United States Patent Application Publication US 2019/0224279 A1 - sequence listing, part 3

SEQ ID NO: 21015 - protein, 38 aa, Artificial Sequence
  Non-cyclic GFR-binding peptide
  MOD_RES (32), (33): Xaa is C or S
ESVAMGPIKGYYTVVGKDFYLINIPSLKTPVXXAKSAK

SEQ ID NO: 21016 - protein, 36 aa, Artificial Sequence
  Non-cyclic GFR-binding peptide
  MOD_RES (34), (35): Xaa is C or S
  MOD_RES (12), (13), (14), (15), (16): Xaa is A or G
  MOD_RES (17), (18), (19), (20): Xaa is A or G or is absent
GEVVMEPIKGYXXXXXXXXXFYLMNIPSLETPVXXA

SEQ ID NO: 21017 - protein, 36 aa, Artificial Sequence
  Non-cyclic GFR-binding peptide
  MOD_RES (1), (3): Xaa is C or S
  MOD_RES (15), (16), (17), (18), (19): Xaa is A or G
  MOD_RES (20), (21), (22), (23): Xaa is A or G or is absent
XGXGEVVMDPIKGYXXXXXXXXXFYLMNIPSLETPV

SEQ ID NO: 21018 - protein, 37 aa, Artificial Sequence
  Non-cyclic GFR-binding peptide
  MOD_RES (2), (4): Xaa is C or S
  MOD_RES (16), (17), (18), (19), (20): Xaa is A or G
  MOD_RES (21), (22), (23), (24): Xaa is A or G or is absent
RXGXGEVVMEPIKGYXXXXXXXXXFYLMNIPSLETPV

SEQ ID NO: 21019 - protein, 42 aa, Artificial Sequence
  Non-cyclic GFR-binding peptide
  MOD_RES (2), (36), (37): Xaa is C or S
  MOD_RES (14), (15), (16), (17), (18): Xaa is A or G
  MOD_RES (19), (20), (21), (22): Xaa is A or G or is absent
GXSRVVMNPIKGYXXXXXXXXXFYLVNIPSLKTPAXXPKPVY

SEQ ID NO: 21020 - protein, 38 aa, Artificial Sequence
  Non-cyclic GFR-binding peptide
  MOD_RES (1), (35), (36): Xaa is C or S
  MOD_RES (13), (14), (15), (16), (17): Xaa is A or G
  MOD_RES (18), (19), (20), (21): Xaa is A or G or is absent
XGEVVMEPIKGYXXXXXXXXXFYLMNIPSLETPVXXAK

SEQ ID NO: 21021 - protein, 38 aa, Artificial Sequence
  Non-cyclic GFR-binding peptide
  MOD_RES (2), (36), (37): Xaa is C or S
  MOD_RES (14), (15), (16), (17), (18): Xaa is A or G
  MOD_RES (19), (20), (21), (22): Xaa is A or G or is absent
GXAEVVMDPIKGYXXXXXXXXXFYLINIPSLRAPVXXS

SEQ ID NO: 21022 - protein, 34 aa, Artificial Sequence
  Non-cyclic GFR-binding peptide
  MOD_RES (1), (33): Xaa is C or S
XSRVVMNPIKGYIVNSSDDFYLVNIPSLKTPAXT

SEQ ID NO: 21023 - protein, 38 aa, Artificial Sequence
  Non-cyclic GFR-binding peptide
  MOD_RES (1), (35), (36): Xaa is C or S
  MOD_RES (13), (14), (15), (16), (17): Xaa is A or G
  MOD_RES (18), (19), (20), (21): Xaa is A or G or is absent
XESVAMGPIKGYXXXXXXXXXFYLINIPSLKTPVXXAK

SEQ ID NO: 21024 - protein, 33 aa, Artificial Sequence
  Non-cyclic GFR-binding peptide
  MOD_RES (12), (13), (14), (15), (16): Xaa is A or G
  MOD_RES (17), (18), (19), (20): Xaa is A or G or is absent
SRVVMNPIKGYXXXXXXXXXFYLVNIPSLKTPA

SEQ ID NO: 21025 - protein, 43 aa, Artificial Sequence
  Non-cyclic GFR-binding peptide
  MOD_RES (2), (4), (39), (40): Xaa is C or S
  MOD_RES (17), (18), (19), (20), (21): Xaa is A or G
  MOD_RES (22), (23), (24), (25): Xaa is A or G or is absent
RXGXEAVSMGEPIKGYXXXXXXXXXFYLVNIPSLKTPVXXAKG

SEQ ID NO: 21026 - protein, 40 aa, Artificial Sequence
  Non-cyclic GFR-binding peptide
  MOD_RES (1), (3), (35), (36): Xaa is C or S
XGXAEVVMDPIKGYVVNNAADFYLINIPSLRAPVXXSAPA

SEQ ID NO: 21027 - protein, 36 aa, Artificial Sequence
  Non-cyclic GFR-binding peptide
  MOD_RES (1), (3), (35), (36): Xaa is C or S
XGXESVAMGPIKGYYTVVGKDFYLINIPSLKTPVXX

SEQ ID NO: 21028 - protein, 36 aa, Artificial Sequence
  Non-cyclic GFR-binding peptide
  MOD_RES (1), (3): Xaa is C or S
  MOD_RES (15), (16), (17), (18), (19): Xaa is A or G
  MOD_RES (20), (21), (22), (23): Xaa is A or G or is absent
XGXAEVVMDPIKGYXXXXXXXXXFYLINIPSLRAPV

SEQ ID NO: 21029 - protein, 30 aa, Artificial Sequence
  Non-cyclic GFR-binding peptide
EVVMDPIKGYVVNNASDFYLINIPSLRTPV

SEQ ID NO: 21030 - protein, 35 aa, Artificial Sequence
  Non-cyclic GFR-binding peptide
  MOD_RES (2), (34), (35): Xaa is C or S
GXGEVVMDPIKGYVVKENEDFYLMNIPSLETPVXX

SEQ ID NO: 21031 - protein, 38 aa, Artificial Sequence
  Non-cyclic GFR-binding peptide
  MOD_RES (35), (36): Xaa is C or S
  MOD_RES (13), (14), (15), (16), (17): Xaa is A or G
  MOD_RES (18), (19), (20), (21): Xaa is A or G or is absent
EAVSMGEPIKGYXXXXXXXXXFYLVNIPSLKTPVXXAK

SEQ ID NO: 21032 - protein, 34 aa, Artificial Sequence
  Non-cyclic GFR-binding peptide
  MOD_RES (1), (3): Xaa is C or S
XGXAEVVMDPIKGYVVNNAADFYLINIPSLRAPV

SEQ ID NO: 21033 - protein, 33 aa, Artificial Sequence
  Non-cyclic GFR-binding peptide
  MOD_RES (2), (2): Xaa is C or S
GXGEVVMEPIKGYVVKDYEDFYLMNIPSLETPV

SEQ ID NO: 21034 - protein, 34 aa, Artificial Sequence
  Non-cyclic GFR-binding peptide
  MOD_RES (31), (32): Xaa is C or S
EEVIMPIKGYLLVRGNDFYLMNIPSTKVPAXXTS

SEQ ID NO: 21035 - protein, 40 aa, Artificial Sequence
  Non-cyclic GFR-binding peptide
  MOD_RES (1), (35), (36): Xaa is C or S
  MOD_RES (13), (14), (15), (16), (17): Xaa is A or G
  MOD_RES (18), (19), (20), (21): Xaa is A or G or is absent
XGEVVMEPIKGYXXXXXXXXXFYLMNIPSLETPVXXAKPI

SEQ ID NO: 21036 - protein, 33 aa, Artificial Sequence
  Non-cyclic GFR-binding peptide
  MOD_RES (12), (13), (14), (15), (16): Xaa is A or G
  MOD_RES (17), (18), (19), (20): Xaa is A or G or is absent
ESVAMGPIKGYXXXXXXXXXFYLINIPSLKTPV

SEQ ID NO: 21037 - protein, 37 aa, Artificial Sequence
  Non-cyclic GFR-binding peptide
  MOD_RES (2), (4), (36), (37): Xaa is C or S
HXGXSRVVMNPIKGYIVNSSDDFYLVNIPSLKTPAXX

SEQ ID NO: 21038 - protein, 41 aa, Artificial Sequence
  Non-cyclic GFR-binding peptide
  MOD_RES (1), (3), (35), (36): Xaa is C or S
XGXAEVVMDPIKGYVVNNAADFYLINIPSLRAPVXXSAPAA

SEQ ID NO: 21039 - protein, 41 aa, Artificial Sequence
  Non-cyclic GFR-binding peptide
  MOD_RES (1), (3), (35), (36): Xaa is C or S
XGXAKVVMNPIKGYIVNNSSDFYLVNIPSLKTPAXXAKPVA

SEQ ID NO: 21040 - protein, 35 aa, Artificial Sequence
  Non-cyclic GFR-binding peptide
  MOD_RES (33), (33): Xaa is C or S
  MOD_RES (11), (12), (13), (14), (15): Xaa is A or G
  MOD_RES (16), (17), (18), (19): Xaa is A or G or is absent
RVVMNPIKGYXXXXXXXXXFYLVNIPSLKTPAXTP

SEQ ID NO: 21041 - protein, 38 aa, Artificial Sequence
  Non-cyclic GFR-binding peptide
  MOD_RES (2), (34), (35): Xaa is C or S
GXGEVVMDPIKGYVVKENEDFYLMNIPSLETPVXXAKP

SEQ ID NO: 21042 - protein, 37 aa, Artificial Sequence
  Non-cyclic GFR-binding peptide
  MOD_RES (1), (35), (36): Xaa is C or S
  MOD_RES (13), (14), (15), (16), (17): Xaa is A or G
  MOD_RES (18), (19), (20), (21): Xaa is A or G or is absent
XAEVVMDPIKGYXXXXXXXXXFYLINIPSLRAPVXXS

SEQ ID NO: 21043 - protein, 40 aa, Artificial Sequence
  Non-cyclic GFR-binding peptide
  MOD_RES (2), (4), (35), (36): Xaa is C or S
LXGXEEVIMPIKGYLLVRGNDFYLMNIPSTKVPAXXTSPV

SEQ ID NO: 21044 - protein, 41 aa, Artificial Sequence
  Non-cyclic GFR-binding peptide
  MOD_RES (1), (3), (37), (38): Xaa is C or S
  MOD_RES (15), (16), (17), (18), (19): Xaa is A or G
  MOD_RES (20), (21), (22), (23): Xaa is A or G or is absent
XGXGEVVMDPIKGYXXXXXXXXXFYLMNIPSLETPVXXAKP

SEQ ID NO: 21045 - protein, 35 aa, Artificial Sequence
  Non-cyclic GFR-binding peptide
  MOD_RES (2), (34), (35): Xaa is C or S
GXSEVVMDPIKGYVVNNASDFYLINIPSLRTPVXX

SEQ ID NO: 21046 - protein, 31 aa, Artificial Sequence
  Non-cyclic GFR-binding peptide
SEVVMDPIKGYVVNNASDFYLINIPSLRTPV

SEQ ID NO: 21047 - protein, 35 aa, Artificial Sequence
  Non-cyclic GFR-binding peptide
  MOD_RES (31), (32): Xaa is C or S
EVVMDPIKGYVVKENEDFYLMNIPSLETPVXXAKP

SEQ ID NO: 21048 - protein, 37 aa, Artificial Sequence
  Non-cyclic GFR-binding peptide
  MOD_RES (2), (4), (36), (37): Xaa is C or S
RXGXAEVVMDPIKGYVVNNAADFYLINIPSLRAPVXX

SEQ ID NO: 21049 - protein, 41 aa, Artificial Sequence
  Non-cyclic GFR-binding peptide
  MOD_RES (2), (36), (37): Xaa is C or S
  MOD_RES (14), (15), (16), (17), (18): Xaa is A or G
  MOD_RES (19), (20), (21), (22): Xaa is A or G or is absent
GXAKVVMNPIKGYXXXXXXXXXFYLVNIPSLKTPAXXAKPV

SEQ ID NO: 21050 - protein, 36 aa, Artificial Sequence
  Non-cyclic GFR-binding peptide
  MOD_RES (1), (3), (35), (36): Xaa is C or S
XGXGEVVMEPIKGYVVKDYEDFYLMNIPSLETPVXX

SEQ ID NO: 21051 - protein, 33 aa, Artificial Sequence
  Non-cyclic GFR-binding peptide
  MOD_RES (31), (32): Xaa is C or S
KVVMNPIKGYIVNNSSDFYLVNIPSLKTPAXXA

SEQ ID NO: 21052 - protein, 43 aa, Artificial Sequence
  Non-cyclic GFR-binding peptide
  MOD_RES (2), (4), (37), (38): Xaa is C or S
  MOD_RES (15), (16), (17), (18), (19): Xaa is A or G
  MOD_RES (20), (21), (22), (23): Xaa is A or G or is absent
LXGXEEVIMPIKGYXXXXXXXXXFYLMNIPSTKVPAXXTSPVR

SEQ ID NO: 21053 - protein, 36 aa, Artificial Sequence
  Non-cyclic GFR-binding peptide
  MOD_RES (1), (3), (36): Xaa is C or S
XGXEAVSMGEPIKGYTPVGMDDFYLVNIPSLKTPVX

SEQ ID NO: 21054 - protein, 31 aa, Artificial Sequence
  Non-cyclic GFR-binding peptide
  MOD_RES (31), (31): Xaa is C or S
EVVMDPIKGYVVNNASDFYLINIPSLRTPVX

SEQ ID NO: 21055 - protein, 37 aa, Artificial Sequence
  Non-cyclic GFR-binding peptide
  MOD_RES (33), (34): Xaa is C or S
  MOD_RES (11), (12), (13), (14), (15): Xaa is A or G
  MOD_RES (16), (17), (18), (19): Xaa is A or G or is absent
EVVMDPIKGYXXXXXXXXXFYLMNIPSLETPVXXAKP

SEQ ID NO: 21056 - protein, 33 aa, Artificial Sequence
  Non-cyclic GFR-binding peptide
  MOD_RES (31), (32): Xaa is C or S
SVAMGPIKGYYTVVGKDFYLINIPSLKTPVXXA

SEQ ID NO: 21057 - protein, 36 aa, Artificial Sequence
  Non-cyclic GFR-binding peptide
  MOD_RES (2), (4), (36): Xaa is C or S
RXGXESVAMGPIKGYYTVVGKDFYLINIPSLKTPVX

SEQ ID NO: 21058 - protein, 36 aa, Artificial Sequence
  Non-cyclic GFR-binding peptide
  MOD_RES (1), (3), (36): Xaa is C or S
  MOD_RES (14), (15), (16), (17), (18): Xaa is A or G
  MOD_RES (19), (20), (21), (22): Xaa is A or G or is absent
XGXEEVIMPIKGYXXXXXXXXXFYLMNIPSTKVPAX

SEQ ID NO: 21059 - protein, 32 aa, Artificial Sequence
  Non-cyclic GFR-binding peptide
  MOD_RES (11), (12), (13), (14), (15): Xaa is A or G
  MOD_RES (16), (17), (18), (19): Xaa is A or G or is absent
EVVMDPIKGYXXXXXXXXXFYLMNIPSLETPV

SEQ ID NO: 21060 - protein, 44 aa, Artificial Sequence
  Non-cyclic GFR-binding peptide
  MOD_RES (2), (4), (38), (39): Xaa is C or S
  MOD_RES (16), (17), (18), (19), (20): Xaa is A or G
  MOD_RES (21), (22), (23), (24): Xaa is A or G or is absent
RXGXAEVVMDPIKGYXXXXXXXXXFYLINIPSLRAPVXXSAPAA

SEQ ID NO: 21061 - protein, 41 aa, Artificial Sequence
  Non-cyclic GFR-binding peptide
  MOD_RES (1), (35), (36): Xaa is C or S
  MOD_RES (13), (14), (15), (16), (17): Xaa is A or G
  MOD_RES (18), (19), (20), (21): Xaa is A or G or is absent
XESVAMGPIKGYXXXXXXXXXFYLINIPSLKTPVXXAKSAK

SEQ ID NO: 21062 - protein, 34 aa, Artificial Sequence
  Non-cyclic GFR-binding peptide
  MOD_RES (34), (34): Xaa is C or S
  MOD_RES (12), (13), (14), (15), (16): Xaa is A or G
  MOD_RES (17), (18), (19), (20): Xaa is A or G or is absent
ARVVMNPIKGYXXXXXXXXXFYLVNIPSLQTPAX

SEQ ID NO: 21063 - protein, 36 aa, Artificial Sequence
  Non-cyclic GFR-binding peptide
  MOD_RES (1), (33), (34): Xaa is C or S
XGEVVMDPIKGYVVKENEDFYLMNIPSLETPVXXAK

SEQ ID NO: 21064 - protein, 37 aa, Artificial Sequence
  Non-cyclic GFR-binding peptide
  MOD_RES (2), (35), (36): Xaa is C or S
  MOD_RES (13), (14), (15), (16), (17): Xaa is A or G
  MOD_RES (18), (19), (20), (21): Xaa is A or G or is absent
GXEEVIMPIKGYXXXXXXXXXFYLMNIPSTKVPAXXT

SEQ ID NO: 21065 - protein, 35 aa, Artificial Sequence
  Non-cyclic GFR-binding peptide
  MOD_RES (31), (31): Xaa is C or S
RVVMNPIKGYIVNSSDDFYLVNIPSLKTPAXTPKT

SEQ ID NO: 21066 - protein, 35 aa, Artificial Sequence
  Non-cyclic GFR-binding peptide
  MOD_RES (33), (34): Xaa is C or S
  MOD_RES (11), (12), (13), (14), (15): Xaa is A or G
  MOD_RES (16), (17), (18), (19): Xaa is A or G or is absent
RVVMNPIKGYXXXXXXXXXFYLVNIPSLQTPAXXP

SEQ ID NO: 21067 - protein, 35 aa, Artificial Sequence
  Non-cyclic GFR-binding peptide
  MOD_RES (2), (4): Xaa is C or S
HXGXARVVMNPIKGYIVNSSDDFYLVNIPSLQTPA

SEQ ID NO: 21068 - protein, 38 aa, Artificial Sequence
  Non-cyclic GFR-binding peptide
  MOD_RES (2), (4), (38): Xaa is C or S
  MOD_RES (16), (17), (18), (19), (20): Xaa is A or G
  MOD_RES (21), (22), (23), (24): Xaa is A or G or is absent
RXGXAEVVMDPIKGYXXXXXXXXXFYLINIPSLRAPVX

SEQ ID NO: 21069 - protein, 36 aa, Artificial Sequence
  Non-cyclic GFR-binding peptide
  MOD_RES (1), (35), (36): Xaa is C or S
  MOD_RES (13), (14), (15), (16), (17): Xaa is A or G
  MOD_RES (18), (19), (20), (21): Xaa is A or G or is absent
XGEVVMEPIKGYXXXXXXXXXFYLMNIPSLETPVXX

SEQ ID NO: 21070 - protein, 35 aa, Artificial Sequence
  Non-cyclic GFR-binding peptide
  MOD_RES (1), (33), (34): Xaa is C or S
XSEVVMDPIKGYVVNNASDFYLINIPSLRTPVXXT

SEQ ID NO: 21071 - protein, 35 aa, Artificial Sequence
  Non-cyclic GFR-binding peptide
  MOD_RES (2), (4): Xaa is C or S
RXGXESVAMGPIKGYYTVVGKDFYLINIPSLKTPV

SEQ ID NO: 21072 - protein, 39 aa, Artificial Sequence
  Non-cyclic GFR-binding peptide
  MOD_RES (1), (3), (37), (38): Xaa is C or S
  MOD_RES (15), (16), (17), (18), (19): Xaa is A or G
  MOD_RES (20), (21), (22), (23): Xaa is A or G or is absent
XGXAEVVMDPIKGYXXXXXXXXXFYLINIPSLRAPVXXS

SEQ ID NO: 21073 - protein, 39 aa, Artificial Sequence
  Non-cyclic GFR-binding peptide
  MOD_RES (2), (36): Xaa is C or S
  MOD_RES (14), (15), (16), (17), (18): Xaa is A or G
  MOD_RES (19), (20), (21), (22): Xaa is A or G or is absent
GXSRVVMNPIKGYXXXXXXXXXFYLVNIPSLKTPAXTPK

SEQ ID NO: 21074 - protein, 40 aa, Artificial Sequence
  Non-cyclic GFR-binding peptide
  MOD_RES (1), (3), (35), (36): Xaa is C or S
XGXAKVVMNPIKGYIVNNSSDFYLVNIPSLKTPAXXAKPV

SEQ ID NO: 21075 - protein, 33 aa, Artificial Sequence
  Non-cyclic GFR-binding peptide
  MOD_RES (1), (33): Xaa is C or S
XGEVVMDPIKGYVVKENEDFYLMNIPSLETPVX

SEQ ID NO: 21076 - protein, 38 aa, Artificial Sequence
  Non-cyclic GFR-binding peptide
  MOD_RES (2), (4): Xaa is C or S
  MOD_RES (17), (18), (19), (20), (21): Xaa is A or G
  MOD_RES (22), (23), (24), (25): Xaa is A or G or is absent
RXGXEAVSMGEPIKGYXXXXXXXXXFYLVNIPSLKTPV

SEQ ID NO: 21077 - protein, 37 aa, Artificial Sequence
  Non-cyclic GFR-binding peptide
  MOD_RES (1), (3), (35), (36): Xaa is C or S
XGXESVAMGPIKGYYTVVGKDFYLINIPSLKTPVXXA

SEQ ID NO: 21078 - protein, 38 aa, Artificial Sequence
  Non-cyclic GFR-binding peptide
  MOD_RES (32), (33): Xaa is C or S
GEVVMDPIKGYVVKENEDFYLMNIPSLETPVXXAKPIK

SEQ ID NO: 21079 - protein, 36 aa, Artificial Sequence
  Non-cyclic GFR-binding peptide
  MOD_RES (2), (4), (36): Xaa is C or S
HXGXARVVMNPIKGYIVNSSDDFYLVNIPSLQTPAX

SEQ ID NO: 21080 - protein, 39 aa, Artificial Sequence
  Non-cyclic GFR-binding peptide
  MOD_RES (2), (36), (37): Xaa is C or S
  MOD_RES (14), (15), (16), (17), (18): Xaa is A or G
  MOD_RES (19), (20), (21), (22): Xaa is A or G or is absent
GXARVVMNPIKGYXXXXXXXXXFYLVNIPSLQTPAXXPK

SEQ ID NO: 21081 - protein, 38 aa, Artificial Sequence
  Non-cyclic GFR-binding peptide
  MOD_RES (2), (4), (36), (37): Xaa is C or S
RXGXGEVVMDPIKGYVVKENEDFYLMNIPSLETPVXXA

SEQ ID NO: 21082 - protein, 42 aa, Artificial Sequence
  Non-cyclic GFR-binding peptide
  MOD_RES (2), (4), (38), (39): Xaa is C or S
  MOD_RES (16), (17), (18), (19), (20): Xaa is A or G
  MOD_RES (21), (22), (23), (24): Xaa is A or G or is absent
HXGXARVVMNPIKGYXXXXXXXXXFYLVNIPSLQTPAXXPKP

SEQ ID NO: 21083 - protein, 40 aa, Artificial Sequence
  Non-cyclic GFR-binding peptide
  MOD_RES (1), (3), (37), (38): Xaa is C or S
  MOD_RES (15), (16), (17), (18), (19): Xaa is A or G
  MOD_RES (20), (21), (22), (23): Xaa is A or G or is absent
XGXSEVVMDPIKGYXXXXXXXXXFYLINIPSLRTPVXXTP

SEQ ID NO: 21084 - protein, 36 aa, Artificial Sequence
  Non-cyclic GFR-binding peptide
  MOD_RES (1), (36): Xaa is C or S
  MOD_RES (14), (15), (16), (17), (18): Xaa is A or G
  MOD_RES (19), (20), (21), (22): Xaa is A or G or is absent
XEAVSMGEPIKGYXXXXXXXXXFYLVNIPSLKTPVX

SEQ ID NO: 21085 - protein, 33 aa, Artificial Sequence
  Non-cyclic GFR-binding peptide
  MOD_RES (32), (33): Xaa is C or S
GEVVMEPIKGYVVKDYEDFYLMNIPSLETPVXX

SEQ ID NO: 21086 - protein, 42 aa, Artificial Sequence
  Non-cyclic GFR-binding peptide
  MOD_RES (2), (4), (37), (38): Xaa is C or S
  MOD_RES (15), (16), (17), (18), (19): Xaa is A or G
  MOD_RES (20), (21), (22), (23): Xaa is A or G or is absent
LXGXEEVIMPIKGYXXXXXXXXXFYLMNIPSTKVPAXXTSPV

SEQ ID NO: 21087 - protein, 38 aa, Artificial Sequence
  Non-cyclic GFR-binding peptide
  MOD_RES (2), (4), (38): Xaa is C or S
  MOD_RES (16), (17), (18), (19), (20): Xaa is A or G
  MOD_RES (21), (22), (23), (24): Xaa is A or G or is absent
HXGXSRVVMNPIKGYXXXXXXXXXFYLVNIPSLKTPAX

SEQ ID NO: 21088 - protein, 37 aa, Artificial Sequence
  Non-cyclic GFR-binding peptide
  MOD_RES (1), (3), (35), (36): Xaa is C or S
XGXGEVVMEPIKGYVVKDYEDFYLMNIPSLETPVXXA

SEQ ID NO: 21089 - protein, 35 aa, Artificial Sequence
  Non-cyclic GFR-binding peptide
  MOD_RES (32), (33): Xaa is C or S
AKVVMNPIKGYIVNNSSDFYLVNIPSLKTPAXXAK

SEQ ID NO: 21090 - protein, 34 aa, Artificial Sequence
  Non-cyclic GFR-binding peptide
  MOD_RES (1), (3): Xaa is C or S
XGXESVAMGPIKGYYTVVGKDFYLINIPSLKTPV

SEQ ID NO: 21091 - protein, 37 aa, Artificial Sequence
  Non-cyclic GFR-binding peptide
  MOD_RES (1), (3), (37): Xaa is C or S
  MOD_RES (15), (16), (17), (18), (19): Xaa is A or G
  MOD_RES (20), (21), (22), (23): Xaa is A or G or is absent
XGXSEVVMDPIKGYXXXXXXXXXFYLINIPSLRTPVX

SEQ ID NO: 21092 - protein, 37 aa, Artificial Sequence
  Non-cyclic GFR-binding peptide
  MOD_RES (1), (3), (37): Xaa is C or S
  MOD_RES (15), (16), (17), (18), (19): Xaa is A or G
  MOD_RES (20), (21), (22), (23): Xaa is A or G or is absent
XGXAKVVMNPIKGYXXXXXXXXXFYLVNIPSLKTPAX

SEQ ID NO: 21093 - protein, 35 aa, Artificial Sequence
  Non-cyclic GFR-binding peptide
  MOD_RES (31), (32): Xaa is C or S
RVVMNPIKGYIVNSSDDFYLVNIPSLQTPAXXPKP

SEQ ID NO: 21094 - protein, 34 aa, Artificial Sequence
  Non-cyclic GFR-binding peptide
  MOD_RES (1), (3): Xaa is C or S
XGXGEVVMEPIKGYVVKDYEDFYLMNIPSLETPV

SEQ ID NO: 21095 - protein, 32 aa, Artificial Sequence
  Non-cyclic GFR-binding peptide
  MOD_RES (32), (32): Xaa is C or S
SEVVMDPIKGYVVNNASDFYLINIPSLRTPVX

SEQ ID NO: 21096 - protein, 31 aa, Artificial Sequence
  Non-cyclic GFR-binding peptide
  MOD_RES (31), (31): Xaa is C or S
SVAMGPIKGYYTVVGKDFYLINIPSLKTPVX

SEQ ID NO: 21097 - protein, 35 aa, Artificial Sequence
  Non-cyclic GFR-binding peptide
  MOD_RES (2), (2): Xaa is C or S
  MOD_RES (14), (15), (16), (17), (18): Xaa is A or G
  MOD_RES (19), (20), (21), (22): Xaa is A or G or is absent
GXAEVVMDPIKGYXXXXXXXXXFYLINIPSLRAPV

SEQ ID NO: 21098 - protein, 37 aa, Artificial Sequence
  Non-cyclic GFR-binding peptide
  MOD_RES (1), (35), (36): Xaa is C or S
  MOD_RES (13), (14), (15), (16), (17): Xaa is A or G
  MOD_RES (18), (19), (20), (21): Xaa is A or G or is absent
XESVAMGPIKGYXXXXXXXXXFYLINIPSLKTPVXXA

SEQ ID NO: 21099 - protein, 40 aa, Artificial Sequence
  Non-cyclic GFR-binding peptide
  MOD_RES (2), (36): Xaa is C or S
  MOD_RES (14), (15), (16), (17), (18): Xaa is A or G
  MOD_RES (19), (20), (21), (22): Xaa is A or G or is absent
GXSRVVMNPIKGYXXXXXXXXXFYLVNIPSLKTPAXTPKT

SEQ ID NO: 21100 - protein, 37 aa, Artificial Sequence
  Non-cyclic GFR-binding peptide
  MOD_RES (33), (34): Xaa is C or S
  MOD_RES (11), (12), (13), (14), (15): Xaa is A or G
  MOD_RES (16), (17), (18), (19): Xaa is A or G or is absent
EVVMDPIKGYXXXXXXXXXFYLINIPSLRAPVXXSAP

SEQ ID NO: 21101 - protein, 36 aa, Artificial Sequence
  Non-cyclic GFR-binding peptide
  MOD_RES (32), (33): Xaa is C or S
AKVVMNPIKGYIVNNSSDFYLVNIPSLKTPAXXAKP

SEQ ID NO: 21102 - protein, 37 aa, Artificial Sequence
  Non-cyclic GFR-binding peptide
  MOD_RES (32), (33): Xaa is C or S
SEVVMDPIKGYVVNNASDFYLINIPSLRTPVXXTPPT

SEQ ID NO: 21103 - protein, 36 aa, Artificial Sequence
  Non-cyclic GFR-binding peptide
  MOD_RES (31), (32): Xaa is C or S
SVAMGPIKGYYTVVGKDFYLINIPSLKTPVXXAKSA

SEQ ID NO: 21104 - protein, 34 aa, Artificial Sequence
  Non-cyclic GFR-binding peptide
  MOD_RES (32), (33): Xaa is C or S
AEVVMDPIKGYVVNNAADFYLINIPSLRAPVXXS

SEQ ID NO: 21105 - protein, 32 aa, Artificial Sequence
  Non-cyclic GFR-binding peptide
  MOD_RES (1), (1): Xaa is C or S
XGEVVMEPIKGYVVKDYEDFYLMNIPSLETPV

SEQ ID NO: 21106 - protein, 36 aa, Artificial Sequence
  Non-cyclic GFR-binding peptide
  MOD_RES (1), (35), (36): Xaa is C or S
  MOD_RES (13), (14), (15), (16), (17): Xaa is A or G
  MOD_RES (18), (19), (20), (21): Xaa is A or G or is absent
XSRVVMNPIKGYXXXXXXXXXFYLVNIPSLKTPAXX

SEQ ID NO: 21107 - protein, 40 aa, Artificial Sequence
  Non-cyclic GFR-binding peptide
  MOD_RES (1), (34), (35): Xaa is C or S
  MOD_RES (12), (13), (14), (15), (16): Xaa is A or G
  MOD_RES (17), (18), (19), (20): Xaa is A or G or is absent
XEEVIMPIKGYXXXXXXXXXFYLMNIPSTKVPAXXTSPVR

SEQ ID NO: 21108 - protein, 40 aa, Artificial Sequence
  Non-cyclic GFR-binding peptide
  MOD_RES (2), (4), (36), (37): Xaa is C or S
RXGXSEVVMDPIKGYVVNNASDFYLINIPSLRTPVXXTPP

SEQ ID NO: 21109 - protein, 39 aa, Artificial Sequence
  Non-cyclic GFR-binding peptide
  MOD_RES (2), (36), (37): Xaa is C or S
  MOD_RES (14), (15), (16), (17), (18): Xaa is A or G
  MOD_RES (19), (20), (21), (22): Xaa is A or G or is absent
GXSRVVMNPIKGYXXXXXXXXXFYLVNIPSLKTPAXXPK

SEQ ID NO: 21110 - protein, 38 aa, Artificial Sequence
  Non-cyclic GFR-binding peptide
  MOD_RES (1), (33), (34): Xaa is C or S
XSEVVMDPIKGYVVNNASDFYLINIPSLRTPVXXTPPT

SEQ ID NO: 21111 - protein, 38 aa, Artificial Sequence
  Non-cyclic GFR-binding peptide
  MOD_RES (34), (35): Xaa is C or S
  MOD_RES (12), (13), (14), (15), (16): Xaa is A or G
  MOD_RES (17), (18), (19), (20): Xaa is A or G or is absent
ESVAMGPIKGYXXXXXXXXXFYLINIPSLKTPVXXAKS

SEQ ID NO: 21112 - protein, 41 aa, Artificial Sequence
  Non-cyclic GFR-binding peptide
  MOD_RES (2), (36), (37): Xaa is C or S
  MOD_RES (14), (15), (16), (17), (18): Xaa is A or G
  MOD_RES (19), (20), (21), (22): Xaa is A or G or is absent
GXSEVVMDPIKGYXXXXXXXXXFYLINIPSLRTPVXXTPPT

SEQ ID NO: 21113 - protein, 36 aa, Artificial Sequence
  Non-cyclic GFR-binding peptide
  MOD_RES (1), (3), (34), (35): Xaa is C or S
XGXEEVIMPIKGYLLVRGNDFYLMNIPSTKVPAXXT

SEQ ID NO: 21114 - protein, 36 aa, Artificial Sequence
  Non-cyclic GFR-binding peptide
  MOD_RES (1), (3), (35), (36): Xaa is C or S
XGXAKVVMNPIKGYIVNNSSDFYLVNIPSLKTPAXX

SEQ ID NO: 21115 - protein, 33 aa, Artificial Sequence
  Non-cyclic GFR-binding peptide
  MOD_RES (31), (32): Xaa is C or S
EVVMDPIKGYVVNNASDFYLINIPSLRTPVXXT

SEQ ID NO: 21116 - protein, 39 aa, Artificial Sequence
  Non-cyclic GFR-binding peptide
  MOD_RES (34), (34): Xaa is C or S
  MOD_RES (12), (13), (14), (15), (16): Xaa is A or G
  MOD_RES (17), (18), (19), (20): Xaa is A or G or is absent
SRVVMNPIKGYXXXXXXXXXFYLVNIPSLKTPAXTPKTV

SEQ ID NO: 21117 - protein, 34 aa, Artificial Sequence
  Non-cyclic GFR-binding peptide
  MOD_RES (32), (33): Xaa is C or S
GEVVMDPIKGYVVKENEDFYLMNIPSLETPVXXA

SEQ ID NO: 21118 - protein, 38 aa, Artificial Sequence
  Non-cyclic GFR-binding peptide
  MOD_RES (2), (34): Xaa is C or S
GXSRVVMNPIKGYIVNSSDDFYLVNIPSLKTPAXTPKT

SEQ ID NO: 21119 - protein, 35 aa, Artificial Sequence
  Non-cyclic GFR-binding peptide
  MOD_RES (2), (4): Xaa is C or S
HXGXSRVVMNPIKGYIVNSSDDFYLVNIPSLKTPA

SEQ ID NO: 21120 - protein, 41 aa, Artificial Sequence
  Non-cyclic GFR-binding peptide
  MOD_RES (2), (4), (38), (39): Xaa is C or S
  MOD_RES (16), (17), (18), (19), (20): Xaa is A or G
  MOD_RES (21), (22), (23), (24): Xaa is A or G or is absent
RXGXSEVVMDPIKGYXXXXXXXXXFYLINIPSLRTPVXXTP

SEQ ID NO: 21121 - protein, 30 aa, Artificial Sequence
  Non-cyclic GFR-binding peptide
KVVMNPIKGYIVNNSSDFYLVNIPSLKTPA

SEQ ID NO: 21122 - protein, 38 aa, Artificial Sequence
  Non-cyclic GFR-binding peptide
  MOD_RES (1), (33): Xaa is C or S
XSRVVMNPIKGYIVNSSDDFYLVNIPSLKTPAXTPKTV

SEQ ID NO: 21123 - protein, 41 aa, Artificial Sequence
  Non-cyclic GFR-binding peptide
  MOD_RES (1), (3), (35), (36): Xaa is C or S
XGXGEVVMEPIKGYVVKDYEDFYLMNIPSLETPVXXAKPIS

SEQ ID NO: 21124 - protein, 42 aa, Artificial Sequence
  Non-cyclic GFR-binding peptide
  MOD_RES (1), (3), (37): Xaa is C or S
  MOD_RES (15), (16), (17), (18), (19): Xaa is A or G
  MOD_RES (20), (21), (22), (23): Xaa is A or G or is absent
XGXSRVVMNPIKGYXXXXXXXXXFYLVNIPSLKTPAXTPKTV

SEQ ID NO: 21125 - protein, 36 aa, Artificial Sequence
  Non-cyclic GFR-binding peptide
  MOD_RES (32), (32): Xaa is C or S
SRVVMNPIKGYIVNSSDDFYLVNIPSLKTPAXTPKT

SEQ ID NO: 21126 - protein, 36 aa, Artificial Sequence
  Non-cyclic GFR-binding peptide
  MOD_RES (2), (36): Xaa is C or S
  MOD_RES (14), (15), (16), (17), (18): Xaa is A or G
  MOD_RES (19), (20), (21), (22): Xaa is A or G or is absent
GXARVVMNPIKGYXXXXXXXXXFYLVNIPSLQTPAX

SEQ ID NO: 21127 - protein, 35 aa, Artificial Sequence
  Non-cyclic GFR-binding peptide
  MOD_RES (1), (35): Xaa is C or S
  MOD_RES (13), (14), (15), (16), (17): Xaa is A or G
  MOD_RES (18), (19), (20), (21): Xaa is A or G or is absent
XSEVVMDPIKGYXXXXXXXXXFYLINIPSLRTPVX

SEQ ID NO: 21128 - protein, 37 aa, Artificial Sequence
  Non-cyclic GFR-binding peptide
  MOD_RES (34), (35): Xaa is C or S
  MOD_RES (12), (13), (14), (15), (16): Xaa is A or G
  MOD_RES (17), (18), (19), (20): Xaa is A or G or is absent
ESVAMGPIKGYXXXXXXXXXFYLINIPSLKTPVXXAK

SEQ ID NO: 21129 - protein, 34 aa, Artificial Sequence
  Non-cyclic GFR-binding peptide
  MOD_RES (1), (33), (34): Xaa is C or S
XAEVVMDPIKGYVVNNAADFYLINIPSLRAPVXX

SEQ ID NO: 21130 - protein, 40 aa, Artificial Sequence
  Non-cyclic GFR-binding peptide
  MOD_RES (1), (34), (35): Xaa is C or S
XEAVSMGEPIKGYTPVGMDDFYLVNIPSLKTPVXXAKGVK

SEQ ID NO: 21131 - protein, 39 aa, Artificial Sequence
  Non-cyclic GFR-binding peptide
  MOD_RES (1), (3), (35), (36): Xaa is C or S
XGXESVAMGPIKGYYTVVGKDFYLINIPSLKTPVXXAKS

SEQ ID NO: 21132 - protein, 34 aa, Artificial Sequence
  Non-cyclic GFR-binding peptide
  MOD_RES (2), (33), (34): Xaa is C or S
GXEEVIMPIKGYLLVRGNDFYLMNIPSTKVPAXX

SEQ ID NO: 21133 - protein, 39 aa, Artificial Sequence
  Non-cyclic GFR-binding peptide
  MOD_RES (2), (35), (36): Xaa is C or S
GXEAVSMGEPIKGYTPVGMDDFYLVNIPSLKTPVXXAKG

SEQ ID NO: 21134 - protein, 41 aa, Artificial Sequence
  Non-cyclic GFR-binding peptide
  MOD_RES (2), (4), (38), (39): Xaa is C or S
  MOD_RES (16), (17), (18), (19), (20): Xaa is A or G
  MOD_RES (21), (22), (23), (24): Xaa is A or G or is absent
RXGXGEVVMDPIKGYXXXXXXXXXFYLMNIPSLETPVXXAK

SEQ ID NO: 21135 - protein, 35 aa, Artificial Sequence
  Non-cyclic GFR-binding peptide
  MOD_RES (32), (33): Xaa is C or S
ARVVMNPIKGYIVNSSDDFYLVNIPSLQTPAXXPK

SEQ ID NO: 21136 - protein, 39 aa, Artificial Sequence
  Non-cyclic GFR-binding peptide
  MOD_RES (34), (35): Xaa is C or S
  MOD_RES (12), (13), (14), (15), (16): Xaa is A or G
  MOD_RES (17), (18), (19), (20): Xaa is A or G or is absent
SRVVMNPIKGYXXXXXXXXXFYLVNIPSLKTPAXXPKPV

SEQ ID NO: 21137 - protein, 39 aa, Artificial Sequence
  Non-cyclic GFR-binding peptide
  MOD_RES (2), (36), (37): Xaa is C or S
  MOD_RES (14), (15), (16), (17), (18): Xaa is A or G
  MOD_RES (19), (20), (21), (22): Xaa is A or G or is absent
GXESVAMGPIKGYXXXXXXXXXFYLINIPSLKTPVXXAK

SEQ ID NO: 21138 - protein, 32 aa, Artificial Sequence
  Non-cyclic GFR-binding peptide
  MOD_RES (1), (1): Xaa is C or S
XAKVVMNPIKGYIVNNSSDFYLVNIPSLKTPA

SEQ ID NO: 21139 - protein, 39 aa, Artificial Sequence
  Non-cyclic GFR-binding peptide
  MOD_RES (1), (33), (34): Xaa is C or S
XGEVVMEPIKGYVVKDYEDFYLMNIPSLETPVXXAKPIS

SEQ ID NO: 21140 - protein, 39 aa, Artificial Sequence
  Non-cyclic GFR-binding peptide
  MOD_RES (34), (35): Xaa is C or S
  MOD_RES (12), (13), (14), (15), (16): Xaa is A or G
  MOD_RES (17), (18), (19), (20): Xaa is A or G or is absent
ESVAMGPIKGYXXXXXXXXXFYLINIPSLKTPVXXAKSA

SEQ ID NO: 21141 - protein, 42 aa, Artificial Sequence
  Non-cyclic GFR-binding peptide
  MOD_RES (2), (4), (38), (39): Xaa is C or S
  MOD_RES (16), (17), (18), (19), (20): Xaa is A or G
  MOD_RES (21), (22), (23), (24): Xaa is A or G or is absent
RXGXGEVVMEPIKGYXXXXXXXXXFYLMNIPSLETPVXXAKP

SEQ ID NO: 21142 - protein, 37 aa, Artificial Sequence
  Non-cyclic GFR-binding peptide
  MOD_RES (33), (34): Xaa is C or S
  MOD_RES (11), (12), (13), (14), (15): Xaa is A or G
  MOD_RES (16), (17), (18), (19): Xaa is A or G or is absent
SVAMGPIKGYXXXXXXXXXFYLINIPSLKTPVXXAKS

SEQ ID NO: 21143 - protein, 40 aa, Artificial Sequence
  Non-cyclic GFR-binding peptide
  MOD_RES (1), (3), (37), (38): Xaa is C or S
  MOD_RES (15), (16), (17), (18), (19): Xaa is A or G
  MOD_RES (20), (21), (22), (23): Xaa is A or G or is absent
XGXARVVMNPIKGYXXXXXXXXXFYLVNIPSLQTPAXXPK

SEQ ID NO: 21144 - protein, 33 aa, Artificial Sequence
  Non-cyclic GFR-binding peptide
  MOD_RES (1), (33): Xaa is C or S
XSEVVMDPIKGYVVNNASDFYLINIPSLRTPVX

SEQ ID NO: 21145 - protein, 39 aa, Artificial Sequence
  Non-cyclic GFR-binding peptide
  MOD_RES (33), (34): Xaa is C or S
  MOD_RES (11), (12), (13), (14), (15): Xaa is A or G
  MOD_RES (16), (17), (18), (19): Xaa is A or G or is absent
EVVMDPIKGYXXXXXXXXXFYLINIPSLRAPVXXSAPAA

SEQ ID NO: 21146 - protein, 37 aa, Artificial Sequence
  Non-cyclic GFR-binding peptide
  MOD_RES (2), (34), (35): Xaa is C or S
GXGEVVMDPIKGYVVKENEDFYLMNIPSLETPVXXAK

SEQ ID NO: 21147 - protein, 31 aa, Artificial Sequence
  Non-cyclic GFR-binding peptide
ESVAMGPIKGYYTVVGKDFYLINIPSLKTPV

SEQ ID NO: 21148 - protein, 34 aa, Artificial Sequence
  Non-cyclic GFR-binding peptide
  MOD_RES (33), (33): Xaa is C or S
  MOD_RES (11), (12), (13), (14), (15): Xaa is A or G
  MOD_RES (16), (17), (18), (19): Xaa is A or G or is absent
RVVMNPIKGYXXXXXXXXXFYLVNIPSLKTPAXT

SEQ ID NO: 21149 - protein, 34 aa, Artificial Sequence
  Non-cyclic GFR-binding peptide
  MOD_RES (1), (3): Xaa is C or S
XGXARVVMNPIKGYIVNSSDDFYLVNIPSLQTPA

SEQ ID NO: 21150 - protein, 38 aa, Artificial Sequence
  Non-cyclic GFR-binding peptide
  MOD_RES (1), (33), (34): Xaa is C or S
XSRVVMNPIKGYIVNSSDDFYLVNIPSLKTPAXXPKPV

SEQ ID NO: 21151 - protein, 37 aa, Artificial Sequence
  Non-cyclic GFR-binding peptide
  MOD_RES (2), (4), (36), (37): Xaa is C or S
RXGXESVAMGPIKGYYTVVGKDFYLINIPSLKTPVXX

SEQ ID NO: 21152 - protein, 37 aa, Artificial Sequence
  Non-cyclic GFR-binding peptide
  MOD_RES (2), (4): Xaa is C or S
  MOD_RES (16), (17), (18), (19), (20): Xaa is A or G
  MOD_RES (21), (22), (23), (24): Xaa is A or G or is absent
RXGXAEVVMDPIKGYXXXXXXXXXFYLINIPSLRAPV

SEQ ID NO: 21153 - protein, 36 aa, Artificial Sequence
  Non-cyclic GFR-binding peptide
  MOD_RES (2), (36): Xaa is C or S
  MOD_RES (14), (15), (16), (17), (18): Xaa is A or G
  MOD_RES (19), (20), (21), (22): Xaa is A or G or is absent
GXGEVVMDPIKGYXXXXXXXXXFYLMNIPSLETPVX

SEQ ID NO: 21154 - protein, 38 aa, Artificial Sequence
  Non-cyclic GFR-binding peptide
  MOD_RES (1), (3), (37), (38): Xaa is C or S
  MOD_RES (15), (16), (17), (18), (19): Xaa is A or G
  MOD_RES (20), (21), (22), (23): Xaa is A or G or is absent
XGXAKVVMNPIKGYXXXXXXXXXFYLVNIPSLKTPAXX

SEQ ID NO: 21155 - protein, 33 aa, Artificial Sequence
  Non-cyclic GFR-binding peptide
  MOD_RES (12), (13), (14), (15), (16): Xaa is A or G
  MOD_RES (17), (18), (19), (20): Xaa is A or G or is absent
GEVVMEPIKGYXXXXXXXXXFYLMNIPSLETPV

SEQ ID NO: 21156 - protein, 41 aa, Artificial Sequence
  Non-cyclic GFR-binding peptide
  MOD_RES (1), (3), (35), (36): Xaa is C or S
XGXSRVVMNPIKGYIVNSSDDFYLVNIPSLKTPAXXPKPVY

SEQ ID NO: 21157 - protein, 39 aa, Artificial Sequence
  Non-cyclic GFR-binding peptide
  MOD_RES (33), (34): Xaa is C or S
  MOD_RES (11), (12), (13), (14), (15): Xaa is A or G
  MOD_RES (16), (17), (18), (19): Xaa is A or G or is absent
RVVMNPIKGYXXXXXXXXXFYLVNIPSLKTPAXXPKPVY

SEQ ID NO: 21158 - protein, 41 aa, Artificial Sequence
  Non-cyclic GFR-binding peptide
  MOD_RES (2), (36), (37): Xaa is C or S
  MOD_RES (14), (15), (16), (17), (18): Xaa is A or G
  MOD_RES (19), (20), (21), (22): Xaa is A or G or is absent
GXGEVVMEPIKGYXXXXXXXXXFYLMNIPSLETPVXXAKPI

SEQ ID NO: 21159 - protein, 37 aa, Artificial Sequence
  Non-cyclic GFR-binding peptide
  MOD_RES (2), (33), (34): Xaa is C or S
GXEEVIMPIKGYLLVRGNDFYLMNIPSTKVPAXXTSP

SEQ ID NO: 21160 - protein, 36 aa, Artificial Sequence
  Non-cyclic GFR-binding peptide
  MOD_RES (1), (3), (35), (36): Xaa is C or S
XGXSRVVMNPIKGYIVNSSDDFYLVNIPSLKTPAXX

SEQ ID NO: 21161 - protein, 37 aa, Artificial Sequence
  Non-cyclic GFR-binding peptide
  MOD_RES (1), (32), (33): Xaa is C or S
XEEVIMPIKGYLLVRGNDFYLMNIPSTKVPAXXTSPV

SEQ ID NO: 21162 - protein, 37 aa, Artificial Sequence
  Non-cyclic GFR-binding peptide
  MOD_RES (34), (35): Xaa is C or S
  MOD_RES (12), (13), (14), (15), (16): Xaa is A or G
  MOD_RES (17), (18), (19), (20): Xaa is A or G or is absent
SRVVMNPIKGYXXXXXXXXXFYLVNIPSLKTPAXXPK

SEQ ID NO: 21163 - protein, 37 aa, Artificial Sequence
  Non-cyclic GFR-binding peptide
  MOD_RES (1), (3), (35), (36): Xaa is C or S
XGXAEVVMDPIKGYVVNNAADFYLINIPSLRAPVXXS

SEQ ID NO: 21164 - protein, 38 aa, Artificial Sequence
  Non-cyclic GFR-binding peptide
  MOD_RES (2), (35), (36): Xaa is C or S
  MOD_RES (13), (14), (15), (16), (17): Xaa is A or G
  MOD_RES (18), (19), (20), (21): Xaa is A or G or is absent
GXEEVIMPIKGYXXXXXXXXXFYLMNIPSTKVPAXXTS

SEQ ID NO: 21165 - protein, 32 aa, Artificial Sequence
  Non-cyclic GFR-binding peptide
  MOD_RES (1), (1): Xaa is C or S
XSRVVMNPIKGYIVNSSDDFYLVNIPSLKTPA

SEQ ID NO: 21166 - protein, 40 aa, Artificial Sequence
  Non-cyclic GFR-binding peptide
  MOD_RES (34), (35): Xaa is C or S
  MOD_RES (12), (13), (14), (15), (16): Xaa is A or G
  MOD_RES (17), (18), (19), (20): Xaa is A or G or is absent
GEVVMDPIKGYXXXXXXXXXFYLMNIPSLETPVXXAKPIK

SEQ ID NO: 21167 - protein, 38 aa, Artificial Sequence
  Non-cyclic GFR-binding peptide
  MOD_RES (32), (33): Xaa is C or S
SRVVMNPIKGYIVNSSDDFYLVNIPSLKTPAXXPKPVH

SEQ ID NO: 21168 - protein, 34 aa, Artificial Sequence
  Non-cyclic GFR-binding peptide
  MOD_RES (1), (33), (34): Xaa is C or S
XESVAMGPIKGYYTVVGKDFYLINIPSLKTPVXX

SEQ ID NO: 21169 - protein, 42 aa, Artificial Sequence
  Non-cyclic GFR-binding peptide
  MOD_RES (2), (4), (36), (37): Xaa is C or S
HXGXARVVMNPIKGYIVNSSDDFYLVNIPSLQTPAXXPKPVT

SEQ ID NO: 21170 - protein, 35 aa, Artificial Sequence
  Non-cyclic GFR-binding peptide
  MOD_RES (2), (4): Xaa is C or S
RXGXGEVVMEPIKGYVVKDYEDFYLMNIPSLETPV

SEQ ID NO: 21171 - protein, 32 aa, Artificial Sequence
  Non-cyclic GFR-binding peptide
  MOD_RES (1), (32): Xaa is C or S
XEEVIMPIKGYLLVRGNDFYLMNIPSTKVPAX

SEQ ID NO: 21172 - protein, 34 aa, Artificial Sequence
  Non-cyclic GFR-binding peptide
  MOD_RES (32), (32): Xaa is C or S
SRVVMNPIKGYIVNSSDDFYLVNIPSLKTPAXTP

SEQ ID NO: 21173 - protein, 37 aa, Artificial Sequence
  Non-cyclic GFR-binding peptide
  MOD_RES (2), (34), (35): Xaa is C or S
GXAKVVMNPIKGYIVNNSSDFYLVNIPSLKTPAXXAK

SEQ ID NO: 21174 - protein, 37 aa, Artificial Sequence
  Non-cyclic GFR-binding peptide
  MOD_RES (31), (32): Xaa is C or S
RVVMNPIKGYIVNSSDDFYLVNIPSLQTPAXXPKPVT

SEQ ID NO: 21175 - protein, 40 aa, Artificial Sequence
  Non-cyclic GFR-binding peptide
  MOD_RES (1), (3), (37), (38): Xaa is C or S
  MOD_RES (15), (16), (17), (18), (19): Xaa is A or G
  MOD_RES (20), (21), (22), (23): Xaa is A or G or is absent
XGXESVAMGPIKGYXXXXXXXXXFYLINIPSLKTPVXXAK

SEQ ID NO: 21176 - protein, 34 aa, Artificial Sequence
  Non-cyclic GFR-binding peptide
  MOD_RES (34), (34): Xaa is C or S
  MOD_RES (12), (13), (14), (15), (16): Xaa is A or G
  MOD_RES (17), (18), (19), (20): Xaa is A or G or is absent
SEVVMDPIKGYXXXXXXXXXFYLINIPSLRTPVX

SEQ ID NO: 21177 - protein, 32 aa, Artificial Sequence
  Non-cyclic GFR-binding peptide
  MOD_RES (31), (32): Xaa is C or S
RVVMNPIKGYIVNSSDDFYLVNIPSLQTPAXX

SEQ ID NO: 21178 - protein, 36 aa, Artificial Sequence
  Non-cyclic GFR-binding peptide
  MOD_RES (32), (33): Xaa is C or S
ARVVMNPIKGYIVNSSDDFYLVNIPSLQTPAXXPKP

SEQ ID NO: 21179 - protein, 37 aa, Artificial Sequence
  Non-cyclic GFR-binding peptide
  MOD_RES (1), (35), (36): Xaa is C or S
  MOD_RES (13), (14), (15), (16), (17): Xaa is A or G
  MOD_RES (18), (19), (20), (21): Xaa is A or G or is absent
XARVVMNPIKGYXXXXXXXXXFYLVNIPSLQTPAXXP

SEQ ID NO: 21180 - protein, 44 aa, Artificial Sequence
  Non-cyclic GFR-binding peptide
  MOD_RES (2), (4), (38): Xaa is C or S
  MOD_RES (16), (17), (18), (19), (20): Xaa is A or G
  MOD_RES (21), (22), (23), (24): Xaa is A or G or is absent
HXGXSRVVMNPIKGYXXXXXXXXXFYLVNIPSLKTPAXTPKTVH

SEQ ID NO: 21181 - protein, 33 aa, Artificial Sequence
  Non-cyclic GFR-binding peptide
  MOD_RES (32), (32): Xaa is C or S
SRVVMNPIKGYIVNSSDDFYLVNIPSLKTPAXT

SEQ ID NO: 21182 - protein, 44 aa, Artificial Sequence
  Non-cyclic GFR-binding peptide
  MOD_RES (2), (4), (38), (39): Xaa is C or S
  MOD_RES (16), (17), (18), (19), (20): Xaa is A or G
  MOD_RES (21), (22), (23), (24): Xaa is A or G or is absent
RXGXGEVVMEPIKGYXXXXXXXXXFYLMNIPSLETPVXXAKPIS

SEQ ID NO: 21183 - protein, 38 aa, Artificial Sequence
  Non-cyclic GFR-binding peptide
  MOD_RES (1), (3), (37), (38): Xaa is C or S
  MOD_RES (15), (16), (17), (18), (19): Xaa is A or G
  MOD_RES (20), (21), (22), (23): Xaa is A or G or is absent
XGXSEVVMDPIKGYXXXXXXXXXFYLINIPSLRTPVXX

SEQ ID NO: 21184 - protein, 38 aa, Artificial Sequence
  Non-cyclic GFR-binding peptide
  MOD_RES (32), (33): Xaa is C or S
SRVVMNPIKGYIVNSSDDFYLVNIPSLKTPAXXPKPVY

SEQ ID NO: 21185 - protein, 36 aa, Artificial Sequence
  Non-cyclic GFR-binding peptide
  MOD_RES (2), (34), (35): Xaa is C or S
GXARVVMNPIKGYIVNSSDDFYLVNIPSLQTPAXXP

SEQ ID NO: 21186 - protein, 38 aa, Artificial Sequence
  Non-cyclic GFR-binding peptide
  MOD_RES (2), (36), (37): Xaa is C or S
  MOD_RES (14), (15), (16), (17), (18): Xaa is A or G
  MOD_RES (19), (20), (21), (22): Xaa is A or G or is absent
GXAKVVMNPIKGYXXXXXXXXXFYLVNIPSLKTPAXXA

SEQ ID NO: 21187 - protein, 35 aa, Artificial Sequence
  Non-cyclic GFR-binding peptide
  MOD_RES (1), (35): Xaa is C or S
  MOD_RES (13), (14), (15), (16), (17): Xaa is A or G
  MOD_RES (18), (19), (20), (21): Xaa is A or G or is absent
XAKVVMNPIKGYXXXXXXXXXFYLVNIPSLKTPAX

SEQ ID NO: 21188 - protein, 31 aa, Artificial Sequence
  Non-cyclic GFR-binding peptide
  MOD_RES (31), (31): Xaa is C or S
RVVMNPIKGYIVNSSDDFYLVNIPSLQTPAX

SEQ ID NO: 21189 - protein, 35 aa, Artificial Sequence
  Non-cyclic GFR-binding peptide
  MOD_RES (31), (32): Xaa is C or S
EVVMDPIKGYVVNNAADFYLINIPSLRAPVXXSAP

SEQ ID NO: 21190 - protein, 43 aa, Artificial Sequence
  Non-cyclic GFR-binding peptide
  MOD_RES (1), (3), (37), (38): Xaa is C or S
  MOD_RES (15), (16), (17), (18), (19): Xaa is A or G
  MOD_RES (20), (21), (22), (23): Xaa is A or G or is absent
XGXGEVVMDPIKGYXXXXXXXXXFYLMNIPSLETPVXXAKPIK

SEQ ID NO: 21191 - protein, 37 aa, Artificial Sequence
  Non-cyclic GFR-binding peptide
  MOD_RES (34), (35): Xaa is C or S
  MOD_RES (12), (13), (14), (15), (16): Xaa is A or G
  MOD_RES (17), (18), (19), (20): Xaa is A or G or is absent
AEVVMDPIKGYXXXXXXXXXFYLINIPSLRAPVXXSA

SEQ ID NO: 21192 - protein, 33 aa, Artificial Sequence
  Non-cyclic GFR-binding peptide
  MOD_RES (31), (32): Xaa is C or S
RVVMNPIKGYIVNSSDDFYLVNIPSLQTPAXXP

SEQ ID NO: 21193 - protein, 42 aa, Artificial Sequence
  Non-cyclic GFR-binding peptide
  MOD_RES (1), (3), (37), (38): Xaa is C or S
  MOD_RES (15), (16), (17), (18), (19): Xaa is A or G
  MOD_RES (20), (21), (22), (23): Xaa is A or G or is absent
XGXGEVVMDPIKGYXXXXXXXXXFYLMNIPSLETPVXXAKPI

SEQ ID NO: 21194 - protein, 38 aa, Artificial Sequence
  Non-cyclic GFR-binding peptide
  MOD_RES (2), (37), (38): Xaa is C or S
  MOD_RES (15), (16), (17), (18), (19): Xaa is A or G
  MOD_RES (20), (21), (22), (23): Xaa is A or G or is absent
GXEAVSMGEPIKGYXXXXXXXXXFYLVNIPSLKTPVXX

SEQ ID NO: 21195 - protein, 35 aa, Artificial Sequence
  Non-cyclic GFR-binding peptide
  MOD_RES (1), (33), (34): Xaa is C or S
XAKVVMNPIKGYIVNNSSDFYLVNIPSLKTPAXXA

SEQ ID NO: 21196 - protein, 39 aa, Artificial Sequence
  Non-cyclic GFR-binding peptide
  MOD_RES (1), (35), (36): Xaa is C or S
  MOD_RES (13), (14), (15), (16), (17): Xaa is A or G
  MOD_RES (18), (19), (20), (21): Xaa is A or G or is absent
XAEVVMDPIKGYXXXXXXXXXFYLINIPSLRAPVXXSAP

SEQ ID NO: 21197 - protein, 33 aa, Artificial Sequence
  Non-cyclic GFR-binding peptide
  MOD_RES (32), (33): Xaa is C or S
AEVVMDPIKGYVVNNAADFYLINIPSLRAPVXX

SEQ ID NO: 21198 - protein, 34 aa, Artificial Sequence
  Non-cyclic GFR-binding peptide
  MOD_RES (1), (33), (34): Xaa is C or S
XARVVMNPIKGYIVNSSDDFYLVNIPSLQTPAXX

SEQ ID NO: 21199 - protein, 39 aa, Artificial Sequence
  Non-cyclic GFR-binding peptide
  MOD_RES (2), (4), (36), (37): Xaa is C or S
HXGXARVVMNPIKGYIVNSSDDFYLVNIPSLQTPAXXPK

SEQ ID NO: 21200 - protein, 36 aa, Artificial Sequence
  Non-cyclic GFR-binding peptide
  MOD_RES (2), (34), (35): Xaa is C or S
GXESVAMGPIKGYYTVVGKDFYLINIPSLKTPVXXA

SEQ ID NO: 21201 - protein, 41 aa, Artificial Sequence
  Non-cyclic GFR-binding peptide
  MOD_RES (2), (36), (37): Xaa is C or S
  MOD_RES (14), (15), (16), (17), (18): Xaa is A or G
  MOD_RES (19), (20), (21), (22): Xaa is A or G or is absent
GXAEVVMDPIKGYXXXXXXXXXFYLINIPSLRAPVXXSAPA

SEQ ID NO: 21202 - protein, 39 aa, Artificial Sequence
  Non-cyclic GFR-binding peptide
  MOD_RES (33), (34): Xaa is C or S
  MOD_RES (11), (12), (13), (14), (15): Xaa is A or G
  MOD_RES (16), (17), (18), (19): Xaa is A or G or is absent
SVAMGPIKGYXXXXXXXXXFYLINIPSLKTPVXXAKSAK

SEQ ID NO: 21203 - protein, 39 aa, Artificial Sequence
  Non-cyclic GFR-binding peptide
  MOD_RES (2), (34), (35): Xaa is C or S
GXAEVVMDPIKGYVVNNAADFYLINIPSLRAPVXXSAPA

SEQ ID NO: 21204 - protein, 36 aa, Artificial Sequence
  Non-cyclic GFR-binding peptide
  MOD_RES (1), (35), (36): Xaa is C or S
  MOD_RES (13), (14), (15), (16), (17): Xaa is A or G
  MOD_RES (18), (19), (20), (21): Xaa is A or G or is absent
XESVAMGPIKGYXXXXXXXXXFYLINIPSLKTPVXX

SEQ ID NO: 21205 - protein, 37 aa, Artificial Sequence
  Non-cyclic GFR-binding peptide
  MOD_RES (2), (34), (35): Xaa is C or S
GXSEVVMDPIKGYVVNNASDFYLINIPSLRTPVXXTP

SEQ ID NO: 21206 - protein, 36 aa, Artificial Sequence
  Non-cyclic GFR-binding peptide
  MOD_RES (2), (36): Xaa is C or S
  MOD_RES (14), (15), (16), (17), (18): Xaa is A or G
  MOD_RES (19), (20), (21), (22): Xaa is A or G or is absent
GXSRVVMNPIKGYXXXXXXXXXFYLVNIPSLKTPAX

SEQ ID NO: 21207 - protein, 36 aa, Artificial Sequence
  Non-cyclic GFR-binding peptide
  MOD_RES (1), (3), (35), (36): Xaa is C or S
XGXGEVVMDPIKGYVVKENEDFYLMNIPSLETPVXX

SEQ ID NO: 21208 - protein, 37 aa, Artificial Sequence
  Non-cyclic GFR-binding peptide
  MOD_RES (34), (35): Xaa is C or S
  MOD_RES (12), (13), (14), (15), (16): Xaa is A or G
  MOD_RES (17), (18), (19), (20): Xaa is A or G or is absent
SEVVMDPIKGYXXXXXXXXXFYLINIPSLRTPVXXTP

SEQ ID NO: 21209 - protein, 36 aa, Artificial Sequence
  Non-cyclic GFR-binding peptide
  MOD_RES (2), (4), (36): Xaa is C or S
RXGXAEVVMDPIKGYVVNNAADFYLINIPSLRAPVX

SEQ ID NO: 21210 - protein, 37 aa, Artificial Sequence
  Non-cyclic GFR-binding peptide
  MOD_RES (32), (33): Xaa is C or S
GEVVMEPIKGYVVKDYEDFYLMNIPSLETPVXXAKPI

SEQ ID NO: 21211 - protein, 37 aa, Artificial Sequence
  Non-cyclic GFR-binding peptide
  MOD_RES (2), (34), (35): Xaa is C or S
GXAEVVMDPIKGYVVNNAADFYLINIPSLRAPVXXSA

SEQ ID NO: 21212 - protein, 41 aa, Artificial Sequence
  Non-cyclic GFR-binding peptide
  MOD_RES (1), (35): Xaa is C or S
  MOD_RES (13), (14), (15), (16), (17): Xaa is A or G
  MOD_RES (18), (19), (20), (21): Xaa is A or G or is absent
XSRVVMNPIKGYXXXXXXXXXFYLVNIPSLKTPAXTPKTVH

SEQ ID NO: 21213 - protein, 39 aa, Artificial Sequence
  Non-cyclic GFR-binding peptide
  MOD_RES (2), (4), (36), (37): Xaa is C or S
HXGXSRVVMNPIKGYIVNSSDDFYLVNIPSLKTPAXXPK

SEQ ID NO: 21214 - protein, 39 aa, Artificial Sequence
  Non-cyclic GFR-binding peptide
  MOD_RES (1), (33), (34): Xaa is C or S
XAEVVMDPIKGYVVNNAADFYLINIPSLRAPVXXSAPAA

SEQ ID NO: 21215 - protein, 42 aa, Artificial Sequence
  Non-cyclic GFR-binding peptide
  MOD_RES (1), (3), (36), (37): Xaa is C or S
XGXEAVSMGEPIKGYTPVGMDDFYLVNIPSLKTPVXXAKGVK

SEQ ID NO: 21216 - protein, 39 aa, Artificial Sequence
  Non-cyclic GFR-binding peptide
  MOD_RES (1), (3), (35), (36): Xaa is C or S
XGXSRVVMNPIKGYIVNSSDDFYLVNIPSLKTPAXXPKP

SEQ ID NO: 21217 - protein, 35 aa, Artificial Sequence
  Non-cyclic GFR-binding peptide
  MOD_RES (34), (35): Xaa is C or S
  MOD_RES (12), (13), (14), (15), (16): Xaa is A or G
  MOD_RES (17), (18), (19), (20): Xaa is A or G or is absent
GEVVMEPIKGYXXXXXXXXXFYLMNIPSLETPVXX

SEQ ID NO: 21218 - protein, 40 aa, Artificial Sequence
  Non-cyclic GFR-binding peptide
  MOD_RES (2), (34), (35): Xaa is C or S
GXAEVVMDPIKGYVVNNAADFYLINIPSLRAPVXXSAPAA

SEQ ID NO: 21219 - protein, 38 aa, Artificial Sequence
  Non-cyclic GFR-binding peptide
  MOD_RES (1), (35), (36): Xaa is C or S
  MOD_RES (13), (14), (15), (16), (17): Xaa is A or G
  MOD_RES (18), (19), (20), (21): Xaa is A or G or is absent
XAEVVMDPIKGYXXXXXXXXXFYLINIPSLRAPVXXSA

SEQ ID NO: 21220 - protein, 43 aa, Artificial Sequence
  Non-cyclic GFR-binding peptide
  MOD_RES (2), (4), (38), (39): Xaa is C or S
  MOD_RES (16), (17), (18), (19), (20): Xaa is A or G
  MOD_RES (21), (22), (23), (24): Xaa is A or G or is absent
RXGXGEVVMEPIKGYXXXXXXXXXFYLMNIPSLETPVXXAKPI

SEQ ID NO: 21221 - protein, 41 aa, Artificial Sequence
  Non-cyclic GFR-binding peptide
  MOD_RES (1), (35), (36): Xaa is C or S
  MOD_RES (13), (14), (15), (16), (17): Xaa is A or G
  MOD_RES (18), (19), (20), (21): Xaa is A or G or is absent
XGEVVMDPIKGYXXXXXXXXXFYLMNIPSLETPVXXAKPIK

SEQ ID NO: 21222 - protein, 39 aa, Artificial Sequence
  Non-cyclic GFR-binding peptide
  MOD_RES (2), (34), (35): Xaa is C or S
GXAKVVMNPIKGYIVNNSSDFYLVNIPSLKTPAXXAKPV

SEQ ID NO: 21223 - protein, 37 aa, Artificial Sequence
  Non-cyclic GFR-binding peptide
  MOD_RES (2), (36), (37): Xaa is C or S
  MOD_RES (14), (15), (16), (17), (18): Xaa is A or G
  MOD_RES (19), (20), (21), (22): Xaa is A or G or is absent
GXSEVVMDPIKGYXXXXXXXXXFYLINIPSLRTPVXX

SEQ ID NO: 21224 - protein, 34 aa, Artificial Sequence
  Non-cyclic GFR-binding peptide
  MOD_RES (1), (34): Xaa is C or S
  MOD_RES (12), (13), (14), (15), (16): Xaa is A or G
  MOD_RES (17), (18), (19), (20): Xaa is A or G or is absent
XEEVIMPIKGYXXXXXXXXXFYLMNIPSTKVPAX

SEQ ID NO: 21225 - protein, 37 aa, Artificial Sequence
  Non-cyclic GFR-binding peptide
  MOD_RES (1), (33), (34): Xaa is C or S
XAKVVMNPIKGYIVNNSSDFYLVNIPSLKTPAXXAKP

SEQ ID NO: 21226 - protein, 34 aa, Artificial Sequence
  Non-cyclic GFR-binding peptide
  MOD_RES (1), (33), (34): Xaa is C or S
XSRVVMNPIKGYIVNSSDDFYLVNIPSLKTPAXX

SEQ ID NO: 21227 - protein, 38 aa, Artificial Sequence
  Non-cyclic GFR-binding peptide
  MOD_RES (2), (35), (36): Xaa is C or S
GXEAVSMGEPIKGYTPVGMDDFYLVNIPSLKTPVXXAK

SEQ ID NO: 21228 - protein, 40 aa, Artificial Sequence
  Non-cyclic GFR-binding peptide
  MOD_RES (1), (35), (36): Xaa is C or S
  MOD_RES (13), (14), (15), (16), (17): Xaa is A or G
  MOD_RES (18), (19), (20), (21): Xaa is A or G or is absent
XAKVVMNPIKGYXXXXXXXXXFYLVNIPSLKTPAXXAKPV

SEQ ID NO: 21229 - protein, 39 aa, Artificial Sequence
  Non-cyclic GFR-binding peptide
  MOD_RES (33), (33): Xaa is C or S
  MOD_RES (11), (12), (13), (14), (15): Xaa is A or G
  MOD_RES (16), (17), (18), (19): Xaa is A or G or is absent
RVVMNPIKGYXXXXXXXXXFYLVNIPSLKTPAXTPKTVH

SEQ ID NO: 21230 - protein, 39 aa, Artificial Sequence
  Non-cyclic GFR-binding peptide
  MOD_RES (1), (35), (36): Xaa is C or S
  MOD_RES (13), (14), (15), (16), (17): Xaa is A or G
  MOD_RES (18), (19), (20), (21): Xaa is A or G or is absent
XGEVVMEPIKGYXXXXXXXXXFYLMNIPSLETPVXXAKP

SEQ ID NO: 21231 - protein, 36 aa, Artificial Sequence
  Non-cyclic GFR-binding peptide
  MOD_RES (1), (35), (36): Xaa is C or S
  MOD_RES (13), (14), (15), (16), (17): Xaa is A or G
  MOD_RES (18), (19), (20), (21): Xaa is A or G or is absent
XAEVVMDPIKGYXXXXXXXXXFYLINIPSLRAPVXX

SEQ ID NO: 21232 - protein, 38 aa, Artificial Sequence
  Non-cyclic GFR-binding peptide
  MOD_RES (1), (3), (35), (36): Xaa is C or S
XGXSRVVMNPIKGYIVNSSDDFYLVNIPSLKTPAXXPK

SEQ ID NO: 21233 - protein, 37 aa, Artificial Sequence
  Non-cyclic GFR-binding peptide
  MOD_RES (2), (36), (37): Xaa is C or S
  MOD_RES (14), (15), (16), (17), (18): Xaa is A or G
  MOD_RES (19), (20), (21), (22): Xaa is A or G or is absent
GXGEVVMEPIKGYXXXXXXXXXFYLMNIPSLETPVXX

SEQ ID NO: 21234 - protein, 38 aa, Artificial Sequence
  Non-cyclic GFR-binding peptide
  MOD_RES (34), (34): Xaa is C or S
  MOD_RES (12), (13), (14), (15), (16): Xaa is A or G
  MOD_RES (17), (18), (19), (20): Xaa is A or G or is absent
SRVVMNPIKGYXXXXXXXXXFYLVNIPSLKTPAXTPKT

SEQ ID NO: 21235 - protein, 31 aa, Artificial Sequence
  Non-cyclic GFR-binding peptide
GEVVMDPIKGYVVKENEDFYLMNIPSLETPV

SEQ ID NO: 21236 - protein, 38 aa, Artificial Sequence
  Non-cyclic GFR-binding peptide
  MOD_RES (1), (35), (36): Xaa is C or S
  MOD_RES (13), (14), (15), (16), (17): Xaa is A or G
  MOD_RES (18), (19), (20), (21): Xaa is A or G or is absent
XARVVMNPIKGYXXXXXXXXXFYLVNIPSLQTPAXXPK

SEQ ID NO: 21237 - protein, 33 aa, Artificial Sequence
  Non-cyclic GFR-binding peptide
  MOD_RES (33), (33): Xaa is C or S
  MOD_RES (11), (12), (13), (14), (15): Xaa is A or G
  MOD_RES (16), (17), (18), (19): Xaa is A or G or is absent
EVVMEPIKGYXXXXXXXXXFYLMNIPSLETPVX

SEQ ID NO: 21238 - protein, 37 aa, Artificial Sequence
  Non-cyclic GFR-binding peptide
  MOD_RES (34), (35): Xaa is C or S
  MOD_RES (12), (13), (14), (15), (16): Xaa is A or G
  MOD_RES (17), (18), (19), (20): Xaa is A or G or is absent
AKVVMNPIKGYXXXXXXXXXFYLVNIPSLKTPAXXAK

SEQ ID NO: 21239 - protein, 37 aa, Artificial Sequence
  Non-cyclic GFR-binding peptide
  MOD_RES (1), (35), (36): Xaa is C or S
  MOD_RES (13), (14), (15), (16), (17): Xaa is A or G
  MOD_RES (18), (19), (20), (21): Xaa is A or G or is absent
XSEVVMDPIKGYXXXXXXXXXFYLINIPSLRTPVXXT

SEQ ID NO: 21240 - protein, 33 aa, Artificial Sequence
  Non-cyclic GFR-binding peptide
  MOD_RES (1), (33): Xaa is C or S
XAEVVMDPIKGYVVNNAADFYLINIPSLRAPVX

SEQ ID NO: 21241 - protein, 35 aa, Artificial Sequence
  Non-cyclic GFR-binding peptide
  MOD_RES (32), (32): Xaa is C or S
SRVVMNPIKGYIVNSSDDFYLVNIPSLKTPAXTPK

SEQ ID NO: 21242 - protein, 40 aa, Artificial Sequence
  Non-cyclic GFR-binding peptide
  MOD_RES (2), (4), (36), (37): Xaa is C or S
HXGXSRVVMNPIKGYIVNSSDDFYLVNIPSLKTPAXXPKP

SEQ ID NO: 21243 - protein, 42 aa, Artificial Sequence
  Non-cyclic GFR-binding peptide
  MOD_RES (1), (3), (36), (37): Xaa is C or S
  MOD_RES (14), (15), (16), (17), (18): Xaa is A or G
  MOD_RES (19), (20), (21), (22): Xaa is A or G or is absent
XGXEEVIMPIKGYXXXXXXXXXFYLMNIPSTKVPAXXTSPVR

SEQ ID NO: 21244 - protein, 41 aa, Artificial Sequence
  Non-cyclic GFR-binding peptide
  MOD_RES (1), (3), (37), (38): Xaa is C or S
  MOD_RES (15), (16), (17), (18), (19): Xaa is A or G
  MOD_RES (20), (21), (22), (23): Xaa is A or G or is absent
XGXAEVVMDPIKGYXXXXXXXXXFYLINIPSLRAPVXXSAP

SEQ ID NO: 21245 - protein, 40 aa, Artificial Sequence
  Non-cyclic GFR-binding peptide
  MOD_RES (35), (36): Xaa is C or S
  MOD_RES (13), (14), (15), (16), (17): Xaa is A or G
  MOD_RES (18), (19), (20), (21): Xaa is A or G or is absent
EAVSMGEPIKGYXXXXXXXXXFYLVNIPSLKTPVXXAKGV

SEQ ID NO: 21246 - protein, 37 aa, Artificial Sequence
  Non-cyclic GFR-binding peptide
  MOD_RES (33), (34): Xaa is C or S
  MOD_RES (11), (12), (13), (14), (15): Xaa is A or G
  MOD_RES (16), (17), (18), (19): Xaa is A or G or is absent
EVVMDPIKGYXXXXXXXXXFYLINIPSLRTPVXXTPP

SEQ ID NO: 21247 - protein, 35 aa, Artificial Sequence
  Non-cyclic GFR-binding peptide
  MOD_RES (1), (35): Xaa is C or S
  MOD_RES (13), (14), (15), (16), (17): Xaa is A or G
  MOD_RES (18), (19), (20), (21): Xaa is A or G or is absent
XAEVVMDPIKGYXXXXXXXXXFYLINIPSLRAPVX

SEQ ID NO: 21248 - protein, 36 aa, Artificial Sequence
  Non-cyclic GFR-binding peptide
  MOD_RES (32), (33): Xaa is C or S
ESVAMGPIKGYYTVVGKDFYLINIPSLKTPVXXAKS

SEQ ID NO: 21249 - protein, 41 aa, Artificial Sequence
  Non-cyclic GFR-binding peptide
  MOD_RES (2), (4), (39), (40): Xaa is C or S
  MOD_RES (17), (18), (19), (20), (21): Xaa is A or G
  MOD_RES (22), (23), (24), (25): Xaa is A or G or is absent
RXGXEAVSMGEPIKGYXXXXXXXXXFYLVNIPSLKTPVXXA

SEQ ID NO: 21250 - protein, 44 aa, Artificial Sequence
  Non-cyclic GFR-binding peptide
  MOD_RES (2), (4), (38), (39): Xaa is C or S
  MOD_RES (16), (17), (18), (19), (20): Xaa is A or G
  MOD_RES (21), (22), (23), (24): Xaa is A or G or is absent
RXGXESVAMGPIKGYXXXXXXXXXFYLINIPSLKTPVXXAKSAK

SEQ ID NO: 21251 - protein, 41 aa, Artificial Sequence
  Non-cyclic GFR-binding peptide
  MOD_RES (1), (3), (37), (38): Xaa is C or S
  MOD_RES (15), (16), (17), (18), (19): Xaa is A or G
  MOD_RES (20), (21), (22), (23): Xaa is A or G or is absent
XGXGEVVMEPIKGYXXXXXXXXXFYLMNIPSLETPVXXAKP

SEQ ID NO: 21252 - protein, 39 aa, Artificial Sequence
  Non-cyclic GFR-binding peptide
  MOD_RES (1), (3), (37), (38): Xaa is C or S
  MOD_RES (15), (16), (17), (18), (19): Xaa is A or G
  MOD_RES (20), (21), (22), (23): Xaa is A or G or is absent
XGXSRVVMNPIKGYXXXXXXXXXFYLVNIPSLKTPAXXP

SEQ ID NO: 21253 - protein, 42 aa, Artificial Sequence
  Non-cyclic GFR-binding peptide
  MOD_RES (2), (4), (36), (37): Xaa is C or S
HXGXSRVVMNPIKGYIVNSSDDFYLVNIPSLKTPAXXPKPVH

SEQ ID NO: 21254 - protein, 42 aa, Artificial Sequence
  Non-cyclic GFR-binding peptide
  MOD_RES (2), (36): Xaa is C or S
  MOD_RES (14), (15), (16), (17), (18): Xaa is A or G
  MOD_RES (19), (20), (21), (22): Xaa is A or G or is absent
GXSRVVMNPIKGYXXXXXXXXXFYLVNIPSLKTPAXTPKTVH

SEQ ID NO: 21255 - protein, 35 aa, Artificial Sequence
  Non-cyclic GFR-binding peptide
  MOD_RES (1), (3), (35): Xaa is C or S
XGXSRVVMNPIKGYIVNSSDDFYLVNIPSLKTPAX

SEQ ID NO: 21256 - protein, 36 aa, Artificial Sequence
  Non-cyclic GFR-binding peptide
  MOD_RES (2), (35), (36): Xaa is C or S
GXEAVSMGEPIKGYTPVGMDDFYLVNIPSLKTPVXX

SEQ ID NO: 21257 - protein, 36 aa, Artificial Sequence
  Non-cyclic GFR-binding peptide
  MOD_RES (1), (34), (35): Xaa is C or S
  MOD_RES (12), (13), (14), (15), (16): Xaa is A or G
  MOD_RES (17), (18), (19), (20): Xaa is A or G or is absent
XEEVIMPIKGYXXXXXXXXXFYLMNIPSTKVPAXXT

SEQ ID NO: 21258 - protein, 36 aa, Artificial Sequence
  Non-cyclic GFR-binding peptide
  MOD_RES (2), (36): Xaa is C or S
  MOD_RES (14), (15), (16), (17), (18): Xaa is A or G
  MOD_RES (19), (20), (21), (22): Xaa is A or G or is absent
GXAEVVMDPIKGYXXXXXXXXXFYLINIPSLRAPVX

SEQ ID NO: 21259 - protein, 40 aa, Artificial Sequence
  Non-cyclic GFR-binding peptide
  MOD_RES (2), (4), (38), (39): Xaa is C or S
  MOD_RES (16), (17), (18), (19), (20): Xaa is A or G
  MOD_RES (21), (22), (23), (24): Xaa is A or G or is absent
RXGXGEVVMEPIKGYXXXXXXXXXFYLMNIPSLETPVXXA

SEQ ID NO: 21260 - protein, 40 aa, Artificial Sequence
  Non-cyclic GFR-binding peptide
  MOD_RES (2), (36), (37): Xaa is C or S
  MOD_RES (14), (15), (16), (17), (18): Xaa is A or G
  MOD_RES (19), (20), (21), (22): Xaa is A or G or is absent
GXAKVVMNPIKGYXXXXXXXXXFYLVNIPSLKTPAXXAKP

SEQ ID NO: 21261 - protein, 39 aa, Artificial Sequence
  Non-cyclic GFR-binding peptide
  MOD_RES (2), (36), (37): Xaa is C or S
  MOD_RES (14), (15), (16), (17), (18): Xaa is A or G
  MOD_RES (19), (20), (21), (22): Xaa is A or G or is absent
GXAKVVMNPIKGYXXXXXXXXXFYLVNIPSLKTPAXXAK

SEQ ID NO: 21262 - protein, 37 aa, Artificial Sequence
  Non-cyclic GFR-binding peptide
  MOD_RES (1), (33), (34): Xaa is C or S
XGEVVMEPIKGYVVKDYEDFYLMNIPSLETPVXXAKP

SEQ ID NO: 21263 - protein, 37 aa, Artificial Sequence
  Non-cyclic GFR-binding peptide
  MOD_RES (1), (33), (34): Xaa is C or S
XESVAMGPIKGYYTVVGKDFYLINIPSLKTPVXXAKS

SEQ ID NO: 21264 - protein, 40 aa, Artificial Sequence
  Non-cyclic GFR-binding peptide
  MOD_RES (34), (35): Xaa is C or S
  MOD_RES (12), (13), (14), (15), (16): Xaa is A or G
  MOD_RES (17), (18), (19), (20): Xaa is A or G or is absent
GEVVMEPIKGYXXXXXXXXXFYLMNIPSLETPVXXAKPIS

SEQ ID NO: 21265 - protein, 32 aa, Artificial Sequence
  Non-cyclic GFR-binding peptide
  MOD_RES (1), (1): Xaa is C or S
XESVAMGPIKGYYTVVGKDFYLINIPSLKTPV

SEQ ID NO: 21266 - protein, 33 aa, Artificial Sequence
  Non-cyclic GFR-binding peptide
  MOD_RES (2), (2): Xaa is C or S
GXARVVMNPIKGYIVNSSDDFYLVNIPSLQTPA

SEQ ID NO: 21267 - protein, 40 aa, Artificial Sequence
  Non-cyclic GFR-binding peptide
  MOD_RES (1), (35): Xaa is C or S
  MOD_RES (13), (14), (15), (16), (17): Xaa is A or G
  MOD_RES (18), (19), (20), (21): Xaa is A or G or is absent
XSRVVMNPIKGYXXXXXXXXXFYLVNIPSLKTPAXTPKTV

SEQ ID NO: 21268 - protein, 37 aa, Artificial Sequence
  Non-cyclic GFR-binding peptide
  MOD_RES (2), (4): Xaa is C or S
  MOD_RES (16), (17), (18), (19), (20): Xaa is A or G
  MOD_RES (21), (22), (23), (24): Xaa is A or G or is absent
HXGXARVVMNPIKGYXXXXXXXXXFYLVNIPSLQTPA

SEQ ID NO: 21269 - protein, 42 aa, Artificial Sequence
  Non-cyclic GFR-binding peptide
  MOD_RES (2), (36), (37): Xaa is C or S
  MOD_RES (14), (15), (16), (17), (18): Xaa is A or G
  MOD_RES (19), (20), (21), (22): Xaa is A or G or is absent
GXGEVVMEPIKGYXXXXXXXXXFYLMNIPSLETPVXXAKPIS

SEQ ID NO: 21270 - protein, 31 aa, Artificial Sequence
  Non-cyclic GFR-binding peptide
  MOD_RES (31), (31): Xaa is C or S
EVVMEPIKGYVVKDYEDFYLMNIPSLETPVX

SEQ ID NO: 21271 - protein, 39 aa, Artificial Sequence
  Non-cyclic GFR-binding peptide
  MOD_RES (2), (4), (38), (39): Xaa is C or S
  MOD_RES (16), (17), (18), (19), (20): Xaa is A or G
  MOD_RES (21), (22), (23), (24): Xaa is A or G or is absent
HXGXAKVVMNPIKGYXXXXXXXXXFYLVNIPSLKTPAXX

SEQ ID NO: 21272 - protein, 44 aa, Artificial Sequence
  Non-cyclic GFR-binding peptide
  MOD_RES (2), (4), (38), (39): Xaa is C or S
  MOD_RES (16), (17), (18), (19), (20): Xaa is A or G
  MOD_RES (21), (22), (23), (24): Xaa is A or G or is absent
HXGXARVVMNPIKGYXXXXXXXXXFYLVNIPSLQTPAXXPKPVT

SEQ ID NO: 21273 - protein, 36 aa, Artificial Sequence
  Non-cyclic GFR-binding peptide
  MOD_RES (1), (35): Xaa is C or S
  MOD_RES (13), (14), (15), (16), (17): Xaa is A or G
  MOD_RES (18), (19), (20), (21): Xaa is A or G or is absent
XSRVVMNPIKGYXXXXXXXXXFYLVNIPSLKTPAXT

SEQ ID NO: 21274 - protein, 37 aa, Artificial Sequence
  Non-cyclic GFR-binding peptide
  MOD_RES (2), (4): Xaa is C or S
  MOD_RES (16), (17), (18), (19), (20): Xaa is A or G
  MOD_RES (21), (22), (23), (24): Xaa is A or G or is absent
RXGXGEVVMDPIKGYXXXXXXXXXFYLMNIPSLETPV

SEQ ID NO: 21275 - protein, 39 aa, Artificial Sequence
  Non-cyclic GFR-binding peptide
  MOD_RES (2), (34), (35): Xaa is C or S
GXGEVVMDPIKGYVVKENEDFYLMNIPSLETPVXXAKPI

SEQ ID NO: 21276 - protein, 44 aa, Artificial Sequence
  Non-cyclic GFR-binding peptide
  MOD_RES (2), (4), (38), (39): Xaa is C or S
  MOD_RES (16), (17), (18), (19), (20): Xaa is A or G
  MOD_RES (21), (22), (23), (24): Xaa is A or G or is absent
RXGXGEVVMDPIKGYXXXXXXXXXFYLMNIPSLETPVXXAKPIK

SEQ ID NO: 21277 - protein, 33 aa, Artificial Sequence
  Non-cyclic GFR-binding peptide
  MOD_RES (2), (2): Xaa is C or S
GXESVAMGPIKGYYTVVGKDFYLINIPSLKTPV

SEQ ID NO: 21278 - protein, 37 aa, Artificial Sequence
  Non-cyclic GFR-binding peptide
  MOD_RES (1), (3): Xaa is C or S
  MOD_RES (16), (17), (18), (19), (20): Xaa is A or G
  MOD_RES (21), (22), (23), (24): Xaa is A or G or is absent
XGXEAVSMGEPIKGYXXXXXXXXXFYLVNIPSLKTPV

SEQ ID NO: 21279 - protein, 42 aa, Artificial Sequence
  Non-cyclic GFR-binding peptide
  MOD_RES (2), (4), (36), (37): Xaa is C or S
RXGXGEVVMDPIKGYVVKENEDFYLMNIPSLETPVXXAKPIK

SEQ ID NO: 21280 - protein, 37 aa, Artificial Sequence
  Non-cyclic GFR-binding peptide
  MOD_RES (33), (34): Xaa is C or S
  MOD_RES (11), (12), (13), (14), (15): Xaa is A or G
  MOD_RES (16), (17), (18), (19): Xaa is A or G or is absent
EEVIMPIKGYXXXXXXXXXFYLMNIPSTKVPAXXTSP

SEQ ID NO: 21281 - protein, 38 aa, Artificial Sequence
  Non-cyclic GFR-binding peptide
  MOD_RES (1), (3), (37): Xaa is C or S
  MOD_RES (15), (16), (17), (18), (19): Xaa is A or G
  MOD_RES (20), (21), (22), (23): Xaa is A or G or is absent
XGXSRVVMNPIKGYXXXXXXXXXFYLVNIPSLKTPAXT

SEQ ID NO: 21282 - protein, 35 aa, Artificial Sequence
  Non-cyclic GFR-binding peptide
  MOD_RES (32), (33): Xaa is C or S
SRVVMNPIKGYIVNSSDDFYLVNIPSLKTPAXXPK

SEQ ID NO: 21283 - protein, 38 aa, Artificial Sequence
  Non-cyclic GFR-binding peptide
  MOD_RES (1), (3), (35): Xaa is C or S
XGXSRVVMNPIKGYIVNSSDDFYLVNIPSLKTPAXTPK

SEQ ID NO: 21284 - protein, 33 aa, Artificial Sequence
  Non-cyclic GFR-binding peptide
  MOD_RES (32), (33): Xaa is C or S
SEVVMDPIKGYVVNNASDFYLINIPSLRTPVXX

SEQ ID NO: 21285 - protein, 38 aa, Artificial Sequence
  Non-cyclic GFR-binding peptide
  MOD_RES (32), (33): Xaa is C or S
SEVVMDPIKGYVVNNASDFYLINIPSLRTPVXXTPPTS

SEQ ID NO: 21286 - protein, 40 aa, Artificial Sequence
  Non-cyclic GFR-binding peptide
  MOD_RES (1), (35), (36): Xaa is C or S
  MOD_RES (13), (14), (15), (16), (17): Xaa is A or G
  MOD_RES (18), (19), (20), (21): Xaa is A or G or is absent
XAEVVMDPIKGYXXXXXXXXXFYLINIPSLRAPVXXSAPA

SEQ ID NO: 21287 - protein, 39 aa, Artificial Sequence
  Non-cyclic GFR-binding peptide
  MOD_RES (1), (3), (35), (36): Xaa is C or S
XGXARVVMNPIKGYIVNSSDDFYLVNIPSLQTPAXXPKP

SEQ ID NO: 21288 - protein, 31 aa, Artificial Sequence
  Non-cyclic GFR-binding peptide
  MOD_RES (31), (31): Xaa is C or S
EVVMDPIKGYVVNNAADFYLINIPSLRAPVX

SEQ ID NO: 21289 - protein, 39 aa, Artificial Sequence
  Non-cyclic GFR-binding peptide
  MOD_RES (2), (4), (37), (38): Xaa is C or S
  MOD_RES (15), (16), (17), (18), (19): Xaa is A or G
  MOD_RES (20), (21), (22), (23): Xaa is A or G or is absent
LXGXEEVIMPIKGYXXXXXXXXXFYLMNIPSTKVPAXXT

SEQ ID NO: 21290 - protein, 38 aa, Artificial Sequence
  Non-cyclic GFR-binding peptide
  MOD_RES (34), (35): Xaa is C or S
  MOD_RES (12), (13), (14), (15), (16): Xaa is A or G
  MOD_RES (17), (18), (19), (20): Xaa is A or G or is absent
AKVVMNPIKGYXXXXXXXXXFYLVNIPSLKTPAXXAKP

SEQ ID NO: 21291 - protein, 38 aa, Artificial Sequence
  Non-cyclic GFR-binding peptide
  MOD_RES (1), (33), (34): Xaa is C or S
XAKVVMNPIKGYIVNNSSDFYLVNIPSLKTPAXXAKPV

SEQ ID NO: 21292 - protein, 34 aa, Artificial Sequence
  Non-cyclic GFR-binding peptide
  MOD_RES (1), (1): Xaa is C or S
  MOD_RES (13), (14), (15), (16), (17): Xaa is A or G
  MOD_RES (18), (19), (20), (21): Xaa is A or G or is absent
XAEVVMDPIKGYXXXXXXXXXFYLINIPSLRAPV

SEQ ID NO: 21293 - protein, 38 aa, Artificial Sequence
  Non-cyclic GFR-binding peptide
  MOD_RES (33), (34): Xaa is C or S
  MOD_RES (11), (12), (13), (14), (15): Xaa is A or G
  MOD_RES (16), (17), (18), (19): Xaa is A or G or is absent
EVVMDPIKGYXXXXXXXXXFYLINIPSLRTPVXXTPPT

SEQ ID NO: 21294 - protein, 38 aa, Artificial Sequence
  Non-cyclic GFR-binding peptide
  MOD_RES (2), (4), (37), (38): Xaa is C or S
RXGXEAVSMGEPIKGYTPVGMDDFYLVNIPSLKTPVXX

SEQ ID NO: 21295 - protein, 37 aa, Artificial Sequence
  Non-cyclic GFR-binding peptide
  MOD_RES (2), (34), (35): Xaa is C or S
GXSRVVMNPIKGYIVNSSDDFYLVNIPSLKTPAXXPK

SEQ ID NO: 21296 - protein, 30 aa, Artificial Sequence
  Non-cyclic GFR-binding peptide
EVVMDPIKGYVVNNAADFYLINIPSLRAPV

SEQ ID NO: 21297 - protein, 41 aa, Artificial Sequence
  Non-cyclic GFR-binding peptide
  MOD_RES (1), (3), (36), (37): Xaa is C or S
  MOD_RES (14), (15), (16), (17), (18): Xaa is A or G
  MOD_RES (19), (20), (21), (22): Xaa is A or G or is absent
XGXEEVIMPIKGYXXXXXXXXXFYLMNIPSTKVPAXXTSPV

SEQ ID NO: 21298 - protein, 31 aa, Artificial Sequence
  Non-cyclic GFR-binding peptide
  MOD_RES (31), (31): Xaa is C or S
EVVMDPIKGYVVKENEDFYLMNIPSLETPVX

SEQ ID NO: 21299 - protein, 35 aa, Artificial Sequence
  Non-cyclic GFR-binding peptide
  MOD_RES (33), (34): Xaa is C or S
  MOD_RES (11), (12), (13), (14), (15): Xaa is A or G
  MOD_RES (16), (17), (18), (19): Xaa is A or G or is absent
EVVMDPIKGYXXXXXXXXXFYLINIPSLRAPVXXS

SEQ ID NO: 21300 - protein, 38 aa, Artificial Sequence
  Non-cyclic GFR-binding peptide
  MOD_RES (1), (3), (37), (38): Xaa is C or S
  MOD_RES (15), (16), (17), (18), (19): Xaa is A or G
  MOD_RES (20), (21), (22), (23): Xaa is A or G or is absent
XGXSRVVMNPIKGYXXXXXXXXXFYLVNIPSLKTPAXX

SEQ ID NO: 21301 - protein, 39 aa, Artificial Sequence
  Non-cyclic GFR-binding peptide
  MOD_RES (2), (33), (34): Xaa is C or S
GXEEVIMPIKGYLLVRGNDFYLMNIPSTKVPAXXTSPVR

SEQ ID NO: 21302 - protein, 35 aa, Artificial Sequence
  Non-cyclic GFR-binding peptide
  MOD_RES (1), (3), (35): Xaa is C or S
XGXSEVVMDPIKGYVVNNASDFYLINIPSLRTPVX

SEQ ID NO: 21303 - protein, 33 aa, Artificial Sequence
  Non-cyclic GFR-binding peptide
  MOD_RES (33), (33): Xaa is C or S
  MOD_RES (11), (12), (13), (14), (15): Xaa is A or G
  MOD_RES (16), (17), (18), (19): Xaa is A or G or is absent
EVVMDPIKGYXXXXXXXXXFYLMNIPSLETPVX

SEQ ID NO: 21304 - protein, 34 aa, Artificial Sequence
  Non-cyclic GFR-binding peptide
  MOD_RES (31), (32): Xaa is C or S
EVVMDPIKGYVVNNAADFYLINIPSLRAPVXXSA

SEQ ID NO: 21305 - protein, 34 aa, Artificial Sequence
  Non-cyclic GFR-binding peptide
  MOD_RES (31), (31): Xaa is C or S
RVVMNPIKGYIVNSSDDFYLVNIPSLKTPAXTPK

SEQ ID NO: 21306 - protein, 40 aa, Artificial Sequence
  Non-cyclic GFR-binding peptide
  MOD_RES (34), (35): Xaa is C or S
  MOD_RES (12), (13), (14), (15), (16): Xaa is A or G
  MOD_RES (17), (18), (19), (20): Xaa is A or G or is absent
SEVVMDPIKGYXXXXXXXXXFYLINIPSLRTPVXXTPPTS

SEQ ID NO: 21307 - protein, 38 aa, Artificial Sequence
  Non-cyclic GFR-binding peptide
  MOD_RES (2), (4), (38): Xaa is C or S
  MOD_RES (16), (17), (18), (19), (20): Xaa is A or G
  MOD_RES (21), (22), (23), (24): Xaa is A or G or is absent
HXGXARVVMNPIKGYXXXXXXXXXFYLVNIPSLQTPAX

SEQ ID NO: 21308 - protein, 35 aa, Artificial Sequence
  Non-cyclic GFR-binding peptide
  MOD_RES (34), (34): Xaa is C or S
  MOD_RES (12), (13), (14), (15), (16): Xaa is A or G
  MOD_RES (17), (18), (19), (20): Xaa is A or G or is absent
SRVVMNPIKGYXXXXXXXXXFYLVNIPSLKTPAXT

SEQ ID NO: 21309 - protein, 36 aa, Artificial Sequence
  Non-cyclic GFR-binding peptide
  MOD_RES (1), (33), (34): Xaa is C or S
XAKVVMNPIKGYIVNNSSDFYLVNIPSLKTPAXXAK

SEQ ID NO: 21310 - protein, 35 aa, Artificial Sequence
  Non-cyclic GFR-binding peptide
  MOD_RES (33), (34): Xaa is C or S
  MOD_RES (11), (12), (13), (14), (15): Xaa is A or G
  MOD_RES (16), (17), (18), (19): Xaa is A or G or is absent
SVAMGPIKGYXXXXXXXXXFYLINIPSLKTPVXXA

SEQ ID NO: 21311 - protein, 36 aa, Artificial Sequence
  Non-cyclic GFR-binding peptide
  MOD_RES (32), (33): Xaa is C or S
GEVVMEPIKGYVVKDYEDFYLMNIPSLETPVXXAKP

SEQ ID NO: 21312 - protein, 36 aa, Artificial Sequence
  Non-cyclic GFR-binding peptide
  MOD_RES (1), (33), (34): Xaa is C or S
XSRVVMNPIKGYIVNSSDDFYLVNIPSLKTPAXXPK

SEQ ID NO: 21313 - protein, 36 aa, Artificial Sequence
  Non-cyclic GFR-binding peptide
  MOD_RES (34), (35): Xaa is C or S
  MOD_RES (12), (13), (14), (15), (16): Xaa is A or G
  MOD_RES (17), (18), (19), (20): Xaa is A or G or is absent
ARVVMNPIKGYXXXXXXXXXFYLVNIPSLQTPAXXP

SEQ ID NO: 21314 - protein, 40 aa, Artificial Sequence
  Non-cyclic GFR-binding peptide
  MOD_RES (34), (35): Xaa is C or S
  MOD_RES (12), (13), (14), (15), (16): Xaa is A or G
  MOD_RES (17), (18), (19), (20): Xaa is A or G or is absent
SRVVMNPIKGYXXXXXXXXXFYLVNIPSLKTPAXXPKPVH

SEQ ID NO: 21315 - protein, 37 aa, Artificial Sequence
  Non-cyclic GFR-binding peptide
  MOD_RES (31), (31): Xaa is C or S
RVVMNPIKGYIVNSSDDFYLVNIPSLKTPAXTPKTVH

SEQ ID NO: 21316 - protein, 38 aa, Artificial Sequence
  Non-cyclic GFR-binding peptide
  MOD_RES (1), (33), (34): Xaa is C or S
XGEVVMDPIKGYVVKENEDFYLMNIPSLETPVXXAKPI

SEQ ID NO: 21317 - protein, 41 aa, Artificial Sequence
  Non-cyclic GFR-binding peptide
  MOD_RES (1), (35), (36): Xaa is C or S
  MOD_RES (13), (14), (15), (16), (17): Xaa is A or G
  MOD_RES (18), (19), (20), (21): Xaa is A or G or is absent
XSRVVMNPIKGYXXXXXXXXXFYLVNIPSLKTPAXXPKPVH

SEQ ID NO: 21318 - protein, 42 aa, Artificial Sequence
  Non-cyclic GFR-binding peptide
  MOD_RES (1), (3), (37), (38): Xaa is C or S
  MOD_RES (15), (16), (17), (18), (19): Xaa is A or G
  MOD_RES (20), (21), (22), (23): Xaa is A or G or is absent
XGXAKVVMNPIKGYXXXXXXXXXFYLVNIPSLKTPAXXAKPV

SEQ ID NO: 21319 - protein, 34 aa, Artificial Sequence
  Non-cyclic GFR-binding peptide
  MOD_RES (33), (34): Xaa is C or S
  MOD_RES (11), (12), (13), (14), (15): Xaa is A or G
  MOD_RES (16), (17), (18), (19): Xaa is A or G or is absent
EVVMDPIKGYXXXXXXXXXFYLMNIPSLETPVXX

SEQ ID NO: 21320 - protein, 39 aa, Artificial Sequence
  Non-cyclic GFR-binding peptide
  MOD_RES (33), (34): Xaa is C or S
  MOD_RES (11), (12), (13), (14), (15): Xaa is A or G
  MOD_RES (16), (17), (18), (19): Xaa is A or G or is absent
RVVMNPIKGYXXXXXXXXXFYLVNIPSLQTPAXXPKPVT

SEQ ID NO: 21321 - protein, 38 aa, Artificial Sequence
  Non-cyclic GFR-binding peptide
  MOD_RES (2), (4), (36), (37): Xaa is C or S
HXGXARVVMNPIKGYIVNSSDDFYLVNIPSLQTPAXXP

SEQ ID NO: 21322 - protein, 41 aa, Artificial Sequence
  Non-cyclic GFR-binding peptide
  MOD_RES (2), (37), (38): Xaa is C or S
  MOD_RES (15), (16), (17), (18), (19): Xaa is A or G
  MOD_RES (20), (21), (22), (23): Xaa is A or G or is absent
GXEAVSMGEPIKGYXXXXXXXXXFYLVNIPSLKTPVXXAKG

SEQ ID NO: 21323 - protein, 41 aa, Artificial Sequence
  Non-cyclic GFR-binding peptide
  MOD_RES (2), (4), (36), (37): Xaa is C or S
HXGXARVVMNPIKGYIVNSSDDFYLVNIPSLQTPAXXPKPV

SEQ ID NO: 21324 - protein, 39 aa, Artificial Sequence
  Non-cyclic GFR-binding peptide
  MOD_RES (1), (35), (36): Xaa is C or S
  MOD_RES (13), (14), (15), (16), (17): Xaa is A or G
  MOD_RES (18), (19), (20), (21): Xaa is A or G or is absent
XAKVVMNPIKGYXXXXXXXXXFYLVNIPSLKTPAXXAKP

SEQ ID NO: 21325 - protein, 41 aa, Artificial Sequence
  Non-cyclic GFR-binding peptide
  MOD_RES (1), (35), (36): Xaa is C or S
  MOD_RES (13), (14), (15), (16), (17): Xaa is A or G
  MOD_RES (18), (19), (20), (21): Xaa is A or G or is absent
XARVVMNPIKGYXXXXXXXXXFYLVNIPSLQTPAXXPKPVT

SEQ ID NO: 21326 - protein, 35 aa, Artificial Sequence
  Non-cyclic GFR-binding peptide
  MOD_RES (2), (34), (35): Xaa is C or S
GXGEVVMEPIKGYVVKDYEDFYLMNIPSLETPVXX

SEQ ID NO: 21327 - protein, 33 aa, Artificial Sequence
  Non-cyclic GFR-binding peptide
  MOD_RES (1), (1): Xaa is C or S
XEAVSMGEPIKGYTPVGMDDFYLVNIPSLKTPV

SEQ ID NO: 21328 - protein, 40 aa, Artificial Sequence
  Non-cyclic GFR-binding peptide
  MOD_RES (2), (4), (38), (39): Xaa is C or S
  MOD_RES (16), (17), (18), (19), (20): Xaa is A or G
  MOD_RES (21), (22), (23), (24): Xaa is A or G or is absent
RXGXESVAMGPIKGYXXXXXXXXXFYLINIPSLKTPVXXA

SEQ ID NO: 21329 - protein, 34 aa, Artificial Sequence
  Non-cyclic GFR-binding peptide
  MOD_RES (1), (34): Xaa is C or S
XEAVSMGEPIKGYTPVGMDDFYLVNIPSLKTPVX

SEQ ID NO: 21330 - protein, 39 aa, Artificial Sequence
  Non-cyclic GFR-binding peptide
  MOD_RES (1), (33), (34): Xaa is C or S
XESVAMGPIKGYYTVVGKDFYLINIPSLKTPVXXAKSAK

SEQ ID NO: 21331 - protein, 33 aa, Artificial Sequence
  Non-cyclic GFR-binding peptide
  MOD_RES (2), (2): Xaa is C or S
GXGEVVMDPIKGYVVKENEDFYLMNIPSLETPV

SEQ ID NO: 21332 - protein, 34 aa, Artificial Sequence
  Non-cyclic GFR-binding peptide
  MOD_RES (2), (34): Xaa is C or S
GXGEVVMEPIKGYVVKDYEDFYLMNIPSLETPVX

SEQ ID NO: 21333 - protein, 38 aa, Artificial Sequence
  Non-cyclic GFR-binding peptide
  MOD_RES (1), (34), (35): Xaa is C or S
  MOD_RES (12), (13), (14), (15), (16): Xaa is A or G
  MOD_RES (17), (18), (19), (20): Xaa is A or G or is absent
XEEVIMPIKGYXXXXXXXXXFYLMNIPSTKVPAXXTSP

SEQ ID NO: 21334 - protein, 41 aa, Artificial Sequence
  Non-cyclic GFR-binding peptide
  MOD_RES (1), (35), (36): Xaa is C or S
  MOD_RES (13), (14), (15), (16), (17): Xaa is A or G
  MOD_RES (18), (19), (20), (21): Xaa is A or G or is absent
XGEVVMEPIKGYXXXXXXXXXFYLMNIPSLETPVXXAKPIS

SEQ ID NO: 21335 - protein, 41 aa, Artificial Sequence
  Non-cyclic GFR-binding peptide
  MOD_RES (2), (4), (38), (39): Xaa is C or S
  MOD_RES (16), (17), (18), (19), (20): Xaa is A or G
  MOD_RES (21), (22), (23), (24): Xaa is A or G or is absent
RXGXESVAMGPIKGYXXXXXXXXXFYLINIPSLKTPVXXAK

SEQ ID NO: 21336 - protein, 39 aa, Artificial Sequence
  Non-cyclic GFR-binding peptide
  MOD_RES (33), (34): Xaa is C or S
  MOD_RES (11), (12), (13), (14), (15): Xaa is A or G
  MOD_RES (16), (17), (18), (19): Xaa is A or G or is absent
RVVMNPIKGYXXXXXXXXXFYLVNIPSLKTPAXXPKPVH

SEQ ID NO: 21337 - protein, 37 aa, Artificial Sequence
  Non-cyclic GFR-binding peptide
  MOD_RES (1), (33), (34): Xaa is C or S
XSEVVMDPIKGYVVNNASDFYLINIPSLRTPVXXTPP

SEQ ID NO: 21338 - protein, 40 aa, Artificial Sequence
  Non-cyclic GFR-binding peptide
  MOD_RES (2), (34), (35): Xaa is C or S
GXSRVVMNPIKGYIVNSSDDFYLVNIPSLKTPAXXPKPVH

SEQ ID NO: 21339 - protein, 34 aa, Artificial Sequence
  Non-cyclic GFR-binding peptide
  MOD_RES (32), (33): Xaa is C or S
SRVVMNPIKGYIVNSSDDFYLVNIPSLKTPAXXP

SEQ ID NO: 21340 - protein, 40 aa, Artificial Sequence
  Non-cyclic GFR-binding peptide
  MOD_RES (2), (36), (37): Xaa is C or S
  MOD_RES (14), (15), (16), (17), (18): Xaa is A or G
  MOD_RES (19), (20), (21), (22): Xaa is A or G or is absent
GXGEVVMDPIKGYXXXXXXXXXFYLMNIPSLETPVXXAKP

SEQ ID NO: 21341 - protein, 37 aa, Artificial Sequence
  Non-cyclic GFR-binding peptide
  MOD_RES (32), (32): Xaa is C or S
SRVVMNPIKGYIVNSSDDFYLVNIPSLKTPAXTPKTV

SEQ ID NO: 21342 - protein, 36 aa, Artificial Sequence
  Non-cyclic GFR-binding peptide
  MOD_RES (33), (33): Xaa is C or S
  MOD_RES (11), (12), (13), (14), (15): Xaa is A or G
  MOD_RES (16), (17), (18), (19): Xaa is A or G or is absent
RVVMNPIKGYXXXXXXXXXFYLVNIPSLKTPAXTPK

SEQ ID NO: 21343 - protein, 40 aa, Artificial Sequence
  Non-cyclic GFR-binding peptide
  MOD_RES (2), (36), (37): Xaa is C or S
  MOD_RES (14), (15), (16), (17), (18): Xaa is A or G
  MOD_RES (19), (20), (21), (22): Xaa is A or G or is absent
GXESVAMGPIKGYXXXXXXXXXFYLINIPSLKTPVXXAKS

SEQ ID NO: 21344 - protein, 40 aa, Artificial Sequence
  Non-cyclic GFR-binding peptide
  MOD_RES (1), (35), (36): Xaa is C or S
  MOD_RES (13), (14), (15), (16), (17): Xaa is A or G
  MOD_RES (18), (19), (20), (21): Xaa is A or G or is absent
XARVVMNPIKGYXXXXXXXXXFYLVNIPSLQTPAXXPKPV

SEQ ID NO: 21345 - protein, 38 aa, Artificial Sequence
  Non-cyclic GFR-binding peptide
  MOD_RES (2), (34), (35): Xaa is C or S
GXSEVVMDPIKGYVVNNASDFYLINIPSLRTPVXXTPP

SEQ ID NO: 21346 - protein, 31 aa, Artificial Sequence
  Non-cyclic GFR-binding peptide
ARVVMNPIKGYIVNSSDDFYLVNIPSLQTPA

SEQ ID NO: 21347 - protein, 39 aa, Artificial Sequence
  Non-cyclic GFR-binding peptide
  MOD_RES (1), (33), (34): Xaa is C or S
XSRVVMNPIKGYIVNSSDDFYLVNIPSLKTPAXXPKPVY

SEQ ID NO: 21348 - protein, 38 aa, Artificial Sequence
  Non-cyclic GFR-binding peptide
  MOD_RES (2), (4), (38): Xaa is C or S
  MOD_RES (16), (17), (18), (19), (20): Xaa is A or G
  MOD_RES (21), (22), (23), (24): Xaa is A or G or is absent
RXGXGEVVMDPIKGYXXXXXXXXXFYLMNIPSLETPVX

SEQ ID NO: 21349 - protein, 39 aa, Artificial Sequence
  Non-cyclic GFR-binding peptide
  MOD_RES (2), (4), (36), (37): Xaa is C or S
RXGXSEVVMDPIKGYVVNNASDFYLINIPSLRTPVXXTP

SEQ ID NO: 21350 - protein, 37 aa, Artificial Sequence
  Non-cyclic GFR-binding peptide
  MOD_RES (2), (37): Xaa is C or S
  MOD_RES (15), (16), (17), (18), (19): Xaa is A or G
  MOD_RES (20), (21), (22), (23): Xaa is A or G or is absent
GXEAVSMGEPIKGYXXXXXXXXXFYLVNIPSLKTPVX

SEQ ID NO: 21351 - protein, 41 aa, Artificial Sequence
  Non-cyclic GFR-binding peptide
  MOD_RES (2), (36), (37): Xaa is C or S
  MOD_RES (14), (15), (16), (17), (18): Xaa is A or G
  MOD_RES (19), (20), (21), (22): Xaa is A or G or is absent
GXSRVVMNPIKGYXXXXXXXXXFYLVNIPSLKTPAXXPKPV

SEQ ID NO: 21352 - protein, 36 aa, Artificial Sequence
  Non-cyclic GFR-binding peptide
  MOD_RES (33), (34): Xaa is C or S
  MOD_RES (11), (12), (13), (14), (15): Xaa is A or G
  MOD_RES (16), (17), (18), (19): Xaa is A or G or is absent
RVVMNPIKGYXXXXXXXXXFYLVNIPSLKTPAXXPK

SEQ ID NO: 21353 - protein, 41 aa, Artificial Sequence
  Non-cyclic GFR-binding peptide
  MOD_RES (1), (35), (36): Xaa is C or S
  MOD_RES (13), (14), (15), (16), (17): Xaa is A or G
  MOD_RES (18), (19), (20), (21): Xaa is A or G or is absent
XSEVVMDPIKGYXXXXXXXXXFYLINIPSLRTPVXXTPPTS

SEQ ID NO: 21354 - protein, 39 aa, Artificial Sequence
  Non-cyclic GFR-binding peptide
  MOD_RES (2), (4), (38), (39): Xaa is C or S
  MOD_RES (16), (17), (18), (19), (20): Xaa is A or G
  MOD_RES (21), (22), (23), (24): Xaa is A or G or is absent
RXGXESVAMGPIKGYXXXXXXXXXFYLINIPSLKTPVXX

SEQ ID NO: 21355 - protein, 41 aa, Artificial Sequence
  Non-cyclic GFR-binding peptide
  MOD_RES (1), (35), (36): Xaa is C or S
  MOD_RES (13), (14), (15), (16), (17): Xaa is A or G
  MOD_RES (18), (19), (20), (21): Xaa is A or G or is absent
XAKVVMNPIKGYXXXXXXXXXFYLVNIPSLKTPAXXAKPVA

SEQ ID NO: 21356 - protein, 30 aa, Artificial Sequence
  Non-cyclic GFR-binding peptide
RVVMNPIKGYIVNSSDDFYLVNIPSLKTPA

SEQ ID NO: 21357 - protein, 34 aa, Artificial Sequence
  Non-cyclic GFR-binding peptide
  MOD_RES (1), (1): Xaa is C or S
  MOD_RES (13), (14), (15), (16), (17): Xaa is A or G
  MOD_RES (18), (19), (20), (21): Xaa is A or G or is absent
XARVVMNPIKGYXXXXXXXXXFYLVNIPSLQTPA

SEQ ID NO: 21358 - protein, 42 aa, Artificial Sequence
  Non-cyclic GFR-binding peptide
  MOD_RES (2), (36), (37): Xaa is C or S
  MOD_RES (14), (15), (16), (17), (18): Xaa is A or G
  MOD_RES (19), (20), (21), (22): Xaa is A or G or is absent
GXSEVVMDPIKGYXXXXXXXXXFYLINIPSLRTPVXXTPPTS

SEQ ID NO: 21359 - protein, 40 aa, Artificial Sequence
  Non-cyclic GFR-binding peptide
  MOD_RES (2), (37), (38): Xaa is C or S
  MOD_RES (15), (16), (17), (18), (19): Xaa is A or G
  MOD_RES (20), (21), (22), (23): Xaa is A or G or is absent
GXEAVSMGEPIKGYXXXXXXXXXFYLVNIPSLKTPVXXAK

SEQ ID NO: 21360 - protein, 36 aa, Artificial Sequence
  Non-cyclic GFR-binding peptide
  MOD_RES (31), (32): Xaa is C or S
EVVMDPIKGYVVNNAADFYLINIPSLRAPVXXSAPA

SEQ ID NO: 21361 - protein, 32 aa, Artificial Sequence
  Non-cyclic GFR-binding peptide
  MOD_RES (31), (32): Xaa is C or S
EVVMEPIKGYVVKDYEDFYLMNIPSLETPVXX

SEQ ID NO: 21362 - protein, 36 aa, Artificial Sequence
  Non-cyclic GFR-binding peptide
  MOD_RES (1), (32), (33): Xaa is C or S
XEEVIMPIKGYLLVRGNDFYLMNIPSTKVPAXXTSP

SEQ ID NO: 21363 - protein, 35 aa, Artificial Sequence
  Non-cyclic GFR-binding peptide
  MOD_RES (1), (33), (34): Xaa is C or S
XGEVVMEPIKGYVVKDYEDFYLMNIPSLETPVXXA

SEQ ID NO: 21364 - protein, 36 aa, Artificial Sequence
  Non-cyclic GFR-binding peptide
  MOD_RES (33), (34): Xaa is C or S
  MOD_RES (11), (12), (13), (14), (15): Xaa is A or G
  MOD_RES (16), (17), (18), (19): Xaa is A or G or is absent
EVVMEPIKGYXXXXXXXXXFYLMNIPSLETPVXXAK

SEQ ID NO: 21365 - protein, 31 aa, Artificial Sequence
  Non-cyclic GFR-binding peptide
  MOD_RES (31), (31): Xaa is C or S
KVVMNPIKGYIVNNSSDFYLVNIPSLKTPAX

SEQ ID NO: 21366 - protein, 38 aa, Artificial Sequence
  Non-cyclic GFR-binding peptide
  MOD_RES (1), (3), (37), (38): Xaa is C or S
  MOD_RES (15), (16), (17), (18), (19): Xaa is A or G
  MOD_RES (20), (21), (22), (23): Xaa is A or G or is absent
XGXESVAMGPIKGYXXXXXXXXXFYLINIPSLKTPVXX

SEQ ID NO: 21367 - protein, 33 aa, Artificial Sequence
  Non-cyclic GFR-binding peptide
  MOD_RES (1), (33): Xaa is C or S
XSRVVMNPIKGYIVNSSDDFYLVNIPSLKTPAX

SEQ ID NO: 21368 - protein, 34 aa, Artificial Sequence
  Non-cyclic GFR-binding peptide
  MOD_RES (34), (34): Xaa is C or S
  MOD_RES (12), (13), (14), (15), (16): Xaa is A or G
  MOD_RES (17), (18), (19), (20): Xaa is A or G or is absent
ESVAMGPIKGYXXXXXXXXXFYLINIPSLKTPVX

SEQ ID NO: 21369 - protein, 40 aa, Artificial Sequence
  Non-cyclic GFR-binding peptide
  MOD_RES (2), (4), (38), (39): Xaa is C or S
  MOD_RES (16), (17), (18), (19), (20): Xaa is A or G
  MOD_RES (21), (22), (23), (24): Xaa is A or G or is absent
HXGXAKVVMNPIKGYXXXXXXXXXFYLVNIPSLKTPAXXA

SEQ ID NO: 21370 - protein, 40 aa, Artificial Sequence
  Non-cyclic GFR-binding peptide
  MOD_RES (2), (4), (36), (37): Xaa is C or S
RXGXESVAMGPIKGYYTVVGKDFYLINIPSLKTPVXXAKS

SEQ ID NO: 21371 - protein, 34 aa, Artificial Sequence
  Non-cyclic GFR-binding peptide
  MOD_RES (31), (32): Xaa is C or S
RVVMNPIKGYIVNSSDDFYLVNIPSLQTPAXXPK

SEQ ID NO: 21372 - protein, 42 aa, Artificial Sequence
  Non-cyclic GFR-binding peptide
  MOD_RES (2), (36), (37): Xaa is C or S
  MOD_RES (14), (15), (16), (17), (18): Xaa is A or G
  MOD_RES (19), (20), (21), (22): Xaa is A or G or is absent
GXESVAMGPIKGYXXXXXXXXXFYLINIPSLKTPVXXAKSAK

SEQ ID NO: 21373 - protein, 38 aa, Artificial Sequence
  Non-cyclic GFR-binding peptide
  MOD_RES (1), (3), (37), (38): Xaa is C or S
  MOD_RES (15), (16), (17), (18), (19): Xaa is A or G
  MOD_RES (20), (21), (22), (23): Xaa is A or G or is absent
XGXGEVVMDPIKGYXXXXXXXXXFYLMNIPSLETPVXX

SEQ ID NO: 21374 - protein, 36 aa, Artificial Sequence
  Non-cyclic GFR-binding peptide
  MOD_RES (1), (33), (34): Xaa is C or S
XESVAMGPIKGYYTVVGKDFYLINIPSLKTPVXXAK

SEQ ID NO: 21375 - protein, 39 aa, Artificial Sequence
  Non-cyclic GFR-binding peptide
  MOD_RES (1), (3), (37), (38): Xaa is C or S
  MOD_RES (15), (16), (17), (18), (19): Xaa is A or G
  MOD_RES (20), (21), (22), (23): Xaa is A or G or is absent
XGXARVVMNPIKGYXXXXXXXXXFYLVNIPSLQTPAXXP

SEQ ID NO: 21376 - protein, 35 aa, Artificial Sequence
  Non-cyclic GFR-binding peptide
  MOD_RES (2), (4): Xaa is C or S
HXGXAKVVMNPIKGYIVNNSSDFYLVNIPSLKTPA

SEQ ID NO: 21377 - protein, 38 aa, Artificial Sequence
  Non-cyclic GFR-binding peptide
  MOD_RES (1), (3), (35), (36): Xaa is C or S
XGXARVVMNPIKGYIVNSSDDFYLVNIPSLQTPAXXPK

SEQ ID NO: 21378 - protein, 37 aa, Artificial Sequence
  Non-cyclic GFR-binding peptide
  MOD_RES (31), (32): Xaa is C or S
EVVMDPIKGYVVKENEDFYLMNIPSLETPVXXAKPIK

SEQ ID NO: 21379 - protein, 38 aa, Artificial Sequence
  Non-cyclic GFR-binding peptide
  MOD_RES (2), (4), (36), (37): Xaa is C or S
RXGXGEVVMEPIKGYVVKDYEDFYLMNIPSLETPVXXA

SEQ ID NO: 21380 - protein, 39 aa, Artificial Sequence
  Non-cyclic GFR-binding peptide
  MOD_RES (33), (34): Xaa is C or S
  MOD_RES (11), (12), (13), (14), (15): Xaa is A or G
  MOD_RES (16), (17), (18), (19): Xaa is A or G or is absent
EVVMDPIKGYXXXXXXXXXFYLINIPSLRTPVXXTPPTS

SEQ ID NO: 21381 - protein, 39 aa, Artificial Sequence
  Non-cyclic GFR-binding peptide
  MOD_RES (2), (4), (36): Xaa is C or S
HXGXSRVVMNPIKGYIVNSSDDFYLVNIPSLKTPAXTPK

SEQ ID NO: 21382 - protein, 40 aa, Artificial Sequence
  Non-cyclic GFR-binding peptide
  MOD_RES (2), (36), (37): Xaa is C or S
  MOD_RES (14), (15), (16), (17), (18): Xaa is A or G
  MOD_RES (19), (20), (21), (22): Xaa is A or G or is absent
GXSRVVMNPIKGYXXXXXXXXXFYLVNIPSLKTPAXXPKP

SEQ ID NO: 21383 - protein, 38 aa, Artificial Sequence
  Non-cyclic GFR-binding peptide
  MOD_RES (33), (34): Xaa is C or S
  MOD_RES (11), (12), (13), (14), (15): Xaa is A or G
  MOD_RES (16), (17), (18), (19): Xaa is A or G or is absent
EEVIMPIKGYXXXXXXXXXFYLMNIPSTKVPAXXTSPV

SEQ ID NO: 21384 - protein, 35 aa, Artificial Sequence
  Non-cyclic GFR-binding peptide
  MOD_RES (2), (2): Xaa is C or S
  MOD_RES (14), (15), (16), (17), (18): Xaa is A or G
  MOD_RES (19), (20), (21), (22): Xaa is A or G or is absent
GXAKVVMNPIKGYXXXXXXXXXFYLVNIPSLKTPA

SEQ ID NO: 21385 - protein, 41 aa, Artificial Sequence
  Non-cyclic GFR-binding peptide
  MOD_RES (2), (35), (36): Xaa is C or S
  MOD_RES (13), (14), (15), (16), (17): Xaa is A or G
  MOD_RES (18), (19), (20), (21): Xaa is A or G or is absent
GXEEVIMPIKGYXXXXXXXXXFYLMNIPSTKVPAXXTSPVR

SEQ ID NO: 21386 - protein, 43 aa, Artificial Sequence
  Non-cyclic GFR-binding peptide
  MOD_RES (2), (4), (38), (39): Xaa is C or S
  MOD_RES (16), (17), (18), (19), (20): Xaa is A or G
  MOD_RES (21), (22), (23), (24): Xaa is A or G or is absent
HXGXAKVVMNPIKGYXXXXXXXXXFYLVNIPSLKTPAXXAKPV

SEQ ID NO: 21387 - protein, 34 aa, Artificial Sequence
  Non-cyclic GFR-binding peptide
  MOD_RES (33), (34): Xaa is C or S
  MOD_RES (11), (12), (13), (14), (15): Xaa is A or G
  MOD_RES (16), (17), (18), (19): Xaa is A or G or is absent
EVVMEPIKGYXXXXXXXXXFYLMNIPSLETPVXX

SEQ ID NO: 21388 - protein, 42 aa, Artificial Sequence
  Non-cyclic GFR-binding peptide
  MOD_RES (2), (36), (37): Xaa is C or S
  MOD_RES (14), (15), (16), (17), (18): Xaa is A or G
  MOD_RES (19), (20), (21), (22): Xaa is A or G or is absent
GXAEVVMDPIKGYXXXXXXXXXFYLINIPSLRAPVXXSAPAA

SEQ ID NO: 21389 - protein, 39 aa, Artificial Sequence
  Non-cyclic GFR-binding peptide
  MOD_RES (2), (34), (35): Xaa is C or S
GXSRVVMNPIKGYIVNSSDDFYLVNIPSLKTPAXXPKPV

SEQ ID NO: 21390 - protein, 39 aa, Artificial Sequence
  Non-cyclic GFR-binding peptide
  MOD_RES (34), (35): Xaa is C or S
  MOD_RES (12), (13), (14), (15), (16): Xaa is A or G
  MOD_RES (17), (18), (19), (20): Xaa is A or G or is absent
AKVVMNPIKGYXXXXXXXXXFYLVNIPSLKTPAXXAKPV

SEQ ID NO: 21391 - protein, 39 aa, Artificial Sequence
  Non-cyclic GFR-binding peptide
  MOD_RES (1), (33), (34): Xaa is C or S
XARVVMNPIKGYIVNSSDDFYLVNIPSLQTPAXXPKPVT

SEQ ID NO: 21392 - protein, 38 aa, Artificial Sequence
  Non-cyclic GFR-binding peptide
  MOD_RES (1), (35), (36): Xaa is C or S
  MOD_RES (13), (14), (15), (16), (17): Xaa is A or G
  MOD_RES (18), (19), (20), (21): Xaa is A or G or is absent
XAKVVMNPIKGYXXXXXXXXXFYLVNIPSLKTPAXXAK

SEQ ID NO: 21393 - protein, 40 aa, Artificial Sequence
  Non-cyclic GFR-binding peptide
  MOD_RES (1), (35), (36): Xaa is C or S
  MOD_RES (13), (14), (15), (16), (17): Xaa is A or G
  MOD_RES (18), (19), (20), (21): Xaa is A or G or is absent
XGEVVMDPIKGYXXXXXXXXXFYLMNIPSLETPVXXAKPI

SEQ ID NO: 21394 - protein, 40 aa, Artificial Sequence
  Non-cyclic GFR-binding peptide
  MOD_RES (2), (4), (37), (38): Xaa is C or S
RXGXEAVSMGEPIKGYTPVGMDDFYLVNIPSLKTPVXXAK

SEQ ID NO: 21395 - protein, 36 aa, Artificial Sequence
  Non-cyclic GFR-binding peptide
  MOD_RES (1), (35), (36): Xaa is C or S
  MOD_RES (13), (14), (15), (16), (17): Xaa is A or G
  MOD_RES (18), (19), (20), (21): Xaa is A or G or is absent
XSEVVMDPIKGYXXXXXXXXXFYLINIPSLRTPVXX

SEQ ID NO: 21396 - protein, 38 aa, Artificial Sequence
  Non-cyclic GFR-binding peptide
  MOD_RES (1), (3), (37), (38): Xaa is C or S
  MOD_RES (15), (16), (17), (18), (19): Xaa is A or G
  MOD_RES (20), (21), (22), (23): Xaa is A or G or is absent
XGXAEVVMDPIKGYXXXXXXXXXFYLINIPSLRAPVXX

SEQ ID NO: 21397 - protein, 37 aa, Artificial Sequence
  Non-cyclic GFR-binding peptide
  MOD_RES (32), (33): Xaa is C or S
ESVAMGPIKGYYTVVGKDFYLINIPSLKTPVXXAKSA

SEQ ID NO: 21398 - protein, 40 aa, Artificial Sequence
  Non-cyclic GFR-binding peptide
  MOD_RES (2), (35), (36): Xaa is C or S
  MOD_RES (13), (14), (15), (16), (17): Xaa is A or G
  MOD_RES (18), (19), (20), (21): Xaa is A or G or is absent
GXEEVIMPIKGYXXXXXXXXXFYLMNIPSTKVPAXXTSPV

SEQ ID NO: 21399 - protein, 37 aa, Artificial Sequence
  Non-cyclic GFR-binding peptide
  MOD_RES (31), (32): Xaa is C or S
EEVIMPIKGYLLVRGNDFYLMNIPSTKVPAXXTSPVR

SEQ ID NO: 21400 - protein, 42 aa, Artificial Sequence
  Non-cyclic GFR-binding peptide
  MOD_RES (2), (4), (38), (39): Xaa is C or S
  MOD_RES (16), (17), (18), (19), (20): Xaa is A or G
  MOD_RES (21), (22), (23), (24): Xaa is A or G or is absent
RXGXAEVVMDPIKGYXXXXXXXXXFYLINIPSLRAPVXXSAP

SEQ ID NO: 21401 - protein, 36 aa, Artificial Sequence
  Non-cyclic GFR-binding peptide
  MOD_RES (34), (35): Xaa is C or S
  MOD_RES (12), (13), (14), (15), (16): Xaa is A or G
  MOD_RES (17), (18), (19), (20): Xaa is A or G or is absent
GEVVMDPIKGYXXXXXXXXXFYLMNIPSLETPVXXA

SEQ ID NO: 21402 - protein, 34 aa, Artificial Sequence
  Non-cyclic GFR-binding peptide
  MOD_RES (31), (32): Xaa is C or S
EVVMEPIKGYVVKDYEDFYLMNIPSLETPVXXAK

SEQ ID NO: 21403 - protein, 33 aa, Artificial Sequence
  Non-cyclic GFR-binding peptide
  MOD_RES (32), (33): Xaa is C or S
ARVVMNPIKGYIVNSSDDFYLVNIPSLQTPAXX

SEQ ID NO: 21404 - protein, 37 aa, Artificial Sequence
  Non-cyclic GFR-binding peptide
  MOD_RES (2), (4), (36), (37): Xaa is C or S
HXGXAKVVMNPIKGYIVNNSSDFYLVNIPSLKTPAXX

SEQ ID NO: 21405 - protein, 32 aa, Artificial Sequence
  Non-cyclic GFR-binding peptide
  MOD_RES (31), (32): Xaa is C or S
KVVMNPIKGYIVNNSSDFYLVNIPSLKTPAXX

SEQ ID NO: 21406 - protein, 35 aa, Artificial Sequence
  Non-cyclic GFR-binding peptide
  MOD_RES (2), (4), (35): Xaa is C or S
LXGXEEVIMPIKGYLLVRGNDFYLMNIPSTKVPAX

SEQ ID NO: 21407 - protein, 34 aa, Artificial Sequence
  Non-cyclic GFR-binding peptide
  MOD_RES (34), (34): Xaa is C or S
  MOD_RES (12), (13), (14), (15), (16): Xaa is A or G
  MOD_RES (17), (18), (19), (20): Xaa is A or G or is absent
AEVVMDPIKGYXXXXXXXXXFYLINIPSLRAPVX

SEQ ID NO: 21408 - protein, 38 aa, Artificial Sequence
  Non-cyclic GFR-binding peptide
  MOD_RES (1), (34), (35): Xaa is C or S
XEAVSMGEPIKGYTPVGMDDFYLVNIPSLKTPVXXAKG

SEQ ID NO: 21409 - protein, 33 aa, Artificial Sequence
  Non-cyclic GFR-binding peptide
  MOD_RES (31), (31): Xaa is C or S
RVVMNPIKGYIVNSSDDFYLVNIPSLKTPAXTP

SEQ ID NO: 21410 - protein, 38 aa, Artificial Sequence
  Non-cyclic GFR-binding peptide
  MOD_RES (2), (36), (37): Xaa is C or S
  MOD_RES (14), (15), (16), (17), (18): Xaa is A or G
  MOD_RES (19), (20), (21), (22): Xaa is A or G or is absent
GXARVVMNPIKGYXXXXXXXXXFYLVNIPSLQTPAXXP

SEQ ID NO: 21411 - protein, 44 aa, Artificial Sequence
  Non-cyclic GFR-binding peptide
  MOD_RES (2), (4), (39), (40): Xaa is C or S
  MOD_RES (17), (18), (19), (20), (21): Xaa is A or G
  MOD_RES (22), (23), (24), (25): Xaa is A or G or is absent
RXGXEAVSMGEPIKGYXXXXXXXXXFYLVNIPSLKTPVXXAKGV

SEQ ID NO: 21412 - protein, 35 aa, Artificial Sequence
  Non-cyclic GFR-binding peptide
  MOD_RES (1), (3), (35): Xaa is C or S
XGXARVVMNPIKGYIVNSSDDFYLVNIPSLQTPAX

SEQ ID NO: 21413 - protein, 39 aa, Artificial Sequence
  Non-cyclic GFR-binding peptide
  MOD_RES (2), (34), (35): Xaa is C or S
GXARVVMNPIKGYIVNSSDDFYLVNIPSLQTPAXXPKPV

SEQ ID NO: 21414 - protein, 42 aa, Artificial Sequence
  Non-cyclic GFR-binding peptide
  MOD_RES (2), (4), (36), (37): Xaa is C or S
HXGXAKVVMNPIKGYIVNNSSDFYLVNIPSLKTPAXXAKPVA

SEQ ID NO: 21415 - protein, 42 aa, Artificial Sequence
  Non-cyclic GFR-binding peptide
  MOD_RES (2), (36), (37): Xaa is C or S
  MOD_RES (14), (15), (16), (17), (18): Xaa is A or G
  MOD_RES (19), (20), (21), (22): Xaa is A or G or is absent
GXAKVVMNPIKGYXXXXXXXXXFYLVNIPSLKTPAXXAKPVA

SEQ ID NO: 21416 - protein, 42 aa, Artificial Sequence
  Non-cyclic GFR-binding peptide
  MOD_RES (2), (4), (36), (37): Xaa is C or S
RXGXGEVVMEPIKGYVVKDYEDFYLMNIPSLETPVXXAKPIS

SEQ ID NO: 21417 - protein, 39 aa, Artificial Sequence
  Non-cyclic GFR-binding peptide
  MOD_RES (1), (36), (37): Xaa is C or S
  MOD_RES (14), (15), (16), (17), (18): Xaa is A or G
  MOD_RES (19), (20), (21), (22): Xaa is A or G or is absent
XEAVSMGEPIKGYXXXXXXXXXFYLVNIPSLKTPVXXAK

SEQ ID NO: 21418 - protein, 36 aa, Artificial Sequence
  Non-cyclic GFR-binding peptide
  MOD_RES (1), (3): Xaa is C or S
  MOD_RES (15), (16), (17), (18), (19): Xaa is A or G
  MOD_RES (20), (21), (22), (23): Xaa is A or G or is absent
XGXARVVMNPIKGYXXXXXXXXXFYLVNIPSLQTPA

SEQ ID NO: 21419 - protein, 35 aa, Artificial Sequence
  Non-cyclic GFR-binding peptide
  MOD_RES (1), (33): Xaa is C or S
XSRVVMNPIKGYIVNSSDDFYLVNIPSLKTPAXTP

SEQ ID NO: 21420 - protein, 38 aa, Artificial Sequence
  Non-cyclic GFR-binding peptide
  MOD_RES (2), (36), (37): Xaa is C or S
  MOD_RES (14), (15), (16), (17), (18): Xaa is A or G
  MOD_RES (19), (20), (21), (22): Xaa is A or G or is absent
GXESVAMGPIKGYXXXXXXXXXFYLINIPSLKTPVXXA

SEQ ID NO: 21421 - protein, 34 aa, Artificial Sequence
  Non-cyclic GFR-binding peptide
  MOD_RES (34), (34): Xaa is C or S
  MOD_RES (12), (13), (14), (15), (16): Xaa is A or G
  MOD_RES (17), (18), (19), (20): Xaa is A or G or is absent
GEVVMEPIKGYXXXXXXXXXFYLMNIPSLETPVX

SEQ ID NO: 21422 - protein, 40 aa, Artificial Sequence
  Non-cyclic GFR-binding peptide
  MOD_RES (34), (35): Xaa is C or S
  MOD_RES (12), (13), (14), (15), (16): Xaa is A or G
  MOD_RES (17), (18), (19), (20): Xaa is A or G or is absent
ESVAMGPIKGYXXXXXXXXXFYLINIPSLKTPVXXAKSAK

SEQ ID NO: 21423 - protein, 39 aa, Artificial Sequence
  Non-cyclic GFR-binding peptide
  MOD_RES (1), (35), (36): Xaa is C or S
  MOD_RES (13), (14), (15), (16), (17): Xaa is A or G
  MOD_RES (18), (19), (20), (21): Xaa is A or G or is absent
XESVAMGPIKGYXXXXXXXXXFYLINIPSLKTPVXXAKS

SEQ ID NO: 21424 - protein, 41 aa, Artificial Sequence
  Non-cyclic GFR-binding peptide
  MOD_RES (2), (4), (37), (38): Xaa is C or S
  MOD_RES (15), (16), (17), (18), (19): Xaa is A or G
  MOD_RES (20), (21), (22), (23): Xaa is A or G or is absent
LXGXEEVIMPIKGYXXXXXXXXXFYLMNIPSTKVPAXXTSP

SEQ ID NO: 21425 - protein, 35 aa, Artificial Sequence
  Non-cyclic GFR-binding peptide
  MOD_RES (33), (34): Xaa is C or S
  MOD_RES (11), (12), (13), (14), (15): Xaa is A or G
  MOD_RES (16), (17), (18), (19): Xaa is A or G or is absent
EVVMDPIKGYXXXXXXXXXFYLINIPSLRTPVXXT

SEQ ID NO: 21426 - protein, 31 aa, Artificial Sequence
  Non-cyclic GFR-binding peptide
SRVVMNPIKGYIVNSSDDFYLVNIPSLKTPA

SEQ ID NO: 21427 - protein, 39 aa, Artificial Sequence
  Non-cyclic GFR-binding peptide
  MOD_RES (33), (34): Xaa is C or S
  MOD_RES (11), (12), (13), (14), (15): Xaa is A or G
  MOD_RES (16), (17), (18), (19): Xaa is A or G or is absent
EVVMDPIKGYXXXXXXXXXFYLMNIPSLETPVXXAKPIK

SEQ ID NO: 21428 - protein, 42 aa, Artificial Sequence
  Non-cyclic GFR-binding peptide
  MOD_RES (1), (3), (37), (38): Xaa is C or S
  MOD_RES (15), (16), (17), (18), (19): Xaa is A or G
  MOD_RES (20), (21), (22), (23): Xaa is A or G or is absent
XGXSRVVMNPIKGYXXXXXXXXXFYLVNIPSLKTPAXXPKPV

SEQ ID NO: 21429 - protein, 34 aa, Artificial Sequence
  Non-cyclic GFR-binding peptide
  MOD_RES (33), (34): Xaa is C or S
  MOD_RES (11), (12), (13), (14), (15): Xaa is A or G
  MOD_RES (16), (17), (18), (19): Xaa is A or G or is absent
RVVMNPIKGYXXXXXXXXXFYLVNIPSLQTPAXX

SEQ ID NO: 21430 - protein, 36 aa, Artificial Sequence
  Non-cyclic GFR-binding peptide
  MOD_RES (1), (3): Xaa is C or S
  MOD_RES (15), (16), (17), (18), (19): Xaa is A or G
  MOD_RES (20), (21), (22), (23): Xaa is A or G or is absent
XGXGEVVMEPIKGYXXXXXXXXXFYLMNIPSLETPV

SEQ ID NO: 21431 - protein, 39 aa, Artificial Sequence
  Non-cyclic GFR-binding peptide
  MOD_RES (1), (3), (36), (37): Xaa is C or S
  MOD_RES (14), (15), (16), (17), (18): Xaa is A or G
  MOD_RES (19), (20), (21), (22): Xaa is A or G or is absent
XGXEEVIMPIKGYXXXXXXXXXFYLMNIPSTKVPAXXTS

SEQ ID NO: 21432 - protein, 38 aa, Artificial Sequence
  Non-cyclic GFR-binding peptide
  MOD_RES (1), (3), (34), (35): Xaa is C or S
XGXEEVIMPIKGYLLVRGNDFYLMNIPSTKVPAXXTSP

SEQ ID NO: 21433 - protein, 37 aa, Artificial Sequence
  Non-cyclic GFR-binding peptide
  MOD_RES (2), (36), (37): Xaa is C or S
  MOD_RES (14), (15), (16), (17), (18): Xaa is A or G
  MOD_RES (19), (20), (21), (22): Xaa is A or G or is absent
GXESVAMGPIKGYXXXXXXXXXFYLINIPSLKTPVXX

SEQ ID NO: 21434 - protein, 36 aa, Artificial Sequence
  Non-cyclic GFR-binding peptide
  MOD_RES (33), (34): Xaa is C or S
  MOD_RES (11), (12), (13), (14), (15): Xaa is A or G
  MOD_RES (16), (17), (18), (19): Xaa is A or G or is absent
EVVMDPIKGYXXXXXXXXXFYLMNIPSLETPVXXAK

SEQ ID NO: 21435 - protein, 37 aa, Artificial Sequence
  Non-cyclic GFR-binding peptide
  MOD_RES (2), (4), (36), (37): Xaa is C or S
HXGXARVVMNPIKGYIVNSSDDFYLVNIPSLQTPAXX

SEQ ID NO: 21436 - protein, 38 aa, Artificial Sequence
  Non-cyclic GFR-binding peptide
  MOD_RES (1), (32), (33): Xaa is C or S
XEEVIMPIKGYLLVRGNDFYLMNIPSTKVPAXXTSPVR

SEQ ID NO: 21437 - protein, 34 aa, Artificial Sequence
  Non-cyclic GFR-binding peptide
  MOD_RES (2), (34): Xaa is C or S
GXAKVVMNPIKGYIVNNSSDFYLVNIPSLKTPAX

SEQ ID NO: 21438 - protein, 39 aa, Artificial Sequence
  Non-cyclic GFR-binding peptide
  MOD_RES (33), (34): Xaa is C or S
  MOD_RES (11), (12), (13), (14), (15): Xaa is A or G
  MOD_RES (16), (17), (18), (19): Xaa is A or G or is absent
KVVMNPIKGYXXXXXXXXXFYLVNIPSLKTPAXXAKPVA

SEQ ID NO: 21439 - protein, 39 aa, Artificial Sequence
  Non-cyclic GFR-binding peptide
  MOD_RES (2), (36), (37): Xaa is C or S
  MOD_RES (14), (15), (16), (17), (18): Xaa is A or G
  MOD_RES (19), (20), (21), (22): Xaa is A or G or is absent
GXGEVVMDPIKGYXXXXXXXXXFYLMNIPSLETPVXXAK

SEQ ID NO: 21440 - protein, 30 aa, Artificial Sequence
  Non-cyclic GFR-binding peptide
SVAMGPIKGYYTVVGKDFYLINIPSLKTPV

SEQ ID NO: 21441 - protein, 35 aa, Artificial Sequence
  Non-cyclic GFR-binding peptide
  MOD_RES (2), (2): Xaa is C or S
  MOD_RES (14), (15), (16), (17), (18): Xaa is A or G
  MOD_RES (19), (20), (21), (22): Xaa is A or G or is absent
GXGEVVMDPIKGYXXXXXXXXXFYLMNIPSLETPV

SEQ ID NO: 21442 - protein, 39 aa, Artificial Sequence
  Non-cyclic GFR-binding peptide
  MOD_RES (1), (33): Xaa is C or S
XSRVVMNPIKGYIVNSSDDFYLVNIPSLKTPAXTPKTVH

SEQ ID NO: 21443 - protein, 32 aa, Artificial Sequence
  Non-cyclic GFR-binding peptide
  MOD_RES (32), (32): Xaa is C or S
AEVVMDPIKGYVVNNAADFYLINIPSLRAPVX

SEQ ID NO: 21444 - protein, 36 aa, Artificial Sequence
  Non-cyclic GFR-binding peptide
  MOD_RES (2), (34): Xaa is C or S
GXSRVVMNPIKGYIVNSSDDFYLVNIPSLKTPAXTP

SEQ ID NO: 21445 - protein, 33 aa, Artificial Sequence
  Non-cyclic GFR-binding peptide
  MOD_RES (12), (13), (14), (15), (16): Xaa is A or G
  MOD_RES (17), (18), (19), (20): Xaa is A or G or is absent
SEVVMDPIKGYXXXXXXXXXFYLINIPSLRTPV

SEQ ID NO: 21446 - protein, 33 aa, Artificial Sequence
  Non-cyclic GFR-binding peptide
  MOD_RES (31), (32): Xaa is C or S
EEVIMPIKGYLLVRGNDFYLMNIPSTKVPAXXT

SEQ ID NO: 21447 - protein, 37 aa, Artificial Sequence
  Non-cyclic GFR-binding peptide
  MOD_RES (1), (3), (36), (37): Xaa is C or S
XGXEAVSMGEPIKGYTPVGMDDFYLVNIPSLKTPVXX

SEQ ID NO: 21448 - protein, 38 aa, Artificial Sequence
  Non-cyclic GFR-binding peptide
  MOD_RES (2), (4), (37), (38): Xaa is C or S
  MOD_RES (15), (16), (17), (18), (19): Xaa is A or G
  MOD_RES (20), (21), (22), (23): Xaa is A or G or is absent
LXGXEEVIMPIKGYXXXXXXXXXFYLMNIPSTKVPAXX

SEQ ID NO: 21449 - protein, 35 aa, Artificial Sequence
  Non-cyclic GFR-binding peptide
  MOD_RES (34), (35): Xaa is C or S
  MOD_RES (12), (13), (14), (15), (16): Xaa is A or G
  MOD_RES (17), (18), (19), (20): Xaa is A or G or is absent
AEVVMDPIKGYXXXXXXXXXFYLINIPSLRAPVXX

SEQ ID NO: 21450 - protein, 38 aa, Artificial Sequence
  Non-cyclic GFR-binding peptide
  MOD_RES (33), (34): Xaa is C or S
  MOD_RES (11), (12), (13), (14), (15): Xaa is A or G
  MOD_RES (16), (17), (18), (19): Xaa is A or G or is absent
KVVMNPIKGYXXXXXXXXXFYLVNIPSLKTPAXXAKPV

SEQ ID NO: 21451 - protein, 37 aa, Artificial Sequence
  Non-cyclic GFR-binding peptide
  MOD_RES (1), (3), (36), (37): Xaa is C or S
  MOD_RES (14), (15), (16), (17), (18): Xaa is A or G
  MOD_RES (19), (20), (21), (22): Xaa is A or G or is absent
XGXEEVIMPIKGYXXXXXXXXXFYLMNIPSTKVPAXX

SEQ ID NO: 21452 - protein, 39 aa, Artificial Sequence
  Non-cyclic GFR-binding peptide
  MOD_RES (6), (7), (39): Xaa is C or S
STPPTXXVPTRLSPINILYFDSANNVVYGKIPDMVVESX

SEQ ID NO: 21453 - protein, 40 aa, Artificial Sequence
  Non-cyclic GFR-binding peptide
  MOD_RES (6), (7): Xaa is C or S
  MOD_RES (21), (22), (23), (24), (25): Xaa is A or G
  MOD_RES (26), (27), (28), (29): Xaa is A or G or is absent
TVPKPXXAPTQLSPINVLYFXXXXXXXXXYGKIPNMVVRA

SEQ ID NO: 21454 - protein, 37 aa, Artificial Sequence
  Non-cyclic GFR-binding peptide
  MOD_RES (5), (6): Xaa is C or S
IPKAXXVPTELSPINMLYFDENEKVVYGKIPDMVVEG

SEQ ID NO: 21455 - protein, 40 aa, Artificial Sequence
  Non-cyclic GFR-binding peptide
  MOD_RES (3), (4), (38), (40): Xaa is C or S
  MOD_RES (18), (19), (20), (21), (22): Xaa is A or G
  MOD_RES (23), (24), (25), (26): Xaa is A or G or is absent
ASXXVPARLSPINILYFXXXXXXXXXYGKIPDMVVEAXGX

SEQ ID NO: 21456 - protein, 32 aa, Artificial Sequence
  Non-cyclic GFR-binding peptide
  MOD_RES (31), (31): Xaa is C or S
APVKTSPINMLYFDNGRVLLYGKIPMIVEEXG

SEQ ID NO: 21457 - protein, 35 aa, Artificial Sequence
  Non-cyclic GFR-binding peptide
  MOD_RES (3), (4): Xaa is C or S
PTXXVPTRLSPINILYFDSANNVVYGKIPDMVVES

SEQ ID NO: 21458 - protein, 42 aa, Artificial Sequence
  Non-cyclic GFR-binding peptide
  MOD_RES (5), (6), (40), (42): Xaa is C or S
  MOD_RES (20), (21), (22), (23), (24): Xaa is A or G
  MOD_RES (25), (26), (27), (28): Xaa is A or G or is absent
TPPTXXVPTRLSPINILYFXXXXXXXXXYGKIPDMVVESXGX

SEQ ID NO: 21459 - protein, 39 aa, Artificial Sequence
  Non-cyclic GFR-binding peptide
  MOD_RES (3), (4), (36), (38): Xaa is C or S
KAXXVPTKLSPINILYFDKGVVTYYGKIPGMAVSEXGXR

SEQ ID NO: 21460 - protein, 41 aa, Artificial Sequence
  Non-cyclic GFR-binding peptide
  MOD_RES (4), (5), (39), (41): Xaa is C or S
  MOD_RES (19), (20), (21), (22), (23): Xaa is A or G
  MOD_RES (24), (25), (26), (27): Xaa is A or G or is absent
PKPXXAPTKLSPINVLYFXXXXXXXXXYGKIPNMVVRSXGX

SEQ ID NO: 21461 - protein, 35 aa, Artificial Sequence
  Non-cyclic GFR-binding peptide
  MOD_RES (2), (3), (35): Xaa is C or S
AXXVPTELSPINMLYFDENEKVVYGKIPDMVVEGX

SEQ ID NO: 21462 - protein, 35 aa, Artificial Sequence
  Non-cyclic GFR-binding peptide
  MOD_RES (1), (2): Xaa is C or S
  MOD_RES (16), (17), (18), (19), (20): Xaa is A or G
  MOD_RES (21), (22), (23), (24): Xaa is A or G or is absent
XXVPTKLSPINILYFXXXXXXXXXYGKIPGMAVSE

SEQ ID NO: 21463 - protein, 40 aa, Artificial Sequence
  Non-cyclic GFR-binding peptide
  MOD_RES (5), (6), (38), (40): Xaa is C or S
ASKAXXVPTKLSPINILYFDKGVVTYYGKIPGMAVSEXGX

SEQ ID NO: 21464 - protein, 37 aa, Artificial Sequence
  Non-cyclic GFR-binding peptide
  MOD_RES (4), (36): Xaa is C or S
KPTXAPTKLSPINVLYFDDSSNVIYGKIPNMVVRSXG

SEQ ID NO: 21465 - protein, 40 aa, Artificial Sequence
  Non-cyclic GFR-binding peptide
  MOD_RES (7), (7): Xaa is C or S
  MOD_RES (21), (22), (23), (24), (25): Xaa is A or G
  MOD_RES (26), (27), (28), (29): Xaa is A or G or is absent
HVTKPTXAPTKLSPINVLYFXXXXXXXXXYGKIPNMVVRS

SEQ ID NO: 21466 - protein, 34 aa, Artificial Sequence
  Non-cyclic GFR-binding peptide
  MOD_RES (1), (33): Xaa is C or S
XAPTKLSPINVLYFDDSSNVIYGKIPNMVVRSXG

SEQ ID NO: 21467 - protein, 41 aa, Artificial Sequence
  Non-cyclic GFR-binding peptide
  MOD_RES (4), (5), (39), (41): Xaa is C or S
  MOD_RES (19), (20), (21), (22), (23): Xaa is A or G
  MOD_RES (24), (25), (26), (27): Xaa is A or G or is absent
SKAXXVPTKLSPINILYFXXXXXXXXXYGKIPGMAVSEXGX

SEQ ID NO: 21468 - protein, 40 aa, Artificial Sequence
  Non-cyclic GFR-binding peptide
  MOD_RES (5), (6), (40): Xaa is C or S
  MOD_RES (20), (21), (22), (23), (24): Xaa is A or G
  MOD_RES (25), (26), (27), (28): Xaa is A or G or is absent
ASKAXXVPTKLSPINILYFXXXXXXXXXYGKIPGMAVSEX

SEQ ID NO: 21469 - protein, 35 aa, Artificial Sequence
  Non-cyclic GFR-binding peptide
  MOD_RES (3), (4): Xaa is C or S
KAXXVPTELSPINMLYFDENEKVVYGKIPDMVVEG

SEQ ID NO: 21470 - protein, 36 aa, Artificial Sequence
  Non-cyclic GFR-binding peptide
  MOD_RES (5), (6): Xaa is C or S
TPPTXXVPTRLSPINILYFDSANNVVYGKIPDMVVE

SEQ ID NO: 21471 - protein, 39 aa, Artificial Sequence
  Non-cyclic GFR-binding peptide
  MOD_RES (1), (2), (36), (38): Xaa is C or S
  MOD_RES (16), (17), (18), (19), (20): Xaa is A or G
  MOD_RES (21), (22), (23), (24): Xaa is A or G or is absent
XXVPARLSPINILYFXXXXXXXXXYGKIPDMVVEAXGXR

SEQ ID NO: 21472 - protein, 35 aa, Artificial Sequence
  Non-cyclic GFR-binding peptide
  MOD_RES (2), (3): Xaa is C or S
  MOD_RES (17), (18), (19), (20), (21): Xaa is A or G
  MOD_RES (22), (23), (24), (25): Xaa is A or G or is absent
AXXVPTELSPINMLYFXXXXXXXXXYGKIPDMVVE

SEQ ID NO: 21473 - protein, 39 aa, Artificial Sequence
  Non-cyclic GFR-binding peptide
  MOD_RES (2), (3), (36), (38): Xaa is C or S
AXXVPTKLSPINVLYFDDMGVPTYGKIPEGMSVAEXGXR

SEQ ID NO: 21474 - protein, 39 aa, Artificial Sequence
  Non-cyclic GFR-binding peptide
  MOD_RES (3), (37), (39): Xaa is C or S
  MOD_RES (17), (18), (19), (20), (21): Xaa is A or G
  MOD_RES (22), (23), (24), (25): Xaa is A or G or is absent
PTXAPTKLSPINVLYFXXXXXXXXXYGKIPNMVVRSXGX

SEQ ID NO: 21475 - protein, 36 aa, Artificial Sequence
  Non-cyclic GFR-binding peptide
  MOD_RES (4), (5): Xaa is C or S
PPTXXVPTRLSPINILYFDSANNVVYGKIPDMVVES

SEQ ID NO: 21476 - protein, 37 aa, Artificial Sequence
  Non-cyclic GFR-binding peptide
  MOD_RES (4), (5): Xaa is C or S
  MOD_RES (19), (20), (21), (22), (23): Xaa is A or G
  MOD_RES (24), (25), (26), (27): Xaa is A or G or is absent
PKPXXAPTQLSPINVLYFXXXXXXXXXYGKIPNMVVR

SEQ ID NO: 21477 - protein, 36 aa, Artificial Sequence
  Non-cyclic GFR-binding peptide
  MOD_RES (2), (3), (35): Xaa is C or S
SXXVPARLSPINILYFDAANNVVYGKIPDMVVEAXG

SEQ ID NO: 21478 - protein, 42 aa, Artificial Sequence
  Non-cyclic GFR-binding peptide
  MOD_RES (5), (6), (39), (41): Xaa is C or S
VGKAXXVPTKLSPINVLYFDDMGVPTYGKIPEGMSVAEXGXR

SEQ ID NO: 21479 - protein, 33 aa, Artificial Sequence
  Non-cyclic GFR-binding peptide
  MOD_RES (1), (2): Xaa is C or S
XXVPTKLSPINILYFDKGVVTYYGKIPGMAVSE

SEQ ID NO: 21480 - protein, 35 aa, Artificial Sequence
  Non-cyclic GFR-binding peptide
  MOD_RES (1), (33), (35): Xaa is C or S
XVPTELSPINMLYFDEYDKVVYGKIPEMVVEGXGX

SEQ ID NO: 21481 - protein, 39 aa, Artificial Sequence
  Non-cyclic GFR-binding peptide
  MOD_RES (3), (4), (36), (38): Xaa is C or S
ASXXVPARLSPINILYFDAANNVVYGKIPDMVVEAXGXR

SEQ ID NO: 21482 - protein, 35 aa, Artificial Sequence
  Non-cyclic GFR-binding peptide
  MOD_RES (1), (2), (35): Xaa is C or S
XXVPTKLSPINVLYFDDMGVPTYGKIPEGMSVAEX

SEQ ID NO: 21483 - protein, 38 aa, Artificial Sequence
  Non-cyclic GFR-binding peptide
  MOD_RES (5), (6), (37): Xaa is C or S
VPSTXXAPVKTSPINMLYFDNGRVLLYGKIPMIVEEXG

SEQ ID NO: 21484 - protein, 43 aa, Artificial Sequence
  Non-cyclic GFR-binding peptide
  MOD_RES (5), (6), (40), (42): Xaa is C or S
  MOD_RES (20), (21), (22), (23), (24): Xaa is A or G
  MOD_RES (25), (26), (27), (28): Xaa is A or G or is absent
ASKAXXVPTKLSPINILYFXXXXXXXXXYGKIPGMAVSEXGXR

SEQ ID NO: 21485 - protein, 43 aa, Artificial Sequence
  Non-cyclic GFR-binding peptide
  MOD_RES (6), (7), (41), (43): Xaa is C or S
  MOD_RES (21), (22), (23), (24), (25): Xaa is A or G
  MOD_RES (26), (27), (28), (29): Xaa is A or G or is absent
AVPKAXXAPTKLSPINVLYFXXXXXXXXXYGKIPNMVVKAXGX

SEQ ID NO: 21486 - protein, 36 aa, Artificial Sequence
  Non-cyclic GFR-binding peptide
  MOD_RES (34), (36): Xaa is C or S
  MOD_RES (14), (15), (16), (17), (18): Xaa is A or G
  MOD_RES (19), (20), (21), (22): Xaa is A or G or is absent
VPTKLSPINILYFXXXXXXXXXYGKIPGMAVSEXGX

SEQ ID NO: 21487 - protein, 40 aa, Artificial Sequence
  Non-cyclic GFR-binding peptide
  MOD_RES (4), (38), (40): Xaa is C or S
  MOD_RES (18), (19), (20), (21), (22): Xaa is A or G
  MOD_RES (23), (24), (25), (26): Xaa is A or G or is absent
KPTXAPTKLSPINVLYFXXXXXXXXXYGKIPNMVVRSXGX

SEQ ID NO: 21488 - protein, 44 aa, Artificial Sequence
  Non-cyclic GFR-binding peptide
  MOD_RES (6), (7), (41), (43): Xaa is C or S
  MOD_RES (21), (22), (23), (24), (25): Xaa is A or G
  MOD_RES (26), (27), (28), (29): Xaa is A or G or is absent
AVPKAXXAPTKLSPINVLYFXXXXXXXXXYGKIPNMVVKAXGXH

SEQ ID NO: 21489 - protein, 39 aa, Artificial Sequence
  Non-cyclic GFR-binding peptide
  MOD_RES (6), (7), (39): Xaa is C or S
KIPKAXXVPTELSPINMLYFDENEKVVYGKIPDMVVEGX

SEQ ID NO: 21490 - protein, 43 aa, Artificial Sequence
  Non-cyclic GFR-binding peptide
  MOD_RES (6), (7), (41), (43): Xaa is C or S
  MOD_RES (21), (22), (23), (24), (25): Xaa is A or G
  MOD_RES (26), (27), (28), (29): Xaa is A or G or is absent
KASKAXXVPTKLSPINILYFXXXXXXXXXYGKIPGMAVSEXGX

SEQ ID NO: 21491 - protein, 34 aa, Artificial Sequence
  Non-cyclic GFR-binding peptide
  MOD_RES (2), (3): Xaa is C or S
PXXAPTQLSPINVLYFDDSSNVIYGKIPNMVVRA

SEQ ID NO: 21492 - protein, 37 aa, Artificial Sequence
  Non-cyclic GFR-binding peptide
  MOD_RES (2), (34), (36): Xaa is C or S
TXAPTKLSPINVLYFDDSSNVIYGKIPNMVVRSXGXH

SEQ ID NO: 21493 - protein, 35 aa, Artificial Sequence
  Non-cyclic GFR-binding peptide
  MOD_RES (35), (35): Xaa is C or S
  MOD_RES (14), (15), (16), (17), (18): Xaa is A or G
  MOD_RES (19), (20), (21), (22): Xaa is A or G or is absent
VPTKLSPINVLYFXXXXXXXXXYGKIPEGMSVAEX

SEQ ID NO: 21494 - protein, 39 aa, Artificial Sequence
  Non-cyclic GFR-binding peptide
  MOD_RES (3), (4), (36), (38): Xaa is C or S
KAXXAPTKLSPINVLYFDSSNNVIYGKIPNMVVKAXGXH

SEQ ID NO: 21495 - protein, 37 aa, Artificial Sequence
  Non-cyclic GFR-binding peptide
  MOD_RES (2), (3), (36): Xaa is C or S
AXXVPTKLSPINVLYFDDMGVPTYGKIPEGMSVAEXG

SEQ ID NO: 21496 - protein, 42 aa, Artificial Sequence
  Non-cyclic GFR-binding peptide
  MOD_RES (4), (5), (39), (41): Xaa is C or S
  MOD_RES (19), (20), (21), (22), (23): Xaa is A or G
  MOD_RES (24), (25), (26), (27): Xaa is A or G or is absent
PKAXXAPTKLSPINVLYFXXXXXXXXXYGKIPNMVVKAXGXH

SEQ ID NO: 21497 - protein, 34 aa, Artificial Sequence
  Non-cyclic GFR-binding peptide
  MOD_RES (1), (32), (34): Xaa is C or S
XAPVKTSPINMLYFDNGRVLLYGKIPMIVEEXGX

SEQ ID NO: 21498 - protein, 42 aa, Artificial Sequence
  Non-cyclic GFR-binding peptide
  MOD_RES (4), (5), (39), (41): Xaa is C or S
  MOD_RES (19), (20), (21), (22), (23): Xaa is A or G
  MOD_RES (24), (25), (26), (27): Xaa is A or G or is absent
PPTXXVPTRLSPINILYFXXXXXXXXXYGKIPDMVVESXGXR

SEQ ID NO: 21499 - protein, 36 aa, Artificial Sequence
  Non-cyclic GFR-binding peptide
  MOD_RES (1), (33), (35): Xaa is C or S
XVPTELSPINMLYFDENEKVVYGKIPDMVVEGXGXR

SEQ ID NO: 21500 - protein, 37 aa, Artificial Sequence
  Non-cyclic GFR-binding peptide
  MOD_RES (6), (7): Xaa is C or S
KASKAXXVPTKLSPINILYFDKGVVTYYGKIPGMAVS

SEQ ID NO: 21501 - protein, 40 aa, Artificial Sequence
  Non-cyclic GFR-binding peptide
  MOD_RES (6), (7), (39): Xaa is C or S
TVPKPXXAPTQLSPINVLYFDDSSNVIYGKIPNMVVRAXG

SEQ ID NO: 21502 - protein, 40 aa, Artificial Sequence
  Non-cyclic GFR-binding peptide
  MOD_RES (4), (5), (39): Xaa is C or S
  MOD_RES (19), (20), (21), (22), (23): Xaa is A or G
  MOD_RES (24), (25), (26), (27): Xaa is A or G or is absent
PPTXXVPTRLSPINILYFXXXXXXXXXYGKIPDMVVESXG

SEQ ID NO: 21503 - protein, 35 aa, Artificial Sequence
  Non-cyclic GFR-binding peptide
  MOD_RES (1), (2): Xaa is C or S
  MOD_RES (16), (17), (18), (19), (20): Xaa is A or G
  MOD_RES (21), (22), (23), (24): Xaa is A or G or is absent
XXAPTKLSPINVLYFXXXXXXXXXYGKIPNMVVRS

SEQ ID NO: 21504 - protein, 39 aa, Artificial Sequence
  Non-cyclic GFR-binding peptide
  MOD_RES (5), (6): Xaa is C or S
  MOD_RES (20), (21), (22), (23), (24): Xaa is A or G
  MOD_RES (25), (26), (27), (28): Xaa is A or G or is absent
IPKAXXVPTELSPINMLYFXXXXXXXXXYGKIPDMVVEG

SEQ ID NO: 21505 - protein, 35 aa, Artificial Sequence
  Non-cyclic GFR-binding peptide
  MOD_RES (1), (33), (35): Xaa is C or S
XVPTKLSPINILYFDKGVVTYYGKIPGMAVSEXGX

SEQ ID NO: 21506 - protein, 35 aa, Artificial Sequence
  Non-cyclic GFR-binding peptide
  MOD_RES (34), (34): Xaa is C or S
  MOD_RES (14), (15), (16), (17), (18): Xaa is A or G
  MOD_RES (19), (20), (21), (22): Xaa is A or G or is absent
APTQLSPINVLYFXXXXXXXXXYGKIPNMVVRAXG

SEQ ID NO: 21507 - protein, 36 aa, Artificial Sequence
  Non-cyclic GFR-binding peptide
  MOD_RES (5), (6): Xaa is C or S
IPKAXXVPTELSPINMLYFDEYDKVVYGKIPEMVVE

SEQ ID NO: 21508 - protein, 38 aa, Artificial Sequence
  Non-cyclic GFR-binding peptide
  MOD_RES (3), (4), (36), (38): Xaa is C or S
KAXXVPTELSPINMLYFDEYDKVVYGKIPEMVVEGXGX

SEQ ID NO: 21509 - protein, 42 aa, Artificial Sequence
  Non-cyclic GFR-binding peptide
  MOD_RES (4), (5), (39), (41): Xaa is C or S
  MOD_RES (19), (20), (21), (22), (23): Xaa is A or G
  MOD_RES (24), (25), (26), (27): Xaa is A or G or is absent
PKAXXVPTELSPINMLYFXXXXXXXXXYGKIPDMVVEGXGXR

SEQ ID NO: 21510 - protein, 41 aa, Artificial Sequence
  Non-cyclic GFR-binding peptide
  MOD_RES (3), (4), (39), (41): Xaa is C or S
  MOD_RES (18), (19), (20), (21), (22): Xaa is A or G
  MOD_RES (23), (24), (25), (26): Xaa is A or G or is absent
KAXXVPTKLSPINVLYFXXXXXXXXXYGKIPEGMSVAEXGX

SEQ ID NO: 21511 - protein, 39 aa, Artificial Sequence
  Non-cyclic GFR-binding peptide
  MOD_RES (4), (5), (38): Xaa is C or S
  MOD_RES (19), (20), (21), (22), (23): Xaa is A or G
  MOD_RES (24), (25), (26), (27): Xaa is A or G or is absent
PSTXXAPVKTSPINMLYFXXXXXXXXXYGKIPMIVEEXG

SEQ ID NO: 21512 - protein, 39 aa, Artificial Sequence
  Non-cyclic GFR-binding peptide
  MOD_RES (6), (38): Xaa is C or S
VTKPTXAPTKLSPINVLYFDDSSNVIYGKIPNMVVRSXG

SEQ ID NO: 21513 - protein, 42 aa, Artificial Sequence
  Non-cyclic GFR-binding peptide
  MOD_RES (5), (6), (41): Xaa is C or S
  MOD_RES (20), (21), (22), (23), (24): Xaa is A or G
  MOD_RES (25), (26), (27), (28): Xaa is A or G or is absent
VGKAXXVPTKLSPINVLYFXXXXXXXXXYGKIPEGMSVAEXG

SEQ ID NO: 21514 - protein, 40 aa, Artificial Sequence
  Non-cyclic GFR-binding peptide
  MOD_RES (6), (7), (39): Xaa is C or S
STPPTXXVPTRLSPINILYFDSANNVVYGKIPDMVVESXG

SEQ ID NO: 21515 - protein, 38 aa, Artificial Sequence
  Non-cyclic GFR-binding peptide
  MOD_RES (3), (4), (38): Xaa is C or S
  MOD_RES (18), (19), (20), (21), (22): Xaa is A or G
  MOD_RES (23), (24), (25), (26): Xaa is A or G or is absent
KPXXAPTKLSPINVLYFXXXXXXXXXYGKIPNMVVRSX

SEQ ID NO: 21516 - protein, 34 aa, Artificial Sequence
  Non-cyclic GFR-binding peptide
  MOD_RES (14), (15), (16), (17), (18): Xaa is A or G
  MOD_RES (19), (20), (21), (22): Xaa is A or G or is absent
VPTKLSPINVLYFXXXXXXXXXYGKIPEGMSVAE

SEQ ID NO: 21517 - protein, 32 aa, Artificial Sequence
  Non-cyclic GFR-binding peptide
  MOD_RES (1), (1): Xaa is C or S
XVPTELSPINMLYFDENEKVVYGKIPDMVVEG

SEQ ID NO: 21518 - protein, 37 aa, Artificial Sequence
  Non-cyclic GFR-binding peptide
  MOD_RES (3), (4), (36): Xaa is C or S
KAXXVPTELSPINMLYFDEYDKVVYGKIPEMVVEGXG

SEQ ID NO: 21519 - protein, 41 aa, Artificial Sequence
  Non-cyclic GFR-binding peptide
  MOD_RES (4), (5), (39), (41): Xaa is C or S
  MOD_RES (19), (20), (21), (22), (23): Xaa is A or G
  MOD_RES (24), (25), (26), (27): Xaa is A or G or is absent
PKAXXAPTKLSPINVLYFXXXXXXXXXYGKIPNMVVKAXGX

SEQ ID NO: 21520 - protein, 40 aa, Artificial Sequence
  Non-cyclic GFR-binding peptide
  MOD_RES (5), (6), (38), (40): Xaa is C or S
VPKPXXAPTKLSPINVLYFDDSSNVIYGKIPNMVVRSXGX

SEQ ID NO: 21521 - protein, 36 aa, Artificial Sequence
  Non-cyclic GFR-binding peptide
  MOD_RES (34), (36): Xaa is C or S
  MOD_RES (14), (15), (16), (17), (18): Xaa is A or G
  MOD_RES (19), (20), (21), (22): Xaa is A or G or is absent
APTKLSPINVLYFXXXXXXXXXYGKIPNMVVKAXGX

SEQ ID NO: 21522 - protein, 34 aa, Artificial Sequence
  Non-cyclic GFR-binding peptide
  MOD_RES (1), (33): Xaa is C or S
XVPTRLSPINILYFDSANNVVYGKIPDMVVESXG

SEQ ID NO: 21523 - protein, 37 aa, Artificial Sequence
  Non-cyclic GFR-binding peptide
  MOD_RES (5), (6): Xaa is C or S
APASXXVPARLSPINILYFDAANNVVYGKIPDMVVEA

SEQ ID NO: 21524 - protein, 35 aa, Artificial Sequence
  Non-cyclic GFR-binding peptide
  MOD_RES (32), (34): Xaa is C or S
VPTELSPINMLYFDENEKVVYGKIPDMVVEGXGXR

SEQ ID NO: 21525 - protein, 41 aa, Artificial Sequence
  Non-cyclic GFR-binding peptide
  MOD_RES (5), (6), (38), (40): Xaa is C or S
IPKAXXVPTELSPINMLYFDEYDKVVYGKIPEMVVEGXGXR

SEQ ID NO: 21526 - protein, 34 aa, Artificial Sequence
  Non-cyclic GFR-binding peptide
  MOD_RES (3), (4): Xaa is C or S
KAXXVPTELSPINMLYFDENEKVVYGKIPDMVVE

SEQ ID NO: 21527 - protein, 41 aa, Artificial Sequence
  Non-cyclic GFR-binding peptide
  MOD_RES (7), (39), (41): Xaa is C or S
HVTKPTXAPTKLSPINVLYFDDSSNVIYGKIPNMVVRSXGX

SEQ ID NO: 21528 - protein, 35 aa, Artificial Sequence
  Non-cyclic GFR-binding peptide
  MOD_RES (4), (5): Xaa is C or S
PKPXXAPTKLSPINVLYFDDSSNVIYGKIPNMVVR

SEQ ID NO: 21529 - protein, 41 aa, Artificial Sequence
  Non-cyclic GFR-binding peptide
  MOD_RES (6), (7), (39), (41): Xaa is C or S
HVPKPXXAPTKLSPINVLYFDDSSNVIYGKIPNMVVRSXGX

SEQ ID NO: 21530 - protein, 38 aa, Artificial Sequence
  Non-cyclic GFR-binding peptide
  MOD_RES (2), (3), (37): Xaa is C or S
  MOD_RES (17), (18), (19), (20), (21): Xaa is A or G
  MOD_RES (22), (23), (24), (25): Xaa is A or G or is absent
AXXVPTELSPINMLYFXXXXXXXXXYGKIPEMVVEGXG

SEQ ID NO: 21531 - protein, 38 aa, Artificial Sequence
  Non-cyclic GFR-binding peptide
  MOD_RES (1), (2), (36), (38): Xaa is C or S
  MOD_RES (16), (17), (18), (19), (20): Xaa is A or G
  MOD_RES (21), (22), (23), (24): Xaa is A or G or is absent
XXAPTQLSPINVLYFXXXXXXXXXYGKIPNMVVRAXGX

SEQ ID NO: 21532 - protein, 38 aa, Artificial Sequence
  Non-cyclic GFR-binding peptide
  MOD_RES (5), (6), (38): Xaa is C or S
IPKAXXVPTELSPINMLYFDEYDKVVYGKIPEMVVEGX

SEQ ID NO: 21533 - protein, 37 aa, Artificial Sequence
  Non-cyclic GFR-binding peptide
  MOD_RES (3), (4), (37): Xaa is C or S
  MOD_RES (18), (19), (20), (21), (22): Xaa is A or G
  MOD_RES (23), (24), (25), (26): Xaa is A or G or is absent
STXXAPVKTSPINMLYFXXXXXXXXXYGKIPMIVEEX

SEQ ID NO: 21534 - protein, 35 aa, Artificial Sequence
  Non-cyclic GFR-binding peptide
  MOD_RES (4), (5): Xaa is C or S
PKAXXVPTELSPINMLYFDEYDKVVYGKIPEMVVE

SEQ ID NO: 21535 - protein, 41 aa, Artificial Sequence
  Non-cyclic GFR-binding peptide
  MOD_RES (4), (38), (40): Xaa is C or S
  MOD_RES (18), (19), (20), (21), (22): Xaa is A or G
  MOD_RES (23), (24), (25), (26): Xaa is A or G or is absent
KPTXAPTKLSPINVLYFXXXXXXXXXYGKIPNMVVRSXGXH

SEQ ID NO: 21536 - protein, 39 aa, Artificial Sequence
  Non-cyclic GFR-binding peptide
  MOD_RES (6), (7): Xaa is C or S
KVGKAXXVPTKLSPINVLYFDDMGVPTYGKIPEGMSVAE

SEQ ID NO: 21537 - protein, 31 aa, Artificial Sequence
  Non-cyclic GFR-binding peptide
VPARLSPINILYFDAANNVVYGKIPDMVVEA

SEQ ID NO: 21538 - protein, 32 aa, Artificial Sequence
  Non-cyclic GFR-binding peptide
  MOD_RES (14), (15), (16), (17), (18): Xaa is A or G
  MOD_RES (19), (20), (21), (22): Xaa is A or G or is absent
APTKLSPINVLYFXXXXXXXXXYGKIPNMVVK

SEQ ID NO: 21539 - protein, 43 aa, Artificial Sequence
  Non-cyclic GFR-binding peptide
  MOD_RES (5), (6), (40), (42): Xaa is C or S
  MOD_RES (20), (21), (22), (23), (24): Xaa is A or G
  MOD_RES (25), (26), (27), (28): Xaa is A or G or is absent
IPKAXXVPTELSPINMLYFXXXXXXXXXYGKIPDMVVEGXGXR

SEQ ID NO: 21540 - protein, 42 aa, Artificial Sequence
  Non-cyclic GFR-binding peptide
  MOD_RES (6), (7), (41): Xaa is C or S
  MOD_RES (21), (22), (23), (24), (25): Xaa is A or G
  MOD_RES (26), (27), (28), (29): Xaa is A or G or is absent
KIPKAXXVPTELSPINMLYFXXXXXXXXXYGKIPDMVVEGXG

SEQ ID NO: 21541 - protein, 32 aa, Artificial Sequence
  Non-cyclic GFR-binding peptide
  MOD_RES (14), (15), (16), (17), (18): Xaa is A or G
  MOD_RES (19), (20), (21), (22): Xaa is A or G or is absent
APVKTSPINMLYFXXXXXXXXXYGKIPMIVEE

SEQ ID NO: 21542 - protein, 38 aa, Artificial Sequence
  Non-cyclic GFR-binding peptide
  MOD_RES (3), (4), (36), (38): Xaa is C or S
KAXXVPTELSPINMLYFDENEKVVYGKIPDMVVEGXGX

SEQ ID NO: 21543 - protein, 33 aa, Artificial Sequence
  Non-cyclic GFR-binding peptide
  MOD_RES (1), (1): Xaa is C or S
  MOD_RES (15), (16), (17), (18), (19): Xaa is A or G
  MOD_RES (20), (21), (22), (23): Xaa is A or G or is absent
XVPARLSPINILYFXXXXXXXXXYGKIPDMVVE

SEQ ID NO: 21544 - protein, 34 aa, Artificial Sequence
  Non-cyclic GFR-binding peptide
  MOD_RES (1), (33): Xaa is C or S
XVPTELSPINMLYFDENEKVVYGKIPDMVVEGXG

SEQ ID NO: 21545 - protein, 35 aa, Artificial Sequence
  Non-cyclic GFR-binding peptide
  MOD_RES (1), (2), (34): Xaa is C or S
XXAPTQLSPINVLYFDDSSNVIYGKIPNMVVRAXG

SEQ ID NO: 21546 - protein, 31 aa, Artificial Sequence
  Non-cyclic GFR-binding peptide
VPTELSPINMLYFDEYDKVVYGKIPEMVVEG

SEQ ID NO: 21547 - protein, 40 aa, Artificial Sequence
  Non-cyclic GFR-binding peptide
  MOD_RES (4), (5), (37), (39): Xaa is C or S
PKAXXVPTELSPINMLYFDENEKVVYGKIPDMVVEGXGXR

SEQ ID NO: 21548 - protein, 38 aa, Artificial Sequence
  Non-cyclic GFR-binding peptide
  MOD_RES (2), (3), (35), (37): Xaa is C or S
AXXVPTKLSPINILYFDKGVVTYYGKIPGMAVSEXGXR

SEQ ID NO: 21549 - protein, 37 aa, Artificial Sequence
  Non-cyclic GFR-binding peptide
  MOD_RES (34), (36): Xaa is C or S
  MOD_RES (14), (15), (16), (17), (18): Xaa is A or G
  MOD_RES (19), (20), (21), (22): Xaa is A or G or is absent
VPTKLSPINILYFXXXXXXXXXYGKIPGMAVSEXGXR

SEQ ID NO: 21550 - protein, 40 aa, Artificial Sequence
  Non-cyclic GFR-binding peptide
  MOD_RES (6), (7), (39): Xaa is C or S
AVPKAXXAPTKLSPINVLYFDSSNNVIYGKIPNMVVKAXG

SEQ ID NO: 21551 - protein, 36 aa, Artificial Sequence
  Non-cyclic GFR-binding peptide
  MOD_RES (2), (3), (35): Xaa is C or S
AXXAPTKLSPINVLYFDSSNNVIYGKIPNMVVKAXG

SEQ ID NO: 21552 - protein, 34 aa, Artificial Sequence
  Non-cyclic GFR-binding peptide
  MOD_RES (32), (34): Xaa is C or S
VPTRLSPINILYFDSANNVVYGKIPDMVVESXGX

SEQ ID NO: 21553 - protein, 37 aa, Artificial Sequence
  Non-cyclic GFR-binding peptide
  MOD_RES (6), (7): Xaa is C or S
YVPKPXXAPTKLSPINVLYFDDSSNVIYGKIPNMVVR

SEQ ID NO: 21554 - protein, 39 aa, Artificial Sequence
  Non-cyclic GFR-binding peptide
  MOD_RES (5), (6), (38): Xaa is C or S
IPKAXXVPTELSPINMLYFDEYDKVVYGKIPEMVVEGXG

SEQ ID NO: 21555 - protein, 32 aa, Artificial Sequence
  Non-cyclic GFR-binding peptide
  MOD_RES (1), (1): Xaa is C or S
XAPTKLSPINVLYFDDSSNVIYGKIPNMVVRS

SEQ ID NO: 21556 - protein, 35 aa, Artificial Sequence
  Non-cyclic GFR-binding peptide
  MOD_RES (1), (33), (35): Xaa is C or S
XAPTKLSPINVLYFDSSNNVIYGKIPNMVVKAXGX

SEQ ID NO: 21557 - protein, 36 aa, Artificial Sequence
  Non-cyclic GFR-binding peptide
  MOD_RES (4), (5): Xaa is C or S
PKAXXVPTELSPINMLYFDENEKVVYGKIPDMVVEG

SEQ ID NO: 21558 - protein, 40 aa, Artificial Sequence
  Non-cyclic GFR-binding peptide
  MOD_RES (4), (5), (39): Xaa is C or S
  MOD_RES (19), (20), (21), (22), (23): Xaa is A or G
  MOD_RES (24), (25), (26), (27): Xaa is A or G or is absent
PASXXVPARLSPINILYFXXXXXXXXXYGKIPDMVVEAXG

SEQ ID NO: 21559 - protein, 35 aa, Artificial Sequence
  Non-cyclic GFR-binding peptide
  MOD_RES (3), (4), (35): Xaa is C or S
STXXAPVKTSPINMLYFDNGRVLLYGKIPMIVEEX

SEQ ID NO: 21560 - protein, 36 aa, Artificial Sequence
  Non-cyclic GFR-binding peptide
  MOD_RES (6), (6): Xaa is C or S
VTKPTXAPTKLSPINVLYFDDSSNVIYGKIPNMVVR

SEQ ID NO: 21561 - protein, 39 aa, Artificial Sequence
  Non-cyclic GFR-binding peptide
  MOD_RES (6), (7), (39): Xaa is C or S
HVPKPXXAPTKLSPINVLYFDDSSNVIYGKIPNMVVRSX

SEQ ID NO: 21562 - protein, 40 aa, Artificial Sequence
  Non-cyclic GFR-binding peptide
  MOD_RES (6), (7), (38), (40): Xaa is C or S
RVPSTXXAPVKTSPINMLYFDNGRVLLYGKIPMIVEEXGX

SEQ ID NO: 21563 - protein, 38 aa, Artificial Sequence
  Non-cyclic GFR-binding peptide
  MOD_RES (4), (5), (37): Xaa is C or S
PKPXXAPTKLSPINVLYFDDSSNVIYGKIPNMVVRSXG

SEQ ID NO: 21564 - protein, 36 aa, Artificial Sequence
  Non-cyclic GFR-binding peptide
  MOD_RES (3), (4), (36): Xaa is C or S
KPXXAPTQLSPINVLYFDDSSNVIYGKIPNMVVRAX

SEQ ID NO: 21565 - protein, 36 aa, Artificial Sequence
  Non-cyclic GFR-binding peptide
  MOD_RES (2), (3): Xaa is C or S
  MOD_RES (17), (18), (19), (20), (21): Xaa is A or G
  MOD_RES (22), (23), (24), (25): Xaa is A or G or is absent
PXXAPTKLSPINVLYFXXXXXXXXXYGKIPNMVVRS

SEQ ID NO: 21566 - protein, 36 aa, Artificial Sequence
  Non-cyclic GFR-binding peptide
  MOD_RES (3), (4), (35): Xaa is C or S
STXXAPVKTSPINMLYFDNGRVLLYGKIPMIVEEXG

SEQ ID NO: 21567 - protein, 40 aa, Artificial Sequence
  Non-cyclic GFR-binding peptide
  MOD_RES (6), (7): Xaa is C or S
  MOD_RES (21), (22), (23), (24), (25): Xaa is A or G
  MOD_RES (26), (27), (28), (29): Xaa is A or G or is absent
AVPKAXXAPTKLSPINVLYFXXXXXXXXXYGKIPNMVVKA

SEQ ID NO: 21568 - protein, 32 aa, Artificial Sequence
  Non-cyclic GFR-binding peptide
  MOD_RES (1), (2): Xaa is C or S
XXVPTELSPINMLYFDENEKVVYGKIPDMVVE

SEQ ID NO: 21569 - protein, 35 aa, Artificial Sequence
  Non-cyclic GFR-binding peptide
  MOD_RES (1), (35): Xaa is C or S
  MOD_RES (15), (16), (17), (18), (19): Xaa is A or G
  MOD_RES (20), (21), (22), (23): Xaa is A or G or is absent
XAPTQLSPINVLYFXXXXXXXXXYGKIPNMVVRAX

SEQ ID NO: 21570 - protein, 44 aa, Artificial Sequence
  Non-cyclic GFR-binding peptide
  MOD_RES (6), (7), (41), (43): Xaa is C or S
  MOD_RES (21), (22), (23), (24), (25): Xaa is A or G
  MOD_RES (26), (27), (28), (29): Xaa is A or G or is absent
YVPKPXXAPTKLSPINVLYFXXXXXXXXXYGKIPNMVVRSXGXH

SEQ ID NO: 21571 - protein, 39 aa, Artificial Sequence
  Non-cyclic GFR-binding peptide
  MOD_RES (6), (7): Xaa is C or S
  MOD_RES (21), (22), (23), (24), (25): Xaa is A or G
  MOD_RES (26), (27), (28), (29): Xaa is A or G or is absent
RVPSTXXAPVKTSPINMLYFXXXXXXXXXYGKIPMIVEE

SEQ ID NO: 21572 - protein, 34 aa, Artificial Sequence
  Non-cyclic GFR-binding peptide
  MOD_RES (34), (34): Xaa is C or S
  MOD_RES (14), (15), (16), (17), (18): Xaa is A or G
  MOD_RES (19), (20), (21), (22): Xaa is A or G or is absent
VPTELSPINMLYFXXXXXXXXXYGKIPEMVVEGX

SEQ ID NO: 21573 - protein, 38 aa, Artificial Sequence
  Non-cyclic GFR-binding peptide
  MOD_RES (4), (5): Xaa is C or S
  MOD_RES (19), (20), (21), (22), (23): Xaa is A or G
  MOD_RES (24), (25), (26), (27): Xaa is A or G or is absent
PPTXXVPTRLSPINILYFXXXXXXXXXYGKIPDMVVES

SEQ ID NO: 21574 - protein, 36 aa, Artificial Sequence
  Non-cyclic GFR-binding peptide
  MOD_RES (33), (35): Xaa is C or S
  MOD_RES (14), (15), (16), (17), (18): Xaa is A or G
  MOD_RES (19), (20), (21), (22): Xaa is A or G or is absent
APVKTSPINMLYFXXXXXXXXXYGKIPMIVEEXGXL

SEQ ID NO: 21575 - protein, 33 aa, Artificial Sequence
  Non-cyclic GFR-binding peptide
  MOD_RES (1), (2): Xaa is C or S
XXAPTKLSPINVLYFDDSSNVIYGKIPNMVVRS

SEQ ID NO: 21576 - protein, 35 aa, Artificial Sequence
  Non-cyclic GFR-binding peptide
  MOD_RES (1), (33), (35): Xaa is C or S
XVPARLSPINILYFDAANNVVYGKIPDMVVEAXGX

SEQ ID NO: 21577 - protein, 37 aa, Artificial Sequence
  Non-cyclic GFR-binding peptide
  MOD_RES (3), (4), (36): Xaa is C or S
KPXXAPTQLSPINVLYFDDSSNVIYGKIPNMVVRAXG

SEQ ID NO: 21578 - protein, 37 aa, Artificial Sequence
  Non-cyclic GFR-binding peptide
  MOD_RES (1), (2), (37): Xaa is C or S
  MOD_RES (16), (17), (18), (19), (20): Xaa is A or G
  MOD_RES (21), (22), (23), (24): Xaa is A or G or is absent
XXVPTKLSPINVLYFXXXXXXXXXYGKIPEGMSVAEX

SEQ ID NO: 21579 - protein, 33 aa, Artificial Sequence
  Non-cyclic GFR-binding peptide
  MOD_RES (1), (1): Xaa is C or S
  MOD_RES (15), (16), (17), (18), (19): Xaa is A or G
  MOD_RES (20), (21), (22), (23): Xaa is A or G or is absent
XVPTRLSPINILYFXXXXXXXXXYGKIPDMVVE

SEQ ID NO: 21580 - protein, 39 aa, Artificial Sequence
  Non-cyclic GFR-binding peptide
  MOD_RES (5), (6), (37), (39): Xaa is C or S
VPSTXXAPVKTSPINMLYFDNGRVLLYGKIPMIVEEXGX

SEQ ID NO: 21581 - protein, 34 aa, Artificial Sequence
  Non-cyclic GFR-binding peptide
  MOD_RES (3), (4): Xaa is C or S
KAXXAPTKLSPINVLYFDSSNNVIYGKIPNMVVK

SEQ ID NO: 21582 - protein, 37 aa, Artificial Sequence
  Non-cyclic GFR-binding peptide
  MOD_RES (1), (35), (37): Xaa is C or S
  MOD_RES (15), (16), (17), (18), (19): Xaa is A or G
  MOD_RES (20), (21), (22), (23): Xaa is A or G or is absent
XVPARLSPINILYFXXXXXXXXXYGKIPDMVVEAXGX

SEQ ID NO: 21583 - protein, 42 aa, Artificial Sequence
  Non-cyclic GFR-binding peptide
  MOD_RES (6), (7), (39), (41): Xaa is C or S
YVPKPXXAPTKLSPINVLYFDDSSNVIYGKIPNMVVRSXGXH

SEQ ID NO: 21584 - protein, 35 aa, Artificial Sequence
  Non-cyclic GFR-binding peptide
  MOD_RES (1), (1): Xaa is C or S
  MOD_RES (15), (16), (17), (18), (19): Xaa is A or G
  MOD_RES (20), (21), (22), (23): Xaa is A or G or is absent
XVPTKLSPINVLYFXXXXXXXXXYGKIPEGMSVAE

SEQ ID NO: 21585 - protein, 36 aa, Artificial Sequence
  Non-cyclic GFR-binding peptide
  MOD_RES (2), (3), (35): Xaa is C or S
TXXVPTRLSPINILYFDSANNVVYGKIPDMVVESXG

SEQ ID NO: 21586 - protein, 38 aa, Artificial Sequence
  Non-cyclic GFR-binding peptide
  MOD_RES (6), (7): Xaa is C or S
SIPKAXXVPTELSPINMLYFDEYDKVVYGKIPEMVVEG

SEQ ID NO: 21587 - protein, 38 aa, Artificial Sequence
  Non-cyclic GFR-binding peptide
  MOD_RES (1), (2), (36), (38): Xaa is C or S
  MOD_RES (16), (17), (18), (19), (20): Xaa is A or G
  MOD_RES (21), (22), (23), (24): Xaa is A or G or is absent
XXVPTELSPINMLYFXXXXXXXXXYGKIPEMVVEGXGX

SEQ ID NO: 21588 - protein, 36 aa, Artificial Sequence
  Non-cyclic GFR-binding peptide
  MOD_RES (1), (2), (36): Xaa is C or S
  MOD_RES (16), (17), (18), (19), (20): Xaa is A or G
  MOD_RES (21), (22), (23), (24): Xaa is A or G or is absent
XXAPTQLSPINVLYFXXXXXXXXXYGKIPNMVVRAX

SEQ ID NO: 21589 - protein, 36 aa, Artificial Sequence
  Non-cyclic GFR-binding peptide
  MOD_RES (5), (6): Xaa is C or S
VPKAXXAPTKLSPINVLYFDSSNNVIYGKIPNMVVK

SEQ ID NO: 21590 - protein, 43 aa, Artificial Sequence
  Non-cyclic GFR-binding peptide
  MOD_RES (6), (7), (41), (43): Xaa is C or S
  MOD_RES (21), (22), (23), (24), (25): Xaa is A or G
  MOD_RES (26), (27), (28), (29): Xaa is A or G or is absent
TVPKPXXAPTQLSPINVLYFXXXXXXXXXYGKIPNMVVRAXGX

SEQ ID NO: 21591 - protein, 37 aa, Artificial Sequence
  Non-cyclic GFR-binding peptide
  MOD_RES (4), (5): Xaa is C or S
  MOD_RES (19), (20), (21), (22), (23): Xaa is A or G
  MOD_RES (24), (25), (26), (27): Xaa is A or G or is absent
PKAXXAPTKLSPINVLYFXXXXXXXXXYGKIPNMVVK

SEQ ID NO: 21592 - protein, 35 aa, Artificial Sequence
  Non-cyclic GFR-binding peptide
  MOD_RES (1), (2): Xaa is C or S
  MOD_RES (16), (17), (18), (19), (20): Xaa is A or G
  MOD_RES (21), (22), (23), (24): Xaa is A or G or is absent
XXAPTKLSPINVLYFXXXXXXXXXYGKIPNMVVKA

SEQ ID NO: 21593 - protein, 31 aa, Artificial Sequence
  Non-cyclic GFR-binding peptide
APTKLSPINVLYFDSSNNVIYGKIPNMVVKA

SEQ ID NO: 21594 - protein, 41 aa, Artificial Sequence
  Non-cyclic GFR-binding peptide
  MOD_RES (3), (4), (38), (40): Xaa is C or S
  MOD_RES (18), (19), (20), (21), (22): Xaa is A or G
  MOD_RES (23), (24), (25), (26): Xaa is A or G or is absent
KAXXVPTELSPINMLYFXXXXXXXXXYGKIPEMVVEGXGXR

SEQ ID NO: 21595 - protein, 40 aa, Artificial Sequence
  Non-cyclic GFR-binding peptide
  MOD_RES (5), (6), (38), (40): Xaa is C or S
VPKPXXAPTQLSPINVLYFDDSSNVIYGKIPNMVVRAXGX

SEQ ID NO: 21596 - protein, 37 aa, Artificial Sequence
  Non-cyclic GFR-binding peptide
  MOD_RES (4), (5), (37): Xaa is C or S
PKPXXAPTKLSPINVLYFDDSSNVIYGKIPNMVVRSX

SEQ ID NO: 21597 - protein, 37 aa, Artificial Sequence
  Non-cyclic GFR-binding peptide
  MOD_RES (6), (7): Xaa is C or S
AAPASXXVPARLSPINILYFDAANNVVYGKIPDMVVE

SEQ ID NO: 21598 - protein, 34 aa, Artificial Sequence
  Non-cyclic GFR-binding peptide
  MOD_RES (2), (3), (34): Xaa is C or S
TXXAPVKTSPINMLYFDNGRVLLYGKIPMIVEEX

SEQ ID NO: 21599 - protein, 36 aa, Artificial Sequence
  Non-cyclic GFR-binding peptide
  MOD_RES (2), (3): Xaa is C or S
  MOD_RES (17), (18), (19), (20), (21): Xaa is A or G
  MOD_RES (22), (23), (24), (25): Xaa is A or G or is absent
TXXVPTRLSPINILYFXXXXXXXXXYGKIPDMVVES

SEQ ID NO: 21600 - protein, 31 aa, Artificial Sequence
  Non-cyclic GFR-binding peptide
  MOD_RES (1), (1): Xaa is C or S
XAPTKLSPINVLYFDDSSNVIYGKIPNMVVR

SEQ ID NO: 21601 - protein, 41 aa, Artificial Sequence
  Non-cyclic GFR-binding peptide
  MOD_RES (6), (7), (40): Xaa is C or S
KVGKAXXVPTKLSPINVLYFDDMGVPTYGKIPEGMSVAEXG

SEQ ID NO: 21602 - protein, 37 aa, Artificial Sequence
  Non-cyclic GFR-binding peptide
  MOD_RES (2), (3): Xaa is C or S
  MOD_RES (17), (18), (19), (20), (21): Xaa is A or G
  MOD_RES (22), (23), (24), (25): Xaa is A or G or is absent
AXXVPTKLSPINVLYFXXXXXXXXXYGKIPEGMSVAE

SEQ ID NO: 21603 - protein, 37 aa, Artificial Sequence
  Non-cyclic GFR-binding peptide
  MOD_RES (1), (2), (36): Xaa is C or S
  MOD_RES (16), (17), (18), (19), (20): Xaa is A or G
  MOD_RES (21), (22), (23), (24): Xaa is A or G or is absent
XXAPTKLSPINVLYFXXXXXXXXXYGKIPNMVVRSXG

SEQ ID NO: 21604 - protein, 32 aa, Artificial Sequence
  Non-cyclic GFR-binding peptide
  MOD_RES (1), (2): Xaa is C or S
XXVPTRLSPINILYFDSANNVVYGKIPDMVVE

SEQ ID NO: 21605 - protein, 34 aa, Artificial Sequence
  Non-cyclic GFR-binding peptide
  MOD_RES (1), (2): Xaa is C or S
  MOD_RES (16), (17), (18), (19), (20): Xaa is A or G
  MOD_RES (21), (22), (23), (24): Xaa is A or G or is absent
XXVPARLSPINILYFXXXXXXXXXYGKIPDMVVE

SEQ ID NO: 21606 - protein, 38 aa, Artificial Sequence
  Non-cyclic GFR-binding peptide
  MOD_RES (2), (3), (36), (38): Xaa is C or S
AXXVPTKLSPINVLYFDDMGVPTYGKIPEGMSVAEXGX

SEQ ID NO: 21607 - protein, 36 aa, Artificial Sequence
  Non-cyclic GFR-binding peptide
  MOD_RES (2), (3), (35): Xaa is C or S
PXXAPTKLSPINVLYFDDSSNVIYGKIPNMVVRSXG

SEQ ID NO: 21608 - protein, 34 aa, Artificial Sequence
  Non-cyclic GFR-binding peptide
  MOD_RES (3), (4): Xaa is C or S
KAXXVPTKLSPINILYFDKGVVTYYGKIPGMAVS

SEQ ID NO: 21609 - protein, 43 aa, Artificial Sequence
  Non-cyclic GFR-binding peptide
  MOD_RES (5), (6), (40), (42): Xaa is C or S
  MOD_RES (20), (21), (22), (23), (24): Xaa is A or G
  MOD_RES (25), (26), (27), (28): Xaa is A or G or is absent
TPPTXXVPTRLSPINILYFXXXXXXXXXYGKIPDMVVESXGXR

SEQ ID NO: 21610 - protein, 32 aa, Artificial Sequence
  Non-cyclic GFR-binding peptide
  MOD_RES (1), (2): Xaa is C or S
XXVPARLSPINILYFDAANNVVYGKIPDMVVE

SEQ ID NO: 21611 - protein, 36 aa, Artificial Sequence
  Non-cyclic GFR-binding peptide
  MOD_RES (1), (2), (34), (36): Xaa is C or S
XXVPTRLSPINILYFDSANNVVYGKIPDMVVESXGX

SEQ ID NO: 21612 - protein, 37 aa, Artificial Sequence
  Non-cyclic GFR-binding peptide
  MOD_RES (4), (4): Xaa is C or S
  MOD_RES (18), (19), (20), (21), (22): Xaa is A or G
  MOD_RES (23), (24), (25), (26): Xaa is A or G or is absent
KPTXAPTKLSPINVLYFXXXXXXXXXYGKIPNMVVRS

SEQ ID NO: 21613 - protein, 38 aa, Artificial Sequence
  Non-cyclic GFR-binding peptide
  MOD_RES (5), (6), (38): Xaa is C or S
ASKAXXVPTKLSPINILYFDKGVVTYYGKIPGMAVSEX

SEQ ID NO: 21614 - protein, 38 aa, Artificial Sequence
  Non-cyclic GFR-binding peptide
  MOD_RES (3), (4), (38): Xaa is C or S
  MOD_RES (18), (19), (20), (21), (22): Xaa is A or G
  MOD_RES (23), (24), (25), (26): Xaa is A or G or is absent
KAXXVPTELSPINMLYFXXXXXXXXXYGKIPDMVVEGX

SEQ ID NO: 21615 - protein, 37 aa, Artificial Sequence
  Non-cyclic GFR-binding peptide
  MOD_RES (2), (3), (35), (37): Xaa is C or S
PXXAPTQLSPINVLYFDDSSNVIYGKIPNMVVRAXGX

SEQ ID NO: 21616 - protein, 38 aa, Artificial Sequence
  Non-cyclic GFR-binding peptide
  MOD_RES (5), (6): Xaa is C or S
  MOD_RES (20), (21), (22), (23), (24): Xaa is A or G
  MOD_RES (25), (26), (27), (28): Xaa is A or G or is absent
VPKPXXAPTQLSPINVLYFXXXXXXXXXYGKIPNMVVR

SEQ ID NO: 21617 - protein, 35 aa, Artificial Sequence
  Non-cyclic GFR-binding peptide
  MOD_RES (1), (2): Xaa is C or S
  MOD_RES (16), (17), (18), (19), (20): Xaa is A or G
  MOD_RES (21), (22), (23), (24): Xaa is A or G or is absent
XXVPTELSPINMLYFXXXXXXXXXYGKIPDMVVEG

SEQ ID NO: 21618 - protein, 33 aa, Artificial Sequence
  Non-cyclic GFR-binding peptide
  MOD_RES (14), (15), (16), (17), (18): Xaa is A or G
  MOD_RES (19), (20), (21), (22): Xaa is A or G or is absent
VPARLSPINILYFXXXXXXXXXYGKIPDMVVEA

SEQ ID NO: 21619 - protein, 34 aa, Artificial Sequence
  Non-cyclic GFR-binding peptide
  MOD_RES (3), (4): Xaa is C or S
PTXXVPTRLSPINILYFDSANNVVYGKIPDMVVE

SEQ ID NO: 21620 - protein, 36 aa, Artificial Sequence
  Non-cyclic GFR-binding peptide
  MOD_RES (3), (4): Xaa is C or S
  MOD_RES (18), (19), (20), (21), (22): Xaa is A or G
  MOD_RES (23), (24), (25), (26): Xaa is A or G or is absent
ASXXVPARLSPINILYFXXXXXXXXXYGKIPDMVVE

SEQ ID NO: 21621 - protein, 40 aa, Artificial Sequence
  Non-cyclic GFR-binding peptide
  MOD_RES (5), (37), (39): Xaa is C or S
TKPTXAPTKLSPINVLYFDDSSNVIYGKIPNMVVRSXGXH

SEQ ID NO: 21622 - protein, 39 aa, Artificial Sequence
  Non-cyclic GFR-binding peptide
  MOD_RES (4), (5), (37), (39): Xaa is C or S
PKAXXAPTKLSPINVLYFDSSNNVIYGKIPNMVVKAXGX

SEQ ID NO: 21623 - protein, 42 aa, Artificial Sequence
  Non-cyclic GFR-binding peptide
  MOD_RES (4), (5), (40), (42): Xaa is C or S
  MOD_RES (19), (20), (21), (22), (23): Xaa is A or G
  MOD_RES (24), (25), (26), (27): Xaa is A or G or is absent
GKAXXVPTKLSPINVLYFXXXXXXXXXYGKIPEGMSVAEXGX

SEQ ID NO: 21624 - protein, 39 aa, Artificial Sequence
  Non-cyclic GFR-binding peptide
  MOD_RES (5), (6): Xaa is C or S
  MOD_RES (20), (21), (22), (23), (24): Xaa is A or G
  MOD_RES (25), (26), (27), (28): Xaa is A or G or is absent
IPKAXXVPTELSPINMLYFXXXXXXXXXYGKIPEMVVEG

SEQ ID NO: 21625 - protein, 34 aa, Artificial Sequence
  Non-cyclic GFR-binding peptide
  MOD_RES (1), (2): Xaa is C or S
  MOD_RES (16), (17), (18), (19), (20): Xaa is A or G
  MOD_RES (21), (22), (23), (24): Xaa is A or G or is absent
XXVPTRLSPINILYFXXXXXXXXXYGKIPDMVVE

SEQ ID NO: 21626 - protein, 37 aa, Artificial Sequence
  Non-cyclic GFR-binding peptide
  MOD_RES (3), (4): Xaa is C or S
  MOD_RES (18), (19), (20), (21), (22): Xaa is A or G
  MOD_RES (23), (24), (25), (26): Xaa is A or G or is absent
KAXXVPTELSPINMLYFXXXXXXXXXYGKIPEMVVEG

SEQ ID NO: 21627 - protein, 34 aa, Artificial Sequence
  Non-cyclic GFR-binding peptide
  MOD_RES (2), (3): Xaa is C or S
AXXVPTELSPINMLYFDEYDKVVYGKIPEMVVEG

SEQ ID NO: 21628 - protein, 38 aa, Artificial Sequence
  Non-cyclic GFR-binding peptide
  MOD_RES (2), (3), (35), (37): Xaa is C or S
TXXVPTRLSPINILYFDSANNVVYGKIPDMVVESXGXR

SEQ ID NO: 21629 - protein, 33 aa, Artificial Sequence
  Non-cyclic GFR-binding peptide
  MOD_RES (2), (3): Xaa is C or S
PXXAPTKLSPINVLYFDDSSNVIYGKIPNMVVR

SEQ ID NO: 21630 - protein, 38 aa, Artificial Sequence
  Non-cyclic GFR-binding peptide
  MOD_RES (1), (35), (37): Xaa is C or S
  MOD_RES (15), (16), (17), (18), (19): Xaa is A or G
  MOD_RES (20), (21), (22), (23): Xaa is A or G or is absent
XVPTKLSPINILYFXXXXXXXXXYGKIPGMAVSEXGXR

SEQ ID NO: 21631 - protein, 33 aa, Artificial Sequence
  Non-cyclic GFR-binding peptide
  MOD_RES (32), (32): Xaa is C or S
APTKLSPINVLYFDSSNNVIYGKIPNMVVKAXG

SEQ ID NO: 21632 - protein, 37 aa, Artificial Sequence
  Non-cyclic GFR-binding peptide
  MOD_RES (2), (3), (37): Xaa is C or S
  MOD_RES (17), (18), (19), (20), (21): Xaa is A or G
  MOD_RES (22), (23), (24), (25): Xaa is A or G or is absent
PXXAPTKLSPINVLYFXXXXXXXXXYGKIPNMVVRSX

SEQ ID NO: 21633 - protein, 39 aa, Artificial Sequence
  Non-cyclic GFR-binding peptide
  MOD_RES (1), (2), (36), (38): Xaa is C or S
  MOD_RES (16), (17), (18), (19), (20): Xaa is A or G
  MOD_RES (21), (22), (23), (24): Xaa is A or G or is absent
XXVPTELSPINMLYFXXXXXXXXXYGKIPEMVVEGXGXR

SEQ ID NO: 21634 - protein, 41 aa, Artificial Sequence
  Non-cyclic GFR-binding peptide
  MOD_RES (3), (4), (38), (40): Xaa is C or S
  MOD_RES (18), (19), (20), (21), (22): Xaa is A or G
  MOD_RES (23), (24), (25), (26): Xaa is A or G or is absent
ASXXVPARLSPINILYFXXXXXXXXXYGKIPDMVVEAXGXR

SEQ ID NO: 21635 - protein, 40 aa, Artificial Sequence
  Non-cyclic GFR-binding peptide
  MOD_RES (2), (3), (38), (40): Xaa is C or S
  MOD_RES (17), (18), (19), (20), (21): Xaa is A or G
  MOD_RES (22), (23), (24), (25): Xaa is A or G or is absent
AXXVPTKLSPINVLYFXXXXXXXXXYGKIPEGMSVAEXGX

SEQ ID NO: 21636 - protein, 39 aa, Artificial Sequence
  Non-cyclic GFR-binding peptide
  MOD_RES (4), (5), (37), (39): Xaa is C or S
PKAXXVPTELSPINMLYFDENEKVVYGKIPDMVVEGXGX

SEQ ID NO: 21637 - protein, 33 aa, Artificial Sequence
  Non-cyclic GFR-binding peptide
  MOD_RES (32), (32): Xaa is C or S
VPARLSPINILYFDAANNVVYGKIPDMVVEAXG

SEQ ID NO: 21638 - protein, 35 aa, Artificial Sequence
  Non-cyclic GFR-binding peptide
  MOD_RES (34), (34): Xaa is C or S
  MOD_RES (14), (15), (16), (17), (18): Xaa is A or G
  MOD_RES (19), (20), (21), (22): Xaa is A or G or is absent
VPTKLSPINILYFXXXXXXXXXYGKIPGMAVSEXG

SEQ ID NO: 21639 - protein, 33 aa, Artificial Sequence
  Non-cyclic GFR-binding peptide
  MOD_RES (32), (32): Xaa is C or S
APTKLSPINVLYFDDSSNVIYGKIPNMVVRSXG

SEQ ID NO: 21640 - protein, 39 aa, Artificial Sequence
  Non-cyclic GFR-binding peptide
  MOD_RES (2), (3), (37), (39): Xaa is C or S
  MOD_RES (17), (18), (19), (20), (21): Xaa is A or G
  MOD_RES (22), (23), (24), (25): Xaa is A or G or is absent
TXXVPTRLSPINILYFXXXXXXXXXYGKIPDMVVESXGX

SEQ ID NO: 21641 - protein, 37 aa, Artificial Sequence
  Non-cyclic GFR-binding peptide
  MOD_RES (2), (3), (37): Xaa is C or S
  MOD_RES (17), (18), (19), (20), (21): Xaa is A or G
  MOD_RES (22), (23), (24), (25): Xaa is A or G or is absent
AXXVPTELSPINMLYFXXXXXXXXXYGKIPDMVVEGX

SEQ ID NO: 21642 - protein, 33 aa, Artificial Sequence
  Non-cyclic GFR-binding peptide
  MOD_RES (1), (33): Xaa is C or S
XVPTKLSPINILYFDKGVVTYYGKIPGMAVSEX

SEQ ID NO: 21643 - protein, 36 aa, Artificial Sequence
  Non-cyclic GFR-binding peptide
  MOD_RES (1), (2), (36): Xaa is C or S
  MOD_RES (16), (17), (18), (19), (20): Xaa is A or G
  MOD_RES (21), (22), (23), (24): Xaa is A or G or is absent
XXVPTELSPINMLYFXXXXXXXXXYGKIPDMVVEGX

SEQ ID NO: 21644 - protein, 35 aa, Artificial Sequence
  Non-cyclic GFR-binding peptide
  MOD_RES (2), (3): Xaa is C or S
AXXVPTKLSPINVLYFDDMGVPTYGKIPEGMSVAE

SEQ ID NO: 21645 - protein, 42 aa, Artificial Sequence
  Non-cyclic GFR-binding peptide
  MOD_RES (6), (7), (42): Xaa is C or S
  MOD_RES (21), (22), (23), (24), (25): Xaa is A or G
  MOD_RES (26), (27), (28), (29): Xaa is A or G or is absent
KVGKAXXVPTKLSPINVLYFXXXXXXXXXYGKIPEGMSVAEX

SEQ ID NO: 21646 - protein, 39 aa, Artificial Sequence
  Non-cyclic GFR-binding peptide
  MOD_RES (4), (5), (37), (39): Xaa is C or S
PPTXXVPTRLSPINILYFDSANNVVYGKIPDMVVESXGX

SEQ ID NO: 21647 - protein, 38 aa, Artificial Sequence
  Non-cyclic GFR-binding peptide
  MOD_RES (5), (6): Xaa is C or S
  MOD_RES (20), (21), (22), (23), (24): Xaa is A or G
  MOD_RES (25), (26), (27), (28): Xaa is A or G or is absent
APASXXVPARLSPINILYFXXXXXXXXXYGKIPDMVVE

SEQ ID NO: 21648 - protein, 37 aa, Artificial Sequence
  Non-cyclic GFR-binding peptide
  MOD_RES (1), (2), (36): Xaa is C or S
  MOD_RES (16), (17), (18), (19), (20): Xaa is A or G
  MOD_RES (21), (22), (23), (24): Xaa is A or G or is absent
XXVPTELSPINMLYFXXXXXXXXXYGKIPDMVVEGXG

SEQ ID NO: 21649 - protein, 38 aa, Artificial Sequence
  Non-cyclic GFR-binding peptide
  MOD_RES (4), (5): Xaa is C or S
  MOD_RES (19), (20), (21), (22), (23): Xaa is A or G
  MOD_RES (24), (25), (26), (27): Xaa is A or G or is absent
PKPXXAPTKLSPINVLYFXXXXXXXXXYGKIPNMVVRS

SEQ ID NO: 21650 - protein, 33 aa, Artificial Sequence
  Non-cyclic GFR-binding peptide
  MOD_RES (32), (32): Xaa is C or S
VPTRLSPINILYFDSANNVVYGKIPDMVVESXG

SEQ ID NO: 21651 - protein, 35 aa, Artificial Sequence
  Non-cyclic GFR-binding peptide
  MOD_RES (3), (4): Xaa is C or S
ASXXVPARLSPINILYFDAANNVVYGKIPDMVVEA

SEQ ID NO: 21652 - protein, 35 aa, Artificial Sequence
  Non-cyclic GFR-binding peptide
  MOD_RES (1), (2), (33), (35): Xaa is C or S
XXAPVKTSPINMLYFDNGRVLLYGKIPMIVEEXGX

SEQ ID NO: 21653 - protein, 42 aa, Artificial Sequence
  Non-cyclic GFR-binding peptide
  MOD_RES (6), (7), (39), (41): Xaa is C or S
KASKAXXVPTKLSPINILYFDKGVVTYYGKIPGMAVSEXGXR

SEQ ID NO: 21654 - protein, 35 aa, Artificial Sequence
  Non-cyclic GFR-binding peptide
  MOD_RES (2), (3): Xaa is C or S
  MOD_RES (17), (18), (19), (20), (21): Xaa is A or G
  MOD_RES (22), (23), (24), (25): Xaa is A or G or is absent
TXXAPVKTSPINMLYFXXXXXXXXXYGKIPMIVEE

SEQ ID NO: 21655 - protein, 39 aa, Artificial Sequence
  Non-cyclic GFR-binding peptide
  MOD_RES (2), (3), (37), (39): Xaa is C or S
  MOD_RES (17), (18), (19), (20), (21): Xaa is A or G
  MOD_RES (22), (23), (24), (25): Xaa is A or G or is absent
AXXAPTKLSPINVLYFXXXXXXXXXYGKIPNMVVKAXGX

SEQ ID NO: 21656 - protein, 33 aa, Artificial Sequence
  Non-cyclic GFR-binding peptide
  MOD_RES (1), (2): Xaa is C or S
XXVPTELSPINMLYFDENEKVVYGKIPDMVVEG

SEQ ID NO: 21657 - protein, 38 aa, Artificial Sequence
  Non-cyclic GFR-binding peptide
  MOD_RES (4), (5): Xaa is C or S
  MOD_RES (19), (20), (21), (22), (23): Xaa is A or G
  MOD_RES (24), (25), (26), (27): Xaa is A or G or is absent
PKAXXVPTELSPINMLYFXXXXXXXXXYGKIPDMVVEG

SEQ ID NO: 21658 - protein, 35 aa, Artificial Sequence
  Non-cyclic GFR-binding peptide
  MOD_RES (1), (33), (35): Xaa is C or S
XVPTELSPINMLYFDENEKVVYGKIPDMVVEGXGX

SEQ ID NO: 21659 - protein, 40 aa, Artificial Sequence
  Non-cyclic GFR-binding peptide
  MOD_RES (4), (5), (37), (39): Xaa is C or S
PKPXXAPTQLSPINVLYFDDSSNVIYGKIPNMVVRAXGXH

SEQ ID NO: 21660 - protein, 41 aa, Artificial Sequence
  Non-cyclic GFR-binding peptide
  MOD_RES (6), (7), (39), (41): Xaa is C or S
KASKAXXVPTKLSPINILYFDKGVVTYYGKIPGMAVSEXGX

SEQ ID NO: 21661 - protein, 32 aa, Artificial Sequence
  Non-cyclic GFR-binding peptide
  MOD_RES (1), (2): Xaa is C or S
XXAPTKLSPINVLYFDDSSNVIYGKIPNMVVR

SEQ ID NO: 21662 - protein, 43 aa, Artificial Sequence
  Non-cyclic GFR-binding peptide
  MOD_RES (6), (7), (41), (43): Xaa is C or S
  MOD_RES (21), (22), (23), (24), (25): Xaa is A or G
  MOD_RES (26), (27), (28), (29): Xaa is A or G or is absent
STPPTXXVPTRLSPINILYFXXXXXXXXXYGKIPDMVVESXGX

SEQ ID NO: 21663 - protein, 38 aa, Artificial Sequence
  Non-cyclic GFR-binding peptide
  MOD_RES (3), (4), (36), (38): Xaa is C or S
KAXXVPTKLSPINILYFDKGVVTYYGKIPGMAVSEXGX

SEQ ID NO: 21664 - protein, 38 aa, Artificial Sequence
  Non-cyclic GFR-binding peptide
  MOD_RES (6), (7): Xaa is C or S
AAPASXXVPARLSPINILYFDAANNVVYGKIPDMVVEA

SEQ ID NO: 21665 - protein, 44 aa, Artificial Sequence
  Non-cyclic GFR-binding peptide
  MOD_RES (6), (7), (41), (43): Xaa is C or S
  MOD_RES (21), (22), (23), (24), (25): Xaa is A or G
  MOD_RES (26), (27), (28), (29): Xaa is A or G or is absent
STPPTXXVPTRLSPINILYFXXXXXXXXXYGKIPDMVVESXGXR

SEQ ID NO: 21666 - protein, 41 aa, Artificial Sequence
  Non-cyclic GFR-binding peptide
  MOD_RES (5), (6), (38), (40): Xaa is C or S
TPPTXXVPTRLSPINILYFDSANNVVYGKIPDMVVESXGXR

SEQ ID NO: 21667 - protein, 36 aa, Artificial Sequence
  Non-cyclic GFR-binding peptide
  MOD_RES (33), (35): Xaa is C or S
VPTKLSPINVLYFDDMGVPTYGKIPEGMSVAEXGXR

SEQ ID NO: 21668 - protein, 41 aa, Artificial Sequence
  Non-cyclic GFR-binding peptide
  MOD_RES (6), (7), (39), (41): Xaa is C or S
TVPKPXXAPTQLSPINVLYFDDSSNVIYGKIPNMVVRAXGX

SEQ ID NO: 21669 - protein, 33 aa, Artificial Sequence
  Non-cyclic GFR-binding peptide
  MOD_RES (1), (1): Xaa is C or S
  MOD_RES (15), (16), (17), (18), (19): Xaa is A or G
  MOD_RES (20), (21), (22), (23): Xaa is A or G or is absent
XAPTQLSPINVLYFXXXXXXXXXYGKIPNMVVR

SEQ ID NO: 21670 - protein, 35 aa, Artificial Sequence
  Non-cyclic GFR-binding peptide
  MOD_RES (2), (3), (34): Xaa is C or S
TXXAPVKTSPINMLYFDNGRVLLYGKIPMIVEEXG

SEQ ID NO: 21671 - protein, 34 aa, Artificial Sequence
  Non-cyclic GFR-binding peptide
  MOD_RES (1), (2), (34): Xaa is C or S
XXVPTRLSPINILYFDSANNVVYGKIPDMVVESX

SEQ ID NO: 21672 - protein, 35 aa, Artificial Sequence
  Non-cyclic GFR-binding peptide
  MOD_RES (3), (4): Xaa is C or S
KAXXVPTKLSPINILYFDKGVVTYYGKIPGMAVSE

SEQ ID NO: 21673 - protein, 43 aa, Artificial Sequence
  Non-cyclic GFR-binding peptide
  MOD_RES (6), (7), (42): Xaa is C or S
  MOD_RES (21), (22), (23), (24), (25): Xaa is A or G
  MOD_RES (26), (27), (28), (29): Xaa is A or G or is absent
KVGKAXXVPTKLSPINVLYFXXXXXXXXXYGKIPEGMSVAEXG

SEQ ID NO: 21674 - protein, 43 aa, Artificial Sequence
  Non-cyclic GFR-binding peptide
  MOD_RES (5), (6), (40), (42): Xaa is C or S
  MOD_RES (20), (21), (22), (23), (24): Xaa is A or G
  MOD_RES (25), (26), (27), (28): Xaa is A or G or is absent
VPKPXXAPTQLSPINVLYFXXXXXXXXXYGKIPNMVVRAXGXH

SEQ ID NO: 21675 - protein, 40 aa, Artificial Sequence
  Non-cyclic GFR-binding peptide
  MOD_RES (5), (6), (38), (40): Xaa is C or S
TPPTXXVPTRLSPINILYFDSANNVVYGKIPDMVVESXGX

SEQ ID NO: 21676 - protein, 33 aa, Artificial Sequence
  Non-cyclic GFR-binding peptide
  MOD_RES (1), (1): Xaa is C or S
XVPTKLSPINVLYFDDMGVPTYGKIPEGMSVAE

SEQ ID NO: 21677 - protein, 38 aa, Artificial Sequence
  Non-cyclic GFR-binding peptide
  MOD_RES (6), (6): Xaa is C or S
  MOD_RES (20), (21), (22), (23), (24): Xaa is A or G
  MOD_RES (25), (26), (27), (28): Xaa is A or G or is absent
VTKPTXAPTKLSPINVLYFXXXXXXXXXYGKIPNMVVR

SEQ ID NO: 21678 - protein, 44 aa, Artificial Sequence
  Non-cyclic GFR-binding peptide
  MOD_RES (6), (7), (42), (44): Xaa is C or S
  MOD_RES (21), (22), (23), (24), (25): Xaa is A or G
  MOD_RES (26), (27), (28), (29): Xaa is A or G or is absent
KVGKAXXVPTKLSPINVLYFXXXXXXXXXYGKIPEGMSVAEXGX

SEQ ID NO: 21679 - protein, 38 aa, Artificial Sequence
  Non-cyclic GFR-binding peptide
  MOD_RES (4), (5), (37): Xaa is C or S
SKAXXVPTKLSPINILYFDKGVVTYYGKIPGMAVSEXG

SEQ ID NO: 21680 - protein, 39 aa, Artificial Sequence
  Non-cyclic GFR-binding peptide
  MOD_RES (4), (5): Xaa is C or S
  MOD_RES (19), (20), (21), (22), (23): Xaa is A or G
  MOD_RES (24), (25), (26), (27): Xaa is A or G or is absent
GKAXXVPTKLSPINVLYFXXXXXXXXXYGKIPEGMSVAE

SEQ ID NO: 21681 - protein, 41 aa, Artificial Sequence
  Non-cyclic GFR-binding peptide
  MOD_RES (6), (7), (41): Xaa is C or S
  MOD_RES (21), (22), (23), (24), (25): Xaa is A or G
  MOD_RES (26), (27), (28), (29): Xaa is A or G or is absent
YVPKPXXAPTKLSPINVLYFXXXXXXXXXYGKIPNMVVRSX

SEQ ID NO: 21682 - protein, 41 aa, Artificial Sequence
  Non-cyclic GFR-binding peptide
  MOD_RES (6), (7), (41): Xaa is C or S
  MOD_RES (21), (22), (23), (24), (25): Xaa is A or G
  MOD_RES (26), (27), (28), (29): Xaa is A or G or is absent
AAPASXXVPARLSPINILYFXXXXXXXXXYGKIPDMVVEAX

SEQ ID NO: 21683 - protein, 33 aa, Artificial Sequence
  Non-cyclic GFR-binding peptide
  MOD_RES (1), (33): Xaa is C or S
XAPTQLSPINVLYFDDSSNVIYGKIPNMVVRAX

SEQ ID NO: 21684 - protein, 34 aa, Artificial Sequence
  Non-cyclic GFR-binding peptide
  MOD_RES (34), (34): Xaa is C or S
  MOD_RES (14), (15), (16), (17), (18): Xaa is A or G
  MOD_RES (19), (20), (21), (22): Xaa is A or G or is absent
APTKLSPINVLYFXXXXXXXXXYGKIPNMVVKAX

SEQ ID NO: 21685 - protein, 33 aa, Artificial Sequence
  Non-cyclic GFR-binding peptide
  MOD_RES (33), (33): Xaa is C or S
  MOD_RES (14), (15), (16), (17), (18): Xaa is A or G
  MOD_RES (19), (20), (21), (22): Xaa is A or G or is absent
APVKTSPINMLYFXXXXXXXXXYGKIPMIVEEX

SEQ ID NO: 21686 - protein, 35 aa, Artificial Sequence
  Non-cyclic GFR-binding peptide
  MOD_RES (32), (34): Xaa is C or S
VPTRLSPINILYFDSANNVVYGKIPDMVVESXGXR

SEQ ID NO: 21687 - protein, 39 aa, Artificial Sequence
  Non-cyclic GFR-binding peptide
  MOD_RES (3), (4), (37), (39): Xaa is C or S
KAXXVPTKLSPINVLYFDDMGVPTYGKIPEGMSVAEXGX

SEQ ID NO: 21688 - protein, 34 aa, Artificial Sequence
  Non-cyclic GFR-binding peptide
  MOD_RES (2), (3): Xaa is C or S
AXXAPTKLSPINVLYFDSSNNVIYGKIPNMVVKA

SEQ ID NO: 21689 - protein, 32 aa, Artificial Sequence
  Non-cyclic GFR-binding peptide
  MOD_RES (1), (1): Xaa is C or S
XAPTQLSPINVLYFDDSSNVIYGKIPNMVVRA

SEQ ID NO: 21690 - protein, 39 aa, Artificial Sequence
  Non-cyclic GFR-binding peptide
  MOD_RES (4), (5), (37), (39): Xaa is C or S
PKAXXVPTELSPINMLYFDEYDKVVYGKIPEMVVEGXGX

SEQ ID NO: 21691 - protein, 38 aa, Artificial Sequence
  Non-cyclic GFR-binding peptide
  MOD_RES (5), (6): Xaa is C or S
  MOD_RES (20), (21), (22), (23), (24): Xaa is A or G
  MOD_RES (25), (26), (27), (28): Xaa is A or G or is absent
ASKAXXVPTKLSPINILYFXXXXXXXXXYGKIPGMAVS

SEQ ID NO: 21692 - protein, 42 aa, Artificial Sequence
  Non-cyclic GFR-binding peptide
  MOD_RES (5), (6), (40), (42): Xaa is C or S
  MOD_RES (20), (21), (22), (23), (24): Xaa is A or G
  MOD_RES (25), (26), (27), (28): Xaa is A or G or is absent
IPKAXXVPTELSPINMLYFXXXXXXXXXYGKIPEMVVEGXGX

SEQ ID NO: 21693 - protein, 36 aa, Artificial Sequence
  Non-cyclic GFR-binding peptide
  MOD_RES (3), (4), (36): Xaa is C or S
PTXXVPTRLSPINILYFDSANNVVYGKIPDMVVESX

SEQ ID NO: 21694 - protein, 41 aa, Artificial Sequence
  Non-cyclic GFR-binding peptide
  MOD_RES (5), (6), (41): Xaa is C or S
  MOD_RES (20), (21), (22), (23), (24): Xaa is A or G
  MOD_RES (25), (26), (27), (28): Xaa is A or G or is absent
VGKAXXVPTKLSPINVLYFXXXXXXXXXYGKIPEGMSVAEX

SEQ ID NO: 21695 - protein, 34 aa, Artificial Sequence
  Non-cyclic GFR-binding peptide
  MOD_RES (1), (2): Xaa is C or S
  MOD_RES (16), (17), (18), (19), (20): Xaa is A or G
  MOD_RES (21), (22), (23), (24): Xaa is A or G or is absent
XXVPTKLSPINILYFXXXXXXXXXYGKIPGMAVS

SEQ ID NO: 21696 - protein, 32 aa, Artificial Sequence
  Non-cyclic GFR-binding peptide
  MOD_RES (1), (2): Xaa is C or S
XXVPTKLSPINILYFDKGVVTYYGKIPGMAVS

SEQ ID NO: 21697 - protein, 38 aa, Artificial Sequence
  Non-cyclic GFR-binding peptide
  MOD_RES (2), (3), (35), (37): Xaa is C or S
AXXAPTKLSPINVLYFDSSNNVIYGKIPNMVVKAXGXH

SEQ ID NO: 21698 - protein, 37 aa, Artificial Sequence
  Non-cyclic GFR-binding peptide
  MOD_RES (1), (2), (36): Xaa is C or S
  MOD_RES (16), (17), (18), (19), (20): Xaa is A or G
  MOD_RES (21), (22), (23), (24): Xaa is A or G or is absent
XXAPTKLSPINVLYFXXXXXXXXXYGKIPNMVVKAXG

SEQ ID NO: 21699 - protein, 36 aa, Artificial Sequence
  Non-cyclic GFR-binding peptide
  MOD_RES (4), (5): Xaa is C or S
PASXXVPARLSPINILYFDAANNVVYGKIPDMVVEA

SEQ ID NO: 21700 - protein, 31 aa, Artificial Sequence
  Non-cyclic GFR-binding peptide
  MOD_RES (31), (31): Xaa is C or S
APVKTSPINMLYFDNGRVLLYGKIPMIVEEX

SEQ ID NO: 21701 - protein, 34 aa, Artificial Sequence
  Non-cyclic GFR-binding peptide
  MOD_RES (31), (33): Xaa is C or S
APVKTSPINMLYFDNGRVLLYGKIPMIVEEXGXL

SEQ ID NO: 21702 - protein, 40 aa, Artificial Sequence
  Non-cyclic GFR-binding peptide
  MOD_RES (3), (4), (38), (40): Xaa is C or S
  MOD_RES (18), (19), (20), (21), (22): Xaa is A or G
  MOD_RES (23), (24), (25), (26): Xaa is A or G or is absent
KAXXVPTELSPINMLYFXXXXXXXXXYGKIPDMVVEGXGX

SEQ ID NO: 21703 - protein, 39 aa, Artificial Sequence
  Non-cyclic GFR-binding peptide
  MOD_RES (6), (7), (39): Xaa is C or S
AVPKAXXAPTKLSPINVLYFDSSNNVIYGKIPNMVVKAX

SEQ ID NO: 21704 - protein, 35 aa, Artificial Sequence
  Non-cyclic GFR-binding peptide
  MOD_RES (2), (3): Xaa is C or S
  MOD_RES (17), (18), (19), (20), (21): Xaa is A or G
  MOD_RES (22), (23), (24), (25): Xaa is A or G or is absent
AXXVPTELSPINMLYFXXXXXXXXXYGKIPEMVVE

SEQ ID NO: 21705 - protein, 42 aa, Artificial Sequence
  Non-cyclic GFR-binding peptide
  MOD_RES (6), (7), (39), (41): Xaa is C or S
STPPTXXVPTRLSPINILYFDSANNVVYGKIPDMVVESXGXR

SEQ ID NO: 21706 - protein, 41 aa, Artificial Sequence
  Non-cyclic GFR-binding peptide
  MOD_RES (5), (6), (38), (40): Xaa is C or S
ASKAXXVPTKLSPINILYFDKGVVTYYGKIPGMAVSEXGXR

SEQ ID NO: 21707 - protein, 39 aa, Artificial Sequence
  Non-cyclic GFR-binding peptide
  MOD_RES (1), (2), (36), (38): Xaa is C or S
  MOD_RES (16), (17), (18), (19), (20): Xaa is A or G
  MOD_RES (21), (22), (23), (24): Xaa is A or G or is absent
XXVPTRLSPINILYFXXXXXXXXXYGKIPDMVVESXGXR

SEQ ID NO: 21708 - protein, 37 aa, Artificial Sequence
  Non-cyclic GFR-binding peptide
  MOD_RES (1), (2), (36): Xaa is C or S
  MOD_RES (16), (17), (18), (19), (20): Xaa is A or G
  MOD_RES (21), (22), (23), (24): Xaa is A or G or is absent
XXAPTQLSPINVLYFXXXXXXXXXYGKIPNMVVRAXG

SEQ ID NO: 21709 - protein, 39 aa, Artificial Sequence
  Non-cyclic GFR-binding peptide
  MOD_RES (3), (4), (38): Xaa is C or S
  MOD_RES (18), (19), (20), (21), (22): Xaa is A or G
  MOD_RES (23), (24), (25), (26): Xaa is A or G or is absent
ASXXVPARLSPINILYFXXXXXXXXXYGKIPDMVVEAXG

SEQ ID NO: 21710 - protein, 37 aa, Artificial Sequence
  Non-cyclic GFR-binding peptide
  MOD_RES (4), (5), (37): Xaa is C or S
PKAXXVPTELSPINMLYFDENEKVVYGKIPDMVVEGX

SEQ ID NO: 21711 - protein, 41 aa, Artificial Sequence
  Non-cyclic GFR-binding peptide
  MOD_RES (5), (6), (38), (40): Xaa is C or S
VPKPXXAPTKLSPINVLYFDDSSNVIYGKIPNMVVRSXGXH

SEQ ID NO: 21712 - protein, 39 aa, Artificial Sequence
  Non-cyclic GFR-binding peptide
  MOD_RES (5), (6): Xaa is C or S
  MOD_RES (20), (21), (22), (23), (24): Xaa is A or G
  MOD_RES (25), (26), (27), (28): Xaa is A or G or is absent
TPPTXXVPTRLSPINILYFXXXXXXXXXYGKIPDMVVES

SEQ ID NO: 21713 - protein, 36 aa, Artificial Sequence
  Non-cyclic GFR-binding peptide
  MOD_RES (34), (36): Xaa is C or S
  MOD_RES (14), (15), (16), (17), (18): Xaa is A or G
  MOD_RES (19), (20), (21), (22): Xaa is A or G or is absent
APTKLSPINVLYFXXXXXXXXXYGKIPNMVVRSXGX

SEQ ID NO: 21714 - protein, 37 aa, Artificial Sequence
  Non-cyclic GFR-binding peptide
  MOD_RES (2), (3), (35), (37): Xaa is C or S
AXXVPTELSPINMLYFDENEKVVYGKIPDMVVEGXGX

SEQ ID NO: 21715 - protein, 33 aa, Artificial Sequence
  Non-cyclic GFR-binding peptide
  MOD_RES (1), (32): Xaa is C or S
XAPVKTSPINMLYFDNGRVLLYGKIPMIVEEXG

SEQ ID NO: 21716 - protein, 36 aa, Artificial Sequence
  Non-cyclic GFR-binding peptide
  MOD_RES (1), (2), (35): Xaa is C or S
  MOD_RES (16), (17), (18), (19), (20): Xaa is A or G
  MOD_RES (21), (22), (23), (24): Xaa is A or G or is absent
XXAPVKTSPINMLYFXXXXXXXXXYGKIPMIVEEXG

SEQ ID NO: 21717 - protein, 34 aa, Artificial Sequence
  Non-cyclic GFR-binding peptide
  MOD_RES (34), (34): Xaa is C or S
  MOD_RES (14), (15), (16), (17), (18): Xaa is A or G
  MOD_RES (19), (20), (21), (22): Xaa is A or G or is absent
VPTRLSPINILYFXXXXXXXXXYGKIPDMVVESX

SEQ ID NO: 21718 - protein, 35 aa, Artificial Sequence
  Non-cyclic GFR-binding peptide
  MOD_RES (1), (2), (34): Xaa is C or S
XXAPTKLSPINVLYFDSSNNVIYGKIPNMVVKAXG

SEQ ID NO: 21719 - protein, 41 aa, Artificial Sequence
  Non-cyclic GFR-binding peptide
  MOD_RES (3), (4), (38), (40): Xaa is C or S
  MOD_RES (18), (19), (20), (21), (22): Xaa is A or G
  MOD_RES (23), (24), (25), (26): Xaa is A or G or is absent
KPXXAPTQLSPINVLYFXXXXXXXXXYGKIPNMVVRAXGXH

SEQ ID NO: 21720 - protein, 43 aa, Artificial Sequence
  Non-cyclic GFR-binding peptide
  MOD_RES (6), (7), (41), (43): Xaa is C or S
  MOD_RES (21), (22), (23), (24), (25): Xaa is A or G
  MOD_RES (26), (27), (28), (29): Xaa is A or G or is absent
AAPASXXVPARLSPINILYFXXXXXXXXXYGKIPDMVVEAXGX

SEQ ID NO: 21721 - protein, 36 aa, Artificial Sequence
  Non-cyclic GFR-binding peptide
  MOD_RES (4), (36): Xaa is C or S
KPTXAPTKLSPINVLYFDDSSNVIYGKIPNMVVRSX

SEQ ID NO: 21722 - protein, 35 aa, Artificial Sequence
  Non-cyclic GFR-binding peptide
  MOD_RES (2), (3): Xaa is C or S
  MOD_RES (17), (18), (19), (20), (21): Xaa is A or G
  MOD_RES (22), (23), (24), (25): Xaa is A or G or is absent
PXXAPTKLSPINVLYFXXXXXXXXXYGKIPNMVVR

SEQ ID NO: 21723 - protein, 41 aa, Artificial Sequence
  Non-cyclic GFR-binding peptide
  MOD_RES (6), (7), (38), (40): Xaa is C or S
RVPSTXXAPVKTSPINMLYFDNGRVLLYGKIPMIVEEXGXL

SEQ ID NO: 21724 - protein, 36 aa, Artificial Sequence
  Non-cyclic GFR-binding peptide
  MOD_RES (1), (35): Xaa is C or S
  MOD_RES (15), (16), (17), (18), (19): Xaa is A or G
  MOD_RES (20), (21), (22), (23): Xaa is A or G or is absent
XVPTRLSPINILYFXXXXXXXXXYGKIPDMVVESXG

SEQ ID NO: 21725 - protein, 35 aa, Artificial Sequence
  Non-cyclic GFR-binding peptide
  MOD_RES (1), (2), (35): Xaa is C or S
  MOD_RES (16), (17), (18), (19), (20): Xaa is A or G
  MOD_RES (21), (22), (23), (24): Xaa is A or G or is absent
XXAPVKTSPINMLYFXXXXXXXXXYGKIPMIVEEX

SEQ ID NO: 21726 - protein, 32 aa, Artificial Sequence
  Non-cyclic GFR-binding peptide
  MOD_RES (14), (15), (16), (17), (18): Xaa is A or G
  MOD_RES (19), (20), (21), (22): Xaa is A or G or is absent
VPTRLSPINILYFXXXXXXXXXYGKIPDMVVE

SEQ ID NO: 21727 - protein, 32 aa, Artificial Sequence
  Non-cyclic GFR-binding peptide
  MOD_RES (1), (2): Xaa is C or S
XXAPVKTSPINMLYFDNGRVLLYGKIPMIVEE

SEQ ID NO: 21728 - protein, 40 aa, Artificial Sequence
  Non-cyclic GFR-binding peptide
  MOD_RES (4), (5), (40): Xaa is C or S
  MOD_RES (19), (20), (21), (22), (23): Xaa is A or G
  MOD_RES (24), (25), (26), (27): Xaa is A or G or is absent
GKAXXVPTKLSPINVLYFXXXXXXXXXYGKIPEGMSVAEX

SEQ ID NO: 21729 - protein, 32 aa, Artificial Sequence
  Non-cyclic GFR-binding peptide
  MOD_RES (14), (15), (16), (17), (18): Xaa is A or G
  MOD_RES (19), (20), (21), (22): Xaa is A or G or is absent
VPARLSPINILYFXXXXXXXXXYGKIPDMVVE

SEQ ID NO: 21730 - protein, 36 aa, Artificial Sequence
  Non-cyclic GFR-binding peptide
  MOD_RES (1), (33), (35): Xaa is C or S
XVPTELSPINMLYFDEYDKVVYGKIPEMVVEGXGXR

SEQ ID NO: 21731 - protein, 42 aa, Artificial Sequence
  Non-cyclic GFR-binding peptide
  MOD_RES (5), (6), (40), (42): Xaa is C or S
  MOD_RES (20), (21), (22), (23), (24): Xaa is A or G
  MOD_RES (25), (26), (27), (28): Xaa is A or G or is absent
ASKAXXVPTKLSPINILYFXXXXXXXXXYGKIPGMAVSEXGX

SEQ ID NO: 21732 - protein, 39 aa, Artificial Sequence
  Non-cyclic GFR-binding peptide
  MOD_RES (5), (6), (39): Xaa is C or S
  MOD_RES (20), (21), (22), (23), (24): Xaa is A or G
  MOD_RES (25), (26), (27), (28): Xaa is A or G or is absent
VPSTXXAPVKTSPINMLYFXXXXXXXXXYGKIPMIVEEX

SEQ ID NO: 21733 - protein, 43 aa, Artificial Sequence
  Non-cyclic GFR-binding peptide
  MOD_RES (6), (7), (41), (43): Xaa is C or S
  MOD_RES (21), (22), (23), (24), (25): Xaa is A or G
  MOD_RES (26), (27), (28), (29): Xaa is A or G or is absent
SIPKAXXVPTELSPINMLYFXXXXXXXXXYGKIPEMVVEGXGX

SEQ ID NO: 21734 - protein, 43 aa, Artificial Sequence
  Non-cyclic GFR-binding peptide
  MOD_RES (5), (6), (40), (42): Xaa is C or S
  MOD_RES (20), (21), (22), (23), (24): Xaa is A or G
  MOD_RES (25), (26), (27), (28): Xaa is A or G or is absent
APASXXVPARLSPINILYFXXXXXXXXXYGKIPDMVVEAXGXR

SEQ ID NO: 21735 - protein, 42 aa, Artificial Sequence
  Non-cyclic GFR-binding peptide
  MOD_RES (6), (7), (39), (41): Xaa is C or S
AAPASXXVPARLSPINILYFDAANNVVYGKIPDMVVEAXGXR

SEQ ID NO: 21736 - protein, 35 aa, Artificial Sequence
  Non-cyclic GFR-binding peptide
  MOD_RES (1), (2): Xaa is C or S
  MOD_RES (16), (17), (18), (19), (20): Xaa is A or G
  MOD_RES (21), (22), (23), (24): Xaa is A or G or is absent
XXVPTRLSPINILYFXXXXXXXXXYGKIPDMVVES

SEQ ID NO: 21737 - protein, 37 aa, Artificial Sequence
  Non-cyclic GFR-binding peptide
  MOD_RES (1), (35), (37): Xaa is C or S
  MOD_RES (15), (16), (17), (18), (19): Xaa is A or G
  MOD_RES (20), (21), (22), (23): Xaa is A or G or is absent
XAPTKLSPINVLYFXXXXXXXXXYGKIPNMVVRSXGX

SEQ ID NO: 21738 - protein, 33 aa, Artificial Sequence
  Non-cyclic GFR-binding peptide
  MOD_RES (1), (1): Xaa is C or S
  MOD_RES (15), (16), (17), (18), (19): Xaa is A or G
  MOD_RES (20), (21), (22), (23): Xaa is A or G or is absent
XAPVKTSPINMLYFXXXXXXXXXYGKIPMIVEE

SEQ ID NO: 21739 - protein, 37 aa, Artificial Sequence
  Non-cyclic GFR-binding peptide
  MOD_RES (6), (7): Xaa is C or S
HVPKPXXAPTKLSPINVLYFDDSSNVIYGKIPNMVVR

SEQ ID NO: 21740 - protein, 41 aa, Artificial Sequence
  Non-cyclic GFR-binding peptide
  MOD_RES (6), (40): Xaa is C or S
  MOD_RES (20), (21), (22), (23), (24): Xaa is A or G
  MOD_RES (25), (26), (27), (28): Xaa is A or G or is absent
VTKPTXAPTKLSPINVLYFXXXXXXXXXYGKIPNMVVRSXG

SEQ ID NO: 21741 - protein, 37 aa, Artificial Sequence
  Non-cyclic GFR-binding peptide
  MOD_RES (1), (34), (36): Xaa is C or S
XVPTKLSPINVLYFDDMGVPTYGKIPEGMSVAEXGXR

SEQ ID NO: 21742 - protein, 40 aa, Artificial Sequence
  Non-cyclic GFR-binding peptide
  MOD_RES (3), (4), (38), (40): Xaa is C or S
  MOD_RES (18), (19), (20), (21), (22): Xaa is A or G
  MOD_RES (23), (24), (25), (26): Xaa is A or G or is absent
KPXXAPTKLSPINVLYFXXXXXXXXXYGKIPNMVVRSXGX

SEQ ID NO: 21743 - protein, 38 aa, Artificial Sequence
  Non-cyclic GFR-binding peptide
  MOD_RES (4), (5), (37): Xaa is C or S
PKPXXAPTQLSPINVLYFDDSSNVIYGKIPNMVVRAXG

SEQ ID NO: 21744 - protein, 33 aa, Artificial Sequence
  Non-cyclic GFR-binding peptide
  MOD_RES (2), (3): Xaa is C or S
AXXVPTELSPINMLYFDENEKVVYGKIPDMVVE

SEQ ID NO: 21745 - protein, 36 aa, Artificial Sequence
  Non-cyclic GFR-binding peptide
  MOD_RES (3), (4): Xaa is C or S
  MOD_RES (18), (19), (20), (21), (22): Xaa is A or G
  MOD_RES (23), (24), (25), (26): Xaa is A or G or is absent
PTXXVPTRLSPINILYFXXXXXXXXXYGKIPDMVVE

SEQ ID NO: 21746 - protein, 39 aa, Artificial Sequence
  Non-cyclic GFR-binding peptide
  MOD_RES (3), (4), (38): Xaa is C or S
  MOD_RES (18), (19), (20), (21), (22): Xaa is A or G
  MOD_RES (23), (24), (25), (26): Xaa is A or G or is absent
KAXXVPTELSPINMLYFXXXXXXXXXYGKIPEMVVEGXG

SEQ ID NO: 21747 - protein, 38 aa, Artificial Sequence
  Non-cyclic GFR-binding peptide
  MOD_RES (4), (38): Xaa is C or S
  MOD_RES (18), (19), (20), (21), (22): Xaa is A or G
  MOD_RES (23), (24), (25), (26): Xaa is A or G or is absent
KPTXAPTKLSPINVLYFXXXXXXXXXYGKIPNMVVRSX

SEQ ID NO: 21748 - protein, 38 aa, Artificial Sequence
  Non-cyclic GFR-binding peptide
  MOD_RES (3), (35), (37): Xaa is C or S
PTXAPTKLSPINVLYFDDSSNVIYGKIPNMVVRSXGXH

SEQ ID NO: 21749 - protein, 42 aa, Artificial Sequence
  Non-cyclic GFR-binding peptide
  MOD_RES (6), (7), (41): Xaa is C or S
  MOD_RES (21), (22), (23), (24), (25): Xaa is A or G
  MOD_RES (26), (27), (28), (29): Xaa is A or G or is absent
HVPKPXXAPTKLSPINVLYFXXXXXXXXXYGKIPNMVVRSXG

SEQ ID NO: 21750 - protein, 41 aa, Artificial Sequence
  Non-cyclic GFR-binding peptide
  MOD_RES (5), (39), (41): Xaa is C or S
  MOD_RES (19), (20), (21), (22), (23): Xaa is A or G
  MOD_RES (24), (25), (26), (27): Xaa is A or G or is absent
TKPTXAPTKLSPINVLYFXXXXXXXXXYGKIPNMVVRSXGX

SEQ ID NO: 21751 - protein, 40 aa, Artificial Sequence
  Non-cyclic GFR-binding peptide
  MOD_RES (6), (7), (39): Xaa is C or S
KIPKAXXVPTELSPINMLYFDENEKVVYGKIPDMVVEGXG

SEQ ID NO: 21752 - protein, 39 aa, Artificial Sequence
  Non-cyclic GFR-binding peptide
  MOD_RES (3), (4), (36), (38): Xaa is C or S
KAXXVPTELSPINMLYFDEYDKVVYGKIPEMVVEGXGXR

SEQ ID NO: 21753 - protein, 37 aa, Artificial Sequence
  Non-cyclic GFR-binding peptide
  MOD_RES (2), (3), (34), (36): Xaa is C or S
TXXAPVKTSPINMLYFDNGRVLLYGKIPMIVEEXGXL

SEQ ID NO: 21754 - protein, 40 aa, Artificial Sequence
  Non-cyclic GFR-binding peptide
  MOD_RES (1), (2), (37), (39): Xaa is C or S
  MOD_RES (16), (17), (18), (19), (20): Xaa is A or G
  MOD_RES (21), (22), (23), (24): Xaa is A or G or is absent
XXVPTKLSPINVLYFXXXXXXXXXYGKIPEGMSVAEXGXR

SEQ ID NO: 21755 - protein, 43 aa, Artificial Sequence
  Non-cyclic GFR-binding peptide
  MOD_RES (6), (40), (42): Xaa is C or S
  MOD_RES (20), (21), (22), (23), (24): Xaa is A or G
  MOD_RES (25), (26), (27), (28): Xaa is A or G or is absent
VTKPTXAPTKLSPINVLYFXXXXXXXXXYGKIPNMVVRSXGXH

SEQ ID NO: 21756 - protein, 33 aa, Artificial Sequence
  Non-cyclic GFR-binding peptide
  MOD_RES (1), (33): Xaa is C or S
XAPTKLSPINVLYFDSSNNVIYGKIPNMVVKAX

SEQ ID NO: 21757 - protein, 33 aa, Artificial Sequence
  Non-cyclic GFR-binding peptide
  MOD_RES (1), (1): Xaa is C or S
  MOD_RES (15), (16), (17), (18), (19): Xaa is A or G
  MOD_RES (20), (21), (22), (23): Xaa is A or G or is absent
XAPTKLSPINVLYFXXXXXXXXXYGKIPNMVVK

SEQ ID NO: 21758 - protein, 36 aa, Artificial Sequence
  Non-cyclic GFR-binding peptide
  MOD_RES (2), (3), (35): Xaa is C or S
AXXVPTELSPINMLYFDENEKVVYGKIPDMVVEGXG

SEQ ID NO: 21759 - protein, 38 aa, Artificial Sequence
  Non-cyclic GFR-binding peptide
  MOD_RES (3), (37): Xaa is C or S
  MOD_RES (17), (18), (19), (20), (21): Xaa is A or G
  MOD_RES (22), (23), (24), (25): Xaa is A or G or is absent
PTXAPTKLSPINVLYFXXXXXXXXXYGKIPNMVVRSXG

SEQ ID NO: 21760 - protein, 37 aa, Artificial Sequence
  Non-cyclic GFR-binding peptide
  MOD_RES (4), (5): Xaa is C or S
GKAXXVPTKLSPINVLYFDDMGVPTYGKIPEGMSVAE

SEQ ID NO: 21761 - protein, 33 aa, Artificial Sequence
  Non-cyclic GFR-binding peptide
  MOD_RES (1), (1): Xaa is C or S
  MOD_RES (15), (16), (17), (18), (19): Xaa is A or G
  MOD_RES (20), (21), (22), (23): Xaa is A or G or is absent
XAPTKLSPINVLYFXXXXXXXXXYGKIPNMVVR

SEQ ID NO: 21762 - protein, 34 aa, Artificial Sequence
  Non-cyclic GFR-binding peptide
  MOD_RES (1), (1): Xaa is C or S
  MOD_RES (15), (16), (17), (18), (19): Xaa is A or G
  MOD_RES (20), (21), (22), (23): Xaa is A or G or is absent
XAPTKLSPINVLYFXXXXXXXXXYGKIPNMVVKA

SEQ ID NO: 21763 - protein, 38 aa, Artificial Sequence
  Non-cyclic GFR-binding peptide
  MOD_RES (2), (3), (37): Xaa is C or S
  MOD_RES (17), (18), (19), (20), (21): Xaa is A or G
  MOD_RES (22), (23), (24), (25): Xaa is A or G or is absent
AXXVPTELSPINMLYFXXXXXXXXXYGKIPDMVVEGXG

SEQ ID NO: 21764 - protein, 41 aa, Artificial Sequence
  Non-cyclic GFR-binding peptide
  MOD_RES (5), (6), (40): Xaa is C or S
  MOD_RES (20), (21), (22), (23), (24): Xaa is A or G
  MOD_RES (25), (26), (27), (28): Xaa is A or G or is absent
IPKAXXVPTELSPINMLYFXXXXXXXXXYGKIPDMVVEGXG

SEQ ID NO: 21765 - protein, 37 aa, Artificial Sequence
  Non-cyclic GFR-binding peptide
  MOD_RES (3), (4): Xaa is C or S
  MOD_RES (18), (19), (20), (21), (22): Xaa is A or G
  MOD_RES (23), (24), (25), (26): Xaa is A or G or is absent
KAXXVPTELSPINMLYFXXXXXXXXXYGKIPDMVVEG

SEQ ID NO: 21766 - protein, 37 aa, Artificial Sequence
  Non-cyclic GFR-binding peptide
  MOD_RES (2), (3), (37): Xaa is C or S
  MOD_RES (17), (18), (19), (20), (21): Xaa is A or G
  MOD_RES (22), (23), (24), (25): Xaa is A or G or is absent
AXXVPTELSPINMLYFXXXXXXXXXYGKIPEMVVEGX

SEQ ID NO: 21767 - protein, 38 aa, Artificial Sequence
  Non-cyclic GFR-binding peptide
  MOD_RES (5), (6), (38): Xaa is C or S
APASXXVPARLSPINILYFDAANNVVYGKIPDMVVEAX

SEQ ID NO: 21768 - protein, 38 aa, Artificial Sequence
  Non-cyclic GFR-binding peptide
  MOD_RES (1), (35), (37): Xaa is C or S
  MOD_RES (15), (16), (17), (18), (19): Xaa is A or G
  MOD_RES (20), (21), (22), (23): Xaa is A or G or is absent
XAPTKLSPINVLYFXXXXXXXXXYGKIPNMVVKAXGXH

SEQ ID NO: 21769 - protein, 42 aa, Artificial Sequence
  Non-cyclic GFR-binding peptide
  MOD_RES (5), (6), (40), (42): Xaa is C or S
  MOD_RES (20), (21), (22), (23), (24): Xaa is A or G
  MOD_RES (25), (26), (27), (28): Xaa is A or G or is absent
VPKPXXAPTQLSPINVLYFXXXXXXXXXYGKIPNMVVRAXGX

SEQ ID NO: 21770 - protein, 36 aa, Artificial Sequence
  Non-cyclic GFR-binding peptide
  MOD_RES (1), (35): Xaa is C or S
  MOD_RES (15), (16), (17), (18), (19): Xaa is A or G
  MOD_RES (20), (21), (22), (23): Xaa is A or G or is absent
XAPTKLSPINVLYFXXXXXXXXXYGKIPNMVVKAXG

SEQ ID NO: 21771 - protein, 36 aa, Artificial Sequence
  Non-cyclic GFR-binding peptide
  MOD_RES (1), (2), (33), (35): Xaa is C or S
XXAPVKTSPINMLYFDNGRVLLYGKIPMIVEEXGXL

SEQ ID NO: 21772 - protein, 30 aa, Artificial Sequence
  Non-cyclic GFR-binding peptide
APTQLSPINVLYFDDSSNVIYGKIPNMVVR

SEQ ID NO: 21773 - protein, 37 aa, Artificial Sequence
  Non-cyclic GFR-binding peptide
  MOD_RES (3), (4), (37): Xaa is C or S
KAXXVPTKLSPINVLYFDDMGVPTYGKIPEGMSVAEX

SEQ ID NO: 21774 - protein, 38 aa, Artificial Sequence
  Non-cyclic GFR-binding peptide
  MOD_RES (2), (3), (35), (37): Xaa is C or S
PXXAPTKLSPINVLYFDDSSNVIYGKIPNMVVRSXGXH

SEQ ID NO: 21775 - protein, 33 aa, Artificial Sequence
  Non-cyclic GFR-binding peptide
  MOD_RES (1), (33): Xaa is C or S
XVPTELSPINMLYFDEYDKVVYGKIPEMVVEGX

SEQ ID NO: 21776 - protein, 37 aa, Artificial Sequence
  Non-cyclic GFR-binding peptide
  MOD_RES (5), (5): Xaa is C or S
  MOD_RES (19), (20), (21), (22), (23): Xaa is A or G
  MOD_RES (24), (25), (26), (27): Xaa is A or G or is absent
TKPTXAPTKLSPINVLYFXXXXXXXXXYGKIPNMVVR

SEQ ID NO: 21777 - protein, 35 aa, Artificial Sequence
  Non-cyclic GFR-binding peptide
  MOD_RES (2), (3), (35): Xaa is C or S
PXXAPTKLSPINVLYFDDSSNVIYGKIPNMVVRSX

SEQ ID NO: 21778 - protein, 43 aa, Artificial Sequence
  Non-cyclic GFR-binding peptide
  MOD_RES (5), (6), (41), (43): Xaa is C or S
  MOD_RES (20), (21), (22), (23), (24): Xaa is A or G
  MOD_RES (25), (26), (27), (28): Xaa is A or G or is absent
VGKAXXVPTKLSPINVLYFXXXXXXXXXYGKIPEGMSVAEXGX

SEQ ID NO: 21779 - protein, 34 aa, Artificial Sequence
  Non-cyclic GFR-binding peptide
  MOD_RES (1), (1): Xaa is C or S
  MOD_RES (15), (16), (17), (18), (19): Xaa is A or G
  MOD_RES (20), (21), (22), (23): Xaa is A or G or is absent
XVPTELSPINMLYFXXXXXXXXXYGKIPDMVVEG

SEQ ID NO: 21780 - protein, 37 aa, Artificial Sequence
  Non-cyclic GFR-binding peptide
  MOD_RES (5), (6): Xaa is C or S
VPKAXXAPTKLSPINVLYFDSSNNVIYGKIPNMVVKA

SEQ ID NO: 21781 - protein, 39 aa, Artificial Sequence
  Non-cyclic GFR-binding peptide
  MOD_RES (1), (2), (37), (39): Xaa is C or S
  MOD_RES (16), (17), (18), (19), (20): Xaa is A or G
  MOD_RES (21), (22), (23), (24): Xaa is A or G or is absent
XXVPTKLSPINVLYFXXXXXXXXXYGKIPEGMSVAEXGX

SEQ ID NO: 21782 - protein, 35 aa, Artificial Sequence
  Non-cyclic GFR-binding peptide
  MOD_RES (1), (34): Xaa is C or S
XVPTKLSPINVLYFDDMGVPTYGKIPEGMSVAEXG

SEQ ID NO: 21783 - protein, 38 aa, Artificial Sequence
  Non-cyclic GFR-binding peptide
  MOD_RES (2), (3), (37): Xaa is C or S
  MOD_RES (17), (18), (19), (20), (21): Xaa is A or G
  MOD_RES (22), (23), (24), (25): Xaa is A or G or is absent
TXXVPTRLSPINILYFXXXXXXXXXYGKIPDMVVESXG

SEQ ID NO: 21784 - protein, 43 aa, Artificial Sequence
  Non-cyclic GFR-binding peptide
  MOD_RES (6), (7), (40), (42): Xaa is C or S
KVGKAXXVPTKLSPINVLYFDDMGVPTYGKIPEGMSVAEXGXR

SEQ ID NO: 21785 - protein, 36 aa, Artificial Sequence
  Non-cyclic GFR-binding peptide
  MOD_RES (2), (3), (36): Xaa is C or S
AXXVPTKLSPINVLYFDDMGVPTYGKIPEGMSVAEX

SEQ ID NO: 21786 - protein, 41 aa, Artificial Sequence
  Non-cyclic GFR-binding peptide
  MOD_RES (6), (7): Xaa is C or S
  MOD_RES (21), (22), (23), (24), (25): Xaa is A or G
  MOD_RES (26), (27), (28), (29): Xaa is A or G or is absent
KVGKAXXVPTKLSPINVLYFXXXXXXXXXYGKIPEGMSVAE

SEQ ID NO: 21787 - protein, 39 aa, Artificial Sequence
  Non-cyclic GFR-binding peptide
  MOD_RES (1), (2), (36), (38): Xaa is C or S
  MOD_RES (16), (17), (18), (19), (20): Xaa is A or G
  MOD_RES (21), (22), (23), (24): Xaa is A or G or is absent
XXAPTQLSPINVLYFXXXXXXXXXYGKIPNMVVRAXGXH

SEQ ID NO: 21788 - protein, 33 aa, Artificial Sequence
  Non-cyclic GFR-binding peptide
  MOD_RES (2), (3): Xaa is C or S
AXXVPTELSPINMLYFDEYDKVVYGKIPEMVVE

SEQ ID NO: 21789 - protein, 34 aa, Artificial Sequence
  Non-cyclic GFR-binding peptide
  MOD_RES (1), (33): Xaa is C or S
XAPTQLSPINVLYFDDSSNVIYGKIPNMVVRAXG

SEQ ID NO: 21790 - protein, 36 aa, Artificial Sequence
  Non-cyclic GFR-binding peptide
  MOD_RES (3), (4), (36): Xaa is C or S
KAXXVPTELSPINMLYFDEYDKVVYGKIPEMVVEGX

SEQ ID NO: 21791 - protein, 38 aa, Artificial Sequence
  Non-cyclic GFR-binding peptide
  MOD_RES (4), (5): Xaa is C or S
  MOD_RES (19), (20), (21), (22), (23): Xaa is A or G
  MOD_RES (24), (25), (26), (27): Xaa is A or G or is absent
PKAXXVPTELSPINMLYFXXXXXXXXXYGKIPEMVVEG

SEQ ID NO: 21792 - protein, 41 aa, Artificial Sequence
  Non-cyclic GFR-binding peptide
  MOD_RES (5), (6), (39), (41): Xaa is C or S
VGKAXXVPTKLSPINVLYFDDMGVPTYGKIPEGMSVAEXGX

SEQ ID NO: 21793 - protein, 40 aa, Artificial Sequence
  Non-cyclic GFR-binding peptide
  MOD_RES (4), (5), (37), (39): Xaa is C or S
PKAXXVPTELSPINMLYFDEYDKVVYGKIPEMVVEGXGXR

SEQ ID NO: 21794 - protein, 35 aa, Artificial Sequence
  Non-cyclic GFR-binding peptide
  MOD_RES (1), (2), (34): Xaa is C or S
XXVPARLSPINILYFDAANNVVYGKIPDMVVEAXG

SEQ ID NO: 21795 - protein, 41 aa, Artificial Sequence
  Non-cyclic GFR-binding peptide
  MOD_RES (5), (6), (40): Xaa is C or S
  MOD_RES (20), (21), (22), (23), (24): Xaa is A or G
  MOD_RES (25), (26), (27), (28): Xaa is A or G or is absent
VPKPXXAPTQLSPINVLYFXXXXXXXXXYGKIPNMVVRAXG

SEQ ID NO: 21796 - protein, 38 aa, Artificial Sequence
  Non-cyclic GFR-binding peptide
  MOD_RES (3), (4), (36), (38): Xaa is C or S
ASXXVPARLSPINILYFDAANNVVYGKIPDMVVEAXGX

SEQ ID NO: 21797 - protein, 40 aa, Artificial Sequence
  Non-cyclic GFR-binding peptide
  MOD_RES (6), (7): Xaa is C or S
  MOD_RES (21), (22), (23), (24), (25): Xaa is A or G
  MOD_RES (26), (27), (28), (29): Xaa is A or G or is absent
AAPASXXVPARLSPINILYFXXXXXXXXXYGKIPDMVVEA

SEQ ID NO: 21798 - protein, 40 aa, Artificial Sequence
  Non-cyclic GFR-binding peptide
  MOD_RES (3), (4), (38), (40): Xaa is C or S
  MOD_RES (18), (19), (20), (21), (22): Xaa is A or G
  MOD_RES (23), (24), (25), (26): Xaa is A or G or is absent
KAXXAPTKLSPINVLYFXXXXXXXXXYGKIPNMVVKAXGX

SEQ ID NO: 21799 - protein, 40 aa, Artificial Sequence
  Non-cyclic GFR-binding peptide
  MOD_RES (5), (6), (39): Xaa is C or S
VGKAXXVPTKLSPINVLYFDDMGVPTYGKIPEGMSVAEXG

SEQ ID NO: 21800 - protein, 36 aa, Artificial Sequence
  Non-cyclic GFR-binding peptide
  MOD_RES (3), (4): Xaa is C or S
KAXXVPTKLSPINVLYFDDMGVPTYGKIPEGMSVAE

SEQ ID NO: 21801 - protein, 39 aa, Artificial Sequence
  Non-cyclic GFR-binding peptide
  MOD_RES (1), (2), (36), (38): Xaa is C or S
  MOD_RES (16), (17), (18), (19), (20): Xaa is A or G
  MOD_RES (21), (22), (23), (24): Xaa is A or G or is absent
XXVPTELSPINMLYFXXXXXXXXXYGKIPDMVVEGXGXR

SEQ ID NO: 21802 - protein, 39 aa, Artificial Sequence
  Non-cyclic GFR-binding peptide
  MOD_RES (5), (37), (39): Xaa is C or S
TKPTXAPTKLSPINVLYFDDSSNVIYGKIPNMVVRSXGX

SEQ ID NO: 21803 - protein, 38 aa, Artificial Sequence
  Non-cyclic GFR-binding peptide
  MOD_RES (4), (5): Xaa is C or S
  MOD_RES (19), (20), (21), (22), (23): Xaa is A or G
  MOD_RES (24), (25), (26), (27): Xaa is A or G or is absent
PKPXXAPTQLSPINVLYFXXXXXXXXXYGKIPNMVVRA

SEQ ID NO: 21804 - protein, 36 aa, Artificial Sequence
  Non-cyclic GFR-binding peptide
  MOD_RES (2), (3): Xaa is C or S
  MOD_RES (17), (18), (19), (20), (21): Xaa is A or G
  MOD_RES (22), (23), (24), (25): Xaa is A or G or is absent
AXXVPTKLSPINILYFXXXXXXXXXYGKIPGMAVSE

SEQ ID NO: 21805 - protein, 34 aa, Artificial Sequence
  Non-cyclic GFR-binding peptide
  MOD_RES (1), (2): Xaa is C or S
  MOD_RES (16), (17), (18), (19), (20): Xaa is A or G
  MOD_RES (21), (22), (23), (24): Xaa is A or G or is absent
XXAPVKTSPINMLYFXXXXXXXXXYGKIPMIVEE

SEQ ID NO: 21806 - protein, 33 aa, Artificial Sequence
  Non-cyclic GFR-binding peptide
  MOD_RES (2), (3): Xaa is C or S
SXXVPARLSPINILYFDAANNVVYGKIPDMVVE

SEQ ID NO: 21807 - protein, 38 aa, Artificial Sequence
  Non-cyclic GFR-binding peptide
  MOD_RES (1), (36), (38): Xaa is C or S
  MOD_RES (15), (16), (17), (18), (19): Xaa is A or G
  MOD_RES (20), (21), (22), (23): Xaa is A or G or is absent
XVPTKLSPINVLYFXXXXXXXXXYGKIPEGMSVAEXGX

SEQ ID NO: 21808 - protein, 35 aa, Artificial Sequence
  Non-cyclic GFR-binding peptide
  MOD_RES (34), (34): Xaa is C or S
  MOD_RES (14), (15), (16), (17), (18): Xaa is A or G
  MOD_RES (19), (20), (21), (22): Xaa is A or G or is absent
VPTELSPINMLYFXXXXXXXXXYGKIPEMVVEGXG

SEQ ID NO: 21809 - protein, 32 aa, Artificial Sequence
  Non-cyclic GFR-binding peptide
  MOD_RES (1), (1): Xaa is C or S
XVPTELSPINMLYFDEYDKVVYGKIPEMVVEG

SEQ ID NO: 21810 - protein, 34 aa, Artificial Sequence
  Non-cyclic GFR-binding peptide
  MOD_RES (1), (33): Xaa is C or S
XVPTKLSPINILYFDKGVVTYYGKIPGMAVSEXG

SEQ ID NO: 21811 - protein, 40 aa, Artificial Sequence
  Non-cyclic GFR-binding peptide
  MOD_RES (3), (4), (37), (39): Xaa is C or S
  MOD_RES (18), (19), (20), (21), (22): Xaa is A or G
  MOD_RES (23), (24), (25), (26): Xaa is A or G or is absent
STXXAPVKTSPINMLYFXXXXXXXXXYGKIPMIVEEXGXL

SEQ ID NO: 21812 - protein, 37 aa, Artificial Sequence
  Non-cyclic GFR-binding peptide
  MOD_RES (1), (2), (36): Xaa is C or S
  MOD_RES (16), (17), (18), (19), (20): Xaa is A or G
  MOD_RES (21), (22), (23), (24): Xaa is A or G or is absent
XXVPARLSPINILYFXXXXXXXXXYGKIPDMVVEAXG

SEQ ID NO: 21813 - protein, 35 aa, Artificial Sequence
  Non-cyclic GFR-binding peptide
  MOD_RES (1), (2): Xaa is C or S
  MOD_RES (16), (17), (18), (19), (20): Xaa is A or G
  MOD_RES (21), (22), (23), (24): Xaa is A or G or is absent
XXAPTQLSPINVLYFXXXXXXXXXYGKIPNMVVRA

SEQ ID NO: 21814 - protein, 34 aa, Artificial Sequence
  Non-cyclic GFR-binding peptide
  MOD_RES (1), (2), (34): Xaa is C or S
XXVPTELSPINMLYFDENEKVVYGKIPDMVVEGX

SEQ ID NO: 21815 - protein, 38 aa, Artificial Sequence
  Non-cyclic GFR-binding peptide
  MOD_RES (6), (7): Xaa is C or S
TVPKPXXAPTQLSPINVLYFDDSSNVIYGKIPNMVVRA

SEQ ID NO: 21816 - protein, 34 aa, Artificial Sequence
  Non-cyclic GFR-binding peptide
  MOD_RES (1), (2): Xaa is C or S
  MOD_RES (16), (17), (18), (19), (20): Xaa is A or G
  MOD_RES (21), (22), (23), (24): Xaa is A or G or is absent
XXAPTKLSPINVLYFXXXXXXXXXYGKIPNMVVR

SEQ ID NO: 21817 - protein, 34 aa, Artificial Sequence
  Non-cyclic GFR-binding peptide
  MOD_RES (1), (2): Xaa is C or S
  MOD_RES (16), (17), (18), (19), (20): Xaa is A or G
  MOD_RES (21), (22), (23), (24): Xaa is A or G or is absent
XXAPTKLSPINVLYFXXXXXXXXXYGKIPNMVVK

SEQ ID NO: 21818 - protein, 36 aa, Artificial Sequence
  Non-cyclic GFR-binding peptide
  MOD_RES (35), (35): Xaa is C or S
  MOD_RES (14), (15), (16), (17), (18): Xaa is A or G
  MOD_RES (19), (20), (21), (22): Xaa is A or G or is absent
VPTKLSPINVLYFXXXXXXXXXYGKIPEGMSVAEXG

SEQ ID NO: 21819 - protein, 38 aa, Artificial Sequence
  Non-cyclic GFR-binding peptide
  MOD_RES (4), (5), (37): Xaa is C or S
PKAXXVPTELSPINMLYFDEYDKVVYGKIPEMVVEGXG

SEQ ID NO: 21820 - protein, 36 aa, Artificial Sequence
  Non-cyclic GFR-binding peptide
  MOD_RES (1), (35): Xaa is C or S
  MOD_RES (15), (16), (17), (18), (19): Xaa is A or G
  MOD_RES (20), (21), (22), (23): Xaa is A or G or is absent
XVPTELSPINMLYFXXXXXXXXXYGKIPEMVVEGXG

SEQ ID NO: 21821 - protein, 43 aa, Artificial Sequence
  Non-cyclic GFR-binding peptide
  MOD_RES (7), (41), (43): Xaa is C or S
  MOD_RES (21), (22), (23), (24), (25): Xaa is A or G
  MOD_RES (26), (27), (28), (29): Xaa is A or G or is absent
HVTKPTXAPTKLSPINVLYFXXXXXXXXXYGKIPNMVVRSXGX

SEQ ID NO: 21822 - protein, 36 aa, Artificial Sequence
  Non-cyclic GFR-binding peptide
  MOD_RES (1), (2): Xaa is C or S
  MOD_RES (16), (17), (18), (19), (20): Xaa is A or G
  MOD_RES (21), (22), (23), (24): Xaa is A or G or is absent
XXVPTKLSPINVLYFXXXXXXXXXYGKIPEGMSVAE

SEQ ID NO: 21823 - protein, 32 aa, Artificial Sequence
  Non-cyclic GFR-binding peptide
  MOD_RES (32), (32): Xaa is C or S
VPTELSPINMLYFDENEKVVYGKIPDMVVEGX

SEQ ID NO: 21824 - protein, 40 aa, Artificial Sequence
  Non-cyclic GFR-binding peptide
  MOD_RES (2), (3), (37), (39): Xaa is C or S
  MOD_RES (17), (18), (19), (20), (21): Xaa is A or G
  MOD_RES (22), (23), (24), (25): Xaa is A or G or is absent
TXXVPTRLSPINILYFXXXXXXXXXYGKIPDMVVESXGXR

SEQ ID NO: 21825 - protein, 39 aa, Artificial Sequence
  Non-cyclic GFR-binding peptide
  MOD_RES (4), (5), (39): Xaa is C or S
  MOD_RES (19), (20), (21), (22), (23): Xaa is A or G
  MOD_RES (24), (25), (26), (27): Xaa is A or G or is absent
PKPXXAPTKLSPINVLYFXXXXXXXXXYGKIPNMVVRSX

SEQ ID NO: 21826 - protein, 38 aa, Artificial Sequence
  Non-cyclic GFR-binding peptide
  MOD_RES (4), (5): Xaa is C or S
  MOD_RES (19), (20), (21), (22), (23): Xaa is A or G
  MOD_RES (24), (25), (26), (27): Xaa is A or G or is absent
PASXXVPARLSPINILYFXXXXXXXXXYGKIPDMVVEA

SEQ ID NO: 21827 - protein, 38 aa, Artificial Sequence
  Non-cyclic GFR-binding peptide
  MOD_RES (3), (4), (35), (37): Xaa is C or S
STXXAPVKTSPINMLYFDNGRVLLYGKIPMIVEEXGXL

SEQ ID NO: 21828 - protein, 36 aa, Artificial Sequence
  Non-cyclic GFR-binding peptide
  MOD_RES (3), (4): Xaa is C or S
  MOD_RES (18), (19), (20), (21), (22): Xaa is A or G
  MOD_RES (23), (24), (25), (26): Xaa is A or G or is absent
KAXXVPTKLSPINILYFXXXXXXXXXYGKIPGMAVS

SEQ ID NO: 21829 - protein, 34 aa, Artificial Sequence
  Non-cyclic GFR-binding peptide
  MOD_RES (32), (34): Xaa is C or S
APTKLSPINVLYFDSSNNVIYGKIPNMVVKAXGX

SEQ ID NO: 21830 - protein, 39 aa, Artificial Sequence
  Non-cyclic GFR-binding peptide
  MOD_RES (4), (5), (39): Xaa is C or S
  MOD_RES (19), (20), (21), (22), (23): Xaa is A or G
  MOD_RES (24), (25), (26), (27): Xaa is A or G or is absent
PKAXXVPTELSPINMLYFXXXXXXXXXYGKIPDMVVEGX

SEQ ID NO: 21831 - protein, 40 aa, Artificial Sequence
  Non-cyclic GFR-binding peptide
  MOD_RES (5), (6), (38), (40): Xaa is C or S
IPKAXXVPTELSPINMLYFDENEKVVYGKIPDMVVEGXGX

SEQ ID NO: 21832 - protein, 34 aa, Artificial Sequence
  Non-cyclic GFR-binding peptide
  MOD_RES (1), (2), (34): Xaa is C or S
XXVPTELSPINMLYFDEYDKVVYGKIPEMVVEGX

SEQ ID NO: 21833 - protein, 33 aa, Artificial Sequence
  Non-cyclic GFR-binding peptide
  MOD_RES (14), (15), (16), (17), (18): Xaa is A or G
  MOD_RES (19), (20), (21), (22): Xaa is A or G or is absent
APTQLSPINVLYFXXXXXXXXXYGKIPNMVVRA

SEQ ID NO: 21834 - protein, 40 aa, Artificial Sequence
  Non-cyclic GFR-binding peptide
  MOD_RES (2), (3), (37), (39): Xaa is C or S
  MOD_RES (17), (18), (19), (20), (21): Xaa is A or G
  MOD_RES (22), (23), (24), (25): Xaa is A or G or is absent
PXXAPTQLSPINVLYFXXXXXXXXXYGKIPNMVVRAXGXH

SEQ ID NO: 21835 - protein, 36 aa, Artificial Sequence
  Non-cyclic GFR-binding peptide
  MOD_RES (34), (36): Xaa is C or S
  MOD_RES (14), (15), (16), (17), (18): Xaa is A or G
  MOD_RES (19), (20), (21), (22): Xaa is A or G or is absent
VPTRLSPINILYFXXXXXXXXXYGKIPDMVVESXGX

SEQ ID NO: 21836 - protein, 39 aa, Artificial Sequence
  Non-cyclic GFR-binding peptide
  MOD_RES (4), (5), (39): Xaa is C or S
  MOD_RES (19), (20), (21), (22), (23): Xaa is A or G
  MOD_RES (24), (25), (26), (27): Xaa is A or G or is absent
PPTXXVPTRLSPINILYFXXXXXXXXXYGKIPDMVVESX

SEQ ID NO: 21837 - protein, 37 aa, Artificial Sequence
  Non-cyclic GFR-binding peptide
  MOD_RES (1), (2), (34), (36): Xaa is C or S
XXVPTELSPINMLYFDEYDKVVYGKIPEMVVEGXGXR

SEQ ID NO: 21838 - protein, 39 aa, Artificial Sequence
  Non-cyclic GFR-binding peptide
  MOD_RES (5), (6): Xaa is C or S
  MOD_RES (20), (21), (22), (23), (24): Xaa is A or G
  MOD_RES (25), (26), (27), (28): Xaa is A or G or is absent
APASXXVPARLSPINILYFXXXXXXXXXYGKIPDMVVEA

SEQ ID NO: 21839 - protein, 37 aa, Artificial Sequence
  Non-cyclic GFR-binding peptide
  MOD_RES (1), (2), (34), (36): Xaa is C or S
XXVPTRLSPINILYFDSANNVVYGKIPDMVVESXGXR

SEQ ID NO: 21840 - protein, 37 aa, Artificial Sequence
  Non-cyclic GFR-binding peptide
  MOD_RES (3), (4), (36): Xaa is C or S
KAXXVPTKLSPINILYFDKGVVTYYGKIPGMAVSEXG

SEQ ID NO: 21841 - protein, 36 aa, Artificial Sequence
  Non-cyclic GFR-binding peptide
  MOD_RES (2), (3): Xaa is C or S
  MOD_RES (17), (18), (19), (20), (21): Xaa is A or G
  MOD_RES (22), (23), (24), (25): Xaa is A or G or is absent
AXXAPTKLSPINVLYFXXXXXXXXXYGKIPNMVVKA

SEQ ID NO: 21842 - protein, 38 aa, Artificial Sequence
  Non-cyclic GFR-binding peptide
  MOD_RES (3), (4), (36), (38): Xaa is C or S
KAXXAPTKLSPINVLYFDSSNNVIYGKIPNMVVKAXGX

SEQ ID NO: 21843 - protein, 36 aa, Artificial Sequence
  Non-cyclic GFR-binding peptide
  MOD_RES (4), (5): Xaa is C or S
PKPXXAPTKLSPINVLYFDDSSNVIYGKIPNMVVRS

SEQ ID NO: 21844 - protein, 38 aa, Artificial Sequence
  Non-cyclic GFR-binding peptide
  MOD_RES (2), (3), (38): Xaa is C or S
  MOD_RES (17), (18), (19), (20), (21): Xaa is A or G
  MOD_RES (22), (23), (24), (25): Xaa is A or G or is absent
AXXVPTKLSPINVLYFXXXXXXXXXYGKIPEGMSVAEX

SEQ ID NO: 21845 - protein, 35 aa, Artificial Sequence
  Non-cyclic GFR-binding peptide
  MOD_RES (1), (2), (34): Xaa is C or S
XXAPTKLSPINVLYFDDSSNVIYGKIPNMVVRSXG

SEQ ID NO: 21846 - protein, 41 aa, Artificial Sequence
  Non-cyclic GFR-binding peptide
  MOD_RES (3), (4), (38), (40): Xaa is C or S
  MOD_RES (18), (19), (20), (21), (22): Xaa is A or G
  MOD_RES (23), (24), (25), (26): Xaa is A or G or is absent
KPXXAPTKLSPINVLYFXXXXXXXXXYGKIPNMVVRSXGXH

SEQ ID NO: 21847 - protein, 42 aa, Artificial Sequence
  Non-cyclic GFR-binding peptide
  MOD_RES (5), (39), (41): Xaa is C or S
  MOD_RES (19), (20), (21), (22), (23): Xaa is A or G
  MOD_RES (24), (25), (26), (27): Xaa is A or G or is absent
TKPTXAPTKLSPINVLYFXXXXXXXXXYGKIPNMVVRSXGXH

SEQ ID NO: 21848 - protein, 38 aa, Artificial Sequence
  Non-cyclic GFR-binding peptide
  MOD_RES (3), (4), (36), (38): Xaa is C or S
PTXXVPTRLSPINILYFDSANNVVYGKIPDMVVESXGX

SEQ ID NO: 21849 - protein, 38 aa, Artificial Sequence
  Non-cyclic GFR-binding peptide
  MOD_RES (7), (7): Xaa is C or S
HVTKPTXAPTKLSPINVLYFDDSSNVIYGKIPNMVVRS

SEQ ID NO: 21850 - protein, 37 aa, Artificial Sequence
  Non-cyclic GFR-binding peptide
  MOD_RES (1), (35), (37): Xaa is C or S
  MOD_RES (15), (16), (17), (18), (19): Xaa is A or G
  MOD_RES (20), (21), (22), (23): Xaa is A or G or is absent
XAPTQLSPINVLYFXXXXXXXXXYGKIPNMVVRAXGX

SEQ ID NO: 21851 - protein, 34 aa, Artificial Sequence
  Non-cyclic GFR-binding peptide
  MOD_RES (32), (34): Xaa is C or S
APTKLSPINVLYFDDSSNVIYGKIPNMVVRSXGX

SEQ ID NO: 21852 - protein, 40 aa, Artificial Sequence
  Non-cyclic GFR-binding peptide
  MOD_RES (5), (6), (38), (40): Xaa is C or S
IPKAXXVPTELSPINMLYFDEYDKVVYGKIPEMVVEGXGX

SEQ ID NO: 21853 - protein, 42 aa, Artificial Sequence
  Non-cyclic GFR-binding peptide
  MOD_RES (6), (7), (41): Xaa is C or S
  MOD_RES (21), (22), (23), (24), (25): Xaa is A or G
  MOD_RES (26), (27), (28), (29): Xaa is A or G or is absent
TVPKPXXAPTQLSPINVLYFXXXXXXXXXYGKIPNMVVRAXG

SEQ ID NO: 21854 - protein, 40 aa, Artificial Sequence
  Non-cyclic GFR-binding peptide
  MOD_RES (6), (7): Xaa is C or S
  MOD_RES (21), (22), (23), (24), (25): Xaa is A or G
  MOD_RES (26), (27), (28), (29): Xaa is A or G or is absent
YVPKPXXAPTKLSPINVLYFXXXXXXXXXYGKIPNMVVRS

SEQ ID NO: 21855 - protein, 33 aa, Artificial Sequence
  Non-cyclic GFR-binding peptide
  MOD_RES (31), (33): Xaa is C or S
APVKTSPINMLYFDNGRVLLYGKIPMIVEEXGX

SEQ ID NO: 21856 - protein, 35 aa, Artificial Sequence
  Non-cyclic GFR-binding peptide
  MOD_RES (1), (35): Xaa is C or S
  MOD_RES (15), (16), (17), (18), (19): Xaa is A or G
  MOD_RES (20), (21), (22), (23): Xaa is A or G or is absent
XVPTELSPINMLYFXXXXXXXXXYGKIPDMVVEGX

SEQ ID NO: 21857 - protein, 37 aa, Artificial Sequence
  Non-cyclic GFR-binding peptide
  MOD_RES (6), (7): Xaa is C or S
SIPKAXXVPTELSPINMLYFDEYDKVVYGKIPEMVVE

SEQ ID NO: 21858 - protein, 37 aa, Artificial Sequence
  Non-cyclic GFR-binding peptide
  MOD_RES (5), (6): Xaa is C or S
VPKPXXAPTKLSPINVLYFDDSSNVIYGKIPNMVVRS

SEQ ID NO: 21859 - protein, 43 aa, Artificial Sequence
  Non-cyclic GFR-binding peptide
  MOD_RES (5), (6), (40), (42): Xaa is C or S
  MOD_RES (20), (21), (22), (23), (24): Xaa is A or G
  MOD_RES (25), (26), (27), (28): Xaa is A or G or is absent
VPKPXXAPTKLSPINVLYFXXXXXXXXXYGKIPNMVVRSXGXH

SEQ ID NO: 21860 - protein, 37 aa, Artificial Sequence
  Non-cyclic GFR-binding peptide
  MOD_RES (1), (35), (37): Xaa is C or S
  MOD_RES (15), (16), (17), (18), (19): Xaa is A or G
  MOD_RES (20), (21), (22), (23): Xaa is A or G or is absent
XVPTELSPINMLYFXXXXXXXXXYGKIPDMVVEGXGX

SEQ ID NO: 21861 - protein, 36 aa, Artificial Sequence
  Non-cyclic GFR-binding peptide
  MOD_RES (1), (2), (34), (36): Xaa is C or S
XXAPTQLSPINVLYFDDSSNVIYGKIPNMVVRAXGX

SEQ ID NO: 21862 - protein, 39 aa, Artificial Sequence
  Non-cyclic GFR-binding peptide
  MOD_RES (1), (36), (38): Xaa is C or S
  MOD_RES (15), (16), (17), (18), (19): Xaa is A or G
  MOD_RES (20), (21), (22), (23): Xaa is A or G or is absent
XVPTKLSPINVLYFXXXXXXXXXYGKIPEGMSVAEXGXR

SEQ ID NO: 21863 - protein, 33 aa, Artificial Sequence
  Non-cyclic GFR-binding peptide
  MOD_RES (1), (1): Xaa is C or S
  MOD_RES (15), (16), (17), (18), (19): Xaa is A or G
  MOD_RES (20), (21), (22), (23): Xaa is A or G or is absent
XVPTKLSPINILYFXXXXXXXXXYGKIPGMAVS

SEQ ID NO: 21864 - protein, 40 aa, Artificial Sequence
  Non-cyclic GFR-binding peptide
  MOD_RES (4), (5), (38), (40): Xaa is C or S
GKAXXVPTKLSPINVLYFDDMGVPTYGKIPEGMSVAEXGX

SEQ ID NO: 21865 - protein, 37 aa, Artificial Sequence
  Non-cyclic GFR-binding peptide
  MOD_RES (6), (7): Xaa is C or S
STPPTXXVPTRLSPINILYFDSANNVVYGKIPDMVVE

SEQ ID NO: 21866 - protein, 36 aa, Artificial Sequence
  Non-cyclic GFR-binding peptide
  MOD_RES (3), (4), (36): Xaa is C or S
ASXXVPARLSPINILYFDAANNVVYGKIPDMVVEAX

SEQ ID NO: 21867 - protein, 37 aa, Artificial Sequence
  Non-cyclic GFR-binding peptide
  MOD_RES (1), (35), (37): Xaa is C or S
  MOD_RES (15), (16), (17), (18), (19): Xaa is A or G
  MOD_RES (20), (21), (22), (23): Xaa is A or G or is absent
XVPTKLSPINILYFXXXXXXXXXYGKIPGMAVSEXGX

SEQ ID NO: 21868 - protein, 38 aa, Artificial Sequence
  Non-cyclic GFR-binding peptide
  MOD_RES (1), (35), (37): Xaa is C or S
  MOD_RES (15), (16), (17), (18), (19): Xaa is A or G
  MOD_RES (20), (21), (22), (23): Xaa is A or G or is absent
XVPTELSPINMLYFXXXXXXXXXYGKIPEMVVEGXGXR

SEQ ID NO: 21869 - protein, 40 aa, Artificial Sequence
  Non-cyclic GFR-binding peptide
  MOD_RES (4), (5), (39): Xaa is C or S
  MOD_RES (19), (20), (21), (22), (23): Xaa is A or G
  MOD_RES (24), (25), (26), (27): Xaa is A or G or is absent
PKPXXAPTQLSPINVLYFXXXXXXXXXYGKIPNMVVRAXG

SEQ ID NO: 21870 - protein, 36 aa, Artificial Sequence
  Non-cyclic GFR-binding peptide
  MOD_RES (2), (34), (36): Xaa is C or S
TXAPTKLSPINVLYFDDSSNVIYGKIPNMVVRSXGX

SEQ ID NO: 21871 - protein, 34 aa, Artificial Sequence
  Non-cyclic GFR-binding peptide
  MOD_RES (1), (1): Xaa is C or S
  MOD_RES (15), (16), (17), (18), (19): Xaa is A or G
  MOD_RES (20), (21), (22), (23): Xaa is A or G or is absent
XAPTKLSPINVLYFXXXXXXXXXYGKIPNMVVRS

SEQ ID NO: 21872 - protein, 36 aa, Artificial Sequence
  Non-cyclic GFR-binding peptide
  MOD_RES (1), (33), (35): Xaa is C or S
XVPTRLSPINILYFDSANNVVYGKIPDMVVESXGXR

SEQ ID NO: 21873 - protein, 41 aa, Artificial Sequence
  Non-cyclic GFR-binding peptide
  MOD_RES (4), (5), (39), (41): Xaa is C or S
  MOD_RES (19), (20), (21), (22), (23): Xaa is A or G
  MOD_RES (24), (25), (26), (27): Xaa is A or G or is absent
PPTXXVPTRLSPINILYFXXXXXXXXXYGKIPDMVVESXGX

SEQ ID NO: 21874 - protein, 37 aa, Artificial Sequence
  Non-cyclic GFR-binding peptide
  MOD_RES (2), (3), (37): Xaa is C or S
  MOD_RES (17), (18), (19), (20), (21): Xaa is A or G
  MOD_RES (22), (23), (24), (25): Xaa is A or G or is absent
AXXAPTKLSPINVLYFXXXXXXXXXYGKIPNMVVKAX

SEQ ID NO: 21875 - protein, 37 aa, Artificial Sequence
  Non-cyclic GFR-binding peptide
  MOD_RES (3), (35), (37): Xaa is C or S
PTXAPTKLSPINVLYFDDSSNVIYGKIPNMVVRSXGX

SEQ ID NO: 21876 - protein, 39 aa, Artificial Sequence
  Non-cyclic GFR-binding peptide
  MOD_RES (5), (6): Xaa is C or S
  MOD_RES (20), (21), (22), (23), (24): Xaa is A or G
  MOD_RES (25), (26), (27), (28): Xaa is A or G or is absent
VPKPXXAPTQLSPINVLYFXXXXXXXXXYGKIPNMVVRA

SEQ ID NO: 21877 - protein, 37 aa, Artificial Sequence
  Non-cyclic GFR-binding peptide
  MOD_RES (4), (5), (37): Xaa is C or S
PASXXVPARLSPINILYFDAANNVVYGKIPDMVVEAX

SEQ ID NO: 21878 - protein, 37 aa, Artificial Sequence
  Non-cyclic GFR-binding peptide
  MOD_RES (1), (35), (37): Xaa is C or S
  MOD_RES (15), (16), (17), (18), (19): Xaa is A or G
  MOD_RES (20), (21), (22), (23): Xaa is A or G or is absent
XVPTELSPINMLYFXXXXXXXXXYGKIPEMVVEGXGX

SEQ ID NO: 21879 - protein, 39 aa, Artificial Sequence
  Non-cyclic GFR-binding peptide
  MOD_RES (5), (6), (39): Xaa is C or S
VGKAXXVPTKLSPINVLYFDDMGVPTYGKIPEGMSVAEX

SEQ ID NO: 21880 - protein, 37 aa, Artificial Sequence
  Non-cyclic GFR-binding peptide
  MOD_RES (4), (5): Xaa is C or S
  MOD_RES (19), (20), (21), (22), (23): Xaa is A or G
  MOD_RES (24), (25), (26), (27): Xaa is A or G or is absent
PKAXXVPTELSPINMLYFXXXXXXXXXYGKIPEMVVE

SEQ ID NO: 21881 - protein, 35 aa, Artificial Sequence
  Non-cyclic GFR-binding peptide
  MOD_RES (1), (35): Xaa is C or S
  MOD_RES (15), (16), (17), (18), (19): Xaa is A or G
  MOD_RES (20), (21), (22), (23): Xaa is A or G or is absent
XAPTKLSPINVLYFXXXXXXXXXYGKIPNMVVRSX

SEQ ID NO: 21882 - protein, 34 aa, Artificial Sequence
  Non-cyclic GFR-binding peptide
  MOD_RES (34), (34): Xaa is C or S
  MOD_RES (14), (15), (16), (17), (18): Xaa is A or G
  MOD_RES (19), (20), (21), (22): Xaa is A or G or is absent
VPTKLSPINILYFXXXXXXXXXYGKIPGMAVSEX

SEQ ID NO: 21883 - protein, 38 aa, Artificial Sequence
  Non-cyclic GFR-binding peptide
  MOD_RES (2), (3), (35), (37): Xaa is C or S
SXXVPARLSPINILYFDAANNVVYGKIPDMVVEAXGXR

SEQ ID NO: 21884 - protein, 38 aa, Artificial Sequence
  Non-cyclic GFR-binding peptide
  MOD_RES (5), (6): Xaa is C or S
  MOD_RES (20), (21), (22), (23), (24): Xaa is A or G
  MOD_RES (25), (26), (27), (28): Xaa is A or G or is absent
IPKAXXVPTELSPINMLYFXXXXXXXXXYGKIPEMVVE

SEQ ID NO: 21885 - protein, 32 aa, Artificial Sequence
  Non-cyclic GFR-binding peptide
  MOD_RES (14), (15), (16), (17), (18): Xaa is A or G
  MOD_RES (19), (20), (21), (22): Xaa is A or G or is absent
APTKLSPINVLYFXXXXXXXXXYGKIPNMVVR

SEQ ID NO: 21886 - protein, 36 aa, Artificial Sequence
  Non-cyclic GFR-binding peptide
  MOD_RES (3), (4): Xaa is C or S
  MOD_RES (18), (19), (20), (21), (22): Xaa is A or G
  MOD_RES (23), (24), (25), (26): Xaa is A or G or is absent
KAXXAPTKLSPINVLYFXXXXXXXXXYGKIPNMVVK

SEQ ID NO: 21887 - protein, 44 aa, Artificial Sequence
  Non-cyclic GFR-binding peptide
  MOD_RES (6), (7), (41), (43): Xaa is C or S
  MOD_RES (21), (22), (23), (24), (25): Xaa is A or G
  MOD_RES (26), (27), (28), (29): Xaa is A or G or is absent
HVPKPXXAPTKLSPINVLYFXXXXXXXXXYGKIPNMVVRSXGXH

SEQ ID NO: 21888 - protein, 32 aa, Artificial Sequence
  Non-cyclic GFR-binding peptide
  MOD_RES (1), (1): Xaa is C or S
XVPTKLSPINILYFDKGVVTYYGKIPGMAVSE

SEQ ID NO: 21889 - protein, 40 aa, Artificial Sequence
  Non-cyclic GFR-binding peptide
  MOD_RES (2), (3), (37), (39): Xaa is C or S
  MOD_RES (17), (18), (19), (20), (21): Xaa is A or G
  MOD_RES (22), (23), (24), (25): Xaa is A or G or is absent
AXXVPTELSPINMLYFXXXXXXXXXYGKIPDMVVEGXGXR

SEQ ID NO: 21890 - protein, 38 aa, Artificial Sequence
  Non-cyclic GFR-binding peptide
  MOD_RES (5), (6): Xaa is C or S
VGKAXXVPTKLSPINVLYFDDMGVPTYGKIPEGMSVAE

SEQ ID NO: 21891 - protein, 43 aa, Artificial Sequence
  Non-cyclic GFR-binding peptide
  MOD_RES (6), (7), (41), (43): Xaa is C or S
  MOD_RES (21), (22), (23), (24), (25): Xaa is A or G
  MOD_RES (26), (27), (28), (29): Xaa is A or G or is absent
HVPKPXXAPTKLSPINVLYFXXXXXXXXXYGKIPNMVVRSXGX

SEQ ID NO: 21892 - protein, 32 aa, Artificial Sequence
  Non-cyclic GFR-binding peptide
  MOD_RES (2), (2): Xaa is C or S
TXAPTKLSPINVLYFDDSSNVIYGKIPNMVVR

SEQ ID NO: 21893 - protein, 37 aa, Artificial Sequence
  Non-cyclic GFR-binding peptide
  MOD_RES (4), (5): Xaa is C or S
  MOD_RES (19), (20), (21), (22), (23): Xaa is A or G
  MOD_RES (24), (25), (26), (27): Xaa is A or G or is absent
PKPXXAPTKLSPINVLYFXXXXXXXXXYGKIPNMVVR

SEQ ID NO: 21894 - protein, 37 aa, Artificial Sequence
  Non-cyclic GFR-binding peptide
  MOD_RES (1), (2), (34), (36): Xaa is C or S
XXVPTELSPINMLYFDENEKVVYGKIPDMVVEGXGXR

SEQ ID NO: 21895 - protein, 37 aa, Artificial Sequence
  Non-cyclic GFR-binding peptide
  MOD_RES (2), (3), (35), (37): Xaa is C or S
PXXAPTKLSPINVLYFDDSSNVIYGKIPNMVVRSXGX

SEQ ID NO: 21896 - protein, 37 aa, Artificial Sequence
  Non-cyclic GFR-binding peptide
  MOD_RES (2), (3), (35), (37): Xaa is C or S
TXXVPTRLSPINILYFDSANNVVYGKIPDMVVESXGX

SEQ ID NO: 21897 - protein, 41 aa, Artificial Sequence
  Non-cyclic GFR-binding peptide
  MOD_RES (5), (6), (38), (40): Xaa is C or S
VPKAXXAPTKLSPINVLYFDSSNNVIYGKIPNMVVKAXGXH

SEQ ID NO: 21898 - protein, 39 aa, Artificial Sequence
  Non-cyclic GFR-binding peptide
  MOD_RES (1), (2), (36), (38): Xaa is C or S
  MOD_RES (16), (17), (18), (19), (20): Xaa is A or G
  MOD_RES (21), (22), (23), (24): Xaa is A or G or is absent
XXAPTKLSPINVLYFXXXXXXXXXYGKIPNMVVRSXGXH

SEQ ID NO: 21899 - protein, 35 aa, Artificial Sequence
  Non-cyclic GFR-binding peptide
  MOD_RES (2), (34): Xaa is C or S
TXAPTKLSPINVLYFDDSSNVIYGKIPNMVVRSXG

SEQ ID NO: 21900 - protein, 34 aa, Artificial Sequence
  Non-cyclic GFR-binding peptide
  MOD_RES (1), (33): Xaa is C or S
XVPARLSPINILYFDAANNVVYGKIPDMVVEAXG

SEQ ID NO: 21901 - protein, 35 aa, Artificial Sequence
  Non-cyclic GFR-binding peptide
  MOD_RES (4), (5): Xaa is C or S
PPTXXVPTRLSPINILYFDSANNVVYGKIPDMVVE

SEQ ID NO: 21902 - protein, 34 aa, Artificial Sequence
  Non-cyclic GFR-binding peptide
  MOD_RES (1), (2), (34): Xaa is C or S
XXAPTKLSPINVLYFDSSNNVIYGKIPNMVVKAX

SEQ ID NO: 21903 - protein, 40 aa, Artificial Sequence
  Non-cyclic GFR-binding peptide
  MOD_RES (6), (7), (39): Xaa is C or S
YVPKPXXAPTKLSPINVLYFDDSSNVIYGKIPNMVVRSXG

SEQ ID NO: 21904 - protein, 36 aa, Artificial Sequence
  Non-cyclic GFR-binding peptide
  MOD_RES (3), (3): Xaa is C or S
  MOD_RES (17), (18), (19), (20), (21): Xaa is A or G
  MOD_RES (22), (23), (24), (25): Xaa is A or G or is absent
PTXAPTKLSPINVLYFXXXXXXXXXYGKIPNMVVRS

SEQ ID NO: 21905 - protein, 39 aa, Artificial Sequence
  Non-cyclic GFR-binding peptide
  MOD_RES (5), (6), (38): Xaa is C or S
ASKAXXVPTKLSPINILYFDKGVVTYYGKIPGMAVSEXG

SEQ ID NO: 21906 - protein, 37 aa, Artificial Sequence
  Non-cyclic GFR-binding peptide
  MOD_RES (34), (36): Xaa is C or S
  MOD_RES (14), (15), (16), (17), (18): Xaa is A or G
  MOD_RES (19), (20), (21), (22): Xaa is A or G or is absent
APTKLSPINVLYFXXXXXXXXXYGKIPNMVVKAXGXH

SEQ ID NO: 21907 - protein, 38 aa, Artificial Sequence
  Non-cyclic GFR-binding peptide
  MOD_RES (4), (5), (37): Xaa is C or S
PKAXXAPTKLSPINVLYFDSSNNVIYGKIPNMVVKAXG

SEQ ID NO: 21908 - protein, 32 aa, Artificial Sequence
  Non-cyclic GFR-binding peptide
  MOD_RES (32), (32): Xaa is C or S
VPARLSPINILYFDAANNVVYGKIPDMVVEAX

SEQ ID NO: 21909 - protein, 39 aa, Artificial Sequence
  Non-cyclic GFR-binding peptide
  MOD_RES (2), (3), (38): Xaa is C or S
  MOD_RES (17), (18), (19), (20), (21): Xaa is A or G
  MOD_RES (22), (23), (24), (25): Xaa is A or G or is absent
AXXVPTKLSPINVLYFXXXXXXXXXYGKIPEGMSVAEXG

SEQ ID NO: 21910 - protein, 35 aa, Artificial Sequence
  Non-cyclic GFR-binding peptide
  MOD_RES (4), (5): Xaa is C or S
PKAXXAPTKLSPINVLYFDSSNNVIYGKIPNMVVK

SEQ ID NO: 21911 - protein, 34 aa, Artificial Sequence
  Non-cyclic GFR-binding peptide
  MOD_RES (33), (33): Xaa is C or S
  MOD_RES (14), (15), (16), (17), (18): Xaa is A or G
  MOD_RES (19), (20), (21), (22): Xaa is A or G or is absent
APVKTSPINMLYFXXXXXXXXXYGKIPMIVEEXG

SEQ ID NO: 21912 - protein, 34 aa, Artificial Sequence
  Non-cyclic GFR-binding peptide
  MOD_RES (3), (4): Xaa is C or S
KPXXAPTKLSPINVLYFDDSSNVIYGKIPNMVVR

SEQ ID NO: 21913 - protein, 41 aa, Artificial Sequence
  Non-cyclic GFR-binding peptide
  MOD_RES (6), (7), (39), (41): Xaa is C or S
KIPKAXXVPTELSPINMLYFDENEKVVYGKIPDMVVEGXGX

SEQ ID NO: 21914 - protein, 37 aa, Artificial Sequence
  Non-cyclic GFR-binding peptide
  MOD_RES (2), (36): Xaa is C or S
  MOD_RES (16), (17), (18), (19), (20): Xaa is A or G
  MOD_RES (21), (22), (23), (24): Xaa is A or G or is absent
TXAPTKLSPINVLYFXXXXXXXXXYGKIPNMVVRSXG

SEQ ID NO: 21915 - protein, 35 aa, Artificial Sequence
  Non-cyclic GFR-binding peptide
  MOD_RES (4), (5): Xaa is C or S
SKAXXVPTKLSPINILYFDKGVVTYYGKIPGMAVS

SEQ ID NO: 21916 - protein, 36 aa, Artificial Sequence
  Non-cyclic GFR-binding peptide
  MOD_RES (3), (4): Xaa is C or S
  MOD_RES (18), (19), (20), (21), (22): Xaa is A or G
  MOD_RES (23), (24), (25), (26): Xaa is A or G or is absent
STXXAPVKTSPINMLYFXXXXXXXXXYGKIPMIVEE

SEQ ID NO: 21917 - protein, 39 aa, Artificial Sequence
  Non-cyclic GFR-binding peptide
  MOD_RES (2), (3), (37), (39): Xaa is C or S
  MOD_RES (17), (18), (19), (20), (21): Xaa is A or G
  MOD_RES (22), (23), (24), (25): Xaa is A or G or is absent
AXXVPTELSPINMLYFXXXXXXXXXYGKIPEMVVEGXGX

SEQ ID NO: 21918 - protein, 38 aa, Artificial Sequence
  Non-cyclic GFR-binding peptide
  MOD_RES (4), (5), (37): Xaa is C or S
PASXXVPARLSPINILYFDAANNVVYGKIPDMVVEAXG

SEQ ID NO: 21919 - protein, 39 aa, Artificial Sequence
  Non-cyclic GFR-binding peptide
  MOD_RES (4), (5), (37), (39): Xaa is C or S
PASXXVPARLSPINILYFDAANNVVYGKIPDMVVEAXGX

SEQ ID NO: 21920 - protein, 35 aa, Artificial Sequence
  Non-cyclic GFR-binding peptide
  MOD_RES (34), (34): Xaa is C or S
  MOD_RES (14), (15), (16), (17), (18): Xaa is A or G
  MOD_RES (19), (20), (21), (22): Xaa is A or G or is absent
VPTRLSPINILYFXXXXXXXXXYGKIPDMVVESXG

SEQ ID NO: 21921 - protein, 40 aa, Artificial Sequence
  Non-cyclic GFR-binding peptide
  MOD_RES (5), (6), (40): Xaa is C or S
  MOD_RES (20), (21), (22), (23), (24): Xaa is A or G
  MOD_RES (25), (26), (27), (28): Xaa is A or G or is absent
VPKPXXAPTKLSPINVLYFXXXXXXXXXYGKIPNMVVRSX

SEQ ID NO: 21922 - protein, 37 aa, Artificial Sequence
  Non-cyclic GFR-binding peptide
  MOD_RES (3), (37): Xaa is C or S
  MOD_RES (17), (18), (19), (20), (21): Xaa is A or G
  MOD_RES (22), (23), (24), (25): Xaa is A or G or is absent
PTXAPTKLSPINVLYFXXXXXXXXXYGKIPNMVVRSX

SEQ ID NO: 21923 - protein, 35 aa, Artificial Sequence
  Non-cyclic GFR-binding peptide
  MOD_RES (34), (34): Xaa is C or S
  MOD_RES (14), (15), (16), (17), (18): Xaa is A or G
  MOD_RES (19), (20), (21), (22): Xaa is A or G or is absent
APTKLSPINVLYFXXXXXXXXXYGKIPNMVVRSXG

SEQ ID NO: 21924 - protein, 38 aa, Artificial Sequence
  Non-cyclic GFR-binding peptide
  MOD_RES (5), (6): Xaa is C or S
  MOD_RES (20), (21), (22), (23), (24): Xaa is A or G
  MOD_RES (25), (26), (27), (28): Xaa is A or G or is absent
IPKAXXVPTELSPINMLYFXXXXXXXXXYGKIPDMVVE

SEQ ID NO: 21925 - protein, 32 aa, Artificial Sequence
  Non-cyclic GFR-binding peptide
  MOD_RES (1), (1): Xaa is C or S
XAPTKLSPINVLYFDSSNNVIYGKIPNMVVKA

SEQ ID NO: 21926 - protein, 38 aa, Artificial Sequence
  Non-cyclic GFR-binding peptide
  MOD_RES (6), (7): Xaa is C or S
AVPKAXXAPTKLSPINVLYFDSSNNVIYGKIPNMVVKA

SEQ ID NO: 21927 - protein, 34 aa, Artificial Sequence
  Non-cyclic GFR-binding peptide
  MOD_RES (33), (33): Xaa is C or S
VPTKLSPINVLYFDDMGVPTYGKIPEGMSVAEXG

SEQ ID NO: 21928 - protein, 40 aa, Artificial Sequence
  Non-cyclic GFR-binding peptide
  MOD_RES (6), (38), (40): Xaa is C or S
VTKPTXAPTKLSPINVLYFDDSSNVIYGKIPNMVVRSXGX

SEQ ID NO: 21929 - protein, 37 aa, Artificial Sequence
  Non-cyclic GFR-binding peptide
  MOD_RES (5), (6): Xaa is C or S
VPKPXXAPTQLSPINVLYFDDSSNVIYGKIPNMVVRA

SEQ ID NO: 21930 - protein, 37 aa, Artificial Sequence
  Non-cyclic GFR-binding peptide
  MOD_RES (6), (7): Xaa is C or S
AVPKAXXAPTKLSPINVLYFDSSNNVIYGKIPNMVVK

SEQ ID NO: 21931 - protein, 35 aa, Artificial Sequence
  Non-cyclic GFR-binding peptide
  MOD_RES (3), (4): Xaa is C or S
KAXXVPTELSPINMLYFDEYDKVVYGKIPEMVVEG

SEQ ID NO: 21932 - protein, 40 aa, Artificial Sequence
  Non-cyclic GFR-binding peptide
  MOD_RES (2), (3), (37), (39): Xaa is C or S
  MOD_RES (17), (18), (19), (20), (21): Xaa is A or G
  MOD_RES (22), (23), (24), (25): Xaa is A or G or is absent
SXXVPARLSPINILYFXXXXXXXXXYGKIPDMVVEAXGXR

SEQ ID NO: 21933 - protein, 36 aa, Artificial Sequence
  Non-cyclic GFR-binding peptide
  MOD_RES (5), (6): Xaa is C or S
VPKPXXAPTQLSPINVLYFDDSSNVIYGKIPNMVVR

SEQ ID NO: 21934 - protein, 39 aa, Artificial Sequence
  Non-cyclic GFR-binding peptide
  MOD_RES (3), (4), (38): Xaa is C or S
  MOD_RES (18), (19), (20), (21), (22): Xaa is A or G
  MOD_RES (23), (24), (25), (26): Xaa is A or G or is absent
PTXXVPTRLSPINILYFXXXXXXXXXYGKIPDMVVESXG

SEQ ID NO: 21935 - protein, 32 aa, Artificial Sequence
  Non-cyclic GFR-binding peptide
  MOD_RES (14), (15), (16), (17), (18): Xaa is A or G
  MOD_RES (19), (20), (21), (22): Xaa is A or G or is absent
VPTKLSPINILYFXXXXXXXXXYGKIPGMAVS

SEQ ID NO: 21936 - protein, 40 aa, Artificial Sequence
  Non-cyclic GFR-binding peptide
  MOD_RES (2), (3), (37), (39): Xaa is C or S
  MOD_RES (17), (18), (19), (20), (21): Xaa is A or G
  MOD_RES (22), (23), (24), (25): Xaa is A or G or is absent
PXXAPTKLSPINVLYFXXXXXXXXXYGKIPNMVVRSXGXH

SEQ ID NO: 21937 - protein, 40 aa, Artificial Sequence
  Non-cyclic GFR-binding peptide
  MOD_RES (4), (5), (39): Xaa is C or S
  MOD_RES (19), (20), (21), (22), (23): Xaa is A or G
  MOD_RES (24), (25), (26), (27): Xaa is A or G or is absent
PKAXXVPTELSPINMLYFXXXXXXXXXYGKIPEMVVEGXG

SEQ ID NO: 21938 - protein, 42 aa, Artificial Sequence
  Non-cyclic GFR-binding peptide
  MOD_RES (4), (5), (39), (41): Xaa is C or S
  MOD_RES (19), (20), (21), (22), (23): Xaa is A or G
  MOD_RES (24), (25), (26), (27): Xaa is A or G or is absent
SKAXXVPTKLSPINILYFXXXXXXXXXYGKIPGMAVSEXGXR

SEQ ID NO: 21939 - protein, 42 aa, Artificial Sequence
  Non-cyclic GFR-binding peptide
  MOD_RES (7), (39), (41): Xaa is C or S
HVTKPTXAPTKLSPINVLYFDDSSNVIYGKIPNMVVRSXGXH

SEQ ID NO: 21940 - protein, 38 aa, Artificial Sequence
  Non-cyclic GFR-binding peptide
  MOD_RES (1), (35), (37): Xaa is C or S
  MOD_RES (15), (16), (17), (18), (19): Xaa is A or G
  MOD_RES (20), (21), (22), (23): Xaa is A or G or is absent
XVPTRLSPINILYFXXXXXXXXXYGKIPDMVVESXGXR

SEQ ID NO: 21941 - protein, 33 aa, Artificial Sequence
  Non-cyclic GFR-binding peptide
  MOD_RES (1), (2), (33): Xaa is C or S
XXAPVKTSPINMLYFDNGRVLLYGKIPMIVEEX

SEQ ID NO: 21942 - protein, 36 aa, Artificial Sequence
  Non-cyclic GFR-binding peptide
  MOD_RES (1), (2), (36): Xaa is C or S
  MOD_RES (16), (17), (18), (19), (20): Xaa is A or G
  MOD_RES (21), (22), (23), (24): Xaa is A or G or is absent
XXAPTKLSPINVLYFXXXXXXXXXYGKIPNMVVKAX

SEQ ID NO: 21943 - protein, 42 aa, Artificial Sequence
  Non-cyclic GFR-binding peptide
  MOD_RES (4), (5), (39), (41): Xaa is C or S
  MOD_RES (19), (20), (21), (22), (23): Xaa is A or G
  MOD_RES (24), (25), (26), (27): Xaa is A or G or is absent
PKPXXAPTKLSPINVLYFXXXXXXXXXYGKIPNMVVRSXGXH

SEQ ID NO: 21944 - protein, 39 aa, Artificial Sequence
  Non-cyclic GFR-binding peptide
  MOD_RES (5), (39): Xaa is C or S
  MOD_RES (19), (20), (21), (22), (23): Xaa is A or G
  MOD_RES (24), (25), (26), (27): Xaa is A or G or is absent
TKPTXAPTKLSPINVLYFXXXXXXXXXYGKIPNMVVRSX

SEQ ID NO: 21945 - protein, 35 aa, Artificial Sequence
  Non-cyclic GFR-binding peptide
  MOD_RES (32), (34): Xaa is C or S
VPARLSPINILYFDAANNVVYGKIPDMVVEAXGXR

SEQ ID NO: 21946 - protein, 41 aa, Artificial Sequence
  Non-cyclic GFR-binding peptide
  MOD_RES (4), (5), (38), (40): Xaa is C or S
GKAXXVPTKLSPINVLYFDDMGVPTYGKIPEGMSVAEXGXR

SEQ ID NO: 21947 - protein, 32 aa, Artificial Sequence
  Non-cyclic GFR-binding peptide
  MOD_RES (32), (32): Xaa is C or S
APTQLSPINVLYFDDSSNVIYGKIPNMVVRAX

SEQ ID NO: 21948 - protein, 41 aa, Artificial Sequence
  Non-cyclic GFR-binding peptide
  MOD_RES (5), (6), (38), (40): Xaa is C or S
IPKAXXVPTELSPINMLYFDENEKVVYGKIPDMVVEGXGXR

SEQ ID NO: 21949 - protein, 39 aa, Artificial Sequence
  Non-cyclic GFR-binding peptide
  MOD_RES (4), (5), (36), (38): Xaa is C or S
PSTXXAPVKTSPINMLYFDNGRVLLYGKIPMIVEEXGXL

SEQ ID NO: 21950 - protein, 34 aa, Artificial Sequence
  Non-cyclic GFR-binding peptide
  MOD_RES (34), (34): Xaa is C or S
  MOD_RES (14), (15), (16), (17), (18): Xaa is A or G
  MOD_RES (19), (20), (21), (22): Xaa is A or G or is absent
VPTELSPINMLYFXXXXXXXXXYGKIPDMVVEGX

SEQ ID NO: 21951 - protein, 38 aa, Artificial Sequence
  Non-cyclic GFR-binding peptide
  MOD_RES (5), (6), (38): Xaa is C or S
VPKPXXAPTQLSPINVLYFDDSSNVIYGKIPNMVVRAX

SEQ ID NO: 21952 - protein, 39 aa, Artificial Sequence
  Non-cyclic GFR-binding peptide
  MOD_RES (2), (3), (37), (39): Xaa is C or S
  MOD_RES (17), (18), (19), (20), (21): Xaa is A or G
  MOD_RES (22), (23), (24), (25): Xaa is A or G or is absent
AXXVPTKLSPINILYFXXXXXXXXXYGKIPGMAVSEXGX

SEQ ID NO: 21953 - protein, 35 aa, Artificial Sequence
  Non-cyclic GFR-binding peptide
  MOD_RES (4), (5): Xaa is C or S
PSTXXAPVKTSPINMLYFDNGRVLLYGKIPMIVEE

SEQ ID NO: 21954 - protein, 42 aa, Artificial Sequence
  Non-cyclic GFR-binding peptide
  MOD_RES (3), (4), (39), (41): Xaa is C or S
  MOD_RES (18), (19), (20), (21), (22): Xaa is A or G
  MOD_RES (23), (24), (25), (26): Xaa is A or G or is absent
KAXXVPTKLSPINVLYFXXXXXXXXXYGKIPEGMSVAEXGXR

SEQ ID NO: 21955 - protein, 37 aa, Artificial Sequence
  Non-cyclic GFR-binding peptide
  MOD_RES (3), (4): Xaa is C or S
  MOD_RES (18), (19), (20), (21), (22): Xaa is A or G
  MOD_RES (23), (24), (25), (26): Xaa is A or G or is absent
KPXXAPTQLSPINVLYFXXXXXXXXXYGKIPNMVVRA

SEQ ID NO: 21956 - protein, 35 aa, Artificial Sequence
  Non-cyclic GFR-binding peptide
  MOD_RES (2), (3), (35): Xaa is C or S
SXXVPARLSPINILYFDAANNVVYGKIPDMVVEAX

SEQ ID NO: 21957 - protein, 38 aa, Artificial Sequence
  Non-cyclic GFR-binding peptide
  MOD_RES (2), (3), (37): Xaa is C or S
  MOD_RES (17), (18), (19), (20), (21): Xaa is A or G
  MOD_RES (22), (23), (24), (25): Xaa is A or G or is absent
PXXAPTKLSPINVLYFXXXXXXXXXYGKIPNMVVRSXG

SEQ ID NO: 21958 - protein, 34 aa, Artificial Sequence
  Non-cyclic GFR-binding peptide
  MOD_RES (34), (34): Xaa is C or S
  MOD_RES (14), (15), (16), (17), (18): Xaa is A or G
  MOD_RES (19), (20), (21), (22): Xaa is A or G or is absent
APTKLSPINVLYFXXXXXXXXXYGKIPNMVVRSX

SEQ ID NO: 21959 - protein, 35 aa, Artificial Sequence
  Non-cyclic GFR-binding peptide
  MOD_RES (2), (3), (35): Xaa is C or S
AXXVPTKLSPINILYFDKGVVTYYGKIPGMAVSEX

SEQ ID NO: 21960 - protein, 43 aa, Artificial Sequence
  Non-cyclic GFR-binding peptide
  MOD_RES (6), (7), (41), (43): Xaa is C or S
  MOD_RES (21), (22), (23), (24), (25): Xaa is A or G
  MOD_RES (26), (27), (28), (29): Xaa is A or G or is absent
YVPKPXXAPTKLSPINVLYFXXXXXXXXXYGKIPNMVVRSXGX

SEQ ID NO: 21961 - protein, 41 aa, Artificial Sequence
  Non-cyclic GFR-binding peptide
  MOD_RES (4), (5), (39), (41): Xaa is C or S
  MOD_RES (19), (20), (21), (22), (23): Xaa is A or G
  MOD_RES (24), (25), (26), (27): Xaa is A or G or is absent
PKPXXAPTQLSPINVLYFXXXXXXXXXYGKIPNMVVRAXGX

SEQ ID NO: 21962 - protein, 35 aa, Artificial Sequence
  Non-cyclic GFR-binding peptide
  MOD_RES (1), (34): Xaa is C or S
  MOD_RES (15), (16), (17), (18), (19): Xaa is A or G
  MOD_RES (20), (21), (22), (23): Xaa is A or G or is absent
XAPVKTSPINMLYFXXXXXXXXXYGKIPMIVEEXG

SEQ ID NO: 21963 - protein, 37 aa, Artificial Sequence
  Non-cyclic GFR-binding peptide
  MOD_RES (4), (5), (37): Xaa is C or S
PKPXXAPTQLSPINVLYFDDSSNVIYGKIPNMVVRAX

SEQ ID NO: 21964 - protein, 39 aa, Artificial Sequence
  Non-cyclic GFR-binding peptide
  MOD_RES (2), (3), (37), (39): Xaa is C or S
  MOD_RES (17), (18), (19), (20), (21): Xaa is A or G
  MOD_RES (22), (23), (24), (25): Xaa is A or G or is absent
AXXVPTELSPINMLYFXXXXXXXXXYGKIPDMVVEGXGX

SEQ ID NO: 21965 - protein, 34 aa, Artificial Sequence
  Non-cyclic GFR-binding peptide
  MOD_RES (1), (2): Xaa is C or S
XXVPTKLSPINVLYFDDMGVPTYGKIPEGMSVAE

SEQ ID NO: 21966 - protein, 35 aa, Artificial Sequence
  Non-cyclic GFR-binding peptide
  MOD_RES (1), (35): Xaa is C or S
  MOD_RES (15), (16), (17), (18), (19): Xaa is A or G
  MOD_RES (20), (21), (22), (23): Xaa is A or G or is absent
XVPTKLSPINILYFXXXXXXXXXYGKIPGMAVSEX

SEQ ID NO: 21967 - protein, 35 aa, Artificial Sequence
  Non-cyclic GFR-binding peptide
  MOD_RES (2), (3), (35): Xaa is C or S
PXXAPTQLSPINVLYFDDSSNVIYGKIPNMVVRAX

SEQ ID NO: 21968 - protein, 39 aa, Artificial Sequence
  Non-cyclic GFR-binding peptide
  MOD_RES (2), (36), (38): Xaa is C or S
  MOD_RES (16), (17), (18), (19), (20): Xaa is A or G
  MOD_RES (21), (22), (23), (24): Xaa is A or G or is absent
TXAPTKLSPINVLYFXXXXXXXXXYGKIPNMVVRSXGXH

SEQ ID NO: 21969 - protein, 40 aa, Artificial Sequence
  Non-cyclic GFR-binding peptide
  MOD_RES (4), (5), (37), (39): Xaa is C or S
PASXXVPARLSPINILYFDAANNVVYGKIPDMVVEAXGXR

SEQ ID NO: 21970 - protein, 36 aa, Artificial Sequence
  Non-cyclic GFR-binding peptide
  MOD_RES (1), (2), (34), (36): Xaa is C or S
XXVPARLSPINILYFDAANNVVYGKIPDMVVEAXGX

SEQ ID NO: 21971 - protein, 40 aa, Artificial Sequence
  Non-cyclic GFR-binding peptide
  MOD_RES (4), (5), (37), (39): Xaa is C or S
PKAXXAPTKLSPINVLYFDSSNNVIYGKIPNMVVKAXGXH

SEQ ID NO: 21972 - protein, 37 aa, Artificial Sequence
  Non-cyclic GFR-binding peptide
  MOD_RES (5), (37): Xaa is C or S
TKPTXAPTKLSPINVLYFDDSSNVIYGKIPNMVVRSX

SEQ ID NO: 21973 - protein, 41 aa, Artificial Sequence
  Non-cyclic GFR-binding peptide
  MOD_RES (5), (6), (38), (40): Xaa is C or S
APASXXVPARLSPINILYFDAANNVVYGKIPDMVVEAXGXR

SEQ ID NO: 21974 - protein, 42 aa, Artificial Sequence
  Non-cyclic GFR-binding peptide
  MOD_RES (5), (6), (40), (42): Xaa is C or S
  MOD_RES (20), (21), (22), (23), (24): Xaa is A or G
  MOD_RES (25), (26), (27), (28): Xaa is A or G or is absent
APASXXVPARLSPINILYFXXXXXXXXXYGKIPDMVVEAXGX

SEQ ID NO: 21975 - protein, 35 aa, Artificial Sequence
  Non-cyclic GFR-binding peptide
  MOD_RES (1), (35): Xaa is C or S
  MOD_RES (15), (16), (17), (18), (19): Xaa is A or G
  MOD_RES (20), (21), (22), (23): Xaa is A or G or is absent
XVPTELSPINMLYFXXXXXXXXXYGKIPEMVVEGX

SEQ ID NO: 21976 - protein, 36 aa, Artificial Sequence
  Non-cyclic GFR-binding peptide
  MOD_RES (2), (3), (35): Xaa is C or S
AXXVPTELSPINMLYFDEYDKVVYGKIPEMVVEGXG

SEQ ID NO: 21977 - protein, 37 aa, Artificial Sequence
  Non-cyclic GFR-binding peptide
  MOD_RES (34), (36): Xaa is C or S
  MOD_RES (14), (15), (16), (17), (18): Xaa is A or G
  MOD_RES (19), (20), (21), (22): Xaa is A or G or is absent
VPTRLSPINILYFXXXXXXXXXYGKIPDMVVESXGXR

SEQ ID NO: 21978 - protein, 32 aa, Artificial Sequence
  Non-cyclic GFR-binding peptide
VPTKLSPINVLYFDDMGVPTYGKIPEGMSVAE

SEQ ID NO: 21979 - protein, 38 aa, Artificial Sequence
  Non-cyclic GFR-binding peptide
  MOD_RES (2), (3), (36), (38): Xaa is C or S
  MOD_RES (17), (18), (19), (20), (21): Xaa is A or G
  MOD_RES (22), (23), (24), (25): Xaa is A or G or is absent
TXXAPVKTSPINMLYFXXXXXXXXXYGKIPMIVEEXGX

SEQ ID NO: 21980 - protein, 38 aa, Artificial Sequence
  Non-cyclic GFR-binding peptide
  MOD_RES (3), (4), (38): Xaa is C or S
  MOD_RES (18), (19), (20), (21), (22): Xaa is A or G
  MOD_RES (23), (24), (25), (26): Xaa is A or G or is absent
PTXXVPTRLSPINILYFXXXXXXXXXYGKIPDMVVESX

SEQ ID NO: 21981 - protein, 40 aa, Artificial Sequence
  Non-cyclic GFR-binding peptide
  MOD_RES (4), (5), (38), (40): Xaa is C or S
  MOD_RES (19), (20), (21), (22), (23): Xaa is A or G
  MOD_RES (24), (25), (26), (27): Xaa is A or G or is absent
PSTXXAPVKTSPINMLYFXXXXXXXXXYGKIPMIVEEXGX

SEQ ID NO: 21982 - protein, 35 aa, Artificial Sequence
  Non-cyclic GFR-binding peptide
  MOD_RES (1), (2), (34): Xaa is C or S
XXVPTKLSPINILYFDKGVVTYYGKIPGMAVSEXG

SEQ ID NO: 21983 - protein, 36 aa, Artificial Sequence
  Non-cyclic GFR-binding peptide
  MOD_RES (5), (6): Xaa is C or S
IPKAXXVPTELSPINMLYFDENEKVVYGKIPDMVVE

SEQ ID NO: 21984 - protein, 40 aa, Artificial Sequence
  Non-cyclic GFR-binding peptide
  MOD_RES (7), (39): Xaa is C or S
HVTKPTXAPTKLSPINVLYFDDSSNVIYGKIPNMVVRSXG

SEQ ID NO: 21985 - protein, 39 aa, Artificial Sequence
  Non-cyclic GFR-binding peptide
  MOD_RES (3), (4), (36), (38): Xaa is C or S
KAXXVPTELSPINMLYFDENEKVVYGKIPDMVVEGXGXR

SEQ ID NO: 21986 - protein, 35 aa, Artificial Sequence
  Non-cyclic GFR-binding peptide
  MOD_RES (33), (35): Xaa is C or S
VPTKLSPINVLYFDDMGVPTYGKIPEGMSVAEXGX

SEQ ID NO: 21987 - protein, 36 aa, Artificial Sequence
  Non-cyclic GFR-binding peptide
  MOD_RES (5), (6): Xaa is C or S
VPKPXXAPTKLSPINVLYFDDSSNVIYGKIPNMVVR

SEQ ID NO: 21988 - protein, 37 aa, Artificial Sequence
  Non-cyclic GFR-binding peptide
  MOD_RES (3), (4), (35), (37): Xaa is C or S
STXXAPVKTSPINMLYFDNGRVLLYGKIPMIVEEXGX

SEQ ID NO: 21989 - protein, 41 aa, Artificial Sequence
  Non-cyclic GFR-binding peptide
  MOD_RES (6), (7), (39), (41): Xaa is C or S
STPPTXXVPTRLSPINILYFDSANNVVYGKIPDMVVESXGX

SEQ ID NO: 21990 - protein, 36 aa, Artificial Sequence
  Non-cyclic GFR-binding peptide
  MOD_RES (2), (3): Xaa is C or S
  MOD_RES (17), (18), (19), (20), (21): Xaa is A or G
  MOD_RES (22), (23), (24), (25): Xaa is A or G or is absent
SXXVPARLSPINILYFXXXXXXXXXYGKIPDMVVEA

SEQ ID NO: 21991 - protein, 36 aa, Artificial Sequence
  Non-cyclic GFR-binding peptide
  MOD_RES (3), (4): Xaa is C or S
  MOD_RES (18), (19), (20), (21), (22): Xaa is A or G
  MOD_RES (23), (24), (25), (26): Xaa is A or G or is absent
KPXXAPTQLSPINVLYFXXXXXXXXXYGKIPNMVVR

SEQ ID NO: 21992 - protein, 36 aa, Artificial Sequence
  Non-cyclic GFR-binding peptide
  MOD_RES (1), (35): Xaa is C or S
  MOD_RES (15), (16), (17), (18), (19): Xaa is A or G
  MOD_RES (20), (21), (22), (23): Xaa is A or G or is absent
XVPTKLSPINILYFXXXXXXXXXYGKIPGMAVSEXG

SEQ ID NO: 21993 - protein, 32 aa, Artificial Sequence
  Non-cyclic GFR-binding peptide
  MOD_RES (14), (15), (16), (17), (18): Xaa is A or G
  MOD_RES (19), (20), (21), (22): Xaa is A or G or is absent
APTQLSPINVLYFXXXXXXXXXYGKIPNMVVR

SEQ ID NO: 21994 - protein, 40 aa, Artificial Sequence
  Non-cyclic GFR-binding peptide
  MOD_RES (5), (6), (40): Xaa is C or S
  MOD_RES (20), (21), (22), (23), (24): Xaa is A or G
  MOD_RES (25), (26), (27), (28): Xaa is A or G or is absent
TPPTXXVPTRLSPINILYFXXXXXXXXXYGKIPDMVVESX

SEQ ID NO: 21995 - protein, 39 aa, Artificial Sequence
  Non-cyclic GFR-binding peptide
  MOD_RES (5), (6), (38): Xaa is C or S
TPPTXXVPTRLSPINILYFDSANNVVYGKIPDMVVESXG

SEQ ID NO: 21996 - protein, 35 aa, Artificial Sequence
  Non-cyclic GFR-binding peptide
  MOD_RES (33), (35): Xaa is C or S
  MOD_RES (14), (15), (16), (17), (18): Xaa is A or G
  MOD_RES (19), (20), (21), (22): Xaa is A or G or is absent
APVKTSPINMLYFXXXXXXXXXYGKIPMIVEEXGX

SEQ ID NO: 21997 - protein, 36 aa, Artificial Sequence
  Non-cyclic GFR-binding peptide
  MOD_RES (5), (6): Xaa is C or S
VPSTXXAPVKTSPINMLYFDNGRVLLYGKIPMIVEE

SEQ ID NO: 21998 - protein, 37 aa, Artificial Sequence
  Non-cyclic GFR-binding peptide
  MOD_RES (2), (3), (35), (37): Xaa is C or S
AXXAPTKLSPINVLYFDSSNNVIYGKIPNMVVKAXGX

SEQ ID NO: 21999 - protein, 40 aa, Artificial Sequence
  Non-cyclic GFR-binding peptide
  MOD_RES (3), (4), (38), (40): Xaa is C or S
  MOD_RES (18), (19), (20), (21), (22): Xaa is A or G
  MOD_RES (23), (24), (25), (26): Xaa is A or G or is absent
KAXXVPTELSPINMLYFXXXXXXXXXYGKIPEMVVEGXGX

SEQ ID NO: 22000 - protein, 37 aa, Artificial Sequence
  Non-cyclic GFR-binding peptide
  MOD_RES (1), (34), (36): Xaa is C or S
  MOD_RES (15), (16), (17), (18), (19): Xaa is A or G
  MOD_RES (20), (21), (22), (23): Xaa is A or G or is absent
XAPVKTSPINMLYFXXXXXXXXXYGKIPMIVEEXGXL

SEQ ID NO: 22001 - protein, 41 aa, Artificial Sequence
  Non-cyclic GFR-binding peptide
  MOD_RES (6), (38), (40): Xaa is C or S
VTKPTXAPTKLSPINVLYFDDSSNVIYGKIPNMVVRSXGXH

SEQ ID NO: 22002 - protein, 37 aa, Artificial Sequence
  Non-cyclic GFR-binding peptide
  MOD_RES (34), (36): Xaa is C or S
  MOD_RES (14), (15), (16), (17), (18): Xaa is A or G
  MOD_RES (19), (20), (21), (22): Xaa is A or G or is absent
APTKLSPINVLYFXXXXXXXXXYGKIPNMVVRSXGXH

SEQ ID NO: 22003 - protein, 45 aa, Artificial Sequence
  Non-cyclic GFR-binding peptide
  MOD_RES (6), (7), (42), (44): Xaa is C or S
  MOD_RES (21), (22), (23), (24), (25): Xaa is A or G
  MOD_RES (26), (27), (28), (29): Xaa is A or G or is absent
KVGKAXXVPTKLSPINVLYFXXXXXXXXXYGKIPEGMSVAEXGXR

SEQ ID NO: 22004 - protein, 33 aa, Artificial Sequence
  Non-cyclic GFR-binding peptide
  MOD_RES (1), (2): Xaa is C or S
XXAPTKLSPINVLYFDSSNNVIYGKIPNMVVKA

SEQ ID NO: 22005 - protein, 36 aa, Artificial Sequence
  Non-cyclic GFR-binding peptide
  MOD_RES (1), (33), (35): Xaa is C or S
XAPTKLSPINVLYFDDSSNVIYGKIPNMVVRSXGXH

SEQ ID NO: 22006 - protein, 39 aa, Artificial Sequence
  Non-cyclic GFR-binding peptide
  MOD_RES (6), (7): Xaa is C or S
  MOD_RES (21), (22), (23), (24), (25): Xaa is A or G
  MOD_RES (26), (27), (28), (29): Xaa is A or G or is absent
SIPKAXXVPTELSPINMLYFXXXXXXXXXYGKIPEMVVE

SEQ ID NO: 22007 - protein, 32 aa, Artificial Sequence
  Non-cyclic GFR-binding peptide
  MOD_RES (32), (32): Xaa is C or S
VPTRLSPINILYFDSANNVVYGKIPDMVVESX

SEQ ID NO: 22008 - protein, 35 aa, Artificial Sequence
  Non-cyclic GFR-binding peptide
  MOD_RES (2), (3): Xaa is C or S
  MOD_RES (17), (18), (19), (20), (21): Xaa is A or G
  MOD_RES (22), (23), (24), (25): Xaa is A or G or is absent
AXXAPTKLSPINVLYFXXXXXXXXXYGKIPNMVVK

SEQ ID NO: 22009 - protein, 39 aa, Artificial Sequence
  Non-cyclic GFR-binding peptide
  MOD_RES (4), (5), (39): Xaa is C or S
  MOD_RES (19), (20), (21), (22), (23): Xaa is A or G
  MOD_RES (24), (25), (26), (27): Xaa is A or G or is absent
PKPXXAPTQLSPINVLYFXXXXXXXXXYGKIPNMVVRAX

SEQ ID NO: 22010 - protein, 38 aa, Artificial Sequence
  Non-cyclic GFR-binding peptide
  MOD_RES (5), (6): Xaa is C or S
  MOD_RES (20), (21), (22), (23), (24): Xaa is A or G
  MOD_RES (25), (26), (27), (28): Xaa is A or G or is absent
VPKPXXAPTKLSPINVLYFXXXXXXXXXYGKIPNMVVR

SEQ ID NO: 22011 - protein, 32 aa, Artificial Sequence
  Non-cyclic GFR-binding peptide
  MOD_RES (14), (15), (16), (17), (18): Xaa is A or G
  MOD_RES (19), (20), (21), (22): Xaa is A or G or is absent
VPTELSPINMLYFXXXXXXXXXYGKIPEMVVE

SEQ ID NO: 22012 - protein, 36 aa, Artificial Sequence
  Non-cyclic GFR-binding peptide
  MOD_RES (1), (33), (35): Xaa is C or S
XAPTKLSPINVLYFDSSNNVIYGKIPNMVVKAXGXH

SEQ ID NO: 22013 - protein, 31 aa, Artificial Sequence
  Non-cyclic GFR-binding peptide
  MOD_RES (1), (1): Xaa is C or S
XAPVKTSPINMLYFDNGRVLLYGKIPMIVEE

SEQ ID NO: 22014 - protein, 41 aa, Artificial Sequence
  Non-cyclic GFR-binding peptide
  MOD_RES (5), (6), (40): Xaa is C or S
  MOD_RES (20), (21), (22), (23), (24): Xaa is A or G
  MOD_RES (25), (26), (27), (28): Xaa is A or G or is absent
ASKAXXVPTKLSPINILYFXXXXXXXXXYGKIPGMAVSEXG

SEQ ID NO: 22015 - protein, 34 aa, Artificial Sequence
  Non-cyclic GFR-binding peptide
  MOD_RES (2), (3): Xaa is C or S
AXXVPTKLSPINILYFDKGVVTYYGKIPGMAVSE

SEQ ID NO: 22016 - protein, 34 aa, Artificial Sequence
  Non-cyclic GFR-binding peptide
  MOD_RES (32), (34): Xaa is C or S
VPTELSPINMLYFDENEKVVYGKIPDMVVEGXGX

SEQ ID NO: 22017 - protein, 34 aa, Artificial Sequence
  Non-cyclic GFR-binding peptide
  MOD_RES (2), (3): Xaa is C or S
TXXVPTRLSPINILYFDSANNVVYGKIPDMVVES

SEQ ID NO: 22018 - protein, 41 aa, Artificial Sequence
  Non-cyclic GFR-binding peptide
  MOD_RES (3), (4), (38), (40): Xaa is C or S
  MOD_RES (18), (19), (20), (21), (22): Xaa is A or G
  MOD_RES (23), (24), (25), (26): Xaa is A or G or is absent
KAXXAPTKLSPINVLYFXXXXXXXXXYGKIPNMVVKAXGXH

SEQ ID NO: 22019 - protein, 40 aa, Artificial Sequence
  Non-cyclic GFR-binding peptide
  MOD_RES (6), (7), (39): Xaa is C or S
SIPKAXXVPTELSPINMLYFDEYDKVVYGKIPEMVVEGXG

SEQ ID NO: 22020 - protein, 40 aa, Artificial Sequence
  Non-cyclic GFR-binding peptide
  MOD_RES (3), (37), (39): Xaa is C or S
  MOD_RES (17), (18), (19), (20), (21): Xaa is A or G
  MOD_RES (22), (23), (24), (25): Xaa is A or G or is absent
PTXAPTKLSPINVLYFXXXXXXXXXYGKIPNMVVRSXGXH

SEQ ID NO: 22021 - protein, 33 aa, Artificial Sequence
  Non-cyclic GFR-binding peptide
  MOD_RES (14), (15), (16), (17), (18): Xaa is A or G
  MOD_RES (19), (20), (21), (22): Xaa is A or G or is absent
VPTELSPINMLYFXXXXXXXXXYGKIPDMVVEG

SEQ ID NO: 22022 - protein, 40 aa, Artificial Sequence
  Non-cyclic GFR-binding peptide
  MOD_RES (6), (7), (39): Xaa is C or S
KASKAXXVPTKLSPINILYFDKGVVTYYGKIPGMAVSEXG

SEQ ID NO: 22023 - protein, 33 aa, Artificial Sequence
  Non-cyclic GFR-binding peptide
  MOD_RES (14), (15), (16), (17), (18): Xaa is A or G
  MOD_RES (19), (20), (21), (22): Xaa is A or G or is absent
APTKLSPINVLYFXXXXXXXXXYGKIPNMVVKA

SEQ ID NO: 22024 - protein, 38 aa, Artificial Sequence
  Non-cyclic GFR-binding peptide
  MOD_RES (6), (7): Xaa is C or S
KASKAXXVPTKLSPINILYFDKGVVTYYGKIPGMAVSE

SEQ ID NO: 22025 - protein, 36 aa, Artificial Sequence
  Non-cyclic GFR-binding peptide
  MOD_RES (2), (3): Xaa is C or S
  MOD_RES (17), (18), (19), (20), (21): Xaa is A or G
  MOD_RES (22), (23), (24), (25): Xaa is A or G or is absent
AXXVPTELSPINMLYFXXXXXXXXXYGKIPEMVVEG

SEQ ID NO: 22026 - protein, 36 aa, Artificial Sequence
  Non-cyclic GFR-binding peptide
  MOD_RES (34), (36): Xaa is C or S
  MOD_RES (14), (15), (16), (17), (18): Xaa is A or G
  MOD_RES (19), (20), (21), (22): Xaa is A or G or is absent
VPTELSPINMLYFXXXXXXXXXYGKIPDMVVEGXGX

SEQ ID NO: 22027 - protein, 37 aa, Artificial Sequence
  Non-cyclic GFR-binding peptide
  MOD_RES (34), (36): Xaa is C or S
  MOD_RES (14), (15), (16), (17), (18): Xaa is A or G
  MOD_RES (19), (20), (21), (22): Xaa is A or G or is absent
VPTELSPINMLYFXXXXXXXXXYGKIPEMVVEGXGXR

SEQ ID NO: 22028 - protein, 42 aa, Artificial Sequence
  Non-cyclic GFR-binding peptide
  MOD_RES (6), (7), (41): Xaa is C or S
  MOD_RES (21), (22), (23), (24), (25): Xaa is A or G
  MOD_RES (26), (27), (28), (29): Xaa is A or G or is absent
YVPKPXXAPTKLSPINVLYFXXXXXXXXXYGKIPNMVVRSXG

SEQ ID NO: 22029 - protein, 38 aa, Artificial Sequence
  Non-cyclic GFR-binding peptide
  MOD_RES (3), (4), (38): Xaa is C or S
  MOD_RES (18), (19), (20), (21), (22): Xaa is A or G
  MOD_RES (23), (24), (25), (26): Xaa is A or G or is absent
KAXXVPTELSPINMLYFXXXXXXXXXYGKIPEMVVEGX

SEQ ID NO: 22030 - protein, 38 aa, Artificial Sequence
  Non-cyclic GFR-binding peptide
  MOD_RES (2), (3), (37): Xaa is C or S
  MOD_RES (17), (18), (19), (20), (21): Xaa is A or G
  MOD_RES (22), (23), (24), (25): Xaa is A or G or is absent
SXXVPARLSPINILYFXXXXXXXXXYGKIPDMVVEAXG

SEQ ID NO: 22031 - protein, 34 aa, Artificial Sequence
  Non-cyclic GFR-binding peptide
  MOD_RES (2), (34): Xaa is C or S
TXAPTKLSPINVLYFDDSSNVIYGKIPNMVVRSX

SEQ ID NO: 22032 - protein, 38 aa, Artificial Sequence
  Non-cyclic GFR-binding peptide
  MOD_RES (3), (4), (38): Xaa is C or S
  MOD_RES (18), (19), (20), (21), (22): Xaa is A or G
  MOD_RES (23), (24), (25), (26): Xaa is A or G or is absent
KAXXVPTKLSPINILYFXXXXXXXXXYGKIPGMAVSEX

SEQ ID NO: 22033 - protein, 33 aa, Artificial Sequence
  Non-cyclic GFR-binding peptide
  MOD_RES (14), (15), (16), (17), (18): Xaa is A or G
  MOD_RES (19), (20), (21), (22): Xaa is A or G or is absent
APTKLSPINVLYFXXXXXXXXXYGKIPNMVVRS

SEQ ID NO: 22034 - protein, 43 aa, Artificial Sequence
  Non-cyclic GFR-binding peptide
  MOD_RES (4), (5), (40), (42): Xaa is C or S
  MOD_RES (19), (20), (21), (22), (23): Xaa is A or G
  MOD_RES (24), (25), (26), (27): Xaa is A or G or is absent
GKAXXVPTKLSPINVLYFXXXXXXXXXYGKIPEGMSVAEXGXR

SEQ ID NO: 22035 - protein, 40 aa, Artificial Sequence
  Non-cyclic GFR-binding peptide
  MOD_RES (5), (6), (38), (40): Xaa is C or S
APASXXVPARLSPINILYFDAANNVVYGKIPDMVVEAXGX

SEQ ID NO: 22036 - protein, 36 aa, Artificial Sequence
  Non-cyclic GFR-binding peptide
  MOD_RES (1), (2), (34), (36): Xaa is C or S
XXVPTKLSPINILYFDKGVVTYYGKIPGMAVSEXGX

SEQ ID NO: 22037 - protein, 36 aa, Artificial Sequence
  Non-cyclic GFR-binding peptide
  MOD_RES (34), (36): Xaa is C or S
  MOD_RES (14), (15), (16), (17), (18): Xaa is A or G
  MOD_RES (19), (20), (21), (22): Xaa is A or G or is absent
VPARLSPINILYFXXXXXXXXXYGKIPDMVVEAXGX

SEQ ID NO: 22038 - protein, 30 aa, Artificial Sequence
  Non-cyclic GFR-binding peptide
VPTRLSPINILYFDSANNVVYGKIPDMVVE

SEQ ID NO: 22039 - protein, 35 aa, Artificial Sequence
  Non-cyclic GFR-binding peptide
  MOD_RES (1), (2), (34): Xaa is C or S
XXVPTELSPINMLYFDENEKVVYGKIPDMVVEGXG

SEQ ID NO: 22040 - protein, 38 aa, Artificial Sequence
  Non-cyclic GFR-binding peptide
  MOD_RES (3), (4): Xaa is C or S
  MOD_RES (18), (19), (20), (21), (22): Xaa is A or G
  MOD_RES (23), (24), (25), (26): Xaa is A or G or is absent
KAXXVPTKLSPINVLYFXXXXXXXXXYGKIPEGMSVAE

SEQ ID NO: 22041 - protein, 34 aa, Artificial Sequence
  Non-cyclic GFR-binding peptide
  MOD_RES (32), (34): Xaa is C or S
VPARLSPINILYFDAANNVVYGKIPDMVVEAXGX

SEQ ID NO: 22042 - protein, 33 aa, Artificial Sequence
  Non-cyclic GFR-binding peptide
  MOD_RES (32), (32): Xaa is C or S
VPTELSPINMLYFDEYDKVVYGKIPEMVVEGXG

SEQ ID NO: 22043 - protein, 34 aa, Artificial Sequence
  Non-cyclic GFR-binding peptide
  MOD_RES (3), (4): Xaa is C or S
STXXAPVKTSPINMLYFDNGRVLLYGKIPMIVEE

SEQ ID NO: 22044 - protein, 40 aa, Artificial Sequence
  Non-cyclic GFR-binding peptide
  MOD_RES (5), (6), (40): Xaa is C or S
  MOD_RES (20), (21), (22), (23), (24): Xaa is A or G
  MOD_RES (25), (26), (27), (28): Xaa is A or G or is absent
IPKAXXVPTELSPINMLYFXXXXXXXXXYGKIPEMVVEGX

SEQ ID NO: 22045 - protein, 33 aa, Artificial Sequence
  Non-cyclic GFR-binding peptide
  MOD_RES (14), (15), (16), (17), (18): Xaa is A or G
  MOD_RES (19), (20), (21), (22): Xaa is A or G or is absent
VPTKLSPINILYFXXXXXXXXXYGKIPGMAVSE

SEQ ID NO: 22046 - protein, 37 aa, Artificial Sequence
  Non-cyclic GFR-binding peptide
  MOD_RES (1), (2), (34), (36): Xaa is C or S
XXAPTKLSPINVLYFDDSSNVIYGKIPNMVVRSXGXH

SEQ ID NO: 22047 - protein, 41 aa, Artificial Sequence
  Non-cyclic GFR-binding peptide
  MOD_RES (6), (7), (39), (41): Xaa is C or S
AAPASXXVPARLSPINILYFDAANNVVYGKIPDMVVEAXGX

SEQ ID NO: 22048 - protein, 41 aa, Artificial Sequence
  Non-cyclic GFR-binding peptide
  MOD_RES (6), (7), (39), (41): Xaa is C or S
AVPKAXXAPTKLSPINVLYFDSSNNVIYGKIPNMVVKAXGX

SEQ ID NO: 22049 - protein, 35 aa, Artificial Sequence
  Non-cyclic GFR-binding peptide
  MOD_RES (3), (3): Xaa is C or S
  MOD_RES (17), (18), (19), (20), (21): Xaa is A or G
  MOD_RES (22), (23), (24), (25): Xaa is A or G or is absent
PTXAPTKLSPINVLYFXXXXXXXXXYGKIPNMVVR

SEQ ID NO: 22050 - protein, 38 aa, Artificial Sequence
  Non-cyclic GFR-binding peptide
  MOD_RES (4), (5), (37): Xaa is C or S
PKAXXVPTELSPINMLYFDENEKVVYGKIPDMVVEGXG

SEQ ID NO: 22051 - protein, 37 aa, Artificial Sequence
  Non-cyclic GFR-binding peptide
  MOD_RES (2), (3), (37): Xaa is C or S
  MOD_RES (17), (18), (19), (20), (21): Xaa is A or G
  MOD_RES (22), (23), (24), (25): Xaa is A or G or is absent
SXXVPARLSPINILYFXXXXXXXXXYGKIPDMVVEAX

SEQ ID NO: 22052 - protein, 40 aa, Artificial Sequence
  Non-cyclic GFR-binding peptide
  MOD_RES (5), (6), (37), (39): Xaa is C or S
VPSTXXAPVKTSPINMLYFDNGRVLLYGKIPMIVEEXGXL

SEQ ID NO: 22053 - protein, 41 aa, Artificial Sequence
  Non-cyclic GFR-binding peptide
  MOD_RES (4), (5), (39), (41): Xaa is C or S
  MOD_RES (19), (20), (21), (22), (23): Xaa is A or G
  MOD_RES (24), (25), (26), (27): Xaa is A or G or is absent
PKAXXVPTELSPINMLYFXXXXXXXXXYGKIPDMVVEGXGX

SEQ ID NO: 22054 - protein, 35 aa, Artificial Sequence
  Non-cyclic GFR-binding peptide
  MOD_RES (1), (2), (34): Xaa is C or S
XXVPTRLSPINILYFDSANNVVYGKIPDMVVESXG

SEQ ID NO: 22055 - protein, 31 aa, Artificial Sequence
  Non-cyclic GFR-binding peptide
VPTRLSPINILYFDSANNVVYGKIPDMVVES

SEQ ID NO: 22056 - protein, 35 aa, Artificial Sequence
  Non-cyclic GFR-binding peptide
  MOD_RES (4), (5): Xaa is C or S
PKAXXVPTELSPINMLYFDENEKVVYGKIPDMVVE

SEQ ID NO: 22057 - protein, 37 aa, Artificial Sequence
  Non-cyclic GFR-binding peptide
  MOD_RES (1), (2), (34), (36): Xaa is C or S
XXVPARLSPINILYFDAANNVVYGKIPDMVVEAXGXR

SEQ ID NO: 22058 - protein, 41 aa, Artificial Sequence
  Non-cyclic GFR-binding peptide
  MOD_RES (5), (6), (40): Xaa is C or S
  MOD_RES (20), (21), (22), (23), (24): Xaa is A or G
  MOD_RES (25), (26), (27), (28): Xaa is A or G or is absent
VPKAXXAPTKLSPINVLYFXXXXXXXXXYGKIPNMVVKAXG

SEQ ID NO: 22059 - protein, 36 aa, Artificial Sequence
  Non-cyclic GFR-binding peptide
  MOD_RES (1), (2), (34), (36): Xaa is C or S
XXVPTELSPINMLYFDEYDKVVYGKIPEMVVEGXGX

SEQ ID NO: 22060 - protein, 33 aa, Artificial Sequence
  Non-cyclic GFR-binding peptide
  MOD_RES (2), (3): Xaa is C or S
AXXAPTKLSPINVLYFDSSNNVIYGKIPNMVVK

SEQ ID NO: 22061 - protein, 43 aa, Artificial Sequence
  Non-cyclic GFR-binding peptide
  MOD_RES (6), (7), (40), (42): Xaa is C or S
  MOD_RES (21), (22), (23), (24), (25): Xaa is A or G
  MOD_RES (26), (27), (28), (29): Xaa is A or G or is absent
RVPSTXXAPVKTSPINMLYFXXXXXXXXXYGKIPMIVEEXGXL

SEQ ID NO: 22062 - protein, 36 aa, Artificial Sequence
  Non-cyclic GFR-binding peptide
  MOD_RES (1), (34), (36): Xaa is C or S
XVPTKLSPINVLYFDDMGVPTYGKIPEGMSVAEXGX

SEQ ID NO: 22063 - protein, 31 aa, Artificial Sequence
  Non-cyclic GFR-binding peptide
  MOD_RES (1), (1): Xaa is C or S
XVPTRLSPINILYFDSANNVVYGKIPDMVVE

SEQ ID NO: 22064 - protein, 37 aa, Artificial Sequence
  Non-cyclic GFR-binding peptide
  MOD_RES (4), (5): Xaa is C or S
  MOD_RES (19), (20), (21), (22), (23): Xaa is A or G
  MOD_RES (24), (25), (26), (27): Xaa is A or G or is absent
PKAXXVPTELSPINMLYFXXXXXXXXXYGKIPDMVVE

SEQ ID NO: 22065 - protein, 33 aa, Artificial Sequence
  Non-cyclic GFR-binding peptide
  MOD_RES (2), (3): Xaa is C or S
AXXVPTKLSPINILYFDKGVVTYYGKIPGMAVS

SEQ ID NO: 22066 - protein, 36 aa, Artificial Sequence
  Non-cyclic GFR-binding peptide
  MOD_RES (1), (33), (35): Xaa is C or S
XVPTKLSPINILYFDKGVVTYYGKIPGMAVSEXGXR

SEQ ID NO: 22067 - protein, 36 aa, Artificial Sequence
  Non-cyclic GFR-binding peptide
  MOD_RES (1), (34), (36): Xaa is C or S
  MOD_RES (15), (16), (17), (18), (19): Xaa is A or G
  MOD_RES (20), (21), (22), (23): Xaa is A or G or is absent
XAPVKTSPINMLYFXXXXXXXXXYGKIPMIVEEXGX

SEQ ID NO: 22068 - protein, 32 aa, Artificial Sequence
  Non-cyclic GFR-binding peptide
  MOD_RES (14), (15), (16), (17), (18): Xaa is A or G
  MOD_RES (19), (20), (21), (22): Xaa is A or G or is absent
VPTELSPINMLYFXXXXXXXXXYGKIPDMVVE

SEQ ID NO: 22069 - protein, 44 aa, Artificial Sequence
  Non-cyclic GFR-binding peptide
  MOD_RES (6), (7), (41), (43): Xaa is C or S
  MOD_RES (21), (22), (23), (24), (25): Xaa is A or G
  MOD_RES (26), (27), (28), (29): Xaa is A or G or is absent
AAPASXXVPARLSPINILYFXXXXXXXXXYGKIPDMVVEAXGXR

SEQ ID NO: 22070 - protein, 41 aa, Artificial Sequence
  Non-cyclic GFR-binding peptide
  MOD_RES (6), (7), (41): Xaa is C or S
  MOD_RES (21), (22), (23), (24), (25): Xaa is A or G
  MOD_RES (26), (27), (28), (29): Xaa is A or G or is absent
KASKAXXVPTKLSPINILYFXXXXXXXXXYGKIPGMAVSEX

SEQ ID NO: 22071 - protein, 34 aa, Artificial Sequence
  Non-cyclic GFR-binding peptide
  MOD_RES (1), (1): Xaa is C or S
  MOD_RES (15), (16), (17), (18), (19): Xaa is A or G
  MOD_RES (20), (21), (22), (23): Xaa is A or G or is absent
XAPTQLSPINVLYFXXXXXXXXXYGKIPNMVVRA

SEQ ID NO: 22072 - protein, 36 aa, Artificial Sequence
  Non-cyclic GFR-binding peptide
  MOD_RES (3), (4), (36): Xaa is C or S
KAXXVPTELSPINMLYFDENEKVVYGKIPDMVVEGX

SEQ ID NO: 22073 - protein, 37 aa, Artificial Sequence
  Non-cyclic GFR-binding peptide
  MOD_RES (2), (3), (36): Xaa is C or S
  MOD_RES (17), (18), (19), (20), (21): Xaa is A or G
  MOD_RES (22), (23), (24), (25): Xaa is A or G or is absent
TXXAPVKTSPINMLYFXXXXXXXXXYGKIPMIVEEXG

SEQ ID NO: 22074 - protein, 35 aa, Artificial Sequence
  Non-cyclic GFR-binding peptide
  MOD_RES (5), (5): Xaa is C or S
TKPTXAPTKLSPINVLYFDDSSNVIYGKIPNMVVR

SEQ ID NO: 22075 - protein, 35 aa, Artificial Sequence
  Non-cyclic GFR-binding peptide
  MOD_RES (2), (3): Xaa is C or S
  MOD_RES (17), (18), (19), (20), (21): Xaa is A or G
  MOD_RES (22), (23), (24), (25): Xaa is A or G or is absent
PXXAPTQLSPINVLYFXXXXXXXXXYGKIPNMVVR

SEQ ID NO: 22076 - protein, 35 aa, Artificial Sequence
  Non-cyclic GFR-binding peptide
  MOD_RES (32), (34): Xaa is C or S
APTQLSPINVLYFDDSSNVIYGKIPNMVVRAXGXH

SEQ ID NO: 22077 - protein, 38 aa, Artificial Sequence
  Non-cyclic GFR-binding peptide
  MOD_RES (1), (35), (37): Xaa is C or S
  MOD_RES (15), (16), (17), (18), (19): Xaa is A or G
  MOD_RES (20), (21), (22), (23): Xaa is A or G or is absent
XVPARLSPINILYFXXXXXXXXXYGKIPDMVVEAXGXR

SEQ ID NO: 22078 - protein, 36 aa, Artificial Sequence
  Non-cyclic GFR-binding peptide
  MOD_RES (1), (2), (36): Xaa is C or S
  MOD_RES (16), (17), (18), (19), (20): Xaa is A or G
  MOD_RES (21), (22), (23), (24): Xaa is A or G or is absent
XXVPTELSPINMLYFXXXXXXXXXYGKIPEMVVEGX

SEQ ID NO: 22079 - protein, 35 aa, Artificial Sequence
  Non-cyclic GFR-binding peptide
  MOD_RES (2), (3), (35): Xaa is C or S
TXXVPTRLSPINILYFDSANNVVYGKIPDMVVESX

SEQ ID NO: 22080 - protein, 35 aa, Artificial Sequence
  Non-cyclic GFR-binding peptide
  MOD_RES (32), (34): Xaa is C or S
VPTKLSPINILYFDKGVVTYYGKIPGMAVSEXGXR

SEQ ID NO: 22081 - protein, 39 aa, Artificial Sequence
  Non-cyclic GFR-binding peptide
  MOD_RES (2), (3), (37), (39): Xaa is C or S
  MOD_RES (17), (18), (19), (20), (21): Xaa is A or G
  MOD_RES (22), (23), (24), (25): Xaa is A or G or is absent
SXXVPARLSPINILYFXXXXXXXXXYGKIPDMVVEAXGX

SEQ ID NO: 22082 - protein, 39 aa, Artificial Sequence
  Non-cyclic GFR-binding peptide
  MOD_RES (4), (38): Xaa is C or S
  MOD_RES (18), (19), (20), (21), (22): Xaa is A or G
  MOD_RES (23), (24), (25), (26): Xaa is A or G or is absent
KPTXAPTKLSPINVLYFXXXXXXXXXYGKIPNMVVRSXG

SEQ ID NO: 22083 - protein, 40 aa, Artificial Sequence
  Non-cyclic GFR-binding peptide
  MOD_RES (5), (6), (38), (40): Xaa is C or S
VPKAXXAPTKLSPINVLYFDSSNNVIYGKIPNMVVKAXGX

SEQ ID NO: 22084 - protein, 33 aa, Artificial Sequence
  Non-cyclic GFR-binding peptide
  MOD_RES (1), (33): Xaa is C or S
XVPTELSPINMLYFDENEKVVYGKIPDMVVEGX

SEQ ID NO: 22085 - protein, 38 aa, Artificial Sequence
  Non-cyclic GFR-binding peptide
  MOD_RES (35), (37): Xaa is C or S
  MOD_RES (14), (15), (16), (17), (18): Xaa is A or G
  MOD_RES (19), (20), (21), (22): Xaa is A or G or is absent
VPTKLSPINVLYFXXXXXXXXXYGKIPEGMSVAEXGXR

SEQ ID NO: 22086 - protein, 37 aa, Artificial Sequence
  Non-cyclic GFR-binding peptide
  MOD_RES (2), (3), (35), (37): Xaa is C or S
AXXVPTKLSPINILYFDKGVVTYYGKIPGMAVSEXGX

SEQ ID NO: 22087 - protein, 38 aa, Artificial Sequence
  Non-cyclic GFR-binding peptide
  MOD_RES (6), (7): Xaa is C or S
KIPKAXXVPTELSPINMLYFDENEKVVYGKIPDMVVEG

SEQ ID NO: 22088 - protein, 36 aa, Artificial Sequence
  Non-cyclic GFR-binding peptide
  MOD_RES (1), (33), (35): Xaa is C or S
XAPTQLSPINVLYFDDSSNVIYGKIPNMVVRAXGXH

SEQ ID NO: 22089 - protein, 39 aa, Artificial Sequence
  Non-cyclic GFR-binding peptide
  MOD_RES (3), (4), (38): Xaa is C or S
  MOD_RES (18), (19), (20), (21), (22): Xaa is A or G
  MOD_RES (23), (24), (25), (26): Xaa is A or G or is absent
KPXXAPTQLSPINVLYFXXXXXXXXXYGKIPNMVVRAXG

SEQ ID NO: 22090 - protein, 38 aa, Artificial Sequence
  Non-cyclic GFR-binding peptide
  MOD_RES (2), (3), (35), (37): Xaa is C or S
AXXVPTELSPINMLYFDENEKVVYGKIPDMVVEGXGXR

SEQ ID NO: 22091 - protein, 42 aa, Artificial Sequence
  Non-cyclic GFR-binding peptide
  MOD_RES (4), (5), (39), (41): Xaa is C or S
  MOD_RES (19), (20), (21), (22), (23): Xaa is A or G
  MOD_RES (24), (25), (26), (27): Xaa is A or G or is absent
PKPXXAPTQLSPINVLYFXXXXXXXXXYGKIPNMVVRAXGXH

SEQ ID NO: 22092 - protein, 40 aa, Artificial Sequence
  Non-cyclic GFR-binding peptide
  MOD_RES (3), (4), (38), (40): Xaa is C or S
  MOD_RES (18), (19), (20), (21), (22): Xaa is A or G
  MOD_RES (23), (24), (25), (26): Xaa is A or G or is absent
PTXXVPTRLSPINILYFXXXXXXXXXYGKIPDMVVESXGX

SEQ ID NO: 22093 - protein, 36 aa, Artificial Sequence
  Non-cyclic GFR-binding peptide
  MOD_RES (1), (36): Xaa is C or S
  MOD_RES (15), (16), (17), (18), (19): Xaa is A or G
  MOD_RES (20), (21), (22), (23): Xaa is A or G or is absent
XVPTKLSPINVLYFXXXXXXXXXYGKIPEGMSVAEX

SEQ ID NO: 22094 - protein, 33 aa, Artificial Sequence
  Non-cyclic GFR-binding peptide
  MOD_RES (1), (2): Xaa is C or S
XXVPTELSPINMLYFDEYDKVVYGKIPEMVVEG

SEQ ID NO: 22095 - protein, 42 aa, Artificial Sequence
  Non-cyclic GFR-binding peptide
  MOD_RES (5), (6), (39), (41): Xaa is C or S
  MOD_RES (20), (21), (22), (23), (24): Xaa is A or G
  MOD_RES (25), (26), (27), (28): Xaa is A or G or is absent
VPSTXXAPVKTSPINMLYFXXXXXXXXXYGKIPMIVEEXGXL

SEQ ID NO: 22096 - protein, 38 aa, Artificial Sequence
  Non-cyclic GFR-binding peptide
  MOD_RES (1), (35), (37): Xaa is C or S
  MOD_RES (15), (16), (17), (18), (19): Xaa is A or G
  MOD_RES (20), (21), (22), (23): Xaa is A or G or is absent
XAPTKLSPINVLYFXXXXXXXXXYGKIPNMVVRSXGXH

SEQ ID NO: 22097 - protein, 37 aa, Artificial Sequence
  Non-cyclic GFR-binding peptide
  MOD_RES (2), (3), (35), (37): Xaa is C or S
AXXVPTELSPINMLYFDEYDKVVYGKIPEMVVEGXGX

SEQ ID NO: 22098 - protein, 35 aa, Artificial Sequence
  Non-cyclic GFR-binding peptide
  MOD_RES (3), (4): Xaa is C or S
KAXXAPTKLSPINVLYFDSSNNVIYGKIPNMVVKA

SEQ ID NO: 22099 - protein, 34 aa, Artificial Sequence
  Non-cyclic GFR-binding peptide
  MOD_RES (32), (34): Xaa is C or S
VPTKLSPINILYFDKGVVTYYGKIPGMAVSEXGX

SEQ ID NO: 22100 - protein, 37 aa, Artificial Sequence
  Non-cyclic GFR-binding peptide
  MOD_RES (1), (35), (37): Xaa is C or S
  MOD_RES (15), (16), (17), (18), (19): Xaa is A or G
  MOD_RES (20), (21), (22), (23): Xaa is A or G or is absent
XVPTRLSPINILYFXXXXXXXXXYGKIPDMVVESXGX

SEQ ID NO: 22101 - protein, 37 aa, Artificial Sequence
  Non-cyclic GFR-binding peptide
  MOD_RES (1), (35), (37): Xaa is C or S
  MOD_RES (15), (16), (17), (18), (19): Xaa is A or G
  MOD_RES (20), (21), (22), (23): Xaa is A or G or is absent
XAPTKLSPINVLYFXXXXXXXXXYGKIPNMVVKAXGX

SEQ ID NO: 22102 - protein, 35 aa, Artificial Sequence
  Non-cyclic GFR-binding peptide
  MOD_RES (4), (5): Xaa is C or S
PKPXXAPTQLSPINVLYFDDSSNVIYGKIPNMVVR

SEQ ID NO: 22103 - protein, 34 aa, Artificial Sequence
  Non-cyclic GFR-binding peptide
  MOD_RES (32), (34): Xaa is C or S
VPTELSPINMLYFDEYDKVVYGKIPEMVVEGXGX

SEQ ID NO: 22104 - protein, 32 aa, Artificial Sequence
  Non-cyclic GFR-binding peptide
  MOD_RES (1), (1): Xaa is C or S
XVPTRLSPINILYFDSANNVVYGKIPDMVVES

SEQ ID NO: 22105 - protein, 31 aa, Artificial Sequence
  Non-cyclic GFR-binding peptide
  MOD_RES (1), (1): Xaa is C or S
XVPTKLSPINILYFDKGVVTYYGKIPGMAVS

SEQ ID NO: 22106 - protein, 35 aa, Artificial Sequence
  Non-cyclic GFR-binding peptide
  MOD_RES (34), (34): Xaa is C or S
  MOD_RES (14), (15), (16), (17), (18): Xaa is A or G
  MOD_RES (19), (20), (21), (22): Xaa is A or G or is absent
VPARLSPINILYFXXXXXXXXXYGKIPDMVVEAXG

SEQ ID NO: 22107 - protein, 37 aa, Artificial Sequence
  Non-cyclic GFR-binding peptide
  MOD_RES (2), (3), (37): Xaa is C or S
  MOD_RES (17), (18), (19), (20), (21): Xaa is A or G
  MOD_RES (22), (23), (24), (25): Xaa is A or G or is absent
AXXVPTKLSPINILYFXXXXXXXXXYGKIPGMAVSEX

SEQ ID NO: 22108 - protein, 40 aa, Artificial Sequence
  Non-cyclic GFR-binding peptide
  MOD_RES (5), (39): Xaa is C or S
  MOD_RES (19), (20), (21), (22), (23): Xaa is A or G
  MOD_RES (24), (25), (26), (27): Xaa is A or G or is absent
TKPTXAPTKLSPINVLYFXXXXXXXXXYGKIPNMVVRSXG

SEQ ID NO: 22109 - protein, 37 aa, Artificial Sequence
  Non-cyclic GFR-binding peptide
  MOD_RES (4), (5): Xaa is C or S
  MOD_RES (19), (20), (21), (22), (23): Xaa is A or G
  MOD_RES (24), (25), (26), (27): Xaa is A or G or is absent
PASXXVPARLSPINILYFXXXXXXXXXYGKIPDMVVE

SEQ ID NO: 22110 - protein, 36 aa, Artificial Sequence
  Non-cyclic GFR-binding peptide
  MOD_RES (4), (5): Xaa is C or S
PKAXXAPTKLSPINVLYFDSSNNVIYGKIPNMVVKA

SEQ ID NO: 22111 - protein, 37 aa, Artificial Sequence
  Non-cyclic GFR-binding peptide
  MOD_RES (5), (6): Xaa is C or S
TPPTXXVPTRLSPINILYFDSANNVVYGKIPDMVVES

SEQ ID NO: 22112 - protein, 36 aa, Artificial Sequence
  Non-cyclic GFR-binding peptide
  MOD_RES (5), (6): Xaa is C or S
ASKAXXVPTKLSPINILYFDKGVVTYYGKIPGMAVS

SEQ ID NO: 22113 - protein, 34 aa, Artificial Sequence
  Non-cyclic GFR-binding peptide
  MOD_RES (2), (3): Xaa is C or S
SXXVPARLSPINILYFDAANNVVYGKIPDMVVEA

SEQ ID NO: 22114 - protein, 32 aa, Artificial Sequence
  Non-cyclic GFR-binding peptide
  MOD_RES (32), (32): Xaa is C or S
VPTELSPINMLYFDEYDKVVYGKIPEMVVEGX

SEQ ID NO: 22115 - protein, 36 aa, Artificial Sequence
  Non-cyclic GFR-binding peptide
  MOD_RES (1), (2), (36): Xaa is C or S
  MOD_RES (16), (17), (18), (19), (20): Xaa is A or G
  MOD_RES (21), (22), (23), (24): Xaa is A or G or is absent
XXAPTKLSPINVLYFXXXXXXXXXYGKIPNMVVRSX

SEQ ID NO: 22116 - protein, 40 aa, Artificial Sequence
  Non-cyclic GFR-binding peptide
  MOD_RES (6), (7), (40): Xaa is C or S
  MOD_RES (21), (22), (23), (24), (25): Xaa is A or G
  MOD_RES (26), (27), (28), (29): Xaa is A or G or is absent
RVPSTXXAPVKTSPINMLYFXXXXXXXXXYGKIPMIVEEX

SEQ ID NO: 22117 - protein, 40 aa, Artificial Sequence
  Non-cyclic GFR-binding peptide
  MOD_RES (4), (5), (37), (39): Xaa is C or S
PPTXXVPTRLSPINILYFDSANNVVYGKIPDMVVESXGXR

SEQ ID NO: 22118 - protein, 39 aa, Artificial Sequence
  Non-cyclic GFR-binding peptide
  MOD_RES (3), (4), (38): Xaa is C or S
  MOD_RES (18), (19), (20), (21), (22): Xaa is A or G
  MOD_RES (23), (24), (25), (26): Xaa is A or G or is absent
KPXXAPTKLSPINVLYFXXXXXXXXXYGKIPNMVVRSXG

SEQ ID NO: 22119 - protein, 38 aa, Artificial Sequence
  Non-cyclic GFR-binding peptide
  MOD_RES (5), (6), (38): Xaa is C or S
TPPTXXVPTRLSPINILYFDSANNVVYGKIPDMVVESX

SEQ ID NO: 22120 - protein, 38 aa, Artificial Sequence
  Non-cyclic GFR-binding peptide
  MOD_RES (4), (5): Xaa is C or S
  MOD_RES (19), (20), (21), (22), (23): Xaa is A or G
  MOD_RES (24), (25), (26), (27): Xaa is A or G or is absent
SKAXXVPTKLSPINILYFXXXXXXXXXYGKIPGMAVSE

SEQ ID NO: 22121 - protein, 41 aa, Artificial Sequence
  Non-cyclic GFR-binding peptide
  MOD_RES (5), (6), (40): Xaa is C or S
  MOD_RES (20), (21), (22), (23), (24): Xaa is A or G
  MOD_RES (25), (26), (27), (28): Xaa is A or G or is absent
TPPTXXVPTRLSPINILYFXXXXXXXXXYGKIPDMVVESXG

SEQ ID NO: 22122 - protein, 36 aa, Artificial Sequence
  Non-cyclic GFR-binding peptide
  MOD_RES (2), (3), (34), (36): Xaa is C or S
TXXAPVKTSPINMLYFDNGRVLLYGKIPMIVEEXGX

SEQ ID NO: 22123 - protein, 36 aa, Artificial Sequence
  Non-cyclic GFR-binding peptide
  MOD_RES (1), (2), (34), (36): Xaa is C or S
XXAPTKLSPINVLYFDSSNNVIYGKIPNMVVKAXGX

SEQ ID NO: 22124 - protein, 33 aa, Artificial Sequence
  Non-cyclic GFR-binding peptide
  MOD_RES (2), (3): Xaa is C or S
TXXVPTRLSPINILYFDSANNVVYGKIPDMVVE

SEQ ID NO: 22125 - protein, 39 aa, Artificial Sequence
  Non-cyclic GFR-binding peptide
  MOD_RES (6), (6): Xaa is C or S
  MOD_RES (20), (21), (22), (23), (24): Xaa is A or G
  MOD_RES (25), (26), (27), (28): Xaa is A or G or is absent
VTKPTXAPTKLSPINVLYFXXXXXXXXXYGKIPNMVVRS

SEQ ID NO: 22126 - protein, 34 aa, Artificial Sequence
  Non-cyclic GFR-binding peptide
  MOD_RES (2), (3): Xaa is C or S
AXXVPTELSPINMLYFDENEKVVYGKIPDMVVEG

SEQ ID NO: 22127 - protein, 38 aa, Artificial Sequence
  Non-cyclic GFR-binding peptide
  MOD_RES (5), (37): Xaa is C or S
TKPTXAPTKLSPINVLYFDDSSNVIYGKIPNMVVRSXG

SEQ ID NO: 22128 - protein, 35 aa, Artificial Sequence
  Non-cyclic GFR-binding peptide
  MOD_RES (32), (34): Xaa is C or S
APTKLSPINVLYFDDSSNVIYGKIPNMVVRSXGXH

SEQ ID NO: 22129 - protein, 41 aa, Artificial Sequence
  Non-cyclic GFR-binding peptide
  MOD_RES (3), (4), (38), (40): Xaa is C or S
  MOD_RES (18), (19), (20), (21), (22): Xaa is A or G
  MOD_RES (23), (24), (25), (26): Xaa is A or G or is absent
PTXXVPTRLSPINILYFXXXXXXXXXYGKIPDMVVESXGXR

SEQ ID NO: 22130 - protein, 30 aa, Artificial Sequence
  Non-cyclic GFR-binding peptide
APTKLSPINVLYFDSSNNVIYGKIPNMVVK

SEQ ID NO: 22131 - protein, 38 aa, Artificial Sequence
  Non-cyclic GFR-binding peptide
  MOD_RES (6), (38): Xaa is C or S
VTKPTXAPTKLSPINVLYFDDSSNVIYGKIPNMVVRSX

SEQ ID NO: 22132 - protein, 41 aa, Artificial Sequence
  Non-cyclic GFR-binding peptide
  MOD_RES (6), (7), (39), (41): Xaa is C or S
SIPKAXXVPTELSPINMLYFDEYDKVVYGKIPEMVVEGXGX

SEQ ID NO: 22133 - protein, 42 aa, Artificial Sequence
  Non-cyclic GFR-binding peptide
  MOD_RES (6), (40), (42): Xaa is C or S
  MOD_RES (20), (21), (22), (23), (24): Xaa is A or G
  MOD_RES (25), (26), (27), (28): Xaa is A or G or is absent
VTKPTXAPTKLSPINVLYFXXXXXXXXXYGKIPNMVVRSXGX

SEQ ID NO: 22134 - protein, 36 aa, Artificial Sequence
  Non-cyclic GFR-binding peptide
  MOD_RES (5), (5): Xaa is C or S
TKPTXAPTKLSPINVLYFDDSSNVIYGKIPNMVVRS

SEQ ID NO: 22135 - protein, 36 aa, Artificial Sequence
  Non-cyclic GFR-binding peptide
  MOD_RES (1), (35): Xaa is C or S
  MOD_RES (15), (16), (17), (18), (19): Xaa is A or G
  MOD_RES (20), (21), (22), (23): Xaa is A or G or is absent
XAPTQLSPINVLYFXXXXXXXXXYGKIPNMVVRAXG

SEQ ID NO: 22136 - protein, 35 aa, Artificial Sequence
  Non-cyclic GFR-binding peptide
  MOD_RES (1), (35): Xaa is C or S
  MOD_RES (15), (16), (17), (18), (19): Xaa is A or G
  MOD_RES (20), (21), (22), (23): Xaa is A or G or is absent
XVPTRLSPINILYFXXXXXXXXXYGKIPDMVVESX

SEQ ID NO: 22137 - protein, 37 aa, Artificial Sequence
  Non-cyclic GFR-binding peptide
  MOD_RES (3), (4): Xaa is C or S
  MOD_RES (18), (19), (20), (21), (22): Xaa is A or G
  MOD_RES (23), (24), (25), (26): Xaa is A or G or is absent
KAXXVPTKLSPINILYFXXXXXXXXXYGKIPGMAVSE

SEQ ID NO: 22138 - protein, 34 aa, Artificial Sequence
  Non-cyclic GFR-binding peptide
  MOD_RES (1), (2), (34): Xaa is C or S
XXVPARLSPINILYFDAANNVVYGKIPDMVVEAX

SEQ ID NO: 22139 - protein, 40 aa, Artificial Sequence
  Non-cyclic GFR-binding peptide
  MOD_RES (6), (7), (40): Xaa is C or S
KVGKAXXVPTKLSPINVLYFDDMGVPTYGKIPEGMSVAEX

SEQ ID NO: 22140 - protein, 39 aa, Artificial Sequence
  Non-cyclic GFR-binding peptide
  MOD_RES (4), (5), (37), (39): Xaa is C or S
SKAXXVPTKLSPINILYFDKGVVTYYGKIPGMAVSEXGX

SEQ ID NO: 22141 - protein, 34 aa, Artificial Sequence
  Non-cyclic GFR-binding peptide
  MOD_RES (1), (2), (33): Xaa is C or S
XXAPVKTSPINMLYFDNGRVLLYGKIPMIVEEXG

SEQ ID NO: 22142 - protein, 39 aa, Artificial Sequence
  Non-cyclic GFR-binding peptide
  MOD_RES (4), (5), (38): Xaa is C or S
GKAXXVPTKLSPINVLYFDDMGVPTYGKIPEGMSVAEXG

SEQ ID NO: 22143 - protein, 41 aa, Artificial Sequence
  Non-cyclic GFR-binding peptide
  MOD_RES (3), (4), (38), (40): Xaa is C or S
  MOD_RES (18), (19), (20), (21), (22): Xaa is A or G
  MOD_RES (23), (24), (25), (26): Xaa is A or G or is absent
KAXXVPTELSPINMLYFXXXXXXXXXYGKIPDMVVEGXGXR

SEQ ID NO: 22144 - protein, 35 aa, Artificial Sequence
  Non-cyclic GFR-binding peptide
  MOD_RES (3), (4): Xaa is C or S
KPXXAPTQLSPINVLYFDDSSNVIYGKIPNMVVRA

SEQ ID NO: 22145 - protein, 39 aa, Artificial Sequence
  Non-cyclic GFR-binding peptide
  MOD_RES (5), (6): Xaa is C or S
  MOD_RES (20), (21), (22), (23), (24): Xaa is A or G
  MOD_RES (25), (26), (27), (28): Xaa is A or G or is absent
VPKPXXAPTKLSPINVLYFXXXXXXXXXYGKIPNMVVRS

SEQ ID NO: 22146 - protein, 39 aa, Artificial Sequence
  Non-cyclic GFR-binding peptide
  MOD_RES (3), (4), (38): Xaa is C or S
  MOD_RES (18), (19), (20), (21), (22): Xaa is A or G
  MOD_RES (23), (24), (25), (26): Xaa is A or G or is absent
KAXXVPTKLSPINILYFXXXXXXXXXYGKIPGMAVSEXG

SEQ ID NO: 22147 - protein, 32 aa, Artificial Sequence
  Non-cyclic GFR-binding peptide
  MOD_RES (32), (32): Xaa is C or S
APTKLSPINVLYFDSSNNVIYGKIPNMVVKAX

SEQ ID NO: 22148 - protein, 39 aa, Artificial Sequence
  Non-cyclic GFR-binding peptide
  MOD_RES (6), (7), (39): Xaa is C or S
SIPKAXXVPTELSPINMLYFDEYDKVVYGKIPEMVVEGX

SEQ ID NO: 22149 - protein, 39 aa, Artificial Sequence
  Non-cyclic GFR-binding peptide
  MOD_RES (5), (6): Xaa is C or S
  MOD_RES (20), (21), (22), (23), (24): Xaa is A or G
  MOD_RES (25), (26), (27), (28): Xaa is A or G or is absent
ASKAXXVPTKLSPINILYFXXXXXXXXXYGKIPGMAVSE

SEQ ID NO: 22150 - protein, 42 aa, Artificial Sequence
  Non-cyclic GFR-binding peptide
  MOD_RES (4), (5), (39), (41): Xaa is C or S
  MOD_RES (19), (20), (21), (22), (23): Xaa is A or G
  MOD_RES (24), (25), (26), (27): Xaa is A or G or is absent
PKAXXVPTELSPINMLYFXXXXXXXXXYGKIPEMVVEGXGXR

SEQ ID NO: 22151 - protein, 37 aa, Artificial Sequence
  Non-cyclic GFR-binding peptide
  MOD_RES (4), (5): Xaa is C or S
  MOD_RES (19), (20), (21), (22), (23): Xaa is A or G
  MOD_RES (24), (25), (26), (27): Xaa is A or G or is absent
SKAXXVPTKLSPINILYFXXXXXXXXXYGKIPGMAVS

SEQ ID NO: 22152 - protein, 40 aa, Artificial Sequence
  Non-cyclic GFR-binding peptide
  MOD_RES (3), (4), (38), (40): Xaa is C or S
  MOD_RES (18), (19), (20), (21), (22): Xaa is A or G
  MOD_RES (23), (24), (25), (26): Xaa is A or G or is absent
KPXXAPTQLSPINVLYFXXXXXXXXXYGKIPNMVVRAXGX

SEQ ID NO: 22153 - protein, 33 aa, Artificial Sequence
  Non-cyclic GFR-binding peptide
  MOD_RES (1), (33): Xaa is C or S
XVPTRLSPINILYFDSANNVVYGKIPDMVVESX

SEQ ID NO: 22154 - protein, 39 aa, Artificial Sequence
  Non-cyclic GFR-binding peptide
  MOD_RES (6), (7): Xaa is C or S
  MOD_RES (21), (22), (23), (24), (25): Xaa is A or G
  MOD_RES (26), (27), (28), (29): Xaa is A or G or is absent
AAPASXXVPARLSPINILYFXXXXXXXXXYGKIPDMVVE

SEQ ID NO: 22155 - protein, 37 aa, Artificial Sequence
  Non-cyclic GFR-binding peptide
  MOD_RES (3), (4), (36): Xaa is C or S
KAXXVPTELSPINMLYFDENEKVVYGKIPDMVVEGXG

SEQ ID NO: 22156 - protein, 31 aa, Artificial Sequence
  Non-cyclic GFR-binding peptide
VPTKLSPINILYFDKGVVTYYGKIPGMAVSE

SEQ ID NO: 22157 - protein, 34 aa, Artificial Sequence
  Non-cyclic GFR-binding peptide
  MOD_RES (2), (2): Xaa is C or S
  MOD_RES (16), (17), (18), (19), (20): Xaa is A or G
  MOD_RES (21), (22), (23), (24): Xaa is A or G or is absent
TXAPTKLSPINVLYFXXXXXXXXXYGKIPNMVVR

SEQ ID NO: 22158 - protein, 34 aa, Artificial Sequence
  Non-cyclic GFR-binding peptide
  MOD_RES (32), (34): Xaa is C or S
APTQLSPINVLYFDDSSNVIYGKIPNMVVRAXGX

SEQ ID NO: 22159 - protein, 38 aa, Artificial Sequence
  Non-cyclic GFR-binding peptide
  MOD_RES (5), (6), (38): Xaa is C or S
VPKPXXAPTKLSPINVLYFDDSSNVIYGKIPNMVVRSX

SEQ ID NO: 22160 - protein, 37 aa, Artificial Sequence
  Non-cyclic GFR-binding peptide
  MOD_RES (1), (2), (34), (36): Xaa is C or S
XXVPTKLSPINILYFDKGVVTYYGKIPGMAVSEXGXR

SEQ ID NO: 22161 - protein, 37 aa, Artificial Sequence
  Non-cyclic GFR-binding peptide
  MOD_RES (34), (36): Xaa is C or S
  MOD_RES (14), (15), (16), (17), (18): Xaa is A or G
  MOD_RES (19), (20), (21), (22): Xaa is A or G or is absent
VPARLSPINILYFXXXXXXXXXYGKIPDMVVEAXGXR

SEQ ID NO: 22162 - protein, 36 aa, Artificial Sequence
  Non-cyclic GFR-binding peptide
  MOD_RES (1), (35): Xaa is C or S
  MOD_RES (15), (16), (17), (18), (19): Xaa is A or G
  MOD_RES (20), (21), (22), (23): Xaa is A or G or is absent
XVPTELSPINMLYFXXXXXXXXXYGKIPDMVVEGXG

SEQ ID NO: 22163 - protein, 38 aa, Artificial Sequence
  Non-cyclic GFR-binding peptide
  MOD_RES (1), (2), (36), (38): Xaa is C or S
  MOD_RES (16), (17), (18), (19), (20): Xaa is A or G
  MOD_RES (21), (22), (23), (24): Xaa is A or G or is absent
XXAPTKLSPINVLYFXXXXXXXXXYGKIPNMVVKAXGX

SEQ ID NO: 22164 - protein, 33 aa, Artificial Sequence
  Non-cyclic GFR-binding peptide
  MOD_RES (14), (15), (16), (17), (18): Xaa is A or G
  MOD_RES (19), (20), (21), (22): Xaa is A or G or is absent
VPTELSPINMLYFXXXXXXXXXYGKIPEMVVEG

SEQ ID NO: 22165 - protein, 41 aa, Artificial Sequence
  Non-cyclic GFR-binding peptide
  MOD_RES (6), (7), (39), (41): Xaa is C or S
YVPKPXXAPTKLSPINVLYFDDSSNVIYGKIPNMVVRSXGX

SEQ ID NO: 22166 - protein, 39 aa, Artificial Sequence
  Non-cyclic GFR-binding peptide
  MOD_RES (6), (7): Xaa is C or S
  MOD_RES (21), (22), (23), (24), (25): Xaa is A or G
  MOD_RES (26), (27), (28), (29): Xaa is A or G or is absent
YVPKPXXAPTKLSPINVLYFXXXXXXXXXYGKIPNMVVR

SEQ ID NO: 22167 - protein, 41 aa, Artificial Sequence
  Non-cyclic GFR-binding peptide
  MOD_RES (5), (6), (40): Xaa is C or S
  MOD_RES (20), (21), (22), (23), (24): Xaa is A or G
  MOD_RES (25), (26), (27), (28): Xaa is A or G or is absent
IPKAXXVPTELSPINMLYFXXXXXXXXXYGKIPEMVVEGXG

SEQ ID NO: 22168 - protein, 37 aa, Artificial Sequence
  Non-cyclic GFR-binding peptide
  MOD_RES (4), (5), (36): Xaa is C or S
PSTXXAPVKTSPINMLYFDNGRVLLYGKIPMIVEEXG

SEQ ID NO: 22169 - protein, 36 aa, Artificial Sequence
  Non-cyclic GFR-binding peptide
  MOD_RES (1), (2), (34), (36): Xaa is C or S
XXAPTKLSPINVLYFDDSSNVIYGKIPNMVVRSXGX

SEQ ID NO: 22170 - protein, 37 aa, Artificial Sequence
  Non-cyclic GFR-binding peptide
  MOD_RES (5), (6), (37): Xaa is C or S
VPSTXXAPVKTSPINMLYFDNGRVLLYGKIPMIVEEX

SEQ ID NO: 22171 - protein, 37 aa, Artificial Sequence
  Non-cyclic GFR-binding peptide
  MOD_RES (3), (4): Xaa is C or S
  MOD_RES (18), (19), (20), (21), (22): Xaa is A or G
  MOD_RES (23), (24), (25), (26): Xaa is A or G or is absent
KPXXAPTKLSPINVLYFXXXXXXXXXYGKIPNMVVRS

SEQ ID NO: 22172 - protein, 37 aa, Artificial Sequence
  Non-cyclic GFR-binding peptide
  MOD_RES (2), (3), (35), (37): Xaa is C or S
SXXVPARLSPINILYFDAANNVVYGKIPDMVVEAXGX

SEQ ID NO: 22173 - protein, 38 aa, Artificial Sequence
  Non-cyclic GFR-binding peptide
  MOD_RES (3), (4), (37): Xaa is C or S
  MOD_RES (18), (19), (20), (21), (22): Xaa is A or G
  MOD_RES (23), (24), (25), (26): Xaa is A or G or is absent
STXXAPVKTSPINMLYFXXXXXXXXXYGKIPMIVEEXG

SEQ ID NO: 22174 - protein, 32 aa, Artificial Sequence
  Non-cyclic GFR-binding peptide
  MOD_RES (32), (32): Xaa is C or S
APTKLSPINVLYFDDSSNVIYGKIPNMVVRSX

SEQ ID NO: 22175 - protein, 40 aa, Artificial Sequence
  Non-cyclic GFR-binding peptide
  MOD_RES (6), (7): Xaa is C or S
  MOD_RES (21), (22), (23), (24), (25): Xaa is A or G
  MOD_RES (26), (27), (28), (29): Xaa is A or G or is absent
KIPKAXXVPTELSPINMLYFXXXXXXXXXYGKIPDMVVEG

SEQ ID NO: 22176 - protein, 38 aa, Artificial Sequence
  Non-cyclic GFR-binding peptide
  MOD_RES (6), (7): Xaa is C or S
HVPKPXXAPTKLSPINVLYFDDSSNVIYGKIPNMVVRS

SEQ ID NO: 22177 - protein, 34 aa, Artificial Sequence
  Non-cyclic GFR-binding peptide
  MOD_RES (1), (2), (34): Xaa is C or S
XXVPTKLSPINILYFDKGVVTYYGKIPGMAVSEX

SEQ ID NO: 22178 - protein, 42 aa, Artificial Sequence
  Non-cyclic GFR-binding peptide
  MOD_RES (6), (7), (39), (41): Xaa is C or S
TVPKPXXAPTQLSPINVLYFDDSSNVIYGKIPNMVVRAXGXH

SEQ ID NO: 22179 - protein, 35 aa, Artificial Sequence
  Non-cyclic GFR-binding peptide
  MOD_RES (32), (34): Xaa is C or S
VPTELSPINMLYFDEYDKVVYGKIPEMVVEGXGXR

SEQ ID NO: 22180 - protein, 32 aa, Artificial Sequence
  Non-cyclic GFR-binding peptide
  MOD_RES (1), (32): Xaa is C or S
XAPVKTSPINMLYFDNGRVLLYGKIPMIVEEX

SEQ ID NO: 22181 - protein, 34 aa, Artificial Sequence
  Non-cyclic GFR-binding peptide
  MOD_RES (3), (3): Xaa is C or S
PTXAPTKLSPINVLYFDDSSNVIYGKIPNMVVRS

SEQ ID NO: 22182 - protein, 37 aa, Artificial Sequence
  Non-cyclic GFR-binding peptide
  MOD_RES (3), (4), (36): Xaa is C or S
KAXXAPTKLSPINVLYFDSSNNVIYGKIPNMVVKAXG

SEQ ID NO: 22183 - protein, 37 aa, Artificial Sequence
  Non-cyclic GFR-binding peptide
  MOD_RES (6), (7): Xaa is C or S
TVPKPXXAPTQLSPINVLYFDDSSNVIYGKIPNMVVR

SEQ ID NO: 22184 - protein, 40 aa, Artificial Sequence
  Non-cyclic GFR-binding peptide
  MOD_RES (3), (4), (38), (40): Xaa is C or S
  MOD_RES (18), (19), (20), (21), (22): Xaa is A or G
  MOD_RES (23), (24), (25), (26): Xaa is A or G or is absent
KAXXVPTKLSPINILYFXXXXXXXXXYGKIPGMAVSEXGX

SEQ ID NO: 22185 - protein, 34 aa, Artificial Sequence
  Non-cyclic GFR-binding peptide
  MOD_RES (1), (1): Xaa is C or S
  MOD_RES (15), (16), (17), (18), (19): Xaa is A or G
  MOD_RES (20), (21), (22), (23): Xaa is A or G or is absent
XVPTRLSPINILYFXXXXXXXXXYGKIPDMVVES

SEQ ID NO: 22186 - protein, 32 aa, Artificial Sequence
  Non-cyclic GFR-binding peptide
  MOD_RES (1), (2): Xaa is C or S
XXAPTQLSPINVLYFDDSSNVIYGKIPNMVVR

SEQ ID NO: 22187 - protein, 36 aa, Artificial Sequence
  Non-cyclic GFR-binding peptide
  MOD_RES (4), (5): Xaa is C or S
PKPXXAPTQLSPINVLYFDDSSNVIYGKIPNMVVRA

SEQ ID NO: 22188 - protein, 37 aa, Artificial Sequence
  Non-cyclic GFR-binding peptide
  MOD_RES (2), (3), (37): Xaa is C or S
  MOD_RES (17), (18), (19), (20), (21): Xaa is A or G
  MOD_RES (22), (23), (24), (25): Xaa is A or G or is absent
PXXAPTQLSPINVLYFXXXXXXXXXYGKIPNMVVRAX

SEQ ID NO: 22189 - protein, 44 aa, Artificial Sequence
  Non-cyclic GFR-binding peptide
  MOD_RES (7), (41), (43): Xaa is C or S
  MOD_RES (21), (22), (23), (24), (25): Xaa is A or G
  MOD_RES (26), (27), (28), (29): Xaa is A or G or is absent
HVTKPTXAPTKLSPINVLYFXXXXXXXXXYGKIPNMVVRSXGXH

SEQ ID NO: 22190 - protein, 33 aa, Artificial Sequence
  Non-cyclic GFR-binding peptide
  MOD_RES (2), (2): Xaa is C or S
TXAPTKLSPINVLYFDDSSNVIYGKIPNMVVRS

SEQ ID NO: 22191 - protein, 44 aa, Artificial Sequence
  Non-cyclic GFR-binding peptide
  MOD_RES (6), (7), (41), (43): Xaa is C or S
  MOD_RES (21), (22), (23), (24), (25): Xaa is A or G
  MOD_RES (26), (27), (28), (29): Xaa is A or G or is absent
SIPKAXXVPTELSPINMLYFXXXXXXXXXYGKIPEMVVEGXGXR

SEQ ID NO: 22192 - protein, 38 aa, Artificial Sequence
  Non-cyclic GFR-binding peptide
  MOD_RES (1), (2), (36), (38): Xaa is C or S
  MOD_RES (16), (17), (18), (19), (20): Xaa is A or G
  MOD_RES (21), (22), (23), (24): Xaa is A or G or is absent
XXVPTRLSPINILYFXXXXXXXXXYGKIPDMVVESXGX

SEQ ID NO: 22193 - protein, 38 aa, Artificial Sequence
  Non-cyclic GFR-binding peptide
  MOD_RES (6), (7): Xaa is C or S
YVPKPXXAPTKLSPINVLYFDDSSNVIYGKIPNMVVRS

SEQ ID NO: 22194 - protein, 36 aa, Artificial Sequence
  Non-cyclic GFR-binding peptide
  MOD_RES (2), (3), (35): Xaa is C or S
PXXAPTQLSPINVLYFDDSSNVIYGKIPNMVVRAXG

SEQ ID NO: 22195 - protein, 38 aa, Artificial Sequence
  Non-cyclic GFR-binding peptide
  MOD_RES (2), (3), (37): Xaa is C or S
  MOD_RES (17), (18), (19), (20), (21): Xaa is A or G
  MOD_RES (22), (23), (24), (25): Xaa is A or G or is absent
AXXAPTKLSPINVLYFXXXXXXXXXYGKIPNMVVKAXG

SEQ ID NO: 22196 - protein, 35 aa, Artificial Sequence
  Non-cyclic GFR-binding peptide
  MOD_RES (1), (35): Xaa is C or S
  MOD_RES (15), (16), (17), (18), (19): Xaa is A or G
  MOD_RES (20), (21), (22), (23): Xaa is A or G or is absent
XAPTKLSPINVLYFXXXXXXXXXYGKIPNMVVKAX

SEQ ID NO: 22197 - protein, 31 aa, Artificial Sequence
  Non-cyclic GFR-binding peptide
  MOD_RES (1), (1): Xaa is C or S
XAPTQLSPINVLYFDDSSNVIYGKIPNMVVR

SEQ ID NO: 22198 - protein, 35 aa, Artificial Sequence
  Non-cyclic GFR-binding peptide
  MOD_RES (4), (5): Xaa is C or S
PASXXVPARLSPINILYFDAANNVVYGKIPDMVVE

SEQ ID NO: 22199 - protein, 43 aa, Artificial Sequence
  Non-cyclic GFR-binding peptide
  MOD_RES (6), (7), (41), (43): Xaa is C or S
  MOD_RES (21), (22), (23), (24), (25): Xaa is A or G
  MOD_RES (26), (27), (28), (29): Xaa is A or G or is absent
KIPKAXXVPTELSPINMLYFXXXXXXXXXYGKIPDMVVEGXGX

SEQ ID NO: 22200 - protein, 37 aa, Artificial Sequence
  Non-cyclic GFR-binding peptide
  MOD_RES (3), (4): Xaa is C or S
  MOD_RES (18), (19), (20), (21), (22): Xaa is A or G
  MOD_RES (23), (24), (25), (26): Xaa is A or G or is absent
ASXXVPARLSPINILYFXXXXXXXXXYGKIPDMVVEA

SEQ ID NO: 22201 - protein, 33 aa, Artificial Sequence
  Non-cyclic GFR-binding peptide
  MOD_RES (2), (3): Xaa is C or S
PXXAPTQLSPINVLYFDDSSNVIYGKIPNMVVR

SEQ ID NO: 22202 - protein, 42 aa, Artificial Sequence
  Non-cyclic GFR-binding peptide
  MOD_RES (5), (6), (40), (42): Xaa is C or S
  MOD_RES (20), (21), (22), (23), (24): Xaa is A or G
  MOD_RES (25), (26), (27), (28): Xaa is A or G or is absent
IPKAXXVPTELSPINMLYFXXXXXXXXXYGKIPDMVVEGXGX

SEQ ID NO: 22203 - protein, 38 aa, Artificial Sequence
  Non-cyclic GFR-binding peptide
  MOD_RES (1), (2), (37): Xaa is C or S
  MOD_RES (16), (17), (18), (19), (20): Xaa is A or G
  MOD_RES (21), (22), (23), (24): Xaa is A or G or is absent
XXVPTKLSPINVLYFXXXXXXXXXYGKIPEGMSVAEXG

SEQ ID NO: 22204 - protein, 35 aa, Artificial Sequence
  Non-cyclic GFR-binding peptide
  MOD_RES (2), (3), (35): Xaa is C or S
AXXAPTKLSPINVLYFDSSNNVIYGKIPNMVVKAX

SEQ ID NO: 22205 - protein, 39 aa, Artificial Sequence
  Non-cyclic GFR-binding peptide
  MOD_RES (4), (5), (39): Xaa is C or S
  MOD_RES (19), (20), (21), (22), (23): Xaa is A or G
  MOD_RES (24), (25), (26), (27): Xaa is A or G or is absent
PASXXVPARLSPINILYFXXXXXXXXXYGKIPDMVVEAX

SEQ ID NO: 22206 - protein, 33 aa, Artificial Sequence
  Non-cyclic GFR-binding peptide
  MOD_RES (1), (2): Xaa is C or S
XXVPARLSPINILYFDAANNVVYGKIPDMVVEA

SEQ ID NO: 22207 - protein, 34 aa, Artificial Sequence
  Non-cyclic GFR-binding peptide
  MOD_RES (1), (2), (34): Xaa is C or S
XXAPTQLSPINVLYFDDSSNVIYGKIPNMVVRAX

SEQ ID NO: 22208 - protein, 39 aa, Artificial Sequence
  Non-cyclic GFR-binding peptide
  MOD_RES (3), (4), (36), (38): Xaa is C or S
KPXXAPTQLSPINVLYFDDSSNVIYGKIPNMVVRAXGXH

SEQ ID NO: 22209 - protein, 36 aa, Artificial Sequence
  Non-cyclic GFR-binding peptide
  MOD_RES (2), (3), (35): Xaa is C or S
AXXVPTKLSPINILYFDKGVVTYYGKIPGMAVSEXG

SEQ ID NO: 22210 - protein, 41 aa, Artificial Sequence
  Non-cyclic GFR-binding peptide
  MOD_RES (5), (6), (40): Xaa is C or S
  MOD_RES (20), (21), (22), (23), (24): Xaa is A or G
  MOD_RES (25), (26), (27), (28): Xaa is A or G or is absent
APASXXVPARLSPINILYFXXXXXXXXXYGKIPDMVVEAXG

SEQ ID NO: 22211 - protein, 39 aa, Artificial Sequence
  Non-cyclic GFR-binding peptide
  MOD_RES (6), (7): Xaa is C or S
  MOD_RES (21), (22), (23), (24), (25): Xaa is A or G
  MOD_RES (26), (27), (28), (29): Xaa is A or G or is absent
KASKAXXVPTKLSPINILYFXXXXXXXXXYGKIPGMAVS

SEQ ID NO: 22212 - protein, 39 aa, Artificial Sequence
  Non-cyclic GFR-binding peptide
  MOD_RES (5), (6), (38): Xaa is C or S
APASXXVPARLSPINILYFDAANNVVYGKIPDMVVEAXG

SEQ ID NO: 22213 - protein, 36 aa, Artificial Sequence
  Non-cyclic GFR-binding peptide
  MOD_RES (1), (2), (36): Xaa is C or S
  MOD_RES (16), (17), (18), (19), (20): Xaa is A or G
  MOD_RES (21), (22), (23), (24): Xaa is A or G or is absent
XXVPTKLSPINILYFXXXXXXXXXYGKIPGMAVSEX

SEQ ID NO: 22214 - protein, 37 aa, Artificial Sequence
  Non-cyclic GFR-binding peptide
  MOD_RES (3), (4), (36): Xaa is C or S
PTXXVPTRLSPINILYFDSANNVVYGKIPDMVVESXG

SEQ ID NO: 22215 - protein, 36 aa, Artificial Sequence
  Non-cyclic GFR-binding peptide
  MOD_RES (1), (35): Xaa is C or S
  MOD_RES (15), (16), (17), (18), (19): Xaa is A or G
  MOD_RES (20), (21), (22), (23): Xaa is A or G or is absent
XAPTKLSPINVLYFXXXXXXXXXYGKIPNMVVRSXG

SEQ ID NO: 22216 - protein, 36 aa, Artificial Sequence
  Non-cyclic GFR-binding peptide
  MOD_RES (1), (2), (34), (36): Xaa is C or S
XXVPTELSPINMLYFDENEKVVYGKIPDMVVEGXGX

SEQ ID NO: 22217 - protein, 37 aa, Artificial Sequence
  Non-cyclic GFR-binding peptide
  MOD_RES (3), (4): Xaa is C or S
  MOD_RES (18), (19), (20), (21), (22): Xaa is A or G
  MOD_RES (23), (24), (25), (26): Xaa is A or G or is absent
PTXXVPTRLSPINILYFXXXXXXXXXYGKIPDMVVES

SEQ ID NO: 22218 - protein, 36 aa, Artificial Sequence
  Non-cyclic GFR-binding peptide
  MOD_RES (1), (33), (35): Xaa is C or S
XVPARLSPINILYFDAANNVVYGKIPDMVVEAXGXR

SEQ ID NO: 22219 - protein, 37 aa, Artificial Sequence
  Non-cyclic GFR-binding peptide
  MOD_RES (5), (6): Xaa is C or S
IPKAXXVPTELSPINMLYFDEYDKVVYGKIPEMVVEG

SEQ ID NO: 22220 - protein, 37 aa, Artificial Sequence
  Non-cyclic GFR-binding peptide
  MOD_RES (3), (4), (36): Xaa is C or S
ASXXVPARLSPINILYFDAANNVVYGKIPDMVVEAXG

SEQ ID NO: 22221 - protein, 41 aa, Artificial Sequence
  Non-cyclic GFR-binding peptide
  MOD_RES (7), (41): Xaa is C or S
  MOD_RES (21), (22), (23), (24), (25): Xaa is A or G
  MOD_RES (26), (27), (28), (29): Xaa is A or G or is absent
HVTKPTXAPTKLSPINVLYFXXXXXXXXXYGKIPNMVVRSX

SEQ ID NO: 22222 - protein, 39 aa, Artificial Sequence
  Non-cyclic GFR-binding peptide
  MOD_RES (3), (4), (36), (38): Xaa is C or S
KPXXAPTKLSPINVLYFDDSSNVIYGKIPNMVVRSXGXH

SEQ ID NO: 22223 - protein, 39 aa, Artificial Sequence
  Non-cyclic GFR-binding peptide
  MOD_RES (6), (7), (39): Xaa is C or S
AAPASXXVPARLSPINILYFDAANNVVYGKIPDMVVEAX

SEQ ID NO: 22224 - protein, 42 aa, Artificial Sequence
  Non-cyclic GFR-binding peptide
  MOD_RES (6), (7), (40), (42): Xaa is C or S
KVGKAXXVPTKLSPINVLYFDDMGVPTYGKIPEGMSVAEXGX

SEQ ID NO: 22225 - protein, 39 aa, Artificial Sequence
  Non-cyclic GFR-binding peptide
  MOD_RES (4), (5), (37), (39): Xaa is C or S
PKPXXAPTKLSPINVLYFDDSSNVIYGKIPNMVVRSXGX

SEQ ID NO: 22226 - protein, 35 aa, Artificial Sequence
  Non-cyclic GFR-binding peptide
  MOD_RES (1), (2): Xaa is C or S
  MOD_RES (16), (17), (18), (19), (20): Xaa is A or G
  MOD_RES (21), (22), (23), (24): Xaa is A or G or is absent
XXVPTELSPINMLYFXXXXXXXXXYGKIPEMVVEG

SEQ ID NO: 22227 - protein, 40 aa, Artificial Sequence
  Non-cyclic GFR-binding peptide
  MOD_RES (6), (7), (39): Xaa is C or S
AAPASXXVPARLSPINILYFDAANNVVYGKIPDMVVEAXG

SEQ ID NO: 22228 - protein, 38 aa, Artificial Sequence
  Non-cyclic GFR-binding peptide
  MOD_RES (3), (4), (38): Xaa is C or S
  MOD_RES (18), (19), (20), (21), (22): Xaa is A or G
  MOD_RES (23), (24), (25), (26): Xaa is A or G or is absent
ASXXVPARLSPINILYFXXXXXXXXXYGKIPDMVVEAX

SEQ ID NO: 22229 - protein, 43 aa, Artificial Sequence
  Non-cyclic GFR-binding peptide
  MOD_RES (5), (6), (40), (42): Xaa is C or S
  MOD_RES (20), (21), (22), (23), (24): Xaa is A or G
  MOD_RES (25), (26), (27), (28): Xaa is A or G or is absent
IPKAXXVPTELSPINMLYFXXXXXXXXXYGKIPEMVVEGXGXR

SEQ ID NO: 22230 - protein, 41 aa, Artificial Sequence
  Non-cyclic GFR-binding peptide
  MOD_RES (6), (7), (41): Xaa is C or S
  MOD_RES (21), (22), (23), (24), (25): Xaa is A or G
  MOD_RES (26), (27), (28), (29): Xaa is A or G or is absent
KIPKAXXVPTELSPINMLYFXXXXXXXXXYGKIPDMVVEGX

SEQ ID NO: 22231 - protein, 39 aa, Artificial Sequence
  Non-cyclic GFR-binding peptide
  MOD_RES (5), (6), (38): Xaa is C or S
VPKAXXAPTKLSPINVLYFDSSNNVIYGKIPNMVVKAXG

SEQ ID NO: 22232 - protein, 37 aa, Artificial Sequence
  Non-cyclic GFR-binding peptide
  MOD_RES (1), (2), (36): Xaa is C or S
  MOD_RES (16), (17), (18), (19), (20): Xaa is A or G
  MOD_RES (21), (22), (23), (24): Xaa is A or G or is absent
XXVPTRLSPINILYFXXXXXXXXXYGKIPDMVVESXG

SEQ ID NO: 22233 - protein, 34 aa, Artificial Sequence
  Non-cyclic GFR-binding peptide
  MOD_RES (1), (34): Xaa is C or S
  MOD_RES (15), (16), (17), (18), (19): Xaa is A or G
  MOD_RES (20), (21), (22), (23): Xaa is A or G or is absent
XAPVKTSPINMLYFXXXXXXXXXYGKIPMIVEEX

SEQ ID NO: 22234 - protein, 37 aa, Artificial Sequence
  Non-cyclic GFR-binding peptide
  MOD_RES (4), (5), (37): Xaa is C or S
PKAXXAPTKLSPINVLYFDSSNNVIYGKIPNMVVKAX

SEQ ID NO: 22235 - protein, 34 aa, Artificial Sequence
  Non-cyclic GFR-binding peptide
  MOD_RES (1), (2), (34): Xaa is C or S
XXAPTKLSPINVLYFDDSSNVIYGKIPNMVVRSX

SEQ ID NO: 22236 - protein, 38 aa, Artificial Sequence
  Non-cyclic GFR-binding peptide
  MOD_RES (3), (4), (37): Xaa is C or S
KAXXVPTKLSPINVLYFDDMGVPTYGKIPEGMSVAEXG

SEQ ID NO: 22237 - protein, 40 aa, Artificial Sequence
  Non-cyclic GFR-binding peptide
  MOD_RES (5), (6), (40): Xaa is C or S
  MOD_RES (20), (21), (22), (23), (24): Xaa is A or G
  MOD_RES (25), (26), (27), (28): Xaa is A or G or is absent
VPKAXXAPTKLSPINVLYFXXXXXXXXXYGKIPNMVVKAX

SEQ ID NO: 22238 - protein, 39 aa, Artificial Sequence
  Non-cyclic GFR-binding peptide
  MOD_RES (7), (7): Xaa is C or S
  MOD_RES (21), (22), (23), (24), (25): Xaa is A or G
  MOD_RES (26), (27), (28), (29): Xaa is A or G or is absent
HVTKPTXAPTKLSPINVLYFXXXXXXXXXYGKIPNMVVR

SEQ ID NO: 22239 - protein, 39 aa, Artificial Sequence
  Non-cyclic GFR-binding peptide
  MOD_RES (4), (5), (39): Xaa is C or S
  MOD_RES (19), (20), (21), (22), (23): Xaa is A or G
  MOD_RES (24), (25), (26), (27): Xaa is A or G or is absent
PKAXXVPTELSPINMLYFXXXXXXXXXYGKIPEMVVEGX

SEQ ID NO: 22240 - protein, 36 aa, Artificial Sequence
  Non-cyclic GFR-binding peptide
  MOD_RES (1), (2), (36): Xaa is C or S
  MOD_RES (16), (17), (18), (19), (20): Xaa is A or G
  MOD_RES (21), (22), (23), (24): Xaa is A or G or is absent
XXVPARLSPINILYFXXXXXXXXXYGKIPDMVVEAX

SEQ ID NO: 22241 - protein, 38 aa, Artificial Sequence
  Non-cyclic GFR-binding peptide
  MOD_RES (3), (4), (36), (38): Xaa is C or S
KPXXAPTKLSPINVLYFDDSSNVIYGKIPNMVVRSXGX

SEQ ID NO: 22242 - protein, 37 aa, Artificial Sequence
  Non-cyclic GFR-binding peptide
  MOD_RES (1), (2), (36): Xaa is C or S
  MOD_RES (16), (17), (18), (19), (20): Xaa is A or G
  MOD_RES (21), (22), (23), (24): Xaa is A or G or is absent
XXVPTELSPINMLYFXXXXXXXXXYGKIPEMVVEGXG

SEQ ID NO: 22243 - protein, 38 aa, Artificial Sequence
  Non-cyclic GFR-binding peptide
  MOD_RES (5), (5): Xaa is C or S
  MOD_RES (19), (20), (21), (22), (23): Xaa is A or G
  MOD_RES (24), (25), (26), (27): Xaa is A or G or is absent
TKPTXAPTKLSPINVLYFXXXXXXXXXYGKIPNMVVRS

SEQ ID NO: 22244 - protein, 31 aa, Artificial Sequence
  Non-cyclic GFR-binding peptide
VPTELSPINMLYFDENEKVVYGKIPDMVVEG

SEQ ID NO: 22245 - protein, 38 aa, Artificial Sequence
  Non-cyclic GFR-binding peptide
  MOD_RES (3), (4), (38): Xaa is C or S
  MOD_RES (18), (19), (20), (21), (22): Xaa is A or G
  MOD_RES (23), (24), (25), (26): Xaa is A or G or is absent
KPXXAPTQLSPINVLYFXXXXXXXXXYGKIPNMVVRAX

SEQ ID NO: 22246 - protein, 33 aa, Artificial Sequence
  Non-cyclic GFR-binding peptide
  MOD_RES (1), (1): Xaa is C or S
  MOD_RES (15), (16), (17), (18), (19): Xaa is A or G
  MOD_RES (20), (21), (22), (23): Xaa is A or G or is absent
XVPTELSPINMLYFXXXXXXXXXYGKIPEMVVE

SEQ ID NO: 22247 - protein, 37 aa, Artificial Sequence
  Non-cyclic GFR-binding peptide
  MOD_RES (3), (4): Xaa is C or S
  MOD_RES (18), (19), (20), (21), (22): Xaa is A or G
  MOD_RES (23), (24), (25), (26): Xaa is A or G or is absent
KAXXAPTKLSPINVLYFXXXXXXXXXYGKIPNMVVKA

SEQ ID NO: 22248 - protein, 37 aa, Artificial Sequence
  Non-cyclic GFR-binding peptide
  MOD_RES (2), (3), (37): Xaa is C or S
  MOD_RES (17), (18), (19), (20), (21): Xaa is A or G
  MOD_RES (22), (23), (24), (25): Xaa is A or G or is absent
TXXVPTRLSPINILYFXXXXXXXXXYGKIPDMVVESX

SEQ ID NO: 22249 - protein, 33 aa, Artificial Sequence
  Non-cyclic GFR-binding peptide
  MOD_RES (1), (33): Xaa is C or S
XVPARLSPINILYFDAANNVVYGKIPDMVVEAX

SEQ ID NO: 22250 - protein, 35 aa, Artificial Sequence
  Non-cyclic GFR-binding peptide
  MOD_RES (4), (4): Xaa is C or S
KPTXAPTKLSPINVLYFDDSSNVIYGKIPNMVVRS

SEQ ID NO: 22251 - protein, 40 aa, Artificial Sequence
  Non-cyclic GFR-binding peptide
  MOD_RES (4), (5), (37), (39): Xaa is C or S
PKPXXAPTKLSPINVLYFDDSSNVIYGKIPNMVVRSXGXH

SEQ ID NO: 22252 - protein, 42 aa, Artificial Sequence
  Non-cyclic GFR-binding peptide
  MOD_RES (6), (7), (40), (42): Xaa is C or S
  MOD_RES (21), (22), (23), (24), (25): Xaa is A or G
  MOD_RES (26), (27), (28), (29): Xaa is A or G or is absent
RVPSTXXAPVKTSPINMLYFXXXXXXXXXYGKIPMIVEEXGX

SEQ ID NO: 22253 - protein, 41 aa, Artificial Sequence
  Non-cyclic GFR-binding peptide
  MOD_RES (4), (5), (39), (41): Xaa is C or S
  MOD_RES (19), (20), (21), (22), (23): Xaa is A or G
  MOD_RES (24), (25), (26), (27): Xaa is A or G or is absent
PASXXVPARLSPINILYFXXXXXXXXXYGKIPDMVVEAXGX

SEQ ID NO: 22254 - protein, 40 aa, Artificial Sequence
  Non-cyclic GFR-binding peptide
  MOD_RES (5), (6): Xaa is C or S
  MOD_RES (20), (21), (22), (23), (24): Xaa is A or G
  MOD_RES (25), (26), (27), (28): Xaa is A or G or is absent
VGKAXXVPTKLSPINVLYFXXXXXXXXXYGKIPEGMSVAE

SEQ ID NO: 22255 - protein, 37 aa, Artificial Sequence
  Non-cyclic GFR-binding peptide
  MOD_RES (4), (5): Xaa is C or S
  MOD_RES (19), (20), (21), (22), (23): Xaa is A or G
  MOD_RES (24), (25), (26), (27): Xaa is A or G or is absent
PPTXXVPTRLSPINILYFXXXXXXXXXYGKIPDMVVE

SEQ ID NO: 22256 - protein, 35 aa, Artificial Sequence
  Non-cyclic GFR-binding peptide
  MOD_RES (1), (35): Xaa is C or S
  MOD_RES (15), (16), (17), (18), (19): Xaa is A or G
  MOD_RES (20), (21), (22), (23): Xaa is A or G or is absent
XVPARLSPINILYFXXXXXXXXXYGKIPDMVVEAX

SEQ ID NO: 22257 - protein, 36 aa, Artificial Sequence
  Non-cyclic GFR-binding peptide
  MOD_RES (4), (5): Xaa is C or S
SKAXXVPTKLSPINILYFDKGVVTYYGKIPGMAVSE

SEQ ID NO: 22258 - protein, 41 aa, Artificial Sequence
  Non-cyclic GFR-binding peptide
  MOD_RES (2), (3), (38), (40): Xaa is C or S
  MOD_RES (17), (18), (19), (20), (21): Xaa is A or G
  MOD_RES (22), (23), (24), (25): Xaa is A or G or is absent
AXXVPTKLSPINVLYFXXXXXXXXXYGKIPEGMSVAEXGXR

SEQ ID NO: 22259 - protein, 44 aa, Artificial Sequence
  Non-cyclic GFR-binding peptide
  MOD_RES (6), (7), (41), (43): Xaa is C or S
  MOD_RES (21), (22), (23), (24), (25): Xaa is A or G
  MOD_RES (26), (27), (28), (29): Xaa is A or G or is absent
KASKAXXVPTKLSPINILYFXXXXXXXXXYGKIPGMAVSEXGXR

SEQ ID NO: 22260 - protein, 41 aa, Artificial Sequence
  Non-cyclic GFR-binding peptide
  MOD_RES (4), (5), (39), (41): Xaa is C or S
  MOD_RES (19), (20), (21), (22), (23): Xaa is A or G
  MOD_RES (24), (25), (26), (27): Xaa is A or G or is absent
PKAXXVPTELSPINMLYFXXXXXXXXXYGKIPEMVVEGXGX

SEQ ID NO: 22261 - protein, 39 aa, Artificial Sequence
  Non-cyclic GFR-binding peptide
  MOD_RES (2), (3), (37), (39): Xaa is C or S
  MOD_RES (17), (18), (19), (20), (21): Xaa is A or G
  MOD_RES (22), (23), (24), (25): Xaa is A or G or is absent
PXXAPTKLSPINVLYFXXXXXXXXXYGKIPNMVVRSXGX

SEQ ID NO: 22262 - protein, 42 aa, Artificial Sequence
  Non-cyclic GFR-binding peptide
  MOD_RES (6), (7), (39), (41): Xaa is C or S
HVPKPXXAPTKLSPINVLYFDDSSNVIYGKIPNMVVRSXGXH

SEQ ID NO: 22263 - protein, 42 aa, Artificial Sequence
  Non-cyclic GFR-binding peptide
  MOD_RES (7), (41): Xaa is C or S
  MOD_RES (21), (22), (23), (24), (25): Xaa is A or G
  MOD_RES (26), (27), (28), (29): Xaa is A or G or is absent
HVTKPTXAPTKLSPINVLYFXXXXXXXXXYGKIPNMVVRSXG

SEQ ID NO: 22264 - protein, 35 aa, Artificial Sequence
  Non-cyclic GFR-binding peptide
  MOD_RES (1), (33), (35): Xaa is C or S
XAPTKLSPINVLYFDDSSNVIYGKIPNMVVRSXGX

SEQ ID NO: 22265 - protein, 36 aa, Artificial Sequence
  Non-cyclic GFR-binding peptide
  MOD_RES (1), (2), (35): Xaa is C or S
XXVPTKLSPINVLYFDDMGVPTYGKIPEGMSVAEXG

SEQ ID NO: 22266 - protein, 36 aa, Artificial Sequence
  Non-cyclic GFR-binding peptide
  MOD_RES (2), (3), (36): Xaa is C or S
  MOD_RES (17), (18), (19), (20), (21): Xaa is A or G
  MOD_RES (22), (23), (24), (25): Xaa is A or G or is absent
TXXAPVKTSPINMLYFXXXXXXXXXYGKIPMIVEEX

SEQ ID NO: 22267 - protein, 36 aa, Artificial Sequence
  Non-cyclic GFR-binding peptide
  MOD_RES (1), (35): Xaa is C or S
  MOD_RES (15), (16), (17), (18), (19): Xaa is A or G
  MOD_RES (20), (21), (22), (23): Xaa is A or G or is absent
XVPARLSPINILYFXXXXXXXXXYGKIPDMVVEAXG

SEQ ID NO: 22268 - protein, 40 aa, Artificial Sequence
  Non-cyclic GFR-binding peptide
  MOD_RES (2), (3), (37), (39): Xaa is C or S
  MOD_RES (17), (18), (19), (20), (21): Xaa is A or G
  MOD_RES (22), (23), (24), (25): Xaa is A or G or is absent
AXXVPTELSPINMLYFXXXXXXXXXYGKIPEMVVEGXGXR

SEQ ID NO: 22269 - protein, 40 aa, Artificial Sequence
  Non-cyclic GFR-binding peptide
  MOD_RES (4), (5), (39): Xaa is C or S
  MOD_RES (19), (20), (21), (22), (23): Xaa is A or G
  MOD_RES (24), (25), (26), (27): Xaa is A or G or is absent
PKAXXAPTKLSPINVLYFXXXXXXXXXYGKIPNMVVKAXG

SEQ ID NO: 22270 - protein, 39 aa, Artificial Sequence
  Non-cyclic GFR-binding peptide
  MOD_RES (3), (4), (38): Xaa is C or S
  MOD_RES (18), (19), (20), (21), (22): Xaa is A or G
  MOD_RES (23), (24), (25), (26): Xaa is A or G or is absent
KAXXAPTKLSPINVLYFXXXXXXXXXYGKIPNMVVKAXG

SEQ ID NO: 22271 - protein, 37 aa, Artificial Sequence
  Non-cyclic GFR-binding peptide
  MOD_RES (4), (5), (37): Xaa is C or S
PKAXXVPTELSPINMLYFDEYDKVVYGKIPEMVVEGX

SEQ ID NO: 22272 - protein, 37 aa, Artificial Sequence
  Non-cyclic GFR-binding peptide
  MOD_RES (4), (5), (37): Xaa is C or S
SKAXXVPTKLSPINILYFDKGVVTYYGKIPGMAVSEX

SEQ ID NO: 22273 - protein, 40 aa, Artificial Sequence
  Non-cyclic GFR-binding peptide
  MOD_RES (6), (7): Xaa is C or S
  MOD_RES (21), (22), (23), (24), (25): Xaa is A or G
  MOD_RES (26), (27), (28), (29): Xaa is A or G or is absent
SIPKAXXVPTELSPINMLYFXXXXXXXXXYGKIPEMVVEG

SEQ ID NO: 22274 - protein, 32 aa, Artificial Sequence
  Non-cyclic GFR-binding peptide
  MOD_RES (32), (32): Xaa is C or S
VPTKLSPINILYFDKGVVTYYGKIPGMAVSEX

SEQ ID NO: 22275 - protein, 33 aa, Artificial Sequence
  Non-cyclic GFR-binding peptide
  MOD_RES (32), (32): Xaa is C or S
APTQLSPINVLYFDDSSNVIYGKIPNMVVRAXG

SEQ ID NO: 22276 - protein, 40 aa, Artificial Sequence
  Non-cyclic GFR-binding peptide
  MOD_RES (6), (40): Xaa is C or S
  MOD_RES (20), (21), (22), (23), (24): Xaa is A or G
  MOD_RES (25), (26), (27), (28): Xaa is A or G or is absent
VTKPTXAPTKLSPINVLYFXXXXXXXXXYGKIPNMVVRSX

SEQ ID NO: 22277 - protein, 37 aa, Artificial Sequence
  Non-cyclic GFR-binding peptide
  MOD_RES (34), (36): Xaa is C or S
  MOD_RES (14), (15), (16), (17), (18): Xaa is A or G
  MOD_RES (19), (20), (21), (22): Xaa is A or G or is absent
APTQLSPINVLYFXXXXXXXXXYGKIPNMVVRAXGXH

SEQ ID NO: 22278 - protein, 42 aa, Artificial Sequence
  Non-cyclic GFR-binding peptide
  MOD_RES (6), (7), (41): Xaa is C or S
  MOD_RES (21), (22), (23), (24), (25): Xaa is A or G
  MOD_RES (26), (27), (28), (29): Xaa is A or G or is absent
SIPKAXXVPTELSPINMLYFXXXXXXXXXYGKIPEMVVEGXG

SEQ ID NO: 22279 - protein, 31 aa, Artificial Sequence
  Non-cyclic GFR-binding peptide
  MOD_RES (1), (1): Xaa is C or S
XVPTELSPINMLYFDEYDKVVYGKIPEMVVE

SEQ ID NO: 22280 - protein, 39 aa, Artificial Sequence
  Non-cyclic GFR-binding peptide
  MOD_RES (1), (2), (36), (38): Xaa is C or S
  MOD_RES (16), (17), (18), (19), (20): Xaa is A or G
  MOD_RES (21), (22), (23), (24): Xaa is A or G or is absent
XXAPTKLSPINVLYFXXXXXXXXXYGKIPNMVVKAXGXH

SEQ ID NO: 22281 - protein, 44 aa, Artificial Sequence
  Non-cyclic GFR-binding peptide
  MOD_RES (6), (7), (41), (43): Xaa is C or S
  MOD_RES (21), (22), (23), (24), (25): Xaa is A or G
  MOD_RES (26), (27), (28), (29): Xaa is A or G or is absent
TVPKPXXAPTQLSPINVLYFXXXXXXXXXYGKIPNMVVRAXGXH

SEQ ID NO: 22282 - protein, 36 aa, Artificial Sequence
  Non-cyclic GFR-binding peptide
  MOD_RES (2), (36): Xaa is C or S
  MOD_RES (16), (17), (18), (19), (20): Xaa is A or G
  MOD_RES (21), (22), (23), (24): Xaa is A or G or is absent
TXAPTKLSPINVLYFXXXXXXXXXYGKIPNMVVRSX

SEQ ID NO: 22283 - protein, 37 aa, Artificial Sequence
  Non-cyclic GFR-binding peptide
  MOD_RES (34), (36): Xaa is C or S
  MOD_RES (14), (15), (16), (17), (18): Xaa is A or G
  MOD_RES (19), (20), (21), (22): Xaa is A or G or is absent
VPTELSPINMLYFXXXXXXXXXYGKIPDMVVEGXGXR

SEQ ID NO: 22284 - protein, 39 aa, Artificial Sequence
  Non-cyclic GFR-binding peptide
  MOD_RES (5), (6), (38): Xaa is C or S
IPKAXXVPTELSPINMLYFDENEKVVYGKIPDMVVEGXG

SEQ ID NO: 22285 - protein, 44 aa, Artificial Sequence
  Non-cyclic GFR-binding peptide
  MOD_RES (6), (7), (41), (43): Xaa is C or S
  MOD_RES (21), (22), (23), (24), (25): Xaa is A or G
  MOD_RES (26), (27), (28), (29): Xaa is A or G or is absent
KIPKAXXVPTELSPINMLYFXXXXXXXXXYGKIPDMVVEGXGXR

SEQ ID NO: 22286 - protein, 33 aa, Artificial Sequence
  Non-cyclic GFR-binding peptide
  MOD_RES (32), (32): Xaa is C or S
VPTKLSPINILYFDKGVVTYYGKIPGMAVSEXG

SEQ ID NO: 22287 - protein, 37 aa, Artificial Sequence
  Non-cyclic GFR-binding peptide
  MOD_RES (35), (37): Xaa is C or S
  MOD_RES (14), (15), (16), (17), (18): Xaa is A or G
  MOD_RES (19), (20), (21), (22): Xaa is A or G or is absent
VPTKLSPINVLYFXXXXXXXXXYGKIPEGMSVAEXGX

SEQ ID NO: 22288 - protein, 42 aa, Artificial Sequence
  Non-cyclic GFR-binding peptide
  MOD_RES (6), (7), (39), (41): Xaa is C or S
KIPKAXXVPTELSPINMLYFDENEKVVYGKIPDMVVEGXGXR

SEQ ID NO: 22289 - protein, 37 aa, Artificial Sequence
  Non-cyclic GFR-binding peptide
  MOD_RES (4), (5): Xaa is C or S
  MOD_RES (19), (20), (21), (22), (23): Xaa is A or G
  MOD_RES (24), (25), (26), (27): Xaa is A or G or is absent
PSTXXAPVKTSPINMLYFXXXXXXXXXYGKIPMIVEE

SEQ ID NO: 22290 - protein, 38 aa, Artificial Sequence
  Non-cyclic GFR-binding peptide
  MOD_RES (2), (36), (38): Xaa is C or S
  MOD_RES (16), (17), (18), (19), (20): Xaa is A or G
  MOD_RES (21), (22), (23), (24): Xaa is A or G or is absent
TXAPTKLSPINVLYFXXXXXXXXXYGKIPNMVVRSXGX

SEQ ID NO: 22291 - protein, 35 aa, Artificial Sequence
  Non-cyclic GFR-binding peptide
  MOD_RES (3), (4): Xaa is C or S
KPXXAPTKLSPINVLYFDDSSNVIYGKIPNMVVRS

SEQ ID NO: 22292 - protein, 38 aa, Artificial Sequence
  Non-cyclic GFR-binding peptide
  MOD_RES (4), (36), (38): Xaa is C or S
KPTXAPTKLSPINVLYFDDSSNVIYGKIPNMVVRSXGX

SEQ ID NO: 22293 - protein, 33 aa, Artificial Sequence
  Non-cyclic GFR-binding peptide
  MOD_RES (1), (2): Xaa is C or S
XXVPTRLSPINILYFDSANNVVYGKIPDMVVES

SEQ ID NO: 22294 - protein, 38 aa, Artificial Sequence
  Non-cyclic GFR-binding peptide
  MOD_RES (6), (7): Xaa is C or S
STPPTXXVPTRLSPINILYFDSANNVVYGKIPDMVVES

SEQ ID NO: 22295 - protein, 40 aa, Artificial Sequence
  Non-cyclic GFR-binding peptide
  MOD_RES (5), (6), (40): Xaa is C or S
  MOD_RES (20), (21), (22), (23), (24): Xaa is A or G
  MOD_RES (25), (26), (27), (28): Xaa is A or G or is absent
APASXXVPARLSPINILYFXXXXXXXXXYGKIPDMVVEAX

SEQ ID NO: 22296 - protein, 39 aa, Artificial Sequence
  Non-cyclic GFR-binding peptide
  MOD_RES (4), (5), (37), (39): Xaa is C or S
PKPXXAPTQLSPINVLYFDDSSNVIYGKIPNMVVRAXGX

SEQ ID NO: 22297 - protein, 31 aa, Artificial Sequence
  Non-cyclic GFR-binding peptide
  MOD_RES (1), (1): Xaa is C or S
XVPARLSPINILYFDAANNVVYGKIPDMVVE

SEQ ID NO: 22298 - protein, 39 aa, Artificial Sequence
  Non-cyclic GFR-binding peptide
  MOD_RES (2), (3), (36), (38): Xaa is C or S
  MOD_RES (17), (18), (19), (20), (21): Xaa is A or G
  MOD_RES (22), (23), (24), (25): Xaa is A or G or is absent
TXXAPVKTSPINMLYFXXXXXXXXXYGKIPMIVEEXGXL

SEQ ID NO: 22299 - protein, 38 aa, Artificial Sequence
  Non-cyclic GFR-binding peptide
  MOD_RES (4), (5): Xaa is C or S
  MOD_RES (19), (20), (21), (22), (23): Xaa is A or G
  MOD_RES (24), (25), (26), (27): Xaa is A or G or is absent
PKAXXAPTKLSPINVLYFXXXXXXXXXYGKIPNMVVKA

SEQ ID NO: 22300 - protein, 38 aa, Artificial Sequence
  Non-cyclic GFR-binding peptide
  MOD_RES (5), (6), (38): Xaa is C or S
VPKAXXAPTKLSPINVLYFDSSNNVIYGKIPNMVVKAX

SEQ ID NO: 22301 - protein, 34 aa, Artificial Sequence
  Non-cyclic GFR-binding peptide
  MOD_RES (34), (34): Xaa is C or S
  MOD_RES (14), (15), (16), (17), (18): Xaa is A or G
  MOD_RES (19), (20), (21), (22): Xaa is A or G or is absent
VPARLSPINILYFXXXXXXXXXYGKIPDMVVEAX

SEQ ID NO: 22302 - protein, 38 aa, Artificial Sequence
  Non-cyclic GFR-binding peptide
  MOD_RES (5), (6): Xaa is C or S
  MOD_RES (20), (21), (22), (23), (24): Xaa is A or G
  MOD_RES (25), (26), (27), (28): Xaa is A or G or is absent
TPPTXXVPTRLSPINILYFXXXXXXXXXYGKIPDMVVE

SEQ ID NO: 22303 - protein, 38 aa, Artificial Sequence
  Non-cyclic GFR-binding peptide
  MOD_RES (1), (2), (35), (37): Xaa is C or S
XXVPTKLSPINVLYFDDMGVPTYGKIPEGMSVAEXGXR

SEQ ID NO: 22304 - protein, 37 aa, Artificial Sequence
  Non-cyclic GFR-binding peptide
  MOD_RES (3), (4), (36): Xaa is C or S
KPXXAPTKLSPINVLYFDDSSNVIYGKIPNMVVRSXG

SEQ ID NO: 22305 - protein, 30 aa, Artificial Sequence
  Non-cyclic GFR-binding peptide
VPARLSPINILYFDAANNVVYGKIPDMVVE

SEQ ID NO: 22306 - protein, 41 aa, Artificial Sequence
  Non-cyclic GFR-binding peptide
  MOD_RES (5), (6), (39), (41): Xaa is C or S
  MOD_RES (20), (21), (22), (23), (24): Xaa is A or G
  MOD_RES (25), (26), (27), (28): Xaa is A or G or is absent
VPSTXXAPVKTSPINMLYFXXXXXXXXXYGKIPMIVEEXGX

SEQ ID NO: 22307 - protein, 31 aa, Artificial Sequence
  Non-cyclic GFR-binding peptide
  MOD_RES (1), (1): Xaa is C or S
XVPTELSPINMLYFDENEKVVYGKIPDMVVE

SEQ ID NO: 22308 - protein, 35 aa, Artificial Sequence
  Non-cyclic GFR-binding peptide
  MOD_RES (2), (3): Xaa is C or S
  MOD_RES (17), (18), (19), (20), (21): Xaa is A or G
  MOD_RES (22), (23), (24), (25): Xaa is A or G or is absent
SXXVPARLSPINILYFXXXXXXXXXYGKIPDMVVE

SEQ ID NO: 22309 - protein, 38 aa, Artificial Sequence
  Non-cyclic GFR-binding peptide
  MOD_RES (1), (2), (36), (38): Xaa is C or S
  MOD_RES (16), (17), (18), (19), (20): Xaa is A or G
  MOD_RES (21), (22), (23), (24): Xaa is A or G or is absent
XXAPTKLSPINVLYFXXXXXXXXXYGKIPNMVVRSXGX

SEQ ID NO: 22310 - protein, 39 aa, Artificial Sequence
  Non-cyclic GFR-binding peptide
  MOD_RES (6), (7), (38): Xaa is C or S
RVPSTXXAPVKTSPINMLYFDNGRVLLYGKIPMIVEEXG

SEQ ID NO: 22311 - protein, 35 aa, Artificial Sequence
  Non-cyclic GFR-binding peptide
  MOD_RES (1), (33), (35): Xaa is C or S
XVPTRLSPINILYFDSANNVVYGKIPDMVVESXGX

SEQ ID NO: 22312 - protein, 33 aa, Artificial Sequence
  Non-cyclic GFR-binding peptide
  MOD_RES (1), (1): Xaa is C or S
  MOD_RES (15), (16), (17), (18), (19): Xaa is A or G
  MOD_RES (20), (21), (22), (23): Xaa is A or G or is absent
XVPTELSPINMLYFXXXXXXXXXYGKIPDMVVE

SEQ ID NO: 22313 - protein, 34 aa, Artificial Sequence
  Non-cyclic GFR-binding peptide
  MOD_RES (3), (4): Xaa is C or S
ASXXVPARLSPINILYFDAANNVVYGKIPDMVVE

SEQ ID NO: 22314 - protein, 34 aa, Artificial Sequence
  Non-cyclic GFR-binding peptide
  MOD_RES (4), (4): Xaa is C or S
KPTXAPTKLSPINVLYFDDSSNVIYGKIPNMVVR

SEQ ID NO: 22315 - protein, 40 aa, Artificial Sequence
  Non-cyclic GFR-binding peptide
  MOD_RES (6), (7): Xaa is C or S
  MOD_RES (21), (22), (23), (24), (25): Xaa is A or G
  MOD_RES (26), (27), (28), (29): Xaa is A or G or is absent
STPPTXXVPTRLSPINILYFXXXXXXXXXYGKIPDMVVES

SEQ ID NO: 22316 - protein, 38 aa, Artificial Sequence
  Non-cyclic GFR-binding peptide
  MOD_RES (1), (35), (37): Xaa is C or S
  MOD_RES (15), (16), (17), (18), (19): Xaa is A or G
  MOD_RES (20), (21), (22), (23): Xaa is A or G or is absent
XAPTQLSPINVLYFXXXXXXXXXYGKIPNMVVRAXGXH

SEQ ID NO: 22317 - protein, 35 aa, Artificial Sequence
  Non-cyclic GFR-binding peptide
  MOD_RES (2), (2): Xaa is C or S
  MOD_RES (16), (17), (18), (19), (20): Xaa is A or G
  MOD_RES (21), (22), (23), (24): Xaa is A or G or is absent
TXAPTKLSPINVLYFXXXXXXXXXYGKIPNMVVRS

SEQ ID NO: 22318 - protein, 36 aa, Artificial Sequence
  Non-cyclic GFR-binding peptide
  MOD_RES (3), (4), (36): Xaa is C or S
KAXXAPTKLSPINVLYFDSSNNVIYGKIPNMVVKAX

SEQ ID NO: 22319 - protein, 35 aa, Artificial Sequence
  Non-cyclic GFR-binding peptide
  MOD_RES (2), (3): Xaa is C or S
  MOD_RES (17), (18), (19), (20), (21): Xaa is A or G
  MOD_RES (22), (23), (24), (25): Xaa is A or G or is absent
AXXVPTKLSPINILYFXXXXXXXXXYGKIPGMAVS

SEQ ID NO: 22320 - protein, 36 aa, Artificial Sequence
  Non-cyclic GFR-binding peptide
  MOD_RES (4), (5): Xaa is C or S
PKAXXVPTELSPINMLYFDEYDKVVYGKIPEMVVEG

SEQ ID NO: 22321 - protein, 36 aa, Artificial Sequence
  Non-cyclic GFR-binding peptide
  MOD_RES (3), (4), (36): Xaa is C or S
KPXXAPTKLSPINVLYFDDSSNVIYGKIPNMVVRSX

SEQ ID NO: 22322 - protein, 36 aa, Artificial Sequence
  Non-cyclic GFR-binding peptide
  MOD_RES (2), (3): Xaa is C or S
  MOD_RES (17), (18), (19), (20), (21): Xaa is A or G
  MOD_RES (22), (23), (24), (25): Xaa is A or G or is absent
PXXAPTQLSPINVLYFXXXXXXXXXYGKIPNMVVRA

SEQ ID NO: 22323 - protein, 40 aa, Artificial Sequence
  Non-cyclic GFR-binding peptide
  MOD_RES (6), (7): Xaa is C or S
  MOD_RES (21), (22), (23), (24), (25): Xaa is A or G
  MOD_RES (26), (27), (28), (29): Xaa is A or G or is absent
HVPKPXXAPTKLSPINVLYFXXXXXXXXXYGKIPNMVVRS

SEQ ID NO: 22324 - protein, 37 aa, Artificial Sequence
  Non-cyclic GFR-binding peptide
  MOD_RES (7), (7): Xaa is C or S
HVTKPTXAPTKLSPINVLYFDDSSNVIYGKIPNMVVR

SEQ ID NO: 22325 - protein, 38 aa, Artificial Sequence
  Non-cyclic GFR-binding peptide
  MOD_RES (5), (6), (38): Xaa is C or S
IPKAXXVPTELSPINMLYFDENEKVVYGKIPDMVVEGX

SEQ ID NO: 22326 - protein, 41 aa, Artificial Sequence
  Non-cyclic GFR-binding peptide
  MOD_RES (6), (7), (41): Xaa is C or S
  MOD_RES (21), (22), (23), (24), (25): Xaa is A or G
  MOD_RES (26), (27), (28), (29): Xaa is A or G or is absent
HVPKPXXAPTKLSPINVLYFXXXXXXXXXYGKIPNMVVRSX

SEQ ID NO: 22327 - protein, 42 aa, Artificial Sequence
  Non-cyclic GFR-binding peptide
  MOD_RES (5), (6), (40), (42): Xaa is C or S
  MOD_RES (20), (21), (22), (23), (24): Xaa is A or G
  MOD_RES (25), (26), (27), (28): Xaa is A or G or is absent
VPKAXXAPTKLSPINVLYFXXXXXXXXXYGKIPNMVVKAXGX

SEQ ID NO: 22328 - protein, 34 aa, Artificial Sequence
  Non-cyclic GFR-binding peptide
  MOD_RES (1), (2): Xaa is C or S
  MOD_RES (16), (17), (18), (19), (20): Xaa is A or G
  MOD_RES (21), (22), (23), (24): Xaa is A or G or is absent
XXVPTELSPINMLYFXXXXXXXXXYGKIPDMVVE

SEQ ID NO: 22329 - protein, 39 aa, Artificial Sequence
  Non-cyclic GFR-binding peptide
  MOD_RES (6), (7): Xaa is C or S
  MOD_RES (21), (22), (23), (24), (25): Xaa is A or G
  MOD_RES (26), (27), (28), (29): Xaa is A or G or is absent
TVPKPXXAPTQLSPINVLYFXXXXXXXXXYGKIPNMVVR

SEQ ID NO: 22330 - protein, 38 aa, Artificial Sequence
  Non-cyclic GFR-binding peptide
  MOD_RES (2), (3), (35), (37): Xaa is C or S
PXXAPTQLSPINVLYFDDSSNVIYGKIPNMVVRAXGXH

SEQ ID NO: 22331 - protein, 41 aa, Artificial Sequence
  Non-cyclic GFR-binding peptide
  MOD_RES (4), (5), (40): Xaa is C or S
  MOD_RES (19), (20), (21), (22), (23): Xaa is A or G
  MOD_RES (24), (25), (26), (27): Xaa is A or G or is absent
GKAXXVPTKLSPINVLYFXXXXXXXXXYGKIPEGMSVAEXG

SEQ ID NO: 22332 - protein, 41 aa, Artificial Sequence
  Non-cyclic GFR-binding peptide
  MOD_RES (5), (6), (38), (40): Xaa is C or S
VPKPXXAPTQLSPINVLYFDDSSNVIYGKIPNMVVRAXGXH

SEQ ID NO: 22333 - protein, 39 aa, Artificial Sequence
  Non-cyclic GFR-binding peptide
  MOD_RES (4), (5), (39): Xaa is C or S
  MOD_RES (19), (20), (21), (22), (23): Xaa is A or G
  MOD_RES (24), (25), (26), (27): Xaa is A or G or is absent
PKAXXAPTKLSPINVLYFXXXXXXXXXYGKIPNMVVKAX

SEQ ID NO: 22334 - protein, 41 aa, Artificial Sequence
  Non-cyclic GFR-binding peptide
  MOD_RES (6), (7), (41): Xaa is C or S
  MOD_RES (21), (22), (23), (24), (25): Xaa is A or G
  MOD_RES (26), (27), (28), (29): Xaa is A or G or is absent
TVPKPXXAPTQLSPINVLYFXXXXXXXXXYGKIPNMVVRAX

SEQ ID NO: 22335 - protein, 35 aa, Artificial Sequence
  Non-cyclic GFR-binding peptide
  MOD_RES (1), (2), (34): Xaa is C or S
XXVPTELSPINMLYFDEYDKVVYGKIPEMVVEGXG

SEQ ID NO: 22336 - protein, 33 aa, Artificial Sequence
  Non-cyclic GFR-binding peptide
  MOD_RES (33), (33): Xaa is C or S
VPTKLSPINVLYFDDMGVPTYGKIPEGMSVAEX

SEQ ID NO: 22337 - protein, 40 aa, Artificial Sequence
  Non-cyclic GFR-binding peptide
  MOD_RES (2), (3), (37), (39): Xaa is C or S
  MOD_RES (17), (18), (19), (20), (21): Xaa is A or G
  MOD_RES (22), (23), (24), (25): Xaa is A or G or is absent
AXXVPTKLSPINILYFXXXXXXXXXYGKIPGMAVSEXGXR

SEQ ID NO: 22338 - protein, 34 aa, Artificial Sequence
  Non-cyclic GFR-binding peptide
  MOD_RES (1), (34): Xaa is C or S
XVPTKLSPINVLYFDDMGVPTYGKIPEGMSVAEX

SEQ ID NO: 22339 - protein, 39 aa, Artificial Sequence
  Non-cyclic GFR-binding peptide
  MOD_RES (6), (7), (39): Xaa is C or S
KASKAXXVPTKLSPINILYFDKGVVTYYGKIPGMAVSEX

SEQ ID NO: 22340 - protein, 33 aa, Artificial Sequence
  Non-cyclic GFR-binding peptide
  MOD_RES (32), (32): Xaa is C or S
VPTELSPINMLYFDENEKVVYGKIPDMVVEGXG

SEQ ID NO: 22341 - protein, 34 aa, Artificial Sequence
  Non-cyclic GFR-binding peptide
  MOD_RES (1), (33): Xaa is C or S
XVPTELSPINMLYFDEYDKVVYGKIPEMVVEGXG

SEQ ID NO: 22342 - protein, 38 aa, Artificial Sequence
  Non-cyclic GFR-binding peptide
  MOD_RES (4), (5), (38): Xaa is C or S
  MOD_RES (19), (20), (21), (22), (23): Xaa is A or G
  MOD_RES (24), (25), (26), (27): Xaa is A or G or is absent
PSTXXAPVKTSPINMLYFXXXXXXXXXYGKIPMIVEEX

SEQ ID NO: 22343 - protein, 41 aa, Artificial Sequence
  Non-cyclic GFR-binding peptide
  MOD_RES (6), (7), (41): Xaa is C or S
  MOD_RES (21), (22), (23), (24), (25): Xaa is A or G
  MOD_RES (26), (27), (28), (29): Xaa is A or G or is absent
SIPKAXXVPTELSPINMLYFXXXXXXXXXYGKIPEMVVEGX

SEQ ID NO: 22344 - protein, 41 aa, Artificial Sequence
  Non-cyclic GFR-binding peptide
  MOD_RES (3), (4), (38), (40): Xaa is C or S
  MOD_RES (18), (19), (20), (21), (22): Xaa is A or G
  MOD_RES (23), (24), (25), (26): Xaa is A or G or is absent
KAXXVPTKLSPINILYFXXXXXXXXXYGKIPGMAVSEXGXR

SEQ ID NO: 22345 - protein, 39 aa, Artificial Sequence
  Non-cyclic GFR-binding peptide
  MOD_RES (6), (7): Xaa is C or S
  MOD_RES (21), (22), (23), (24), (25): Xaa is A or G
  MOD_RES (26), (27), (28), (29): Xaa is A or G or is absent
HVPKPXXAPTKLSPINVLYFXXXXXXXXXYGKIPNMVVR

SEQ ID NO: 22346 - protein, 37 aa, Artificial Sequence
  Non-cyclic GFR-binding peptide
  MOD_RES (4), (5), (37): Xaa is C or S
PPTXXVPTRLSPINILYFDSANNVVYGKIPDMVVESX

SEQ ID NO: 22347 - protein, 40 aa, Artificial Sequence
  Non-cyclic GFR-binding peptide
  MOD_RES (6), (7), (39): Xaa is C or S
HVPKPXXAPTKLSPINVLYFDDSSNVIYGKIPNMVVRSXG

SEQ ID NO: 22348 - protein, 34 aa, Artificial Sequence
  Non-cyclic GFR-binding peptide
  MOD_RES (2), (3): Xaa is C or S
PXXAPTKLSPINVLYFDDSSNVIYGKIPNMVVRS

SEQ ID NO: 22349 - protein, 40 aa, Artificial Sequence
  Non-cyclic GFR-binding peptide
  MOD_RES (4), (5), (39): Xaa is C or S
  MOD_RES (19), (20), (21), (22), (23): Xaa is A or G
  MOD_RES (24), (25), (26), (27): Xaa is A or G or is absent
PKAXXVPTELSPINMLYFXXXXXXXXXYGKIPDMVVEGXG

SEQ ID NO: 22350 - protein, 37 aa, Artificial Sequence
  Non-cyclic GFR-binding peptide
  MOD_RES (6), (6): Xaa is C or S
VTKPTXAPTKLSPINVLYFDDSSNVIYGKIPNMVVRS

SEQ ID NO: 22351 - protein, 36 aa, Artificial Sequence
  Non-cyclic GFR-binding peptide
  MOD_RES (4), (4): Xaa is C or S
  MOD_RES (18), (19), (20), (21), (22): Xaa is A or G
  MOD_RES (23), (24), (25), (26): Xaa is A or G or is absent
KPTXAPTKLSPINVLYFXXXXXXXXXYGKIPNMVVR

SEQ ID NO: 22352 - protein, 40 aa, Artificial Sequence
  Non-cyclic GFR-binding peptide
  MOD_RES (4), (5), (39): Xaa is C or S
  MOD_RES (19), (20), (21), (22), (23): Xaa is A or G
  MOD_RES (24), (25), (26), (27): Xaa is A or G or is absent
SKAXXVPTKLSPINILYFXXXXXXXXXYGKIPGMAVSEXG

SEQ ID NO: 22353 - protein, 40 aa, Artificial Sequence
  Non-cyclic GFR-binding peptide
  MOD_RES (5), (6), (40): Xaa is C or S
  MOD_RES (20), (21), (22), (23), (24): Xaa is A or G
  MOD_RES (25), (26), (27), (28): Xaa is A or G or is absent
VPKPXXAPTQLSPINVLYFXXXXXXXXXYGKIPNMVVRAX

SEQ ID NO: 22354 - protein, 38 aa, Artificial Sequence
  Non-cyclic GFR-binding peptide
  MOD_RES (4), (5), (37): Xaa is C or S
PPTXXVPTRLSPINILYFDSANNVVYGKIPDMVVESXG

SEQ ID NO: 22355 - protein, 31 aa, Artificial Sequence
  Non-cyclic GFR-binding peptide
APTQLSPINVLYFDDSSNVIYGKIPNMVVRA

SEQ ID NO: 22356 - protein, 39 aa, Artificial Sequence
  Non-cyclic GFR-binding peptide
  MOD_RES (6), (7), (39): Xaa is C or S
YVPKPXXAPTKLSPINVLYFDDSSNVIYGKIPNMVVRSX

SEQ ID NO: 22357 - protein, 38 aa, Artificial Sequence
  Non-cyclic GFR-binding peptide
  MOD_RES (1), (35), (37): Xaa is C or S
  MOD_RES (15), (16), (17), (18), (19): Xaa is A or G
  MOD_RES (20), (21), (22), (23): Xaa is A or G or is absent
XVPTELSPINMLYFXXXXXXXXXYGKIPDMVVEGXGXR

SEQ ID NO: 22358 - protein, 39 aa, Artificial Sequence
  Non-cyclic GFR-binding peptide
  MOD_RES (3), (4), (36), (38): Xaa is C or S
PTXXVPTRLSPINILYFDSANNVVYGKIPDMVVESXGXR

SEQ ID NO: 22359 - protein, 37 aa, Artificial Sequence
  Non-cyclic GFR-binding peptide
  MOD_RES (1), (36): Xaa is C or S
  MOD_RES (15), (16), (17), (18), (19): Xaa is A or G
  MOD_RES (20), (21), (22), (23): Xaa is A or G or is absent
XVPTKLSPINVLYFXXXXXXXXXYGKIPEGMSVAEXG

SEQ ID NO: 22360 - protein, 41 aa, Artificial Sequence
  Non-cyclic GFR-binding peptide
  MOD_RES (5), (6), (40): Xaa is C or S
  MOD_RES (20), (21), (22), (23), (24): Xaa is A or G
  MOD_RES (25), (26), (27), (28): Xaa is A or G or is absent
VPKPXXAPTKLSPINVLYFXXXXXXXXXYGKIPNMVVRSXG

SEQ ID NO: 22361 - protein, 36 aa, Artificial Sequence
  Non-cyclic GFR-binding peptide
  MOD_RES (3), (4): Xaa is C or S
  MOD_RES (18), (19), (20), (21), (22): Xaa is A or G
  MOD_RES (23), (24), (25), (26): Xaa is A or G or is absent
KPXXAPTKLSPINVLYFXXXXXXXXXYGKIPNMVVR

SEQ ID NO: 22362 - protein, 41 aa, Artificial Sequence
  Non-cyclic GFR-binding peptide
  MOD_RES (6), (7), (41): Xaa is C or S
  MOD_RES (21), (22), (23), (24), (25): Xaa is A or G
  MOD_RES (26), (27), (28), (29): Xaa is A or G or is absent
STPPTXXVPTRLSPINILYFXXXXXXXXXYGKIPDMVVESX

SEQ ID NO: 22363 - protein, 39 aa, Artificial Sequence
  Non-cyclic GFR-binding peptide
  MOD_RES (1), (2), (36), (38): Xaa is C or S
  MOD_RES (16), (17), (18), (19), (20): Xaa is A or G
  MOD_RES (21), (22), (23), (24): Xaa is A or G or is absent
XXVPTKLSPINILYFXXXXXXXXXYGKIPGMAVSEXGXR

SEQ ID NO: 22364 - protein, 41 aa, Artificial Sequence
  Non-cyclic GFR-binding peptide
  MOD_RES (6), (7), (41): Xaa is C or S
  MOD_RES (21), (22), (23), (24), (25): Xaa is A or G
  MOD_RES (26), (27), (28), (29): Xaa is A or G or is absent
AVPKAXXAPTKLSPINVLYFXXXXXXXXXYGKIPNMVVKAX

SEQ ID NO: 22365 - protein, 30 aa, Artificial Sequence
  Non-cyclic GFR-binding peptide
APTKLSPINVLYFDDSSNVIYGKIPNMVVR

SEQ ID NO: 22366 - protein, 34 aa, Artificial Sequence
  Non-cyclic GFR-binding peptide
  MOD_RES (34), (34): Xaa is C or S
  MOD_RES (14), (15), (16), (17), (18): Xaa is A or G
  MOD_RES (19), (20), (21), (22): Xaa is A or G or is absent
APTQLSPINVLYFXXXXXXXXXYGKIPNMVVRAX

SEQ ID NO: 22367 - protein, 42 aa, Artificial Sequence
  Non-cyclic GFR-binding peptide
  MOD_RES (6), (7), (41): Xaa is C or S
  MOD_RES (21), (22), (23), (24), (25): Xaa is A or G
  MOD_RES (26), (27), (28), (29): Xaa is A or G or is absent
STPPTXXVPTRLSPINILYFXXXXXXXXXYGKIPDMVVESXG

SEQ ID NO: 22368 - protein, 40 aa, Artificial Sequence
  Non-cyclic GFR-binding peptide
  MOD_RES (3), (4), (39): Xaa is C or S
  MOD_RES (18), (19), (20), (21), (22): Xaa is A or G
  MOD_RES (23), (24), (25), (26): Xaa is A or G or is absent
KAXXVPTKLSPINVLYFXXXXXXXXXYGKIPEGMSVAEXG

SEQ ID NO: 22369 - protein, 36 aa, Artificial Sequence
  Non-cyclic GFR-binding peptide
  MOD_RES (5), (6): Xaa is C or S
APASXXVPARLSPINILYFDAANNVVYGKIPDMVVE

SEQ ID NO: 22370 - protein, 32 aa, Artificial Sequence
  Non-cyclic GFR-binding peptide
  MOD_RES (1), (2): Xaa is C or S
XXVPTELSPINMLYFDEYDKVVYGKIPEMVVE

SEQ ID NO: 22371 - protein, 36 aa, Artificial Sequence
  Non-cyclic GFR-binding peptide
  MOD_RES (4), (5), (36): Xaa is C or S
PSTXXAPVKTSPINMLYFDNGRVLLYGKIPMIVEEX

SEQ ID NO: 22372 - protein, 35 aa, Artificial Sequence
  Non-cyclic GFR-binding peptide
  MOD_RES (2), (3), (35): Xaa is C or S
AXXVPTELSPINMLYFDEYDKVVYGKIPEMVVEGX

SEQ ID NO: 22373 - protein, 36 aa, Artificial Sequence
  Non-cyclic GFR-binding peptide
  MOD_RES (3), (4): Xaa is C or S
  MOD_RES (18), (19), (20), (21), (22): Xaa is A or G
  MOD_RES (23), (24), (25), (26): Xaa is A or G or is absent
KAXXVPTELSPINMLYFXXXXXXXXXYGKIPEMVVE

SEQ ID NO: 22374 - protein, 31 aa, Artificial Sequence
  Non-cyclic GFR-binding peptide
  MOD_RES (1), (1): Xaa is C or S
XAPTKLSPINVLYFDSSNNVIYGKIPNMVVK

SEQ ID NO: 22375 - protein, 38 aa, Artificial Sequence
  Non-cyclic GFR-binding peptide
  MOD_RES (1), (2), (36), (38): Xaa is C or S
  MOD_RES (16), (17), (18), (19), (20): Xaa is A or G
  MOD_RES (21), (22), (23), (24): Xaa is A or G or is absent
XXVPTKLSPINILYFXXXXXXXXXYGKIPGMAVSEXGX

SEQ ID NO: 22376 - protein, 33 aa, Artificial Sequence
  Non-cyclic GFR-binding peptide
  MOD_RES (1), (33): Xaa is C or S
XAPTKLSPINVLYFDDSSNVIYGKIPNMVVRSX

SEQ ID NO: 22377 - protein, 34 aa, Artificial Sequence
  Non-cyclic GFR-binding peptide
  MOD_RES (1), (1): Xaa is C or S
  MOD_RES (15), (16), (17), (18), (19): Xaa is A or G
  MOD_RES (20), (21), (22), (23): Xaa is A or G or is absent
XVPTKLSPINILYFXXXXXXXXXYGKIPGMAVSE

SEQ ID NO: 22378 - protein, 40 aa, Artificial Sequence
  Non-cyclic GFR-binding peptide
  MOD_RES (2), (3), (37), (39): Xaa is C or S
  MOD_RES (17), (18), (19), (20), (21): Xaa is A or G
  MOD_RES (22), (23), (24), (25): Xaa is A or G or is absent
AXXAPTKLSPINVLYFXXXXXXXXXYGKIPNMVVKAXGXH

SEQ ID NO: 22379 - protein, 40 aa, Artificial Sequence
  Non-cyclic GFR-binding peptide
  MOD_RES (4), (5), (37), (39): Xaa is C or S
SKAXXVPTKLSPINILYFDKGVVTYYGKIPGMAVSEXGXR

SEQ ID NO: 22380 - protein, 34 aa, Artificial Sequence
  Non-cyclic GFR-binding peptide
  MOD_RES (3), (4): Xaa is C or S
KPXXAPTQLSPINVLYFDDSSNVIYGKIPNMVVR

SEQ ID NO: 22381 - protein, 42 aa, Artificial Sequence
  Non-cyclic GFR-binding peptide
  MOD_RES (6), (7), (41): Xaa is C or S
  MOD_RES (21), (22), (23), (24), (25): Xaa is A or G
  MOD_RES (26), (27), (28), (29): Xaa is A or G or is absent
KASKAXXVPTKLSPINILYFXXXXXXXXXYGKIPGMAVSEXG

SEQ ID NO: 22382 - protein, 38 aa, Artificial Sequence
  Non-cyclic GFR-binding peptide
  MOD_RES (1), (2), (36), (38): Xaa is C or S
  MOD_RES (16), (17), (18), (19), (20): Xaa is A or G
  MOD_RES (21), (22), (23), (24): Xaa is A or G or is absent
XXVPTELSPINMLYFXXXXXXXXXYGKIPDMVVEGXGX

SEQ ID NO: 22383 - protein, 36 aa, Artificial Sequence
  Non-cyclic GFR-binding peptide
  MOD_RES (3), (4), (36): Xaa is C or S
KAXXVPTKLSPINILYFDKGVVTYYGKIPGMAVSEX

SEQ ID NO: 22384 - protein, 39 aa, Artificial Sequence
  Non-cyclic GFR-binding peptide
  MOD_RES (2), (3), (37), (39): Xaa is C or S
  MOD_RES (17), (18), (19), (20), (21): Xaa is A or G
  MOD_RES (22), (23), (24), (25): Xaa is A or G or is absent
PXXAPTQLSPINVLYFXXXXXXXXXYGKIPNMVVRAXGX

SEQ ID NO: 22385 - protein, 35 aa, Artificial Sequence
  Non-cyclic GFR-binding peptide
  MOD_RES (32), (34): Xaa is C or S
APTKLSPINVLYFDSSNNVIYGKIPNMVVKAXGXH

SEQ ID NO: 22386 - protein, 38 aa, Artificial Sequence
  Non-cyclic GFR-binding peptide
  MOD_RES (3), (4), (36), (38): Xaa is C or S
KPXXAPTQLSPINVLYFDDSSNVIYGKIPNMVVRAXGX

SEQ ID NO: 22387 - protein, 37 aa, Artificial Sequence
  Non-cyclic GFR-binding peptide
  MOD_RES (6), (7): Xaa is C or S
KIPKAXXVPTELSPINMLYFDENEKVVYGKIPDMVVE

SEQ ID NO: 22388 - protein, 38 aa, Artificial Sequence
  Non-cyclic GFR-binding peptide
  MOD_RES (2), (3), (35), (37): Xaa is C or S
AXXVPTELSPINMLYFDEYDKVVYGKIPEMVVEGXGXR

SEQ ID NO: 22389 - protein, 39 aa, Artificial Sequence
  Non-cyclic GFR-binding peptide
  MOD_RES (6), (7): Xaa is C or S
  MOD_RES (21), (22), (23), (24), (25): Xaa is A or G
  MOD_RES (26), (27), (28), (29): Xaa is A or G or is absent
STPPTXXVPTRLSPINILYFXXXXXXXXXYGKIPDMVVE

SEQ ID NO: 22390 - protein, 39 aa, Artificial Sequence
  Non-cyclic GFR-binding peptide
  MOD_RES (4), (36), (38): Xaa is C or S
KPTXAPTKLSPINVLYFDDSSNVIYGKIPNMVVRSXGXH

SEQ ID NO: 22391 - protein, 40 aa, Artificial Sequence
  Non-cyclic GFR-binding peptide
  MOD_RES (4), (5), (39): Xaa is C or S
  MOD_RES (19), (20), (21), (22), (23): Xaa is A or G
  MOD_RES (24), (25), (26), (27): Xaa is A or G or is absent
PKPXXAPTKLSPINVLYFXXXXXXXXXYGKIPNMVVRSXG

SEQ ID NO: 22392 - protein, 38 aa, Artificial Sequence
  Non-cyclic GFR-binding peptide
  MOD_RES (5), (6): Xaa is C or S
  MOD_RES (20), (21), (22), (23), (24): Xaa is A or G
  MOD_RES (25), (26), (27), (28): Xaa is A or G or is absent
VPSTXXAPVKTSPINMLYFXXXXXXXXXYGKIPMIVEE

SEQ ID NO: 22393 - protein, 35 aa, Artificial Sequence
  Non-cyclic GFR-binding peptide
  MOD_RES (34), (34): Xaa is C or S
  MOD_RES (14), (15), (16), (17), (18): Xaa is A or G
  MOD_RES (19), (20), (21), (22): Xaa is A or G or is absent
APTKLSPINVLYFXXXXXXXXXYGKIPNMVVKAXG

SEQ ID NO: 22394 - protein, 41 aa, Artificial Sequence
  Non-cyclic GFR-binding peptide
  MOD_RES (6), (7), (40): Xaa is C or S
  MOD_RES (21), (22), (23), (24), (25): Xaa is A or G
  MOD_RES (26), (27), (28), (29): Xaa is A or G or is absent
RVPSTXXAPVKTSPINMLYFXXXXXXXXXYGKIPMIVEEXG

SEQ ID NO: 22395 - protein, 43 aa, Artificial Sequence
  Non-cyclic GFR-binding peptide
  MOD_RES (5), (6), (40), (42): Xaa is C or S
  MOD_RES (20), (21), (22), (23), (24): Xaa is A or G
  MOD_RES (25), (26), (27), (28): Xaa is A or G or is absent
VPKAXXAPTKLSPINVLYFXXXXXXXXXYGKIPNMVVKAXGXH

SEQ ID NO: 22396 - protein, 34 aa, Artificial Sequence
  Non-cyclic GFR-binding peptide
  MOD_RES (1), (2): Xaa is C or S
  MOD_RES (16), (17), (18), (19), (20): Xaa is A or G
  MOD_RES (21), (22), (23), (24): Xaa is A or G or is absent
XXVPTELSPINMLYFXXXXXXXXXYGKIPEMVVE

SEQ ID NO: 22397 - protein, 42 aa, Artificial Sequence
  Non-cyclic GFR-binding peptide
  MOD_RES (6), (7), (41): Xaa is C or S
  MOD_RES (21), (22), (23), (24), (25): Xaa is A or G
  MOD_RES (26), (27), (28), (29): Xaa is A or G or is absent
AAPASXXVPARLSPINILYFXXXXXXXXXYGKIPDMVVEAXG

SEQ ID NO: 22398 - protein, 39 aa, Artificial Sequence
  Non-cyclic GFR-binding peptide
  MOD_RES (5), (6), (38): Xaa is C or S
VPKPXXAPTKLSPINVLYFDDSSNVIYGKIPNMVVRSXG

SEQ ID NO: 22399 - protein, 39 aa, Artificial Sequence
  Non-cyclic GFR-binding peptide
  MOD_RES (5), (6): Xaa is C or S
  MOD_RES (20), (21), (22), (23), (24): Xaa is A or G
  MOD_RES (25), (26), (27), (28): Xaa is A or G or is absent
VPKAXXAPTKLSPINVLYFXXXXXXXXXYGKIPNMVVKA

SEQ ID NO: 22400 - protein, 39 aa, Artificial Sequence
  Non-cyclic GFR-binding peptide
  MOD_RES (6), (7), (39): Xaa is C or S
TVPKPXXAPTQLSPINVLYFDDSSNVIYGKIPNMVVRAX

SEQ ID NO: 22401 - protein, 38 aa, Artificial Sequence
  Non-cyclic GFR-binding peptide
  MOD_RES (3), (4), (38): Xaa is C or S
  MOD_RES (18), (19), (20), (21), (22): Xaa is A or G
  MOD_RES (23), (24), (25), (26): Xaa is A or G or is absent
KAXXAPTKLSPINVLYFXXXXXXXXXYGKIPNMVVKAX

SEQ ID NO: 22402 - protein, 40 aa, Artificial Sequence
  Non-cyclic GFR-binding peptide
  MOD_RES (5), (6), (40): Xaa is C or S
  MOD_RES (20), (21), (22), (23), (24): Xaa is A or G
  MOD_RES (25), (26), (27), (28): Xaa is A or G or is absent
IPKAXXVPTELSPINMLYFXXXXXXXXXYGKIPDMVVEGX

SEQ ID NO: 22403 - protein, 40 aa, Artificial Sequence
  Non-cyclic GFR-binding peptide
  MOD_RES (3), (4), (37), (39): Xaa is C or S
KAXXVPTKLSPINVLYFDDMGVPTYGKIPEGMSVAEXGXR

SEQ ID NO: 22404 - protein, 36 aa, Artificial Sequence
  Non-cyclic GFR-binding peptide
  MOD_RES (1), (2), (36): Xaa is C or S
  MOD_RES (16), (17), (18), (19), (20): Xaa is A or G
  MOD_RES (21), (22), (23), (24): Xaa is A or G or is absent
XXVPTRLSPINILYFXXXXXXXXXYGKIPDMVVESX

SEQ ID NO: 22405 - protein, 38 aa, Artificial Sequence
  Non-cyclic GFR-binding peptide
  MOD_RES (1), (2), (36), (38): Xaa is C or S
  MOD_RES (16), (17), (18), (19), (20): Xaa is A or G
  MOD_RES (21), (22), (23), (24): Xaa is A or G or is absent
XXVPARLSPINILYFXXXXXXXXXYGKIPDMVVEAXGX

SEQ ID NO: 22406 - protein, 37 aa, Artificial Sequence
  Non-cyclic GFR-binding peptide
  MOD_RES (5), (6): Xaa is C or S
ASKAXXVPTKLSPINILYFDKGVVTYYGKIPGMAVSE

SEQ ID NO: 22407 - protein, 40 aa, Artificial Sequence
  Non-cyclic GFR-binding peptide
  MOD_RES (5), (6), (39): Xaa is C or S
  MOD_RES (20), (21), (22), (23), (24): Xaa is A or G
  MOD_RES (25), (26), (27), (28): Xaa is A or G or is absent
VPSTXXAPVKTSPINMLYFXXXXXXXXXYGKIPMIVEEXG

SEQ ID NO: 22408 - protein, 37 aa, Artificial Sequence
  Non-cyclic GFR-binding peptide
  MOD_RES (6), (7): Xaa is C or S
RVPSTXXAPVKTSPINMLYFDNGRVLLYGKIPMIVEE

SEQ ID NO: 22409 - protein, 42 aa, Artificial Sequence
  Non-cyclic GFR-binding peptide
  MOD_RES (4), (5), (39), (41): Xaa is C or S
  MOD_RES (19), (20), (21), (22), (23): Xaa is A or G
  MOD_RES (24), (25), (26), (27): Xaa is A or G or is absent
PASXXVPARLSPINILYFXXXXXXXXXYGKIPDMVVEAXGXR

SEQ ID NO: 22410 - protein, 36 aa, Artificial Sequence
  Non-cyclic GFR-binding peptide
  MOD_RES (2), (3): Xaa is C or S
  MOD_RES (17), (18), (19), (20), (21): Xaa is A or G
  MOD_RES (22), (23), (24), (25): Xaa is A or G or is absent
AXXVPTELSPINMLYFXXXXXXXXXYGKIPDMVVEG

SEQ ID NO: 22411 - protein, 34 aa, Artificial Sequence
  Non-cyclic GFR-binding peptide
  MOD_RES (3), (4): Xaa is C or S
KAXXVPTELSPINMLYFDEYDKVVYGKIPEMVVE

SEQ ID NO: 22412 - protein, 33 aa, Artificial Sequence
  Non-cyclic GFR-binding peptide
  MOD_RES (1), (2): Xaa is C or S
XXAPTQLSPINVLYFDDSSNVIYGKIPNMVVRA

SEQ ID NO: 22413 - protein, 37 aa, Artificial Sequence
  Non-cyclic GFR-binding peptide
  MOD_RES (1), (2), (34), (36): Xaa is C or S
XXAPTKLSPINVLYFDSSNNVIYGKIPNMVVKAXGXH

SEQ ID NO: 22414 - protein, 32 aa, Artificial Sequence
  Non-cyclic GFR-binding peptide
  MOD_RES (1), (2): Xaa is C or S
XXAPTKLSPINVLYFDSSNNVIYGKIPNMVVK

SEQ ID NO: 22415 - protein, 35 aa, Artificial Sequence
  Non-cyclic GFR-binding peptide
  MOD_RES (1), (32), (34): Xaa is C or S
XAPVKTSPINMLYFDNGRVLLYGKIPMIVEEXGXL

SEQ ID NO: 22416 - protein, 34 aa, Artificial Sequence
  Non-cyclic GFR-binding peptide
  MOD_RES (1), (1): Xaa is C or S
  MOD_RES (15), (16), (17), (18), (19): Xaa is A or G
  MOD_RES (20), (21), (22), (23): Xaa is A or G or is absent
XVPARLSPINILYFXXXXXXXXXYGKIPDMVVEA

SEQ ID NO: 22417 - protein, 38 aa, Artificial Sequence
  Non-cyclic GFR-binding peptide
  MOD_RES (4), (5), (38): Xaa is C or S
GKAXXVPTKLSPINVLYFDDMGVPTYGKIPEGMSVAEX

SEQ ID NO: 22418 - protein, 33 aa, Artificial Sequence
  Non-cyclic GFR-binding peptide
  MOD_RES (3), (3): Xaa is C or S
PTXAPTKLSPINVLYFDDSSNVIYGKIPNMVVR

SEQ ID NO: 22419 - protein, 38 aa, Artificial Sequence
  Non-cyclic GFR-binding peptide
  MOD_RES (2), (3), (37): Xaa is C or S
  MOD_RES (17), (18), (19), (20), (21): Xaa is A or G
  MOD_RES (22), (23), (24), (25): Xaa is A or G or is absent
PXXAPTQLSPINVLYFXXXXXXXXXYGKIPNMVVRAXG

SEQ ID NO: 22420 - protein, 44 aa, Artificial Sequence
  Non-cyclic GFR-binding peptide
  MOD_RES (5), (6), (41), (43): Xaa is C or S
  MOD_RES (20), (21), (22), (23), (24): Xaa is A or G
  MOD_RES (25), (26), (27), (28): Xaa is A or G or is absent
VGKAXXVPTKLSPINVLYFXXXXXXXXXYGKIPEGMSVAEXGXR

SEQ ID NO: 22421 - protein, 35 aa, Artificial Sequence
  Non-cyclic GFR-binding peptide
  MOD_RES (1), (33), (35): Xaa is C or S
XAPTQLSPINVLYFDDSSNVIYGKIPNMVVRAXGX

SEQ ID NO: 22422 - protein, 39 aa, Artificial Sequence
  Non-cyclic GFR-binding peptide
  MOD_RES (5), (6), (38): Xaa is C or S
VPKPXXAPTQLSPINVLYFDDSSNVIYGKIPNMVVRAXG

SEQ ID NO: 22423 - protein, 42 aa, Artificial Sequence
  Non-cyclic GFR-binding peptide
  MOD_RES (6), (7), (39), (41): Xaa is C or S
AVPKAXXAPTKLSPINVLYFDSSNNVIYGKIPNMVVKAXGXH

SEQ ID NO: 22424 - protein, 42 aa, Artificial Sequence
  Non-cyclic GFR-binding peptide
  MOD_RES (6), (7), (41): Xaa is C or S
  MOD_RES (21), (22), (23), (24), (25): Xaa is A or G
  MOD_RES (26), (27), (28), (29): Xaa is A or G or is absent
AVPKAXXAPTKLSPINVLYFXXXXXXXXXYGKIPNMVVKAXG

SEQ ID NO: 22425 - protein, 42 aa, Artificial Sequence
  Non-cyclic GFR-binding peptide
  MOD_RES (6), (7), (39), (41): Xaa is C or S
SIPKAXXVPTELSPINMLYFDEYDKVVYGKIPEMVVEGXGXR

SEQ ID NO: 22426 - protein, 39 aa, Artificial Sequence
  Non-cyclic GFR-binding peptide
  MOD_RES (3), (4), (39): Xaa is C or S
  MOD_RES (18), (19), (20), (21), (22): Xaa is A or G
  MOD_RES (23), (24), (25), (26): Xaa is A or G or is absent
KAXXVPTKLSPINVLYFXXXXXXXXXYGKIPEGMSVAEX

SEQ ID NO: 22427 - protein, 36 aa, Artificial Sequence
  Non-cyclic GFR-binding peptide
  MOD_RES (34), (36): Xaa is C or S
  MOD_RES (14), (15), (16), (17), (18): Xaa is A or G
  MOD_RES (19), (20), (21), (22): Xaa is A or G or is absent
APTQLSPINVLYFXXXXXXXXXYGKIPNMVVRAXGX

SEQ ID NO: 22428 - protein, 35 aa, Artificial Sequence
  Non-cyclic GFR-binding peptide
  MOD_RES (3), (35): Xaa is C or S
PTXAPTKLSPINVLYFDDSSNVIYGKIPNMVVRSX

SEQ ID NO: 22429 - protein, 38 aa, Artificial Sequence
  Non-cyclic GFR-binding peptide
  MOD_RES (2), (3), (37): Xaa is C or S
  MOD_RES (17), (18), (19), (20), (21): Xaa is A or G
  MOD_RES (22), (23), (24), (25): Xaa is A or G or is absent
AXXVPTKLSPINILYFXXXXXXXXXYGKIPGMAVSEXG

SEQ ID NO: 22430 - protein, 34 aa, Artificial Sequence
  Non-cyclic GFR-binding peptide
  MOD_RES (1), (1): Xaa is C or S
  MOD_RES (15), (16), (17), (18), (19): Xaa is A or G
  MOD_RES (20), (21), (22), (23): Xaa is A or G or is absent
XVPTELSPINMLYFXXXXXXXXXYGKIPEMVVEG

SEQ ID NO: 22431 - protein, 40 aa, Artificial Sequence
  Non-cyclic GFR-binding peptide
  MOD_RES (6), (7): Xaa is C or S
  MOD_RES (21), (22), (23), (24), (25): Xaa is A or G
  MOD_RES (26), (27), (28), (29): Xaa is A or G or is absent
KASKAXXVPTKLSPINILYFXXXXXXXXXYGKIPGMAVSE

SEQ ID NO: 22432 - protein, 39 aa, Artificial Sequence
  Non-cyclic GFR-binding peptide
  MOD_RES (4), (5), (39): Xaa is C or S
  MOD_RES (19), (20), (21), (22), (23): Xaa is A or G
  MOD_RES (24), (25), (26), (27): Xaa is A or G or is absent
SKAXXVPTKLSPINILYFXXXXXXXXXYGKIPGMAVSEX

SEQ ID NO: 22433 - protein, 41 aa, Artificial Sequence
  Non-cyclic GFR-binding peptide
  MOD_RES (4), (5), (38), (40): Xaa is C or S
  MOD_RES (19), (20), (21), (22), (23): Xaa is A or G
  MOD_RES (24), (25), (26), (27): Xaa is A or G or is absent
PSTXXAPVKTSPINMLYFXXXXXXXXXYGKIPMIVEEXGXL

SEQ ID NO: 22434 - protein, 35 aa, Artificial Sequence
  Non-cyclic GFR-binding peptide
  MOD_RES (2), (3): Xaa is C or S
  MOD_RES (17), (18), (19), (20), (21): Xaa is A or G
  MOD_RES (22), (23), (24), (25): Xaa is A or G or is absent
TXXVPTRLSPINILYFXXXXXXXXXYGKIPDMVVE

SEQ ID NO: 22435 - protein, 31 aa, Artificial Sequence
  Non-cyclic GFR-binding peptide
APTKLSPINVLYFDDSSNVIYGKIPNMVVRS

SEQ ID NO: 22436 - protein, 39 aa, Artificial Sequence
  Non-cyclic GFR-binding peptide
  MOD_RES (6), (7): Xaa is C or S
  MOD_RES (21), (22), (23), (24), (25): Xaa is A or G
  MOD_RES (26), (27), (28), (29): Xaa is A or G or is absent
KIPKAXXVPTELSPINMLYFXXXXXXXXXYGKIPDMVVE

SEQ ID NO: 22437 - protein, 42 aa, Artificial Sequence
  Non-cyclic GFR-binding peptide
  MOD_RES (5), (6), (40), (42): Xaa is C or S
  MOD_RES (20), (21), (22), (23), (24): Xaa is A or G
  MOD_RES (25), (26), (27), (28): Xaa is A or G or is absent
VPKPXXAPTKLSPINVLYFXXXXXXXXXYGKIPNMVVRSXGX

SEQ ID NO: 22438 - protein, 34 aa, Artificial Sequence
  Non-cyclic GFR-binding peptide
  MOD_RES (1), (2): Xaa is C or S
  MOD_RES (16), (17), (18), (19), (20): Xaa is A or G
  MOD_RES (21), (22), (23), (24): Xaa is A or G or is absent
XXAPTQLSPINVLYFXXXXXXXXXYGKIPNMVVR

SEQ ID NO: 22439 - protein, 36 aa, Artificial Sequence
  Non-cyclic GFR-binding peptide
  MOD_RES (34), (36): Xaa is C or S
  MOD_RES (14), (15), (16), (17), (18): Xaa is A or G
  MOD_RES (19), (20), (21), (22): Xaa is A or G or is absent
VPTELSPINMLYFXXXXXXXXXYGKIPEMVVEGXGX

SEQ ID NO: 22440 - protein, 39 aa, Artificial Sequence
  Non-cyclic GFR-binding peptide
  MOD_RES (3), (4), (37), (39): Xaa is C or S
  MOD_RES (18), (19), (20), (21), (22): Xaa is A or G
  MOD_RES (23), (24), (25), (26): Xaa is A or G or is absent
STXXAPVKTSPINMLYFXXXXXXXXXYGKIPMIVEEXGX

SEQ ID NO: 22441 - protein, 38 aa, Artificial Sequence
  Non-cyclic GFR-binding peptide
  MOD_RES (4), (5), (36), (38): Xaa is C or S
PSTXXAPVKTSPINMLYFDNGRVLLYGKIPMIVEEXGX

SEQ ID NO: 22442 - protein, 37 aa, Artificial Sequence
  Non-cyclic GFR-binding peptide
  MOD_RES (1), (2), (36): Xaa is C or S
  MOD_RES (16), (17), (18), (19), (20): Xaa is A or G
  MOD_RES (21), (22), (23), (24): Xaa is A or G or is absent
XXVPTKLSPINILYFXXXXXXXXXYGKIPGMAVSEXG

SEQ ID NO: 22443 - protein, 36 aa, Artificial Sequence
  Non-cyclic GFR-binding peptide
  MOD_RES (3), (4): Xaa is C or S
  MOD_RES (18), (19), (20), (21), (22): Xaa is A or G
  MOD_RES (23), (24), (25), (26): Xaa is A or G or is absent
KAXXVPTELSPINMLYFXXXXXXXXXYGKIPDMVVE

SEQ ID NO: 22444 - protein, 37 aa, Artificial Sequence
  Non-cyclic GFR-binding peptide
  MOD_RES (1), (2), (34), (36): Xaa is C or S
XXAPTQLSPINVLYFDDSSNVIYGKIPNMVVRAXGXH

SEQ ID NO: 22445 - protein, 38 aa, Artificial Sequence
  Non-cyclic GFR-binding peptide
  MOD_RES (6), (7), (38): Xaa is C or S
RVPSTXXAPVKTSPINMLYFDNGRVLLYGKIPMIVEEX

SEQ ID NO: 22446 - protein, 34 aa, Artificial Sequence
  Non-cyclic GFR-binding peptide
  MOD_RES (1), (33): Xaa is C or S
XAPTKLSPINVLYFDSSNNVIYGKIPNMVVKAXG

SEQ ID NO: 22447 - protein, 39 aa, Artificial Sequence
  Non-cyclic GFR-binding peptide
  MOD_RES (6), (7): Xaa is C or S
  MOD_RES (21), (22), (23), (24), (25): Xaa is A or G
  MOD_RES (26), (27), (28), (29): Xaa is A or G or is absent
AVPKAXXAPTKLSPINVLYFXXXXXXXXXYGKIPNMVVK

SEQ ID NO: 22448 - protein, 39 aa, Artificial Sequence
  Non-cyclic GFR-binding peptide
  MOD_RES (3), (4), (38): Xaa is C or S
  MOD_RES (18), (19), (20), (21), (22): Xaa is A or G
  MOD_RES (23), (24), (25), (26): Xaa is A or G or is absent
KAXXVPTELSPINMLYFXXXXXXXXXYGKIPDMVVEGXG

SEQ ID NO: 22449 - protein, 30 aa, Artificial Sequence
  Non-cyclic GFR-binding peptide
VPTKLSPINILYFDKGVVTYYGKIPGMAVS

SEQ ID NO: 22450 - protein, 35 aa, Artificial Sequence
  Non-cyclic GFR-binding peptide
  MOD_RES (34), (34): Xaa is C or S
  MOD_RES (14), (15), (16), (17), (18): Xaa is A or G
  MOD_RES (19), (20), (21), (22): Xaa is A or G or is absent
VPTELSPINMLYFXXXXXXXXXYGKIPDMVVEGXG

SEQ ID NO: 22451 - protein, 39 aa, Artificial Sequence
  Non-cyclic GFR-binding peptide
  MOD_RES (7), (39): Xaa is C or S
HVTKPTXAPTKLSPINVLYFDDSSNVIYGKIPNMVVRSX

SEQ ID NO: 22452 - protein, 32 aa, Artificial Sequence
  Non-cyclic GFR-binding peptide
  MOD_RES (1), (1): Xaa is C or S
XVPARLSPINILYFDAANNVVYGKIPDMVVEA

SEQ ID NO: 22453 - protein, 36 aa, Artificial Sequence
  Non-cyclic GFR-binding peptide
  MOD_RES (3), (35): Xaa is C or S
PTXAPTKLSPINVLYFDDSSNVIYGKIPNMVVRSXG

SEQ ID NO: 22454 - protein, 33 aa, Artificial Sequence
  Non-cyclic GFR-binding peptide
  MOD_RES (14), (15), (16), (17), (18): Xaa is A or G
  MOD_RES (19), (20), (21), (22): Xaa is A or G or is absent
VPTRLSPINILYFXXXXXXXXXYGKIPDMVVES

SEQ ID NO: 22455 - protein, 33 aa, Artificial Sequence
  Non-cyclic GFR-binding peptide
  MOD_RES (2), (3): Xaa is C or S
TXXAPVKTSPINMLYFDNGRVLLYGKIPMIVEE

SEQ ID NO: 22456 - protein, 37 aa, Artificial Sequence
  Non-cyclic GFR-binding peptide
  MOD_RES (1), (2), (35), (37): Xaa is C or S
XXVPTKLSPINVLYFDDMGVPTYGKIPEGMSVAEXGX

SEQ ID NO: 22457 - protein, 38 aa, Artificial Sequence
  Non-cyclic GFR-binding peptide
  MOD_RES (1), (2), (35), (37): Xaa is C or S
  MOD_RES (16), (17), (18), (19), (20): Xaa is A or G
  MOD_RES (21), (22), (23), (24): Xaa is A or G or is absent
XXAPVKTSPINMLYFXXXXXXXXXYGKIPMIVEEXGXL

SEQ ID NO: 22458 - protein, 35 aa, Artificial Sequence
  Non-cyclic GFR-binding peptide
  MOD_RES (1), (2): Xaa is C or S
  MOD_RES (16), (17), (18), (19), (20): Xaa is A or G
  MOD_RES (21), (22), (23), (24): Xaa is A or G or is absent
XXVPARLSPINILYFXXXXXXXXXYGKIPDMVVEA

SEQ ID NO: 22459 - protein, 38 aa, Artificial Sequence
  Non-cyclic GFR-binding peptide
  MOD_RES (5), (6): Xaa is C or S
  MOD_RES (20), (21), (22), (23), (24): Xaa is A or G
  MOD_RES (25), (26), (27), (28): Xaa is A or G or is absent
VPKAXXAPTKLSPINVLYFXXXXXXXXXYGKIPNMVVK

SEQ ID NO: 22460 - protein, 37 aa, Artificial Sequence
  Non-cyclic GFR-binding peptide
  MOD_RES (1), (2), (35), (37): Xaa is C or S
  MOD_RES (16), (17), (18), (19), (20): Xaa is A or G
  MOD_RES (21), (22), (23), (24): Xaa is A or G or is absent
XXAPVKTSPINMLYFXXXXXXXXXYGKIPMIVEEXGX

SEQ ID NO: 22461 - protein, 34 aa, Artificial Sequence
  Non-cyclic GFR-binding peptide
  MOD_RES (2), (2): Xaa is C or S
  MOD_RES (13), (14), (15), (16), (17): Xaa is A or G
  MOD_RES (18), (19), (20), (21): Xaa is A or G or is absent
GXEEVIMEYQKYXXXXXXXXXIYLMSIPSTKVPA

SEQ ID NO: 22462 - protein, 38 aa, Artificial Sequence
  Non-cyclic GFR-binding peptide
  MOD_RES (2), (33), (34): Xaa is C or S
GXEEVIMEYQKYLLVRGNDIYLMSIPSTKVPAXXTSPV

SEQ ID NO: 22463 - protein, 35 aa, Artificial Sequence
  Non-cyclic GFR-binding peptide
  MOD_RES (31), (32): Xaa is C or S
EEVIMEYQKYLLVRGNDIYLMSIPSTKVPAXXTSP

SEQ ID NO: 22464 - protein, 32 aa, Artificial Sequence
  Non-cyclic GFR-binding peptide
  MOD_RES (2), (2): Xaa is C or S
GXEEVIMEYQKYLLVRGNDIYLMSIPSTKVPA

SEQ ID NO: 22465 - protein, 40 aa, Artificial Sequence
  Non-cyclic GFR-binding peptide
  MOD_RES (1), (3), (36), (37): Xaa is C or S
  MOD_RES (14), (15), (16), (17), (18): Xaa is A or G
  MOD_RES (19), (20), (21), (22): Xaa is A or G or is absent
XGXEEVIMEYQKYXXXXXXXXXIYLMSIPSTKVPAXXTSP

SEQ ID NO: 22466 - protein, 39 aa, Artificial Sequence
  Non-cyclic GFR-binding peptide
  MOD_RES (34), (35): Xaa is C or S
  MOD_RES (12), (13), (14), (15), (16): Xaa is A or G
  MOD_RES (17), (18), (19), (20): Xaa is A or G or is absent
RDVVMGEYQKYXXXXXXXXXIYLMSIPSMKTPTXXPGAS

SEQ ID NO: 22467 - protein, 32 aa, Artificial Sequence
  Non-cyclic GFR-binding peptide
  MOD_RES (1), (32): Xaa is C or S
XEEVIMEYQKYLLVRGNDIYLMSIPSTKVPAX

SEQ ID NO: 22468 - protein, 33 aa, Artificial Sequence
  Non-cyclic GFR-binding peptide
  MOD_RES (1), (33): Xaa is C or S
XRDVVMGEYQKYIIQQKDNIYLMSIPSMKTPTX

SEQ ID NO: 22469 - protein, 35 aa, Artificial Sequence
  Non-cyclic GFR-binding peptide
  MOD_RES (2), (33), (34): Xaa is C or S
GXEEVIMEYQKYLLVRGNDIYLMSIPSTKVPAXXT

SEQ ID NO: 22470 - protein, 37 aa, Artificial Sequence
  Non-cyclic GFR-binding peptide
  MOD_RES (1), (3), (34), (35): Xaa is C or S
XGXEEVIMEYQKYLLVRGNDIYLMSIPSTKVPAXXTS

SEQ ID NO: 22471 - protein, 33 aa, Artificial Sequence
  Non-cyclic GFR-binding peptide
  MOD_RES (33), (33): Xaa is C or S
  MOD_RES (11), (12), (13), (14), (15): Xaa is A or G
  MOD_RES (16), (17), (18), (19): Xaa is A or G or is absent
DVVMGEYQKYXXXXXXXXXIYLMSIPSMKTPTX

SEQ ID NO: 22472 - protein, 37 aa, Artificial Sequence
  Non-cyclic GFR-binding peptide
  MOD_RES (2), (36), (37): Xaa is C or S
  MOD_RES (14), (15), (16), (17), (18): Xaa is A or G
  MOD_RES (19), (20), (21), (22): Xaa is A or G or is absent
GXRDVVMGEYQKYXXXXXXXXXIYLMSIPSMKTPTXX

SEQ ID NO: 22473 - protein, 36 aa, Artificial Sequence
  Non-cyclic GFR-binding peptide
  MOD_RES (1), (33), (34): Xaa is C or S
XRDVVMGEYQKYIIQQKDNIYLMSIPSMKTPTXXPG

SEQ ID NO: 22474 - protein, 33 aa, Artificial Sequence
  Non-cyclic GFR-binding peptide
  MOD_RES (32), (33): Xaa is C or S
RDVVMGEYQKYIIQQKDNIYLMSIPSMKTPTXX

SEQ ID NO: 22475 - protein, 34 aa, Artificial Sequence
  Non-cyclic GFR-binding peptide
  MOD_RES (33), (34): Xaa is C or S
  MOD_RES (11), (12), (13), (14), (15): Xaa is A or G
  MOD_RES (16), (17), (18), (19): Xaa is A or G or is absent
DVVMGEYQKYXXXXXXXXXIYLMSIPSMKTPTXX

SEQ ID NO: 22476 - protein, 36 aa, Artificial Sequence
  Non-cyclic GFR-binding peptide
  MOD_RES (1), (3), (36): Xaa is C or S
  MOD_RES (14), (15), (16), (17), (18): Xaa is A or G
  MOD_RES (19), (20), (21), (22): Xaa is A or G or is absent
XGXEEVIMEYQKYXXXXXXXXXIYLMSIPSTKVPAX

SEQ ID NO: 22477 - protein, 36 aa, Artificial Sequence
  Non-cyclic GFR-binding peptide
  MOD_RES (33), (34): Xaa is C or S
  MOD_RES (11), (12), (13), (14), (15): Xaa is A or G
  MOD_RES (16), (17), (18), (19): Xaa is A or G or is absent
EEVIMEYQKYXXXXXXXXXIYLMSIPSTKVPAXXTS

SEQ ID NO: 22478 - protein, 39 aa, Artificial Sequence
  Non-cyclic GFR-binding peptide
  MOD_RES (2), (34), (35): Xaa is C or S
GXRDVVMGEYQKYIIQQKDNIYLMSIPSMKTPTXXPGAS

SEQ ID NO: 22479 - protein, 35 aa, Artificial Sequence
  Non-cyclic GFR-binding peptide
  MOD_RES (1), (3): Xaa is C or S
  MOD_RES (14), (15), (16), (17), (18): Xaa is A or G
  MOD_RES (19), (20), (21), (22): Xaa is A or G or is absent
XGXEEVIMEYQKYXXXXXXXXXIYLMSIPSTKVPA

SEQ ID NO: 22480 - protein, 36 aa, Artificial Sequence
  Non-cyclic GFR-binding peptide
  MOD_RES (1), (32), (33): Xaa is C or S
XEEVIMEYQKYLLVRGNDIYLMSIPSTKVPAXXTSP

SEQ ID NO: 22481 - protein, 41 aa, Artificial Sequence
  Non-cyclic GFR-binding peptide
  MOD_RES (2), (4), (36), (37): Xaa is C or S
SXGXRDVVMGEYQKYIIQQKDNIYLMSIPSMKTPTXXPGAS

SEQ ID NO: 22482 - protein, 38 aa, Artificial Sequence
  Non-cyclic GFR-binding peptide
  MOD_RES (1), (3), (36), (37): Xaa is C or S
  MOD_RES (14), (15), (16), (17), (18): Xaa is A or G
  MOD_RES (19), (20), (21), (22): Xaa is A or G or is absent
XGXEEVIMEYQKYXXXXXXXXXIYLMSIPSTKVPAXXT

SEQ ID NO: 22483 - protein, 42 aa, Artificial Sequence
  Non-cyclic GFR-binding peptide
  MOD_RES (2), (4), (38), (39): Xaa is C or S
  MOD_RES (16), (17), (18), (19), (20): Xaa is A or G
  MOD_RES (21), (22), (23), (24): Xaa is A or G or is absent
SXGXRDVVMGEYQKYXXXXXXXXXIYLMSIPSMKTPTXXPGA

SEQ ID NO: 22484 - protein, 37 aa, Artificial Sequence
  Non-cyclic GFR-binding peptide
  MOD_RES (2), (4), (37): Xaa is C or S
  MOD_RES (15), (16), (17), (18), (19): Xaa is A or G
  MOD_RES (20), (21), (22), (23): Xaa is A or G or is absent
LXGXEEVIMEYQKYXXXXXXXXXIYLMSIPSTKVPAX

SEQ ID NO: 22485 - protein, 40 aa, Artificial Sequence
  Non-cyclic GFR-binding peptide
  MOD_RES (1), (34), (35): Xaa is C or S
  MOD_RES (12), (13), (14), (15), (16): Xaa is A or G
  MOD_RES (17), (18), (19), (20): Xaa is A or G or is absent
XEEVIMEYQKYXXXXXXXXXIYLMSIPSTKVPAXXTSPVR

SEQ ID NO: 22486 - protein, 35 aa, Artificial Sequence
  Non-cyclic GFR-binding peptide
  MOD_RES (1), (3), (35): Xaa is C or S
XGXRDVVMGEYQKYIIQQKDNIYLMSIPSMKTPTX

SEQ ID NO: 22487 - protein, 38 aa, Artificial Sequence
  Non-cyclic GFR-binding peptide
  MOD_RES (2), (4), (37), (38): Xaa is C or S
  MOD_RES (15), (16), (17), (18), (19): Xaa is A or G
  MOD_RES (20), (21), (22), (23): Xaa is A or G or is absent
LXGXEEVIMEYQKYXXXXXXXXXIYLMSIPSTKVPAXX

SEQ ID NO: 22488 - protein, 43 aa, Artificial Sequence
  Non-cyclic GFR-binding peptide
  MOD_RES (2), (4), (37), (38): Xaa is C or S
  MOD_RES (15), (16), (17), (18), (19): Xaa is A or G
  MOD_RES (20), (21), (22), (23): Xaa is A or G or is absent
LXGXEEVIMEYQKYXXXXXXXXXIYLMSIPSTKVPAXXTSPVR

SEQ ID NO: 22489 - protein, 37 aa, Artificial Sequence
  Non-cyclic GFR-binding peptide
  MOD_RES (1), (3), (36), (37): Xaa is C or S
  MOD_RES (14), (15), (16), (17), (18): Xaa is A or G
  MOD_RES (19), (20), (21), (22): Xaa is A or G or is absent
XGXEEVIMEYQKYXXXXXXXXXIYLMSIPSTKVPAXX

SEQ ID NO: 22490 - protein, 32 aa, Artificial Sequence
  Non-cyclic GFR-binding peptide
  MOD_RES (1), (1): Xaa is C or S
XRDVVMGEYQKYIIQQKDNIYLMSIPSMKTPT

SEQ ID NO: 22491 - protein, 37 aa, Artificial Sequence
  Non-cyclic GFR-binding peptide
  MOD_RES (1), (32), (33): Xaa is C or S
XEEVIMEYQKYLLVRGNDIYLMSIPSTKVPAXXTSPV

SEQ ID NO: 22492 - protein, 30 aa, Artificial Sequence
  Non-cyclic GFR-binding peptide
DVVMGEYQKYIIQQKDNIYLMSIPSMKTPT

SEQ ID NO: 22493 - protein, 39 aa, Artificial Sequence
  Non-cyclic GFR-binding peptide
  MOD_RES (2), (4), (38), (39): Xaa is C or S
  MOD_RES (16), (17), (18), (19), (20): Xaa is A or G
  MOD_RES (21), (22), (23), (24): Xaa is A or G or is absent
SXGXRDVVMGEYQKYXXXXXXXXXIYLMSIPSMKTPTXX

SEQ ID NO: 22494 - protein, 40 aa, Artificial Sequence
  Non-cyclic GFR-binding peptide
  MOD_RES (1), (35), (36): Xaa is C or S
  MOD_RES (13), (14), (15), (16), (17): Xaa is A or G
  MOD_RES (18), (19), (20), (21): Xaa is A or G or is absent
XRDVVMGEYQKYXXXXXXXXXIYLMSIPSMKTPTXXPGAS

SEQ ID NO: 22495 - protein, 32 aa, Artificial Sequence
  Non-cyclic GFR-binding peptide
  MOD_RES (31), (32): Xaa is C or S
EEVIMEYQKYLLVRGNDIYLMSIPSTKVPAXX

SEQ ID NO: 22496 - protein, 37 aa, Artificial Sequence
  Non-cyclic GFR-binding peptide
  MOD_RES (2), (35), (36): Xaa is C or S
  MOD_RES (13), (14), (15), (16), (17): Xaa is A or G
  MOD_RES (18), (19), (20), (21): Xaa is A or G or is absent
GXEEVIMEYQKYXXXXXXXXXIYLMSIPSTKVPAXXT

SEQ ID NO: 22497 - protein, 40 aa, Artificial Sequence
  Non-cyclic GFR-binding peptide
  MOD_RES (2), (34), (35): Xaa is C or S
GXSRVVMNEYQKYIVNSSDDIYLVSIPSLKTPAXXPKPVH

SEQ ID NO: 22498 - protein, 35 aa, Artificial Sequence
  Non-cyclic GFR-binding peptide
  MOD_RES (2), (34), (35): Xaa is C or S
GXRDVVMGEYQKYIIQQKDNIYLMSIPSMKTPTXX

SEQ ID NO: 22499 - protein, 35 aa, Artificial Sequence
  Non-cyclic GFR-binding peptide
  MOD_RES (31), (32): Xaa is C or S
DVVMGEYQKYIIQQKDNIYLMSIPSMKTPTXXPGA

SEQ ID NO: 22500 - protein, 41 aa, Artificial Sequence
  Non-cyclic GFR-binding peptide
  MOD_RES (1), (35), (36): Xaa is C or S
  MOD_RES (13), (14), (15), (16), (17): Xaa is A or G
  MOD_RES (18), (19), (20), (21): Xaa is A or G or is absent
XSRVVMNEYQKYXXXXXXXXXIYLVSIPSLKTPAXXPKPVH

SEQ ID NO: 22501 - protein, 33 aa, Artificial Sequence
  Non-cyclic GFR-binding peptide
  MOD_RES (1), (3): Xaa is C or S
XGXEEVIMEYQKYLLVRGNDIYLMSIPSTKVPA

SEQ ID NO: 22502 - protein, 37 aa, Artificial Sequence
  Non-cyclic GFR-binding peptide
  MOD_RES (2), (34), (35): Xaa is C or S
GXRDVVMGEYQKYIIQQKDNIYLMSIPSMKTPTXXPG

SEQ ID NO: 22503 - protein, 34 aa, Artificial Sequence
  Non-cyclic GFR-binding peptide
  MOD_RES (32), (33): Xaa is C or S
RDVVMGEYQKYIIQQKDNIYLMSIPSMKTPTXXP

SEQ ID NO: 22504 - protein, 37 aa, Artificial Sequence
  Non-cyclic GFR-binding peptide
  MOD_RES (1), (35), (36): Xaa is C or S
  MOD_RES (13), (14), (15), (16), (17): Xaa is A or G
  MOD_RES (18), (19), (20), (21): Xaa is A or G or is absent
XRDVVMGEYQKYXXXXXXXXXIYLMSIPSMKTPTXXP

SEQ ID NO: 22505 - protein, 41 aa, Artificial Sequence
  Non-cyclic GFR-binding peptide
  MOD_RES (1), (3), (35), (36): Xaa is C or S
XGXRDVVMGEYQKYIIQQKDNIYLMSIPSMKTPTXXPGASG

SEQ ID NO: 22506 - protein, 33 aa, Artificial Sequence
  Non-cyclic GFR-binding peptide
  MOD_RES (31), (32): Xaa is C or S
EEVIMEYQKYLLVRGNDIYLMSIPSTKVPAXXT

SEQ ID NO: 22507 - protein, 34 aa, Artificial Sequence
  Non-cyclic GFR-binding peptide
  MOD_RES (1), (3): Xaa is C or S
XGXRDVVMGEYQKYIIQQKDNIYLMSIPSMKTPT

SEQ ID NO: 22508 - protein, 38 aa, Artificial Sequence
  Non-cyclic GFR-binding peptide
  MOD_RES (1), (3), (34), (35): Xaa is C or S
XGXEEVIMEYQKYLLVRGNDIYLMSIPSTKVPAXXTSP

SEQ ID NO: 22509 - protein, 37 aa, Artificial Sequence
  Non-cyclic GFR-binding peptide
  MOD_RES (1), (3), (37): Xaa is C or S
  MOD_RES (15), (16), (17), (18), (19): Xaa is A or G
  MOD_RES (20), (21), (22), (23): Xaa is A or G or is absent
XGXRDVVMGEYQKYXXXXXXXXXIYLMSIPSMKTPTX

SEQ ID NO: 22510 - protein, 39 aa, Artificial Sequence
  Non-cyclic GFR-binding peptide
  MOD_RES (33), (34): Xaa is C or S
  MOD_RES (11), (12), (13), (14), (15): Xaa is A or G
  MOD_RES (16), (17), (18), (19): Xaa is A or G or is absent
DVVMGEYQKYXXXXXXXXXIYLMSIPSMKTPTXXPGASG

SEQ ID NO: 22511 - protein, 37 aa, Artificial Sequence
  Non-cyclic GFR-binding peptide
  MOD_RES (1), (33), (34): Xaa is C or S
XRDVVMGEYQKYIIQQKDNIYLMSIPSMKTPTXXPGA

SEQ ID NO: 22512 - protein, 34 aa, Artificial Sequence
  Non-cyclic GFR-binding peptide
  MOD_RES (2), (4): Xaa is C or S
LXGXEEVIMEYQKYLLVRGNDIYLMSIPSTKVPA

SEQ ID NO: 22513 - protein, 36 aa, Artificial Sequence
  Non-cyclic GFR-binding peptide
  MOD_RES (32), (33): Xaa is C or S
RDVVMGEYQKYIIQQKDNIYLMSIPSMKTPTXXPGA

SEQ ID NO: 22514 - protein, 38 aa, Artificial Sequence
  Non-cyclic GFR-binding peptide
  MOD_RES (1), (34), (35): Xaa is C or S
  MOD_RES (12), (13), (14), (15), (16): Xaa is A or G
  MOD_RES (17), (18), (19), (20): Xaa is A or G or is absent
XEEVIMEYQKYXXXXXXXXXIYLMSIPSTKVPAXXTSP

SEQ ID NO: 22515 - protein, 34 aa, Artificial Sequence
  Non-cyclic GFR-binding peptide
  MOD_RES (1), (34): Xaa is C or S
  MOD_RES (12), (13), (14), (15), (16): Xaa is A or G
  MOD_RES (17), (18), (19), (20): Xaa is A or G or is absent
XEEVIMEYQKYXXXXXXXXXIYLMSIPSTKVPAX

SEQ ID NO: 22516 - protein, 36 aa, Artificial Sequence
  Non-cyclic GFR-binding peptide
  MOD_RES (1), (3), (34), (35): Xaa is C or S
XGXEEVIMEYQKYLLVRGNDIYLMSIPSTKVPAXXT

SEQ ID NO: 22517 - protein, 38 aa, Artificial Sequence
  Non-cyclic GFR-binding peptide
  MOD_RES (34), (35): Xaa is C or S
  MOD_RES (12), (13), (14), (15), (16): Xaa is A or G
  MOD_RES (17), (18), (19), (20): Xaa is A or G or is absent
RDVVMGEYQKYXXXXXXXXXIYLMSIPSMKTPTXXPGA

SEQ ID NO: 22518 - protein, 40 aa, Artificial Sequence
  Non-cyclic GFR-binding peptide
  MOD_RES (2), (4), (35), (36): Xaa is C or S
LXGXEEVIMEYQKYLLVRGNDIYLMSIPSTKVPAXXTSPV

SEQ ID NO: 22519 - protein, 36 aa, Artificial Sequence
  Non-cyclic GFR-binding peptide
  MOD_RES (31), (32): Xaa is C or S
DVVMGEYQKYIIQQKDNIYLMSIPSMKTPTXXPGAS

SEQ ID NO: 22520 - protein, 44 aa, Artificial Sequence
  Non-cyclic GFR-binding peptide
  MOD_RES (2), (4), (38), (39): Xaa is C or S
  MOD_RES (16), (17), (18), (19), (20): Xaa is A or G
  MOD_RES (21), (22), (23), (24): Xaa is A or G or is absent
SXGXRDVVMGEYQKYXXXXXXXXXIYLMSIPSMKTPTXXPGASG

SEQ ID NO: 22521 - protein, 38 aa, Artificial Sequence
  Non-cyclic GFR-binding peptide
  MOD_RES (1), (3), (35), (36): Xaa is C or S
XGXRDVVMGEYQKYIIQQKDNIYLMSIPSMKTPTXXPG

SEQ ID NO: 22522 - protein, 36 aa, Artificial Sequence
  Non-cyclic GFR-binding peptide
  MOD_RES (1), (35), (36): Xaa is C or S
  MOD_RES (13), (14), (15), (16), (17): Xaa is A or G
  MOD_RES (18), (19), (20), (21): Xaa is A or G or is absent
XRDVVMGEYQKYXXXXXXXXXIYLMSIPSMKTPTXX

SEQ ID NO: 22523 - protein, 31 aa, Artificial Sequence
  Non-cyclic GFR-binding peptide
RDVVMGEYQKYIIQQKDNIYLMSIPSMKTPT

SEQ ID NO: 22524 - protein, 44 aa, Artificial Sequence
  Non-cyclic GFR-binding peptide
  MOD_RES (2), (4), (38), (39): Xaa is C or S
  MOD_RES (16), (17), (18), (19), (20): Xaa is A or G
  MOD_RES (21), (22), (23), (24): Xaa is A or G or is absent
RXGXSEVVMDEYQKYXXXXXXXXXIYLISIPSLRTPVXXTPPTS

SEQ ID NO: 22525 - protein, 42 aa, Artificial Sequence
  Non-cyclic GFR-binding peptide
  MOD_RES (2), (36), (37): Xaa is C or S
  MOD_RES (14), (15), (16), (17), (18): Xaa is A or G
  MOD_RES (19), (20), (21), (22): Xaa is A or G or is absent
GXSRVVMNEYQKYXXXXXXXXXIYLVSIPSLKTPAXXPKPVH

SEQ ID NO: 22526 - protein, 36 aa, Artificial Sequence
  Non-cyclic GFR-binding peptide
  MOD_RES (2), (4), (35), (36): Xaa is C or S
LXGXEEVIMEYQKYLLVRGNDIYLMSIPSTKVPAXX

SEQ ID NO: 22527 - protein, 40 aa, Artificial Sequence
  Non-cyclic GFR-binding peptide
  MOD_RES (2), (4), (36), (37): Xaa is C or S
SXGXRDVVMGEYQKYIIQQKDNIYLMSIPSMKTPTXXPGA

SEQ ID NO: 22528 - protein, 36 aa, Artificial Sequence
  Non-cyclic GFR-binding peptide
  MOD_RES (2), (34), (35): Xaa is C or S
GXRDVVMGEYQKYIIQQKDNIYLMSIPSMKTPTXXP

SEQ ID NO: 22529 - protein, 39 aa, Artificial Sequence
  Non-cyclic GFR-binding peptide
  MOD_RES (2), (4), (37), (38): Xaa is C or S
  MOD_RES (15), (16), (17), (18), (19): Xaa is A or G
  MOD_RES (20), (21), (22), (23): Xaa is A or G or is absent
LXGXEEVIMEYQKYXXXXXXXXXIYLMSIPSTKVPAXXT

SEQ ID NO: 22530 - protein, 36 aa, Artificial Sequence
  Non-cyclic GFR-binding peptide
  MOD_RES (1), (34), (35): Xaa is C or S
  MOD_RES (12), (13), (14), (15), (16): Xaa is A or G
  MOD_RES (17), (18), (19), (20): Xaa is A or G or is absent
XEEVIMEYQKYXXXXXXXXXIYLMSIPSTKVPAXXT

SEQ ID NO: 22531 - protein, 34 aa, Artificial Sequence
  Non-cyclic GFR-binding peptide
  MOD_RES (1), (32), (33): Xaa is C or S
XEEVIMEYQKYLLVRGNDIYLMSIPSTKVPAXXT

SEQ ID NO: 22532 - protein, 42 aa, Artificial Sequence
  Non-cyclic GFR-binding peptide
  MOD_RES (2), (4), (37), (38): Xaa is C or S
  MOD_RES (15), (16), (17), (18), (19): Xaa is A or G
  MOD_RES (20), (21), (22), (23): Xaa is A or G or is absent
LXGXEEVIMEYQKYXXXXXXXXXIYLMSIPSTKVPAXXTSPV

SEQ ID NO: 22533 - protein, 35 aa, Artificial Sequence
  Non-cyclic GFR-binding peptide
  MOD_RES (1), (3), (34), (35): Xaa is C or S
XGXEEVIMEYQKYLLVRGNDIYLMSIPSTKVPAXX

SEQ ID NO: 22534 - protein, 37 aa, Artificial Sequence
  Non-cyclic GFR-binding peptide
  MOD_RES (2), (4), (35), (36): Xaa is C or S
LXGXEEVIMEYQKYLLVRGNDIYLMSIPSTKVPAXXT

SEQ ID NO: 22535 - protein, 38 aa, Artificial Sequence
  Non-cyclic GFR-binding peptide
  MOD_RES (2), (4), (38): Xaa is C or S
  MOD_RES (16), (17), (18), (19), (20): Xaa is A or G
  MOD_RES (21), (22), (23), (24): Xaa is A or G or is absent
SXGXRDVVMGEYQKYXXXXXXXXXIYLMSIPSMKTPTX

SEQ ID NO: 22536 - protein, 41 aa, Artificial Sequence
  Non-cyclic GFR-binding peptide
  MOD_RES (1), (35), (36): Xaa is C or S
  MOD_RES (13), (14), (15), (16), (17): Xaa is A or G
  MOD_RES (18), (19), (20), (21): Xaa is A or G or is absent
XRDVVMGEYQKYXXXXXXXXXIYLMSIPSMKTPTXXPGASG

SEQ ID NO: 22537 - protein, 33 aa, Artificial Sequence
  Non-cyclic GFR-binding peptide
  MOD_RES (31), (32): Xaa is C or S
DVVMGEYQKYIIQQKDNIYLMSIPSMKTPTXXP

SEQ ID NO: 22538 - protein, 32 aa, Artificial Sequence
  Non-cyclic GFR-binding peptide
  MOD_RES (11), (12), (13), (14), (15): Xaa is A or G
  MOD_RES (16), (17), (18), (19): Xaa is A or G or is absent
DVVMGEYQKYXXXXXXXXXIYLMSIPSMKTPT

SEQ ID NO: 22539 - protein, 31 aa, Artificial Sequence
  Non-cyclic GFR-binding peptide
  MOD_RES (31), (31): Xaa is C or S
DVVMGEYQKYIIQQKDNIYLMSIPSMKTPTX

SEQ ID NO: 22540 - protein, 40 aa, Artificial Sequence
  Non-cyclic GFR-binding peptide
  MOD_RES (2), (36), (37): Xaa is C or S
  MOD_RES (14), (15), (16), (17), (18): Xaa is A or G
  MOD_RES (19), (20), (21), (22): Xaa is A or G or is absent
GXRDVVMGEYQKYXXXXXXXXXIYLMSIPSMKTPTXXPGA

SEQ ID NO: 22541 - protein, 34 aa, Artificial Sequence
  Non-cyclic GFR-binding peptide
  MOD_RES (2), (34): Xaa is C or S
GXRDVVMGEYQKYIIQQKDNIYLMSIPSMKTPTX

SEQ ID NO: 22542 - protein, 33 aa, Artificial Sequence
  Non-cyclic GFR-binding peptide
  MOD_RES (1), (32), (33): Xaa is C or S
XEEVIMEYQKYLLVRGNDIYLMSIPSTKVPAXX

SEQ ID NO: 22543 - protein, 34 aa, Artificial Sequence
  Non-cyclic GFR-binding peptide
  MOD_RES (31), (32): Xaa is C or S
DVVMGEYQKYIIQQKDNIYLMSIPSMKTPTXXPG

SEQ ID NO: 22544 - protein, 42 aa, Artificial Sequence
  Non-cyclic GFR-binding peptide
  MOD_RES (2), (4), (36), (37): Xaa is C or S
SXGXRDVVMGEYQKYIIQQKDNIYLMSIPSMKTPTXXPGASG

SEQ ID NO: 22545 - protein, 44 aa, Artificial Sequence
  Non-cyclic GFR-binding peptide
  MOD_RES (2), (4), (38), (39): Xaa is C or S
  MOD_RES (16), (17), (18), (19), (20): Xaa is A or G
  MOD_RES (21), (22), (23), (24): Xaa is A or G or is absent
HXGXSRVVMNEYQKYXXXXXXXXXIYLVSIPSLKTPAXXPKPVH

SEQ ID NO: 22546 - protein, 37 aa, Artificial Sequence
  Non-cyclic GFR-binding peptide
  MOD_RES (1), (3), (35), (36): Xaa is C or S
XGXRDVVMGEYQKYIIQQKDNIYLMSIPSMKTPTXXP

SEQ ID NO: 22547 - protein, 36 aa, Artificial Sequence
  Non-cyclic GFR-binding peptide
  MOD_RES (34), (35): Xaa is C or S
  MOD_RES (12), (13), (14), (15), (16): Xaa is A or G
  MOD_RES (17), (18), (19), (20): Xaa is A or G or is absent
RDVVMGEYQKYXXXXXXXXXIYLMSIPSMKTPTXXP

SEQ ID NO: 22548 - protein, 39 aa, Artificial Sequence
  Non-cyclic GFR-binding peptide
  MOD_RES (2), (4), (36), (37): Xaa is C or S
SXGXRDVVMGEYQKYIIQQKDNIYLMSIPSMKTPTXXPG

SEQ ID NO: 22549 - protein, 39 aa, Artificial Sequence
  Non-cyclic GFR-binding peptide
  MOD_RES (33), (34): Xaa is C or S
  MOD_RES (11), (12), (13), (14), (15): Xaa is A or G
  MOD_RES (16), (17), (18), (19): Xaa is A or G or is absent
EEVIMEYQKYXXXXXXXXXIYLMSIPSTKVPAXXTSPVR

SEQ ID NO: 22550 - protein, 39 aa, Artificial Sequence
  Non-cyclic GFR-binding peptide
  MOD_RES (1), (33), (34): Xaa is C or S
XSRVVMNEYQKYIVNSSDDIYLVSIPSLKTPAXXPKPVH

SEQ ID NO: 22551 - protein, 40 aa, Artificial Sequence
  Non-cyclic GFR-binding peptide
  MOD_RES (2), (35), (36): Xaa is C or S
  MOD_RES (13), (14), (15), (16), (17): Xaa is A or G
  MOD_RES (18), (19), (20), (21): Xaa is A or G or is absent
GXEEVIMEYQKYXXXXXXXXXIYLMSIPSTKVPAXXTSPV

SEQ ID NO: 22552 - protein, 34 aa, Artificial Sequence
  Non-cyclic GFR-binding peptide
  MOD_RES (34), (34): Xaa is C or S
  MOD_RES (12), (13), (14), (15), (16): Xaa is A or G
  MOD_RES (17), (18), (19), (20): Xaa is A or G or is absent
RDVVMGEYQKYXXXXXXXXXIYLMSIPSMKTPTX

SEQ ID NO: 22553 - protein, 33 aa, Artificial Sequence
  Non-cyclic GFR-binding peptide
  MOD_RES (2), (2): Xaa is C or S
GXRDVVMGEYQKYIIQQKDNIYLMSIPSMKTPT

SEQ ID NO: 22554 - protein, 36 aa, Artificial Sequence
  Non-cyclic GFR-binding peptide
  MOD_RES (2), (4), (36): Xaa is C or S
SXGXRDVVMGEYQKYIIQQKDNIYLMSIPSMKTPTX

SEQ ID NO: 22555 - protein, 39 aa, Artificial Sequence
  Non-cyclic GFR-binding peptide
  MOD_RES (2), (4), (35), (36): Xaa is C or S
LXGXEEVIMEYQKYLLVRGNDIYLMSIPSTKVPAXXTSP

SEQ ID NO: 22556 - protein, 41 aa, Artificial Sequence
  Non-cyclic GFR-binding peptide
  MOD_RES (1), (3), (37), (38): Xaa is C or S
  MOD_RES (15), (16), (17), (18), (19): Xaa is A or G
  MOD_RES (20), (21), (22), (23): Xaa is A or G or is absent
XGXRDVVMGEYQKYXXXXXXXXXIYLMSIPSMKTPTXXPGA

SEQ ID NO: 22557 - protein, 40 aa, Artificial Sequence
  Non-cyclic GFR-binding peptide
  MOD_RES (1), (3), (37), (38): Xaa is C or S
  MOD_RES (15), (16), (17), (18), (19): Xaa is A or G
  MOD_RES (20), (21), (22), (23): Xaa is A or G or is absent
XGXRDVVMGEYQKYXXXXXXXXXIYLMSIPSMKTPTXXPG

SEQ ID NO: 22558 - protein, 39 aa, Artificial Sequence
  Non-cyclic GFR-binding peptide
  MOD_RES (1), (3), (36), (37): Xaa is C or S
  MOD_RES (14), (15), (16), (17), (18): Xaa is A or G
  MOD_RES (19), (20), (21), (22): Xaa is A or G or is absent
XGXEEVIMEYQKYXXXXXXXXXIYLMSIPSTKVPAXXTS

SEQ ID NO: 22559 - protein, 31 aa, Artificial Sequence
  Non-cyclic GFR-binding peptide
  MOD_RES (31), (31): Xaa is C or S
EEVIMEYQKYLLVRGNDIYLMSIPSTKVPAX

SEQ ID NO: 22560 - protein, 37 aa, Artificial Sequence
  Non-cyclic GFR-binding peptide
  MOD_RES (2), (4): Xaa is C or S
  MOD_RES (16), (17), (18), (19), (20): Xaa is A or G
  MOD_RES (21), (22), (23), (24): Xaa is A or G or is absent
SXGXRDVVMGEYQKYXXXXXXXXXIYLMSIPSMKTPT

SEQ ID NO: 22561 - protein, 38 aa, Artificial Sequence
  Non-cyclic GFR-binding peptide
  MOD_RES (2), (4), (35), (36): Xaa is C or S
LXGXEEVIMEYQKYLLVRGNDIYLMSIPSTKVPAXXTS

SEQ ID NO: 22562 - protein, 39 aa, Artificial Sequence
  Non-cyclic GFR-binding peptide
  MOD_RES (1), (3), (35), (36): Xaa is C or S
XGXRDVVMGEYQKYIIQQKDNIYLMSIPSMKTPTXXPGA

SEQ ID NO: 22563 - protein, 36 aa, Artificial Sequence
  Non-cyclic GFR-binding peptide
  MOD_RES (2), (4): Xaa is C or S
  MOD_RES (15), (16), (17), (18), (19): Xaa is A or G
  MOD_RES (20), (21), (22), (23): Xaa is A or G or is absent
LXGXEEVIMEYQKYXXXXXXXXXIYLMSIPSTKVPA

SEQ ID NO: 22564 - protein, 37 aa, Artificial Sequence
  Non-cyclic GFR-binding peptide
  MOD_RES (31), (32): Xaa is C or S
EEVIMEYQKYLLVRGNDIYLMSIPSTKVPAXXTSPVR

SEQ ID NO: 22565 - protein, 41 aa, Artificial Sequence
  Non-cyclic GFR-binding peptide
  MOD_RES (2), (4), (35), (36): Xaa is C or S
LXGXEEVIMEYQKYLLVRGNDIYLMSIPSTKVPAXXTSPVR

SEQ ID NO: 22566 - protein, 32 aa, Artificial Sequence
  Non-cyclic GFR-binding peptide
  MOD_RES (31), (32): Xaa is C or S
DVVMGEYQKYIIQQKDNIYLMSIPSMKTPTXX

SEQ ID NO: 22567 - protein, 34 aa, Artificial Sequence
  Non-cyclic GFR-binding peptide
  MOD_RES (31), (32): Xaa is C or S
EEVIMEYQKYLLVRGNDIYLMSIPSTKVPAXXTS

SEQ ID NO: 22568 - protein, 39 aa, Artificial Sequence
  Non-cyclic GFR-binding peptide
  MOD_RES (33), (34): Xaa is C or S
  MOD_RES (11), (12), (13), (14), (15): Xaa is A or G
  MOD_RES (16), (17), (18), (19): Xaa is A or G or is absent
RVVMNEYQKYXXXXXXXXXIYLVSIPSLKTPAXXPKPVH

SEQ ID NO: 22569 - protein, 36 aa, Artificial Sequence
  Non-cyclic GFR-binding peptide
  MOD_RES (31), (32): Xaa is C or S
EEVIMEYQKYLLVRGNDIYLMSIPSTKVPAXXTSPV

SEQ ID NO: 22570 - protein, 30 aa, Artificial Sequence
  Non-cyclic GFR-binding peptide
EEVIMEYQKYLLVRGNDIYLMSIPSTKVPA

SEQ ID NO: 22571 - protein, 43 aa, Artificial Sequence
  Non-cyclic GFR-binding peptide
  MOD_RES (1), (3), (37), (38): Xaa is C or S
  MOD_RES (15), (16), (17), (18), (19): Xaa is A or G
  MOD_RES (20), (21), (22), (23): Xaa is A or G or is absent
XGXRDVVMGEYQKYXXXXXXXXXIYLMSIPSMKTPTXXPGASG

SEQ ID NO: 22572 - protein, 37 aa, Artificial Sequence
  Non-cyclic GFR-binding peptide
  MOD_RES (33), (34): Xaa is C or S
  MOD_RES (11), (12), (13), (14), (15): Xaa is A or G
  MOD_RES (16), (17), (18), (19): Xaa is A or G or is absent
EEVIMEYQKYXXXXXXXXXIYLMSIPSTKVPAXXTSP

SEQ ID NO: 22573 - protein, 35 aa, Artificial Sequence
  Non-cyclic GFR-binding peptide
  MOD_RES (1), (33), (34): Xaa is C or S
XRDVVMGEYQKYIIQQKDNIYLMSIPSMKTPTXXP

SEQ ID NO: 22574 - protein, 37 aa, Artificial Sequence
  Non-cyclic GFR-binding peptide
  MOD_RES (2), (33), (34): Xaa is C or S
GXEEVIMEYQKYLLVRGNDIYLMSIPSTKVPAXXTSP

SEQ ID NO: 22575 - protein, 36 aa, Artificial Sequence
  Non-cyclic GFR-binding peptide
  MOD_RES (2), (35), (36): Xaa is C or S
  MOD_RES (13), (14), (15), (16), (17): Xaa is A or G
  MOD_RES (18), (19), (20), (21): Xaa is A or G or is absent
GXEEVIMEYQKYXXXXXXXXXIYLMSIPSTKVPAXX

SEQ ID NO: 22576 - protein, 35 aa, Artificial Sequence
  Non-cyclic GFR-binding peptide
  MOD_RES (2), (4), (35): Xaa is C or S
LXGXEEVIMEYQKYLLVRGNDIYLMSIPSTKVPAX

SEQ ID NO: 22577 - protein, 35 aa, Artificial Sequence
  Non-cyclic GFR-binding peptide
  MOD_RES (2), (4): Xaa is C or S
SXGXRDVVMGEYQKYIIQQKDNIYLMSIPSMKTPT

SEQ ID NO: 22578 - protein, 40 aa, Artificial Sequence
  Non-cyclic GFR-binding peptide
  MOD_RES (1), (3), (34), (35): Xaa is C or S
XGXEEVIMEYQKYLLVRGNDIYLMSIPSTKVPAXXTSPVR

SEQ ID NO: 22579 - protein, 36 aa, Artificial Sequence
  Non-cyclic GFR-binding peptide
  MOD_RES (2), (36): Xaa is C or S
  MOD_RES (14), (15), (16), (17), (18): Xaa is A or G
  MOD_RES (19), (20), (21), (22): Xaa is A or G or is absent
GXRDVVMGEYQKYXXXXXXXXXIYLMSIPSMKTPTX

SEQ ID NO: 22580 - protein, 39 aa, Artificial Sequence
  Non-cyclic GFR-binding peptide
  MOD_RES (2), (35), (36): Xaa is C or S
  MOD_RES (13), (14), (15), (16), (17): Xaa is A or G
  MOD_RES (18), (19), (20), (21): Xaa is A or G or is absent
GXEEVIMEYQKYXXXXXXXXXIYLMSIPSTKVPAXXTSP

SEQ ID NO: 22581 - protein, 42 aa, Artificial Sequence
  Non-cyclic GFR-binding peptide
  MOD_RES (2), (36), (37): Xaa is C or S
  MOD_RES (14), (15), (16), (17), (18): Xaa is A or G
  MOD_RES (19), (20), (21), (22): Xaa is A or G or is absent
GXRDVVMGEYQKYXXXXXXXXXIYLMSIPSMKTPTXXPGASG

SEQ ID NO: 22582 - protein, 37 aa, Artificial Sequence
  Non-cyclic GFR-binding peptide
  MOD_RES (33), (34): Xaa is C or S
  MOD_RES (11), (12), (13), (14), (15): Xaa is A or G
  MOD_RES (16), (17), (18), (19): Xaa is A or G or is absent
DVVMGEYQKYXXXXXXXXXIYLMSIPSMKTPTXXPGA

SEQ ID NO: 22583 - protein, 39 aa, Artificial Sequence
  Non-cyclic GFR-binding peptide
  MOD_RES (1), (35), (36): Xaa is C or S
  MOD_RES (13), (14), (15), (16), (17): Xaa is A or G
  MOD_RES (18), (19), (20), (21): Xaa is A or G or is absent
XRDVVMGEYQKYXXXXXXXXXIYLMSIPSMKTPTXXPGA

SEQ ID NO: 22584 - protein, 42 aa, Artificial Sequence
  Non-cyclic GFR-binding peptide
  MOD_RES (1), (3), (37), (38): Xaa is C or S
  MOD_RES (15), (16), (17), (18), (19): Xaa is A or G
  MOD_RES (20), (21), (22), (23): Xaa is A or G or is absent
XGXRDVVMGEYQKYXXXXXXXXXIYLMSIPSMKTPTXXPGAS

SEQ ID NO: 22585 - protein, 40 aa, Artificial Sequence
  Non-cyclic GFR-binding peptide
  MOD_RES (1), (3), (35), (36): Xaa is C or S
XGXRDVVMGEYQKYIIQQKDNIYLMSIPSMKTPTXXPGAS

SEQ ID NO: 22586 - protein, 33 aa, Artificial Sequence
  Non-cyclic GFR-binding peptide
  MOD_RES (33), (33): Xaa is C or S
  MOD_RES (11), (12), (13), (14), (15): Xaa is A or G
  MOD_RES (16), (17), (18), (19): Xaa is A or G or is absent
EEVIMEYQKYXXXXXXXXXIYLMSIPSTKVPAX

SEQ ID NO: 22587 - protein, 41 aa, Artificial Sequence
  Non-cyclic GFR-binding peptide
  MOD_RES (1), (3), (36), (37): Xaa is C or S
  MOD_RES (14), (15), (16), (17), (18): Xaa is A or G
  MOD_RES (19), (20), (21), (22): Xaa is A or G or is absent
XGXEEVIMEYQKYXXXXXXXXXIYLMSIPSTKVPAXXTSPV

SEQ ID NO: 22588 - protein, 37 aa, Artificial Sequence
  Non-cyclic GFR-binding peptide
  MOD_RES (31), (32): Xaa is C or S
DVVMGEYQKYIIQQKDNIYLMSIPSMKTPTXXPGASG

SEQ ID NO: 22589 - protein, 39 aa, Artificial Sequence
  Non-cyclic GFR-binding peptide
  MOD_RES (1), (3), (34), (35): Xaa is C or S
XGXEEVIMEYQKYLLVRGNDIYLMSIPSTKVPAXXTSPV

SEQ ID NO: 22590 - protein, 35 aa, Artificial Sequence
  Non-cyclic GFR-binding peptide
  MOD_RES (1), (34), (35): Xaa is C or S
  MOD_RES (12), (13), (14), (15), (16): Xaa is A or G
  MOD_RES (17), (18), (19), (20): Xaa is A or G or is absent
XEEVIMEYQKYXXXXXXXXXIYLMSIPSTKVPAXX

SEQ ID NO: 22591 - protein, 35 aa, Artificial Sequence
  Non-cyclic GFR-binding peptide
  MOD_RES (2), (35): Xaa is C or S
  MOD_RES (13), (14), (15), (16), (17): Xaa is A or G
  MOD_RES (18), (19), (20), (21): Xaa is A or G or is absent
GXEEVIMEYQKYXXXXXXXXXIYLMSIPSTKVPAX

SEQ ID NO: 22592 - protein, 38 aa, Artificial Sequence
  Non-cyclic GFR-binding peptide
  MOD_RES (32), (33): Xaa is C or S
SRVVMNEYQKYIVNSSDDIYLVSIPSLKTPAXXPKPVH

SEQ ID NO: 22593 - protein, 40 aa, Artificial Sequence
  Non-cyclic GFR-binding peptide
  MOD_RES (2), (34), (35): Xaa is C or S
GXRDVVMGEYQKYIIQQKDNIYLMSIPSMKTPTXXPGASG

SEQ ID NO: 22594 - protein, 34 aa, Artificial Sequence
  Non-cyclic GFR-binding peptide
  MOD_RES (1), (3), (34): Xaa is C or S
XGXEEVIMEYQKYLLVRGNDIYLMSIPSTKVPAX

SEQ ID NO: 22595 - protein, 39 aa, Artificial Sequence
  Non-cyclic GFR-binding peptide
  MOD_RES (2), (33), (34): Xaa is C or S
GXEEVIMEYQKYLLVRGNDIYLMSIPSTKVPAXXTSPVR

SEQ ID NO: 22596 - protein, 36 aa, Artificial Sequence
  Non-cyclic GFR-binding peptide
  MOD_RES (1), (3), (35), (36): Xaa is C or S
XGXRDVVMGEYQKYIIQQKDNIYLMSIPSMKTPTXX

SEQ ID NO: 22597 - protein, 41 aa, Artificial Sequence
  Non-cyclic GFR-binding peptide
  MOD_RES (1), (3), (35), (36): Xaa is C or S
XGXSRVVMNEYQKYIVNSSDDIYLVSIPSLKTPAXXPKPVH

SEQ ID NO: 22598 - protein, 42 aa, Artificial Sequence
  Non-cyclic GFR-binding peptide
  MOD_RES (2), (4), (36), (37): Xaa is C or S
RXGXSEVVMDEYQKYVVNNASDIYLISIPSLRTPVXXTPPTS

SEQ ID NO: 22599 - protein, 32 aa, Artificial Sequence
  Non-cyclic GFR-binding peptide
  MOD_RES (11), (12), (13), (14), (15): Xaa is A or G
  MOD_RES (16), (17), (18), (19): Xaa is A or G or is absent
EEVIMEYQKYXXXXXXXXXIYLMSIPSTKVPA

SEQ ID NO: 22600 - protein, 33 aa, Artificial Sequence
  Non-cyclic GFR-binding peptide
  MOD_RES (12), (13), (14), (15), (16): Xaa is A or G
  MOD_RES (17), (18), (19), (20): Xaa is A or G or is absent
RDVVMGEYQKYXXXXXXXXXIYLMSIPSMKTPT

SEQ ID NO: 22601 - protein, 35 aa, Artificial Sequence
  Non-cyclic GFR-binding peptide
  MOD_RES (1), (32), (33): Xaa is C or S
XEEVIMEYQKYLLVRGNDIYLMSIPSTKVPAXXTS

SEQ ID NO: 22602 - protein, 38 aa, Artificial Sequence
  Non-cyclic GFR-binding peptide
  MOD_RES (33), (34): Xaa is C or S
  MOD_RES (11), (12), (13), (14), (15): Xaa is A or G
  MOD_RES (16), (17), (18), (19): Xaa is A or G or is absent
EEVIMEYQKYXXXXXXXXXIYLMSIPSTKVPAXXTSPV

SEQ ID NO: 22603 - protein, 41 aa, Artificial Sequence
  Non-cyclic GFR-binding peptide
  MOD_RES (2), (4), (38), (39): Xaa is C or S
  MOD_RES (16), (17), (18), (19), (20): Xaa is A or G
  MOD_RES (21), (22), (23), (24): Xaa is A or G or is absent
SXGXRDVVMGEYQKYXXXXXXXXXIYLMSIPSMKTPTXXPG

SEQ ID NO: 22604 - protein, 35 aa, Artificial Sequence
  Non-cyclic GFR-binding peptide
  MOD_RES (33), (34): Xaa is C or S
  MOD_RES (11), (12), (13), (14), (15): Xaa is A or G
  MOD_RES (16), (17), (18), (19): Xaa is A or G or is absent
DVVMGEYQKYXXXXXXXXXIYLMSIPSMKTPTXXP

SEQ ID NO: 22605 - protein, 31 aa, Artificial Sequence
  Non-cyclic GFR-binding peptide
  MOD_RES (1), (1): Xaa is C or S
XEEVIMEYQKYLLVRGNDIYLMSIPSTKVPA

SEQ ID NO: 22606 - protein, 33 aa, Artificial Sequence
  Non-cyclic GFR-binding peptide
  MOD_RES (1), (1): Xaa is C or S
  MOD_RES (12), (13), (14), (15), (16): Xaa is A or G
  MOD_RES (17), (18), (19), (20): Xaa is A or G or is absent
XEEVIMEYQKYXXXXXXXXXIYLMSIPSTKVPA

SEQ ID NO: 22607 - protein, 37 aa, Artificial Sequence
  Non-cyclic GFR-binding peptide
  MOD_RES (34), (35): Xaa is C or S
  MOD_RES (12), (13), (14), (15), (16): Xaa is A or G
  MOD_RES (17), (18), (19), (20): Xaa is A or G or is absent
RDVVMGEYQKYXXXXXXXXXIYLMSIPSMKTPTXXPG

SEQ ID NO: 22608 - protein, 40 aa, Artificial Sequence
  Non-cyclic GFR-binding peptide
  MOD_RES (2), (4), (38), (39): Xaa is C or S
  MOD_RES (16), (17), (18), (19), (20): Xaa is A or G
  MOD_RES (21), (22), (23), (24): Xaa is A or G or is absent
SXGXRDVVMGEYQKYXXXXXXXXXIYLMSIPSMKTPTXXP

SEQ ID NO: 22609 - protein, 41 aa, Artificial Sequence
  Non-cyclic GFR-binding peptide
  MOD_RES (2), (35), (36): Xaa is C or S
  MOD_RES (13), (14), (15), (16), (17): Xaa is A or G
  MOD_RES (18), (19), (20), (21): Xaa is A or G or is absent
GXEEVIMEYQKYXXXXXXXXXIYLMSIPSTKVPAXXTSPVR

SEQ ID NO: 22610 - protein, 37 aa, Artificial Sequence
  Non-cyclic GFR-binding peptide
  MOD_RES (1), (34), (35): Xaa is C or S
  MOD_RES (12), (13), (14), (15), (16): Xaa is A or G
  MOD_RES (17), (18), (19), (20): Xaa is A or G or is absent
XEEVIMEYQKYXXXXXXXXXIYLMSIPSTKVPAXXTS

SEQ ID NO: 22611 - protein, 38 aa, Artificial Sequence
  Non-cyclic GFR-binding peptide
  MOD_RES (1), (33), (34): Xaa is C or S
XRDVVMGEYQKYIIQQKDNIYLMSIPSMKTPTXXPGAS

SEQ ID NO: 22612 - protein, 41 aa, Artificial Sequence
  Non-cyclic GFR-binding peptide
  MOD_RES (2), (4), (37), (38): Xaa is C or S
  MOD_RES (15), (16), (17), (18), (19): Xaa is A or G
  MOD_RES (20), (21), (22), (23): Xaa is A or G or is absent
LXGXEEVIMEYQKYXXXXXXXXXIYLMSIPSTKVPAXXTSP

SEQ ID NO: 22613 - protein, 38 aa, Artificial Sequence
  Non-cyclic GFR-binding peptide
  MOD_RES (2), (34), (35): Xaa is C or S
GXRDVVMGEYQKYIIQQKDNIYLMSIPSMKTPTXXPGA

SEQ ID NO: 22614 - protein, 37 aa, Artificial Sequence
  Non-cyclic GFR-binding peptide
  MOD_RES (2), (4), (36), (37): Xaa is C or S
SXGXRDVVMGEYQKYIIQQKDNIYLMSIPSMKTPTXX

SEQ ID NO: 22615 - protein, 35 aa, Artificial Sequence
  Non-cyclic GFR-binding peptide
  MOD_RES (1), (35): Xaa is C or S
  MOD_RES (13), (14), (15), (16), (17): Xaa is A or G
  MOD_RES (18), (19), (20), (21): Xaa is A or G or is absent
XRDVVMGEYQKYXXXXXXXXXIYLMSIPSMKTPTX

SEQ ID NO: 22616 - protein, 39 aa, Artificial Sequence
  Non-cyclic GFR-binding peptide
  MOD_RES (1), (34), (35): Xaa is C or S
  MOD_RES (12), (13), (14), (15), (16): Xaa is A or G
  MOD_RES (17), (18), (19), (20): Xaa is A or G or is absent
XEEVIMEYQKYXXXXXXXXXIYLMSIPSTKVPAXXTSPV

SEQ ID NO: 22617 - protein, 37 aa, Artificial Sequence
  Non-cyclic GFR-binding peptide
  MOD_RES (31), (32): Xaa is C or S
RVVMNEYQKYIVNSSDDIYLVSIPSLKTPAXXPKPVH

SEQ ID NO: 22618 - protein, 40 aa, Artificial Sequence
  Non-cyclic GFR-binding peptide
  MOD_RES (2), (4), (37), (38): Xaa is C or S
  MOD_RES (15), (16), (17), (18), (19): Xaa is A or G
  MOD_RES (20), (21), (22), (23): Xaa is A or G or is absent
LXGXEEVIMEYQKYXXXXXXXXXIYLMSIPSTKVPAXXTS

SEQ ID NO: 22619 - protein, 35 aa, Artificial Sequence
  Non-cyclic GFR-binding peptide
  MOD_RES (33), (34): Xaa is C or S
  MOD_RES (11), (12), (13), (14), (15): Xaa is A or G
  MOD_RES (16), (17), (18), (19): Xaa is A or G or is absent
EEVIMEYQKYXXXXXXXXXIYLMSIPSTKVPAXXT

SEQ ID NO: 22620 - protein, 40 aa, Artificial Sequence
  Non-cyclic GFR-binding peptide
  MOD_RES (34), (35): Xaa is C or S
  MOD_RES (12), (13), (14), (15), (16): Xaa is A or G
  MOD_RES (17), (18), (19), (20): Xaa is A or G or is absent
SRVVMNEYQKYXXXXXXXXXIYLVSIPSLKTPAXXPKPVH

SEQ ID NO: 22621 - protein, 41 aa, Artificial Sequence
  Non-cyclic GFR-binding peptide
  MOD_RES (2), (36), (37): Xaa is C or S
  MOD_RES (14), (15), (16), (17), (18): Xaa is A or G
  MOD_RES (19), (20), (21), (22): Xaa is A or G or is absent
GXRDVVMGEYQKYXXXXXXXXXIYLMSIPSMKTPTXXPGAS

SEQ ID NO: 22622 - protein, 39 aa, Artificial Sequence
  Non-cyclic GFR-binding peptide
  MOD_RES (1), (33), (34): Xaa is C or S
XRDVVMGEYQKYIIQQKDNIYLMSIPSMKTPTXXPGASG

SEQ ID NO: 22623 - protein, 40 aa, Artificial Sequence
  Non-cyclic GFR-binding peptide
  MOD_RES (34), (35): Xaa is C or S
  MOD_RES (12), (13), (14), (15), (16): Xaa is A or G
  MOD_RES (17), (18), (19), (20): Xaa is A or G or is absent
RDVVMGEYQKYXXXXXXXXXIYLMSIPSMKTPTXXPGASG

SEQ ID NO: 22624 - protein, 32 aa, Artificial Sequence
  Non-cyclic GFR-binding peptide
  MOD_RES (32), (32): Xaa is C or S
RDVVMGEYQKYIIQQKDNIYLMSIPSMKTPTX

SEQ ID NO: 22625 - protein, 43 aa, Artificial Sequence
  Non-cyclic GFR-binding peptide
  MOD_RES (1), (3), (37), (38): Xaa is C or S
  MOD_RES (15), (16), (17), (18), (19): Xaa is A or G
  MOD_RES (20), (21), (22), (23): Xaa is A or G or is absent
XGXSRVVMNEYQKYXXXXXXXXXIYLVSIPSLKTPAXXPKPVH

SEQ ID NO: 22626 - protein, 38 aa, Artificial Sequence
  Non-cyclic GFR-binding peptide
  MOD_RES (2), (36), (37): Xaa is C or S
  MOD_RES (14), (15), (16), (17), (18): Xaa is A or G
  MOD_RES (19), (20), (21), (22): Xaa is A or G or is absent
GXRDVVMGEYQKYXXXXXXXXXIYLMSIPSMKTPTXXP

SEQ ID NO: 22627 - protein, 33 aa, Artificial Sequence
  Non-cyclic GFR-binding peptide
  MOD_RES (2), (33): Xaa is C or S
GXEEVIMEYQKYLLVRGNDIYLMSIPSTKVPAX

SEQ ID NO: 22628 - protein, 34 aa, Artificial Sequence
  Non-cyclic GFR-binding peptide
  MOD_RES (1), (1): Xaa is C or S
  MOD_RES (13), (14), (15), (16), (17): Xaa is A or G
  MOD_RES (18), (19), (20), (21): Xaa is A or G or is absent
XRDVVMGEYQKYXXXXXXXXXIYLMSIPSMKTPT

SEQ ID NO: 22629 - protein, 38 aa, Artificial Sequence
  Non-cyclic GFR-binding peptide
  MOD_RES (1), (3), (37), (38): Xaa is C or S
  MOD_RES (15), (16), (17), (18), (19): Xaa is A or G
  MOD_RES (20), (21), (22), (23): Xaa is A or G or is absent
XGXRDVVMGEYQKYXXXXXXXXXIYLMSIPSMKTPTXX

SEQ ID NO: 22630 - protein, 38 aa, Artificial Sequence
  Non-cyclic GFR-binding peptide
  MOD_RES (32), (33): Xaa is C or S
RDVVMGEYQKYIIQQKDNIYLMSIPSMKTPTXXPGASG

SEQ ID NO: 22631 - protein, 35 aa, Artificial Sequence
  Non-cyclic GFR-binding peptide
  MOD_RES (2), (2): Xaa is C or S
  MOD_RES (14), (15), (16), (17), (18): Xaa is A or G
  MOD_RES (19), (20), (21), (22): Xaa is A or G or is absent
GXRDVVMGEYQKYXXXXXXXXXIYLMSIPSMKTPT

SEQ ID NO: 22632 - protein, 43 aa, Artificial Sequence
  Non-cyclic GFR-binding peptide
  MOD_RES (2), (4), (38), (39): Xaa is C or S
  MOD_RES (16), (17), (18), (19), (20): Xaa is A or G
  MOD_RES (21), (22), (23), (24): Xaa is A or G or is absent
SXGXRDVVMGEYQKYXXXXXXXXXIYLMSIPSMKTPTXXPGAS

SEQ ID NO: 22633 - protein, 35 aa, Artificial Sequence
  Non-cyclic GFR-binding peptide
  MOD_RES (32), (33): Xaa is C or S
RDVVMGEYQKYIIQQKDNIYLMSIPSMKTPTXXPG

SEQ ID NO: 22634 - protein, 38 aa, Artificial Sequence
  Non-cyclic GFR-binding peptide
  MOD_RES (2), (4), (36), (37): Xaa is C or S
SXGXRDVVMGEYQKYIIQQKDNIYLMSIPSMKTPTXXP

SEQ ID NO: 22635 - protein, 35 aa, Artificial Sequence
  Non-cyclic GFR-binding peptide
  MOD_RES (34), (35): Xaa is C or S
  MOD_RES (12), (13), (14), (15), (16): Xaa is A or G
  MOD_RES (17), (18), (19), (20): Xaa is A or G or is absent
RDVVMGEYQKYXXXXXXXXXIYLMSIPSMKTPTXX

SEQ ID NO: 22636 - protein, 34 aa, Artificial Sequence
  Non-cyclic GFR-binding peptide
  MOD_RES (2), (33), (34): Xaa is C or S
GXEEVIMEYQKYLLVRGNDIYLMSIPSTKVPAXX

SEQ ID NO: 22637 - protein, 39 aa, Artificial Sequence
  Non-cyclic GFR-binding peptide
  MOD_RES (2), (36), (37): Xaa is C or S
  MOD_RES (14), (15), (16), (17), (18): Xaa is A or G
  MOD_RES (19), (20), (21), (22): Xaa is A or G or is absent
GXRDVVMGEYQKYXXXXXXXXXIYLMSIPSMKTPTXXPG

SEQ ID NO: 22638 - protein, 38 aa, Artificial Sequence
  Non-cyclic GFR-binding peptide
  MOD_RES (2), (35), (36): Xaa is C or S
  MOD_RES (13), (14), (15), (16), (17): Xaa is A or G
  MOD_RES (18), (19), (20), (21): Xaa is A or G or is absent
GXEEVIMEYQKYXXXXXXXXXIYLMSIPSTKVPAXXTS

SEQ ID NO: 22639 - protein, 38 aa, Artificial Sequence
  Non-cyclic GFR-binding peptide
  MOD_RES (1), (32), (33): Xaa is C or S
XEEVIMEYQKYLLVRGNDIYLMSIPSTKVPAXXTSPVR

SEQ ID NO: 22640 - protein, 36 aa, Artificial Sequence
  Non-cyclic GFR-binding peptide
  MOD_RES (1), (3): Xaa is C or S
  MOD_RES (15), (16), (17), (18), (19): Xaa is A or G
  MOD_RES (20), (21), (22), (23): Xaa is A or G or is absent
XGXRDVVMGEYQKYXXXXXXXXXIYLMSIPSMKTPT

SEQ ID NO: 22641 - protein, 36 aa, Artificial Sequence
  Non-cyclic GFR-binding peptide
  MOD_RES (33), (34): Xaa is C or S
  MOD_RES (11), (12), (13), (14), (15): Xaa is A or G
  MOD_RES (16), (17), (18), (19): Xaa is A or G or is absent
DVVMGEYQKYXXXXXXXXXIYLMSIPSMKTPTXXPG

SEQ ID NO: 22642 - protein, 42 aa, Artificial Sequence
  Non-cyclic GFR-binding peptide
  MOD_RES (2), (4), (36), (37): Xaa is C or S
HXGXSRVVMNEYQKYIVNSSDDIYLVSIPSLKTPAXXPKPVH

SEQ ID NO: 22643 - protein, 39 aa, Artificial Sequence
  Non-cyclic GFR-binding peptide
  MOD_RES (1), (3), (37), (38): Xaa is C or S
  MOD_RES (15), (16), (17), (18), (19): Xaa is A or G
  MOD_RES (20), (21), (22), (23): Xaa is A or G or is absent
XGXRDVVMGEYQKYXXXXXXXXXIYLMSIPSMKTPTXXP

SEQ ID NO: 22644 - protein, 34 aa, Artificial Sequence
  Non-cyclic GFR-binding peptide
  MOD_RES (1), (33), (34): Xaa is C or S
XRDVVMGEYQKYIIQQKDNIYLMSIPSMKTPTXX

SEQ ID NO: 22645 - protein, 42 aa, Artificial Sequence
  Non-cyclic GFR-binding peptide
  MOD_RES (1), (3), (36), (37): Xaa is C or S
  MOD_RES (14), (15), (16), (17), (18): Xaa is A or G
  MOD_RES (19), (20), (21), (22): Xaa is A or G or is absent
XGXEEVIMEYQKYXXXXXXXXXIYLMSIPSTKVPAXXTSPVR

SEQ ID NO: 22646 - protein, 36 aa, Artificial Sequence
  Non-cyclic GFR-binding peptide
  MOD_RES (2), (33), (34): Xaa is C or S
GXEEVIMEYQKYLLVRGNDIYLMSIPSTKVPAXXTS

SEQ ID NO: 22647 - protein, 38 aa, Artificial Sequence
  Non-cyclic GFR-binding peptide
  MOD_RES (1), (35), (36): Xaa is C or S
  MOD_RES (13), (14), (15), (16), (17): Xaa is A or G
  MOD_RES (18), (19), (20), (21): Xaa is A or G or is absent
XRDVVMGEYQKYXXXXXXXXXIYLMSIPSMKTPTXXPG

SEQ ID NO: 22648 - protein, 38 aa, Artificial Sequence
  Non-cyclic GFR-binding peptide
  MOD_RES (33), (34): Xaa is C or S
  MOD_RES (11), (12), (13), (14), (15): Xaa is A or G
  MOD_RES (16), (17), (18), (19): Xaa is A or G or is absent
DVVMGEYQKYXXXXXXXXXIYLMSIPSMKTPTXXPGAS

SEQ ID NO: 22649 - protein, 34 aa, Artificial Sequence
  Non-cyclic GFR-binding peptide
  MOD_RES (33), (34): Xaa is C or S
  MOD_RES (11), (12), (13), (14), (15): Xaa is A or G
  MOD_RES (16), (17), (18), (19): Xaa is A or G or is absent
EEVIMEYQKYXXXXXXXXXIYLMSIPSTKVPAXX

SEQ ID NO: 22650 - protein, 37 aa, Artificial Sequence
  Non-cyclic GFR-binding peptide
  MOD_RES (32), (33): Xaa is C or S
RDVVMGEYQKYIIQQKDNIYLMSIPSMKTPTXXPGAS

SEQ ID NO: 22651 - protein, 34 aa, Artificial Sequence
  Non-cyclic GFR-binding peptide
  MOD_RES (33), (33): Xaa is C or S
  MOD_RES (14), (15), (16), (17), (18): Xaa is A or G
  MOD_RES (19), (20), (21), (22): Xaa is A or G or is absent
APVKTSPISMLYIXXXXXXXXXYKQYEMIVEEXG

SEQ ID NO: 22652 - protein, 38 aa, Artificial Sequence
  Non-cyclic GFR-binding peptide
  MOD_RES (5), (6), (37): Xaa is C or S
VPSTXXAPVKTSPISMLYIDNGRVLLYKQYEMIVEEXG

SEQ ID NO: 22653 - protein, 35 aa, Artificial Sequence
  Non-cyclic GFR-binding peptide
  MOD_RES (4), (5): Xaa is C or S
PSTXXAPVKTSPISMLYIDNGRVLLYKQYEMIVEE

SEQ ID NO: 22654 - protein, 32 aa, Artificial Sequence
  Non-cyclic GFR-binding peptide
  MOD_RES (31), (31): Xaa is C or S
APVKTSPISMLYIDNGRVLLYKQYEMIVEEXG

SEQ ID NO: 22655 - protein, 40 aa, Artificial Sequence
  Non-cyclic GFR-binding peptide
  MOD_RES (4), (5), (38), (40): Xaa is C or S
  MOD_RES (19), (20), (21), (22), (23): Xaa is A or G
  MOD_RES (24), (25), (26), (27): Xaa is A or G or is absent
PSTXXAPVKTSPISMLYIXXXXXXXXXYKQYEMIVEEXGX

SEQ ID NO: 22656 - protein, 39 aa, Artificial Sequence
  Non-cyclic GFR-binding peptide
  MOD_RES (5), (6): Xaa is C or S
  MOD_RES (20), (21), (22), (23), (24): Xaa is A or G
  MOD_RES (25), (26), (27), (28): Xaa is A or G or is absent
SAGPXXTPTKMSPISMLYIXXXXXXXXXYKQYEGMVVDR

SEQ ID NO: 22657 - protein, 32 aa, Artificial Sequence
  Non-cyclic GFR-binding peptide
  MOD_RES (1), (32): Xaa is C or S
XAPVKTSPISMLYIDNGRVLLYKQYEMIVEEX

SEQ ID NO: 22658 - protein, 33 aa, Artificial Sequence
  Non-cyclic GFR-binding peptide
  MOD_RES (1), (33): Xaa is C or S
XTPTKMSPISMLYINDKQQIIYKQYEGMVVDRX

SEQ ID NO: 22659 - protein, 35 aa, Artificial Sequence
  Non-cyclic GFR-binding peptide
  MOD_RES (2), (3), (34): Xaa is C or S
TXXAPVKTSPISMLYIDNGRVLLYKQYEMIVEEXG

SEQ ID NO: 22660 - protein, 37 aa, Artificial Sequence
  Non-cyclic GFR-binding peptide
  MOD_RES (3), (4), (35), (37): Xaa is C or S
STXXAPVKTSPISMLYIDNGRVLLYKQYEMIVEEXGX

SEQ ID NO: 22661 - protein, 33 aa, Artificial Sequence
  Non-cyclic GFR-binding peptide
  MOD_RES (1), (1): Xaa is C or S
  MOD_RES (15), (16), (17), (18), (19): Xaa is A or G
  MOD_RES (20), (21), (22), (23): Xaa is A or G or is absent
XTPTKMSPISMLYIXXXXXXXXXYKQYEGMVVD

SEQ ID NO: 22662 - protein, 37 aa, Artificial Sequence
  Non-cyclic GFR-binding peptide
  MOD_RES (1), (2), (36): Xaa is C or S
  MOD_RES (16), (17), (18), (19), (20): Xaa is A or G
  MOD_RES (21), (22), (23), (24): Xaa is A or G or is absent
XXTPTKMSPISMLYIXXXXXXXXXYKQYEGMVVDRXG

SEQ ID NO: 22663 - protein, 36 aa, Artificial Sequence
  Non-cyclic GFR-binding peptide
  MOD_RES (3), (4), (36): Xaa is C or S
GPXXTPTKMSPISMLYINDKQQIIYKQYEGMVVDRX

SEQ ID NO: 22664 - protein, 33 aa, Artificial Sequence
  Non-cyclic GFR-binding peptide
  MOD_RES (1), (2): Xaa is C or S
XXTPTKMSPISMLYINDKQQIIYKQYEGMVVDR

SEQ ID NO: 22665 - protein, 34 aa, Artificial Sequence
  Non-cyclic GFR-binding peptide
  MOD_RES (1), (2): Xaa is C or S
  MOD_RES (16), (17), (18), (19), (20): Xaa is A or G
  MOD_RES (21), (22), (23), (24): Xaa is A or G or is absent
XXTPTKMSPISMLYIXXXXXXXXXYKQYEGMVVD

SEQ ID NO: 22666 - protein, 36 aa, Artificial Sequence
  Non-cyclic GFR-binding peptide
  MOD_RES (1), (34), (36): Xaa is C or S
  MOD_RES (15), (16), (17), (18), (19): Xaa is A or G
  MOD_RES (20), (21), (22), (23): Xaa is A or G or is absent
XAPVKTSPISMLYIXXXXXXXXXYKQYEMIVEEXGX

SEQ ID NO: 22667 - protein, 36 aa, Artificial Sequence
  Non-cyclic GFR-binding peptide
  MOD_RES (3), (4): Xaa is C or S
  MOD_RES (18), (19), (20), (21), (22): Xaa is A or G
  MOD_RES (23), (24), (25), (26): Xaa is A or G or is absent
STXXAPVKTSPISMLYIXXXXXXXXXYKQYEMIVEE

SEQ ID NO: 22668 - protein, 39 aa, Artificial Sequence
  Non-cyclic GFR-binding peptide
  MOD_RES (5), (6), (38): Xaa is C or S
SAGPXXTPTKMSPISMLYINDKQQIIYKQYEGMVVDRXG

SEQ ID NO: 22669 - protein, 35 aa, Artificial Sequence
  Non-cyclic GFR-binding peptide
  MOD_RES (33), (35): Xaa is C or S
  MOD_RES (14), (15), (16), (17), (18): Xaa is A or G
  MOD_RES (19), (20), (21), (22): Xaa is A or G or is absent
APVKTSPISMLYIXXXXXXXXXYKQYEMIVEEXGX

SEQ ID NO: 22670 - protein, 36 aa, Artificial Sequence
  Non-cyclic GFR-binding peptide
  MOD_RES (4), (5), (36): Xaa is C or S
PSTXXAPVKTSPISMLYIDNGRVLLYKQYEMIVEEX

SEQ ID NO: 22671 - protein, 41 aa, Artificial Sequence
  Non-cyclic GFR-binding peptide
  MOD_RES (5), (6), (38), (40): Xaa is C or S
SAGPXXTPTKMSPISMLYINDKQQIIYKQYEGMVVDRXGXS

SEQ ID NO: 22672 - protein, 38 aa, Artificial Sequence
  Non-cyclic GFR-binding peptide
  MOD_RES (2), (3), (36), (38): Xaa is C or S
  MOD_RES (17), (18), (19), (20), (21): Xaa is A or G
  MOD_RES (22), (23), (24), (25): Xaa is A or G or is absent
TXXAPVKTSPISMLYIXXXXXXXXXYKQYEMIVEEXGX

SEQ ID NO: 22673 - protein, 42 aa, Artificial Sequence
  Non-cyclic GFR-binding peptide
  MOD_RES (4), (5), (39), (41): Xaa is C or S
  MOD_RES (19), (20), (21), (22), (23): Xaa is A or G
  MOD_RES (24), (25), (26), (27): Xaa is A or G or is absent
AGPXXTPTKMSPISMLYIXXXXXXXXXYKQYEGMVVDRXGXS

SEQ ID NO: 22674 - protein, 37 aa, Artificial Sequence
  Non-cyclic GFR-binding peptide
  MOD_RES (1), (34), (36): Xaa is C or S
  MOD_RES (15), (16), (17), (18), (19): Xaa is A or G
  MOD_RES (20), (21), (22), (23): Xaa is A or G or is absent
XAPVKTSPISMLYIXXXXXXXXXYKQYEMIVEEXGXL

SEQ ID NO: 22675 - protein, 40 aa, Artificial Sequence
  Non-cyclic GFR-binding peptide
  MOD_RES (6), (7), (40): Xaa is C or S
  MOD_RES (21), (22), (23), (24), (25): Xaa is A or G
  MOD_RES (26), (27), (28), (29): Xaa is A or G or is absent
RVPSTXXAPVKTSPISMLYIXXXXXXXXXYKQYEMIVEEX

SEQ ID NO: 22676 - protein, 35 aa, Artificial Sequence
  Non-cyclic GFR-binding peptide
  MOD_RES (1), (33), (35): Xaa is C or S
XTPTKMSPISMLYINDKQQIIYKQYEGMVVDRXGX

SEQ ID NO: 22677 - protein, 38 aa, Artificial Sequence
  Non-cyclic GFR-binding peptide
  MOD_RES (1), (2), (35), (37): Xaa is C or S
  MOD_RES (16), (17), (18), (19), (20): Xaa is A or G
  MOD_RES (21), (22), (23), (24): Xaa is A or G or is absent
XXAPVKTSPISMLYIXXXXXXXXXYKQYEMIVEEXGXL

SEQ ID NO: 22678 - protein, 43 aa, Artificial Sequence
  Non-cyclic GFR-binding peptide
  MOD_RES (6), (7), (40), (42): Xaa is C or S
  MOD_RES (21), (22), (23), (24), (25): Xaa is A or G
  MOD_RES (26), (27), (28), (29): Xaa is A or G or is absent
RVPSTXXAPVKTSPISMLYIXXXXXXXXXYKQYEMIVEEXGXL

SEQ ID NO: 22679 - protein, 37 aa, Artificial Sequence
  Non-cyclic GFR-binding peptide
  MOD_RES (1), (2), (35), (37): Xaa is C or S
  MOD_RES (16), (17), (18), (19), (20): Xaa is A or G
  MOD_RES (21), (22), (23), (24): Xaa is A or G or is absent
XXAPVKTSPISMLYIXXXXXXXXXYKQYEMIVEEXGX

SEQ ID NO: 22680 - protein, 32 aa, Artificial Sequence
  Non-cyclic GFR-binding peptide
  MOD_RES (32), (32): Xaa is C or S
TPTKMSPISMLYINDKQQIIYKQYEGMVVDRX

SEQ ID NO: 22681 - protein, 37 aa, Artificial Sequence
  Non-cyclic GFR-binding peptide
  MOD_RES (5), (6), (37): Xaa is C or S
VPSTXXAPVKTSPISMLYIDNGRVLLYKQYEMIVEEX

SEQ ID NO: 22682 - protein, 30 aa, Artificial Sequence
  Non-cyclic GFR-binding peptide
TPTKMSPISMLYINDKQQIIYKQYEGMVVD

SEQ ID NO: 22683 - protein, 39 aa, Artificial Sequence
  Non-cyclic GFR-binding peptide
  MOD_RES (1), (2), (36), (38): Xaa is C or S
  MOD_RES (16), (17), (18), (19), (20): Xaa is A or G
  MOD_RES (21), (22), (23), (24): Xaa is A or G or is absent
XXTPTKMSPISMLYIXXXXXXXXXYKQYEGMVVDRXGXS

SEQ ID NO: 22684 - protein, 40 aa, Artificial Sequence
  Non-cyclic GFR-binding peptide
  MOD_RES (5), (6), (40): Xaa is C or S
  MOD_RES (20), (21), (22), (23), (24): Xaa is A or G
  MOD_RES (25), (26), (27), (28): Xaa is A or G or is absent
SAGPXXTPTKMSPISMLYIXXXXXXXXXYKQYEGMVVDRX

SEQ ID NO: 22685 - protein, 32 aa, Artificial Sequence
  Non-cyclic GFR-binding peptide
  MOD_RES (1), (2): Xaa is C or S
XXAPVKTSPISMLYIDNGRVLLYKQYEMIVEE

SEQ ID NO: 22686 - protein, 37 aa, Artificial Sequence
  Non-cyclic GFR-binding peptide
  MOD_RES (2), (3), (36): Xaa is C or S
  MOD_RES (17), (18), (19), (20), (21): Xaa is A or G
  MOD_RES (22), (23), (24), (25): Xaa is A or G or is absent
TXXAPVKTSPISMLYIXXXXXXXXXYKQYEMIVEEXG

SEQ ID NO: 22687 - protein, 40 aa, Artificial Sequence
  Non-cyclic GFR-binding peptide
  MOD_RES (6), (7), (39): Xaa is C or S
HVPKPXXAPTKLSPISVLYIDDSSNVIYKQYENMVVRSXG

SEQ ID NO: 22688 - protein, 35 aa, Artificial Sequence
  Non-cyclic GFR-binding peptide
  MOD_RES (1), (2), (34): Xaa is C or S
XXTPTKMSPISMLYINDKQQIIYKQYEGMVVDRXG

SEQ ID NO: 22689 - protein, 35 aa, Artificial Sequence
  Non-cyclic GFR-binding peptide
  MOD_RES (4), (5): Xaa is C or S
AGPXXTPTKMSPISMLYINDKQQIIYKQYEGMVVD

SEQ ID NO: 22690 - protein, 41 aa, Artificial Sequence
  Non-cyclic GFR-binding peptide
  MOD_RES (6), (7), (41): Xaa is C or S
  MOD_RES (21), (22), (23), (24), (25): Xaa is A or G
  MOD_RES (26), (27), (28), (29): Xaa is A or G or is absent
HVPKPXXAPTKLSPISVLYIXXXXXXXXXYKQYENMVVRSX

SEQ ID NO: 22691 - protein, 33 aa, Artificial Sequence
  Non-cyclic GFR-binding peptide
  MOD_RES (31), (33): Xaa is C or S
APVKTSPISMLYIDNGRVLLYKQYEMIVEEXGX

SEQ ID NO: 22692 - protein, 37 aa, Artificial Sequence
  Non-cyclic GFR-binding peptide
  MOD_RES (3), (4), (36): Xaa is C or S
GPXXTPTKMSPISMLYINDKQQIIYKQYEGMVVDRXG

SEQ ID NO: 22693 - protein, 34 aa, Artificial Sequence
  Non-cyclic GFR-binding peptide
  MOD_RES (2), (3): Xaa is C or S
PXXTPTKMSPISMLYINDKQQIIYKQYEGMVVDR

SEQ ID NO: 22694 - protein, 37 aa, Artificial Sequence
  Non-cyclic GFR-binding peptide
  MOD_RES (2), (3), (37): Xaa is C or S
  MOD_RES (17), (18), (19), (20), (21): Xaa is A or G
  MOD_RES (22), (23), (24), (25): Xaa is A or G or is absent
PXXTPTKMSPISMLYIXXXXXXXXXYKQYEGMVVDRX

SEQ ID NO: 22695 - protein, 41 aa, Artificial Sequence
  Non-cyclic GFR-binding peptide
  MOD_RES (6), (7), (39), (41): Xaa is C or S
GSAGPXXTPTKMSPISMLYINDKQQIIYKQYEGMVVDRXGX

SEQ ID NO: 22696 - protein, 33 aa, Artificial Sequence
  Non-cyclic GFR-binding peptide
  MOD_RES (2), (3): Xaa is C or S
TXXAPVKTSPISMLYIDNGRVLLYKQYEMIVEE

SEQ ID NO: 22697 - protein, 34 aa, Artificial Sequence
  Non-cyclic GFR-binding peptide
  MOD_RES (32), (34): Xaa is C or S
TPTKMSPISMLYINDKQQIIYKQYEGMVVDRXGX

SEQ ID NO: 22698 - protein, 38 aa, Artificial Sequence
  Non-cyclic GFR-binding peptide
  MOD_RES (4), (5), (36), (38): Xaa is C or S
PSTXXAPVKTSPISMLYIDNGRVLLYKQYEMIVEEXGX

SEQ ID NO: 22699 - protein, 37 aa, Artificial Sequence
  Non-cyclic GFR-binding peptide
  MOD_RES (1), (35), (37): Xaa is C or S
  MOD_RES (15), (16), (17), (18), (19): Xaa is A or G
  MOD_RES (20), (21), (22), (23): Xaa is A or G or is absent
XTPTKMSPISMLYIXXXXXXXXXYKQYEGMVVDRXGX

SEQ ID NO: 22700 - protein, 39 aa, Artificial Sequence
  Non-cyclic GFR-binding peptide
  MOD_RES (6), (7): Xaa is C or S
  MOD_RES (21), (22), (23), (24), (25): Xaa is A or G
  MOD_RES (26), (27), (28), (29): Xaa is A or G or is absent
GSAGPXXTPTKMSPISMLYIXXXXXXXXXYKQYEGMVVD

SEQ ID NO: 22701 - protein, 37 aa, Artificial Sequence
  Non-cyclic GFR-binding peptide
  MOD_RES (4), (5), (37): Xaa is C or S
AGPXXTPTKMSPISMLYINDKQQIIYKQYEGMVVDRX

SEQ ID NO: 22702 - protein, 34 aa, Artificial Sequence
  Non-cyclic GFR-binding peptide
  MOD_RES (31), (33): Xaa is C or S
APVKTSPISMLYIDNGRVLLYKQYEMIVEEXGXL

SEQ ID NO: 22703 - protein, 36 aa, Artificial Sequence
  Non-cyclic GFR-binding peptide
  MOD_RES (4), (5): Xaa is C or S
AGPXXTPTKMSPISMLYINDKQQIIYKQYEGMVVDR

SEQ ID NO: 22704 - protein, 38 aa, Artificial Sequence
  Non-cyclic GFR-binding peptide
  MOD_RES (4), (5), (38): Xaa is C or S
  MOD_RES (19), (20), (21), (22), (23): Xaa is A or G
  MOD_RES (24), (25), (26), (27): Xaa is A or G or is absent
PSTXXAPVKTSPISMLYIXXXXXXXXXYKQYEMIVEEX

SEQ ID NO: 22705 - protein, 34 aa, Artificial Sequence
  Non-cyclic GFR-binding peptide
  MOD_RES (1), (34): Xaa is C or S
  MOD_RES (15), (16), (17), (18), (19): Xaa is A or G
  MOD_RES (20), (21), (22), (23): Xaa is A or G or is absent
XAPVKTSPISMLYIXXXXXXXXXYKQYEMIVEEX

SEQ ID NO: 22706 - protein, 36 aa, Artificial Sequence
  Non-cyclic GFR-binding peptide
  MOD_RES (2), (3), (34), (36): Xaa is C or S
TXXAPVKTSPISMLYIDNGRVLLYKQYEMIVEEXGX

SEQ ID NO: 22707 - protein, 38 aa, Artificial Sequence
  Non-cyclic GFR-binding peptide
  MOD_RES (4), (5): Xaa is C or S
  MOD_RES (19), (20), (21), (22), (23): Xaa is A or G
  MOD_RES (24), (25), (26), (27): Xaa is A or G or is absent
AGPXXTPTKMSPISMLYIXXXXXXXXXYKQYEGMVVDR

SEQ ID NO: 22708 - protein, 40 aa, Artificial Sequence
  Non-cyclic GFR-binding peptide
  MOD_RES (5), (6), (37), (39): Xaa is C or S
VPSTXXAPVKTSPISMLYIDNGRVLLYKQYEMIVEEXGXL

SEQ ID NO: 22709 - protein, 36 aa, Artificial Sequence
  Non-cyclic GFR-binding peptide
  MOD_RES (5), (6): Xaa is C or S
SAGPXXTPTKMSPISMLYINDKQQIIYKQYEGMVVD

SEQ ID NO: 22710 - protein, 44 aa, Artificial Sequence
  Non-cyclic GFR-binding peptide
  MOD_RES (6), (7), (41), (43): Xaa is C or S
  MOD_RES (21), (22), (23), (24), (25): Xaa is A or G
  MOD_RES (26), (27), (28), (29): Xaa is A or G or is absent
GSAGPXXTPTKMSPISMLYIXXXXXXXXXYKQYEGMVVDRXGXS

SEQ ID NO: 22711 - protein, 38 aa, Artificial Sequence
  Non-cyclic GFR-binding peptide
  MOD_RES (3), (4), (36), (38): Xaa is C or S
GPXXTPTKMSPISMLYINDKQQIIYKQYEGMVVDRXGX

SEQ ID NO: 22712 - protein, 36 aa, Artificial Sequence
  Non-cyclic GFR-binding peptide
  MOD_RES (1), (2), (36): Xaa is C or S
  MOD_RES (16), (17), (18), (19), (20): Xaa is A or G
  MOD_RES (21), (22), (23), (24): Xaa is A or G or is absent
XXTPTKMSPISMLYIXXXXXXXXXYKQYEGMVVDRX

SEQ ID NO: 22713 - protein, 31 aa, Artificial Sequence
  Non-cyclic GFR-binding peptide
TPTKMSPISMLYINDKQQIIYKQYEGMVVDR

SEQ ID NO: 22714 - protein, 44 aa, Artificial Sequence
  Non-cyclic GFR-binding peptide
  MOD_RES (6), (7), (41), (43): Xaa is C or S
  MOD_RES (21), (22), (23), (24), (25): Xaa is A or G
  MOD_RES (26), (27), (28), (29): Xaa is A or G or is absent
STPPTXXVPTRLSPISILYIXXXXXXXXXYKQYEDMVVESXGXR

SEQ ID NO: 22715 - protein, 42 aa, Artificial Sequence
  Non-cyclic GFR-binding peptide
  MOD_RES (6), (7), (41): Xaa is C or S
  MOD_RES (21), (22), (23), (24), (25): Xaa is A or G
  MOD_RES (26), (27), (28), (29): Xaa is A or G or is absent
HVPKPXXAPTKLSPISVLYIXXXXXXXXXYKQYENMVVRSXG

SEQ ID NO: 22716 - protein, 36 aa, Artificial Sequence
  Non-cyclic GFR-binding peptide
  MOD_RES (1), (2), (33), (35): Xaa is C or S
XXAPVKTSPISMLYIDNGRVLLYKQYEMIVEEXGXL

SEQ ID NO: 22717 - protein, 40 aa, Artificial Sequence
  Non-cyclic GFR-binding peptide
  MOD_RES (4), (5), (37), (39): Xaa is C or S
AGPXXTPTKMSPISMLYINDKQQIIYKQYEGMVVDRXGXS

SEQ ID NO: 22718 - protein, 36 aa, Artificial Sequence
  Non-cyclic GFR-binding peptide
  MOD_RES (2), (3), (35): Xaa is C or S
PXXTPTKMSPISMLYINDKQQIIYKQYEGMVVDRXG

SEQ ID NO: 22719 - protein, 39 aa, Artificial Sequence
  Non-cyclic GFR-binding peptide
  MOD_RES (2), (3), (36), (38): Xaa is C or S
  MOD_RES (17), (18), (19), (20), (21): Xaa is A or G
  MOD_RES (22), (23), (24), (25): Xaa is A or G or is absent
TXXAPVKTSPISMLYIXXXXXXXXXYKQYEMIVEEXGXL

SEQ ID NO: 22720 - protein, 36 aa, Artificial Sequence
  Non-cyclic GFR-binding peptide
  MOD_RES (2), (3), (36): Xaa is C or S
  MOD_RES (17), (18), (19), (20), (21): Xaa is A or G
  MOD_RES (22), (23), (24), (25): Xaa is A or G or is absent
TXXAPVKTSPISMLYIXXXXXXXXXYKQYEMIVEEX

SEQ ID NO: 22721 - protein, 34 aa, Artificial Sequence
  Non-cyclic GFR-binding peptide
  MOD_RES (2), (3), (34): Xaa is C or S
TXXAPVKTSPISMLYIDNGRVLLYKQYEMIVEEX

SEQ ID NO: 22722 - protein, 42 aa, Artificial Sequence
  Non-cyclic GFR-binding peptide
  MOD_RES (5), (6), (39), (41): Xaa is C or S
  MOD_RES (20), (21), (22), (23), (24): Xaa is A or G
  MOD_RES (25), (26), (27), (28): Xaa is A or G or is absent
VPSTXXAPVKTSPISMLYIXXXXXXXXXYKQYEMIVEEXGXL

SEQ ID NO: 22723 - protein, 35 aa, Artificial Sequence
  Non-cyclic GFR-binding peptide
  MOD_RES (1), (2), (33), (35): Xaa is C or S
XXAPVKTSPISMLYIDNGRVLLYKQYEMIVEEXGX

SEQ ID NO: 22724 - protein, 37 aa, Artificial Sequence
  Non-cyclic GFR-binding peptide
  MOD_RES (2), (3), (34), (36): Xaa is C or S
TXXAPVKTSPISMLYIDNGRVLLYKQYEMIVEEXGXL

SEQ ID NO: 22725 - protein, 38 aa, Artificial Sequence
  Non-cyclic GFR-binding peptide
  MOD_RES (1), (35), (37): Xaa is C or S
  MOD_RES (15), (16), (17), (18), (19): Xaa is A or G
  MOD_RES (20), (21), (22), (23): Xaa is A or G or is absent
XTPTKMSPISMLYIXXXXXXXXXYKQYEGMVVDRXGXS

SEQ ID NO: 22726 - protein, 41 aa, Artificial Sequence
  Non-cyclic GFR-binding peptide
  MOD_RES (6), (7), (41): Xaa is C or S
  MOD_RES (21), (22), (23), (24), (25): Xaa is A or G
  MOD_RES (26), (27), (28), (29): Xaa is A or G or is absent
GSAGPXXTPTKMSPISMLYIXXXXXXXXXYKQYEGMVVDRX

SEQ ID NO: 22727 - protein, 33 aa, Artificial Sequence
  Non-cyclic GFR-binding peptide
  MOD_RES (2), (3): Xaa is C or S
PXXTPTKMSPISMLYINDKQQIIYKQYEGMVVD

SEQ ID NO: 22728 - protein, 32 aa, Artificial Sequence
  Non-cyclic GFR-binding peptide
  MOD_RES (14), (15), (16), (17), (18): Xaa is A or G
  MOD_RES (19), (20), (21), (22): Xaa is A or G or is absent
TPTKMSPISMLYIXXXXXXXXXYKQYEGMVVD

SEQ ID NO: 22729 - protein, 31 aa, Artificial Sequence
  Non-cyclic GFR-binding peptide
  MOD_RES (1), (1): Xaa is C or S
XTPTKMSPISMLYINDKQQIIYKQYEGMVVD

SEQ ID NO: 22730 - protein, 40 aa, Artificial Sequence
  Non-cyclic GFR-binding peptide
  MOD_RES (4), (5), (39): Xaa is C or S
  MOD_RES (19), (20), (21), (22), (23): Xaa is A or G
  MOD_RES (24), (25), (26), (27): Xaa is A or G or is absent
AGPXXTPTKMSPISMLYIXXXXXXXXXYKQYEGMVVDRXG

SEQ ID NO: 22731 - protein, 34 aa, Artificial Sequence
  Non-cyclic GFR-binding peptide
  MOD_RES (1), (33): Xaa is C or S
XTPTKMSPISMLYINDKQQIIYKQYEGMVVDRXG

SEQ ID NO: 22732 - protein, 33 aa, Artificial Sequence
  Non-cyclic GFR-binding peptide
  MOD_RES (1), (2), (33): Xaa is C or S
XXAPVKTSPISMLYIDNGRVLLYKQYEMIVEEX

SEQ ID NO: 22733 - protein, 34 aa, Artificial Sequence
  Non-cyclic GFR-binding peptide
  MOD_RES (3), (4): Xaa is C or S
GPXXTPTKMSPISMLYINDKQQIIYKQYEGMVVD

SEQ ID NO: 22734 - protein, 42 aa, Artificial Sequence
  Non-cyclic GFR-binding peptide
  MOD_RES (6), (7), (39), (41): Xaa is C or S
GSAGPXXTPTKMSPISMLYINDKQQIIYKQYEGMVVDRXGXS

SEQ ID NO: 22735 - protein, 44 aa, Artificial Sequence
  Non-cyclic GFR-binding peptide
  MOD_RES (6), (7), (41), (43): Xaa is C or S
  MOD_RES (21), (22), (23), (24), (25): Xaa is A or G
  MOD_RES (26), (27), (28), (29): Xaa is A or G or is absent
HVPKPXXAPTKLSPISVLYIXXXXXXXXXYKQYENMVVRSXGXH

SEQ ID NO: 22736 - protein, 37 aa, Artificial Sequence
  Non-cyclic GFR-binding peptide
  MOD_RES (2), (3), (35), (37): Xaa is C or S
PXXTPTKMSPISMLYINDKQQIIYKQYEGMVVDRXGX

SEQ ID NO: 22737 - protein, 36 aa, Artificial Sequence
  Non-cyclic GFR-binding peptide
  MOD_RES (2), (3): Xaa is C or S
  MOD_RES (17), (18), (19), (20), (21): Xaa is A or G
  MOD_RES (22), (23), (24), (25): Xaa is A or G or is absent
PXXTPTKMSPISMLYIXXXXXXXXXYKQYEGMVVDR

SEQ ID NO: 22738 - protein, 39 aa, Artificial Sequence
  Non-cyclic GFR-binding peptide
  MOD_RES (3), (4), (36), (38): Xaa is C or S
GPXXTPTKMSPISMLYINDKQQIIYKQYEGMVVDRXGXS

SEQ ID NO: 22739 - protein, 39 aa, Artificial Sequence
  Non-cyclic GFR-binding peptide
  MOD_RES (6), (7): Xaa is C or S
  MOD_RES (21), (22), (23), (24), (25): Xaa is A or G
  MOD_RES (26), (27), (28), (29): Xaa is A or G or is absent
RVPSTXXAPVKTSPISMLYIXXXXXXXXXYKQYEMIVEE

SEQ ID NO: 22740 - protein, 39 aa, Artificial Sequence
  Non-cyclic GFR-binding peptide
  MOD_RES (6), (7), (39): Xaa is C or S
HVPKPXXAPTKLSPISVLYIDDSSNVIYKQYENMVVRSX

SEQ ID NO: 22741 - protein, 40 aa, Artificial Sequence
  Non-cyclic GFR-binding peptide
  MOD_RES (5), (6), (39): Xaa is C or S
  MOD_RES (20), (21), (22), (23), (24): Xaa is A or G
  MOD_RES (25), (26), (27), (28): Xaa is A or G or is absent
VPSTXXAPVKTSPISMLYIXXXXXXXXXYKQYEMIVEEXG

SEQ ID NO: 22742 - protein, 34 aa, Artificial Sequence
  Non-cyclic GFR-binding peptide
  MOD_RES (1), (1): Xaa is C or S
  MOD_RES (15), (16), (17), (18), (19): Xaa is A or G
  MOD_RES (20), (21), (22), (23): Xaa is A or G or is absent
XTPTKMSPISMLYIXXXXXXXXXYKQYEGMVVDR

SEQ ID NO: 22743 - protein, 33 aa, Artificial Sequence
  Non-cyclic GFR-binding peptide
  MOD_RES (32), (32): Xaa is C or S
TPTKMSPISMLYINDKQQIIYKQYEGMVVDRXG

SEQ ID NO: 22744 - protein, 36 aa, Artificial Sequence
  Non-cyclic GFR-binding peptide
  MOD_RES (1), (33), (35): Xaa is C or S
XTPTKMSPISMLYINDKQQIIYKQYEGMVVDRXGXS

SEQ ID NO: 22745 - protein, 39 aa, Artificial Sequence
  Non-cyclic GFR-binding peptide
  MOD_RES (4), (5), (36), (38): Xaa is C or S
PSTXXAPVKTSPISMLYIDNGRVLLYKQYEMIVEEXGXL

SEQ ID NO: 22746 - protein, 41 aa, Artificial Sequence
  Non-cyclic GFR-binding peptide
  MOD_RES (4), (5), (39), (41): Xaa is C or S
  MOD_RES (19), (20), (21), (22), (23): Xaa is A or G
  MOD_RES (24), (25), (26), (27): Xaa is A or G or is absent
AGPXXTPTKMSPISMLYIXXXXXXXXXYKQYEGMVVDRXGX

SEQ ID NO: 22747 - protein, 40 aa, Artificial Sequence
  Non-cyclic GFR-binding peptide
  MOD_RES (3), (4), (38), (40): Xaa is C or S
  MOD_RES (18), (19), (20), (21), (22): Xaa is A or G
  MOD_RES (23), (24), (25), (26): Xaa is A or G or is absent
GPXXTPTKMSPISMLYIXXXXXXXXXYKQYEGMVVDRXGX

SEQ ID NO: 22748 - protein, 39 aa, Artificial Sequence
  Non-cyclic GFR-binding peptide
  MOD_RES (3), (4), (37), (39): Xaa is C or S
  MOD_RES (18), (19), (20), (21), (22): Xaa is A or G
  MOD_RES (23), (24), (25), (26): Xaa is A or G or is absent
STXXAPVKTSPISMLYIXXXXXXXXXYKQYEMIVEEXGX

SEQ ID NO: 22749 - protein, 31 aa, Artificial Sequence
  Non-cyclic GFR-binding peptide
  MOD_RES (1), (1): Xaa is C or S
XAPVKTSPISMLYIDNGRVLLYKQYEMIVEE

SEQ ID NO: 22750 - protein, 37 aa, Artificial Sequence
  Non-cyclic GFR-binding peptide
  MOD_RES (34), (36): Xaa is C or S
  MOD_RES (14), (15), (16), (17), (18): Xaa is A or G
  MOD_RES (19), (20), (21), (22): Xaa is A or G or is absent
TPTKMSPISMLYIXXXXXXXXXYKQYEGMVVDRXGXS

SEQ ID NO: 22751 - protein, 38 aa, Artificial Sequence
  Non-cyclic GFR-binding peptide
  MOD_RES (3), (4), (35), (37): Xaa is C or S
STXXAPVKTSPISMLYIDNGRVLLYKQYEMIVEEXGXL

SEQ ID NO: 22752 - protein, 39 aa, Artificial Sequence
  Non-cyclic GFR-binding peptide
  MOD_RES (4), (5), (37), (39): Xaa is C or S
AGPXXTPTKMSPISMLYINDKQQIIYKQYEGMVVDRXGX

SEQ ID NO: 22753 - protein, 36 aa, Artificial Sequence
  Non-cyclic GFR-binding peptide
  MOD_RES (33), (35): Xaa is C or S
  MOD_RES (14), (15), (16), (17), (18): Xaa is A or G
  MOD_RES (19), (20), (21), (22): Xaa is A or G or is absent
APVKTSPISMLYIXXXXXXXXXYKQYEMIVEEXGXL

SEQ ID NO: 22754 - protein, 37 aa, Artificial Sequence
  Non-cyclic GFR-binding peptide
  MOD_RES (6), (7): Xaa is C or S
RVPSTXXAPVKTSPISMLYIDNGRVLLYKQYEMIVEE

SEQ ID NO: 22755 - protein, 41 aa, Artificial Sequence
  Non-cyclic GFR-binding peptide
  MOD_RES (6), (7), (38), (40): Xaa is C or S
RVPSTXXAPVKTSPISMLYIDNGRVLLYKQYEMIVEEXGXL

SEQ ID NO: 22756 - protein, 32 aa, Artificial Sequence
  Non-cyclic GFR-binding peptide
  MOD_RES (1), (2): Xaa is C or S
XXTPTKMSPISMLYINDKQQIIYKQYEGMVVD

SEQ ID NO: 22757 - protein, 34 aa, Artificial Sequence
  Non-cyclic GFR-binding peptide
  MOD_RES (3), (4): Xaa is C or S
STXXAPVKTSPISMLYIDNGRVLLYKQYEMIVEE

SEQ ID NO: 22758 - protein, 39 aa, Artificial Sequence
  Non-cyclic GFR-binding peptide
  MOD_RES (6), (7): Xaa is C or S
  MOD_RES (21), (22), (23), (24), (25): Xaa is A or G
  MOD_RES (26), (27), (28), (29): Xaa is A or G or is absent
HVPKPXXAPTKLSPISVLYIXXXXXXXXXYKQYENMVVR

SEQ ID NO: 22759 - protein, 36 aa, Artificial Sequence
  Non-cyclic GFR-binding peptide
  MOD_RES (5), (6): Xaa is C or S
VPSTXXAPVKTSPISMLYIDNGRVLLYKQYEMIVEE

SEQ ID NO: 22760 - protein, 30 aa, Artificial Sequence
  Non-cyclic GFR-binding peptide
APVKTSPISMLYIDNGRVLLYKQYEMIVEE

SEQ ID NO: 22761 - protein, 43 aa, Artificial Sequence
  Non-cyclic GFR-binding peptide
  MOD_RES (6), (7), (41), (43): Xaa is C or S
  MOD_RES (21), (22), (23), (24), (25): Xaa is A or G
  MOD_RES (26), (27), (28), (29): Xaa is A or G or is absent
GSAGPXXTPTKMSPISMLYIXXXXXXXXXYKQYEGMVVDRXGX

SEQ ID NO: 22762 - protein, 37 aa, Artificial Sequence
  Non-cyclic GFR-binding peptide
  MOD_RES (4), (5): Xaa is C or S
  MOD_RES (19), (20), (21), (22), (23): Xaa is A or G
  MOD_RES (24), (25), (26), (27): Xaa is A or G or is absent
PSTXXAPVKTSPISMLYIXXXXXXXXXYKQYEMIVEE

SEQ ID NO: 22763 - protein, 35 aa, Artificial Sequence
  Non-cyclic GFR-binding peptide
  MOD_RES (2), (3), (35): Xaa is C or S
PXXTPTKMSPISMLYINDKQQIIYKQYEGMVVDRX

SEQ ID NO: 22764 - protein, 37 aa, Artificial Sequence
  Non-cyclic GFR-binding peptide
  MOD_RES (4), (5), (36): Xaa is C or S
PSTXXAPVKTSPISMLYIDNGRVLLYKQYEMIVEEXG

SEQ ID NO: 22765 - protein, 36 aa, Artificial Sequence
  Non-cyclic GFR-binding peptide
  MOD_RES (1), (2), (35): Xaa is C or S
  MOD_RES (16), (17), (18), (19), (20): Xaa is A or G
  MOD_RES (21), (22), (23), (24): Xaa is A or G or is absent
XXAPVKTSPISMLYIXXXXXXXXXYKQYEMIVEEXG

SEQ ID NO: 22766 - protein, 35 aa, Artificial Sequence
  Non-cyclic GFR-binding peptide
  MOD_RES (1), (32), (34): Xaa is C or S
XAPVKTSPISMLYIDNGRVLLYKQYEMIVEEXGXL

SEQ ID NO: 22767 - protein, 35 aa, Artificial Sequence
  Non-cyclic GFR-binding peptide
  MOD_RES (32), (34): Xaa is C or S
TPTKMSPISMLYINDKQQIIYKQYEGMVVDRXGXS

SEQ ID NO: 22768 - protein, 40 aa, Artificial Sequence
  Non-cyclic GFR-binding peptide
  MOD_RES (6), (7), (38), (40): Xaa is C or S
RVPSTXXAPVKTSPISMLYIDNGRVLLYKQYEMIVEEXGX

SEQ ID NO: 22769 - protein, 36 aa, Artificial Sequence
  Non-cyclic GFR-binding peptide
  MOD_RES (1), (35): Xaa is C or S
  MOD_RES (15), (16), (17), (18), (19): Xaa is A or G
  MOD_RES (20), (21), (22), (23): Xaa is A or G or is absent
XTPTKMSPISMLYIXXXXXXXXXYKQYEGMVVDRXG

SEQ ID NO: 22770 - protein, 39 aa, Artificial Sequence
  Non-cyclic GFR-binding peptide
  MOD_RES (4), (5), (38): Xaa is C or S
  MOD_RES (19), (20), (21), (22), (23): Xaa is A or G
  MOD_RES (24), (25), (26), (27): Xaa is A or G or is absent
PSTXXAPVKTSPISMLYIXXXXXXXXXYKQYEMIVEEXG

SEQ ID NO: 22771 - protein, 42 aa, Artificial Sequence
  Non-cyclic GFR-binding peptide
  MOD_RES (6), (7), (41): Xaa is C or S
  MOD_RES (21), (22), (23), (24), (25): Xaa is A or G
  MOD_RES (26), (27), (28), (29): Xaa is A or G or is absent
GSAGPXXTPTKMSPISMLYIXXXXXXXXXYKQYEGMVVDRXG

SEQ ID NO: 22772 - protein, 37 aa, Artificial Sequence
  Non-cyclic GFR-binding peptide
  MOD_RES (4), (5): Xaa is C or S
  MOD_RES (19), (20), (21), (22), (23): Xaa is A or G
  MOD_RES (24), (25), (26), (27): Xaa is A or G or is absent
AGPXXTPTKMSPISMLYIXXXXXXXXXYKQYEGMVVD

SEQ ID NO: 22773 - protein, 39 aa, Artificial Sequence
  Non-cyclic GFR-binding peptide
  MOD_RES (4), (5), (39): Xaa is C or S
  MOD_RES (19), (20), (21), (22), (23): Xaa is A or G
  MOD_RES (24), (25), (26), (27): Xaa is A or G or is absent
AGPXXTPTKMSPISMLYIXXXXXXXXXYKQYEGMVVDRX

SEQ ID NO: 22774 - protein, 42 aa, Artificial Sequence
  Non-cyclic GFR-binding peptide
  MOD_RES (5), (6), (40), (42): Xaa is C or S
  MOD_RES (20), (21), (22), (23), (24): Xaa is A or G
  MOD_RES (25), (26), (27), (28): Xaa is A or G or is absent
SAGPXXTPTKMSPISMLYIXXXXXXXXXYKQYEGMVVDRXGX

SEQ ID NO: 22775 - protein, 40 aa, Artificial Sequence
  Non-cyclic GFR-binding peptide
  MOD_RES (5), (6), (38), (40): Xaa is C or S
SAGPXXTPTKMSPISMLYINDKQQIIYKQYEGMVVDRXGX

SEQ ID NO: 22776 - protein, 33 aa, Artificial Sequence
  Non-cyclic GFR-binding peptide
  MOD_RES (1), (1): Xaa is C or S
  MOD_RES (15), (16), (17), (18), (19): Xaa is A or G
  MOD_RES (20), (21), (22), (23): Xaa is A or G or is absent
XAPVKTSPISMLYIXXXXXXXXXYKQYEMIVEE

SEQ ID NO: 22777 - protein, 41 aa, Artificial Sequence
  Non-cyclic GFR-binding peptide
  MOD_RES (5), (6), (39), (41): Xaa is C or S
  MOD_RES (20), (21), (22), (23), (24): Xaa is A or G
  MOD_RES (25), (26), (27), (28): Xaa is A or G or is absent
VPSTXXAPVKTSPISMLYIXXXXXXXXXYKQYEMIVEEXGX

SEQ ID NO: 22778 - protein, 37 aa, Artificial Sequence
  Non-cyclic GFR-binding peptide
  MOD_RES (6), (7): Xaa is C or S
GSAGPXXTPTKMSPISMLYINDKQQIIYKQYEGMVVD

SEQ ID NO: 22779 - protein, 39 aa, Artificial Sequence
  Non-cyclic GFR-binding peptide
  MOD_RES (5), (6), (37), (39): Xaa is C or S
VPSTXXAPVKTSPISMLYIDNGRVLLYKQYEMIVEEXGX

SEQ ID NO: 22780 - protein, 35 aa, Artificial Sequence
  Non-cyclic GFR-binding peptide
  MOD_RES (1), (2), (35): Xaa is C or S
  MOD_RES (16), (17), (18), (19), (20): Xaa is A or G
  MOD_RES (21), (22), (23), (24): Xaa is A or G or is absent
XXAPVKTSPISMLYIXXXXXXXXXYKQYEMIVEEX

SEQ ID NO: 22781 - protein, 35 aa, Artificial Sequence
  Non-cyclic GFR-binding peptide
  MOD_RES (1), (34): Xaa is C or S
  MOD_RES (15), (16), (17), (18), (19): Xaa is A or G
  MOD_RES (20), (21), (22), (23): Xaa is A or G or is absent
XAPVKTSPISMLYIXXXXXXXXXYKQYEMIVEEXG

SEQ ID NO: 22782 - protein, 38 aa, Artificial Sequence
  Non-cyclic GFR-binding peptide
  MOD_RES (6), (7): Xaa is C or S
HVPKPXXAPTKLSPISVLYIDDSSNVIYKQYENMVVRS

SEQ ID NO: 22783 - protein, 40 aa, Artificial Sequence
  Non-cyclic GFR-binding peptide
  MOD_RES (6), (7), (39): Xaa is C or S
GSAGPXXTPTKMSPISMLYINDKQQIIYKQYEGMVVDRXG

SEQ ID NO: 22784 - protein, 34 aa, Artificial Sequence
  Non-cyclic GFR-binding peptide
  MOD_RES (1), (32), (34): Xaa is C or S
XAPVKTSPISMLYIDNGRVLLYKQYEMIVEEXGX

SEQ ID NO: 22785 - protein, 39 aa, Artificial Sequence
  Non-cyclic GFR-binding peptide
  MOD_RES (6), (7), (38): Xaa is C or S
RVPSTXXAPVKTSPISMLYIDNGRVLLYKQYEMIVEEXG

SEQ ID NO: 22786 - protein, 36 aa, Artificial Sequence
  Non-cyclic GFR-binding peptide
  MOD_RES (1), (2), (34), (36): Xaa is C or S
XXTPTKMSPISMLYINDKQQIIYKQYEGMVVDRXGX

SEQ ID NO: 22787 - protein, 41 aa, Artificial Sequence
  Non-cyclic GFR-binding peptide
  MOD_RES (6), (7), (39), (41): Xaa is C or S
HVPKPXXAPTKLSPISVLYIDDSSNVIYKQYENMVVRSXGX

SEQ ID NO: 22788 - protein, 42 aa, Artificial Sequence
  Non-cyclic GFR-binding peptide
  MOD_RES (6), (7), (39), (41): Xaa is C or S
STPPTXXVPTRLSPISILYIDSANNVVYKQYEDMVVESXGXR

SEQ ID NO: 22789 - protein, 32 aa, Artificial Sequence
  Non-cyclic GFR-binding peptide
  MOD_RES (14), (15), (16), (17), (18): Xaa is A or G
  MOD_RES (19), (20), (21), (22): Xaa is A or G or is absent
APVKTSPISMLYIXXXXXXXXXYKQYEMIVEE

SEQ ID NO: 22790 - protein, 33 aa, Artificial Sequence
  Non-cyclic GFR-binding peptide
  MOD_RES (14), (15), (16), (17), (18): Xaa is A or G
  MOD_RES (19), (20), (21), (22): Xaa is A or G or is absent
TPTKMSPISMLYIXXXXXXXXXYKQYEGMVVDR

SEQ ID NO: 22791 - protein, 35 aa, Artificial Sequence
  Non-cyclic GFR-binding peptide
  MOD_RES (3), (4), (35): Xaa is C or S
STXXAPVKTSPISMLYIDNGRVLLYKQYEMIVEEX

SEQ ID NO: 22792 - protein, 38 aa, Artificial Sequence
  Non-cyclic GFR-binding peptide
  MOD_RES (5), (6): Xaa is C or S
  MOD_RES (20), (21), (22), (23), (24): Xaa is A or G
  MOD_RES (25), (26), (27), (28): Xaa is A or G or is absent
VPSTXXAPVKTSPISMLYIXXXXXXXXXYKQYEMIVEE

SEQ ID NO: 22793 - protein, 41 aa, Artificial Sequence
  Non-cyclic GFR-binding peptide
  MOD_RES (3), (4), (38), (40): Xaa is C or S
  MOD_RES (18), (19), (20), (21), (22): Xaa is A or G
  MOD_RES (23), (24), (25), (26): Xaa is A or G or is absent
GPXXTPTKMSPISMLYIXXXXXXXXXYKQYEGMVVDRXGXS

SEQ ID NO: 22794 - protein, 35 aa, Artificial Sequence
  Non-cyclic GFR-binding peptide
  MOD_RES (2), (3): Xaa is C or S
  MOD_RES (17), (18), (19), (20), (21): Xaa is A or G
  MOD_RES (22), (23), (24), (25): Xaa is A or G or is absent
PXXTPTKMSPISMLYIXXXXXXXXXYKQYEGMVVD

SEQ ID NO: 22795 - protein, 31 aa, Artificial Sequence
  Non-cyclic GFR-binding peptide
  MOD_RES (31), (31): Xaa is C or S
APVKTSPISMLYIDNGRVLLYKQYEMIVEEX

SEQ ID NO: 22796 - protein, 33 aa, Artificial Sequence
  Non-cyclic GFR-binding peptide
  MOD_RES (33), (33): Xaa is C or S
  MOD_RES (14), (15), (16), (17), (18): Xaa is A or G
  MOD_RES (19), (20), (21), (22): Xaa is A or G or is absent
APVKTSPISMLYIXXXXXXXXXYKQYEMIVEEX

SEQ ID NO: 22797 - protein, 37 aa, Artificial Sequence
  Non-cyclic GFR-binding peptide
  MOD_RES (3), (4): Xaa is C or S
  MOD_RES (18), (19), (20), (21), (22): Xaa is A or G
  MOD_RES (23), (24), (25), (26): Xaa is A or G or is absent
GPXXTPTKMSPISMLYIXXXXXXXXXYKQYEGMVVDR

SEQ ID NO: 22798 - protein, 40 aa, Artificial Sequence
  Non-cyclic GFR-binding peptide
  MOD_RES (2), (3), (37), (39): Xaa is C or S
  MOD_RES (17), (18), (19), (20), (21): Xaa is A or G
  MOD_RES (22), (23), (24), (25): Xaa is A or G or is absent
PXXTPTKMSPISMLYIXXXXXXXXXYKQYEGMVVDRXGXS

SEQ ID NO: 22799 - protein, 41 aa, Artificial Sequence
  Non-cyclic GFR-binding peptide
  MOD_RES (6), (7), (40): Xaa is C or S
  MOD_RES (21), (22), (23), (24), (25): Xaa is A or G
  MOD_RES (26), (27), (28), (29): Xaa is A or G or is absent
RVPSTXXAPVKTSPISMLYIXXXXXXXXXYKQYEMIVEEXG

SEQ ID NO: 22800 - protein, 37 aa, Artificial Sequence
  Non-cyclic GFR-binding peptide
  MOD_RES (3), (4), (37): Xaa is C or S
  MOD_RES (18), (19), (20), (21), (22): Xaa is A or G
  MOD_RES (23), (24), (25), (26): Xaa is A or G or is absent
STXXAPVKTSPISMLYIXXXXXXXXXYKQYEMIVEEX

SEQ ID NO: 22801 - protein, 38 aa, Artificial Sequence
  Non-cyclic GFR-binding peptide
  MOD_RES (5), (6), (38): Xaa is C or S
SAGPXXTPTKMSPISMLYINDKQQIIYKQYEGMVVDRX

SEQ ID NO: 22802 - protein, 41 aa, Artificial Sequence
  Non-cyclic GFR-binding peptide
  MOD_RES (4), (5), (38), (40): Xaa is C or S
  MOD_RES (19), (20), (21), (22), (23): Xaa is A or G
  MOD_RES (24), (25), (26), (27): Xaa is A or G or is absent
PSTXXAPVKTSPISMLYIXXXXXXXXXYKQYEMIVEEXGXL

SEQ ID NO: 22803 - protein, 38 aa, Artificial Sequence
  Non-cyclic GFR-binding peptide
  MOD_RES (4), (5), (37): Xaa is C or S
AGPXXTPTKMSPISMLYINDKQQIIYKQYEGMVVDRXG

SEQ ID NO: 22804 - protein, 37 aa, Artificial Sequence
  Non-cyclic GFR-binding peptide
  MOD_RES (1), (2), (34), (36): Xaa is C or S
XXTPTKMSPISMLYINDKQQIIYKQYEGMVVDRXGXS

SEQ ID NO: 22805 - protein, 35 aa, Artificial Sequence
  Non-cyclic GFR-binding peptide
  MOD_RES (1), (35): Xaa is C or S
  MOD_RES (15), (16), (17), (18), (19): Xaa is A or G
  MOD_RES (20), (21), (22), (23): Xaa is A or G or is absent
XTPTKMSPISMLYIXXXXXXXXXYKQYEGMVVDRX

SEQ ID NO: 22806 - protein, 39 aa, Artificial Sequence
  Non-cyclic GFR-binding peptide
  MOD_RES (5), (6), (39): Xaa is C or S
  MOD_RES (20), (21), (22), (23), (24): Xaa is A or G
  MOD_RES (25), (26), (27), (28): Xaa is A or G or is absent
VPSTXXAPVKTSPISMLYIXXXXXXXXXYKQYEMIVEEX

SEQ ID NO: 22807 - protein, 37 aa, Artificial Sequence
  Non-cyclic GFR-binding peptide
  MOD_RES (6), (7): Xaa is C or S
HVPKPXXAPTKLSPISVLYIDDSSNVIYKQYENMVVR

SEQ ID NO: 22808 - protein, 40 aa, Artificial Sequence
  Non-cyclic GFR-binding peptide
  MOD_RES (3), (4), (37), (39): Xaa is C or S
  MOD_RES (18), (19), (20), (21), (22): Xaa is A or G
  MOD_RES (23), (24), (25), (26): Xaa is A or G or is absent
STXXAPVKTSPISMLYIXXXXXXXXXYKQYEMIVEEXGXL

SEQ ID NO: 22809 - protein, 35 aa, Artificial Sequence
  Non-cyclic GFR-binding peptide
  MOD_RES (2), (3): Xaa is C or S
  MOD_RES (17), (18), (19), (20), (21): Xaa is A or G
  MOD_RES (22), (23), (24), (25): Xaa is A or G or is absent
TXXAPVKTSPISMLYIXXXXXXXXXYKQYEMIVEE

SEQ ID NO: 22810 - protein, 40 aa, Artificial Sequence
  Non-cyclic GFR-binding peptide
  MOD_RES (6), (7): Xaa is C or S
  MOD_RES (21), (22), (23), (24), (25): Xaa is A or G
  MOD_RES (26), (27), (28), (29): Xaa is A or G or is absent
HVPKPXXAPTKLSPISVLYIXXXXXXXXXYKQYENMVVRS

SEQ ID NO: 22811 - protein, 41 aa, Artificial Sequence
  Non-cyclic GFR-binding peptide
  MOD_RES (5), (6), (40): Xaa is C or S
  MOD_RES (20), (21), (22), (23), (24): Xaa is A or G
  MOD_RES (25), (26), (27), (28): Xaa is A or G or is absent
SAGPXXTPTKMSPISMLYIXXXXXXXXXYKQYEGMVVDRXG

SEQ ID NO: 22812 - protein, 39 aa, Artificial Sequence
  Non-cyclic GFR-binding peptide
  MOD_RES (6), (7), (39): Xaa is C or S
GSAGPXXTPTKMSPISMLYINDKQQIIYKQYEGMVVDRX

SEQ ID NO: 22813 - protein, 40 aa, Artificial Sequence
  Non-cyclic GFR-binding peptide
  MOD_RES (6), (7): Xaa is C or S
  MOD_RES (21), (22), (23), (24), (25): Xaa is A or G
  MOD_RES (26), (27), (28), (29): Xaa is A or G or is absent
GSAGPXXTPTKMSPISMLYIXXXXXXXXXYKQYEGMVVDR

SEQ ID NO: 22814 - protein, 32 aa, Artificial Sequence
  Non-cyclic GFR-binding peptide
  MOD_RES (1), (1): Xaa is C or S
XTPTKMSPISMLYINDKQQIIYKQYEGMVVDR

SEQ ID NO: 22815 - protein, 43 aa, Artificial Sequence
  Non-cyclic GFR-binding peptide
  MOD_RES (6), (7), (41), (43): Xaa is C or S
  MOD_RES (21), (22), (23), (24), (25): Xaa is A or G
  MOD_RES (26), (27), (28), (29): Xaa is A or G or is absent
HVPKPXXAPTKLSPISVLYIXXXXXXXXXYKQYENMVVRSXGX

SEQ ID NO: 22816 - protein, 38 aa, Artificial Sequence
  Non-cyclic GFR-binding peptide
  MOD_RES (2), (3), (37): Xaa is C or S
  MOD_RES (17), (18), (19), (20), (21): Xaa is A or G
  MOD_RES (22), (23), (24), (25): Xaa is A or G or is absent
PXXTPTKMSPISMLYIXXXXXXXXXYKQYEGMVVDRXG

SEQ ID NO: 22817 - protein, 33 aa, Artificial Sequence
  Non-cyclic GFR-binding peptide
  MOD_RES (1), (32): Xaa is C or S
XAPVKTSPISMLYIDNGRVLLYKQYEMIVEEXG

SEQ ID NO: 22818 - protein, 34 aa, Artificial Sequence
  Non-cyclic GFR-binding peptide
  MOD_RES (34), (34): Xaa is C or S
  MOD_RES (14), (15), (16), (17), (18): Xaa is A or G
  MOD_RES (19), (20), (21), (22): Xaa is A or G or is absent
TPTKMSPISMLYIXXXXXXXXXYKQYEGMVVDRX

SEQ ID NO: 22819 - protein, 38 aa, Artificial Sequence
  Non-cyclic GFR-binding peptide
  MOD_RES (1), (2), (36), (38): Xaa is C or S
  MOD_RES (16), (17), (18), (19), (20): Xaa is A or G
  MOD_RES (21), (22), (23), (24): Xaa is A or G or is absent
XXTPTKMSPISMLYIXXXXXXXXXYKQYEGMVVDRXGX

SEQ ID NO: 22820 - protein, 38 aa, Artificial Sequence
  Non-cyclic GFR-binding peptide
  MOD_RES (6), (7): Xaa is C or S
GSAGPXXTPTKMSPISMLYINDKQQIIYKQYEGMVVDR

SEQ ID NO: 22821 - protein, 35 aa, Artificial Sequence
  Non-cyclic GFR-binding peptide
  MOD_RES (34), (34): Xaa is C or S
  MOD_RES (14), (15), (16), (17), (18): Xaa is A or G
  MOD_RES (19), (20), (21), (22): Xaa is A or G or is absent
TPTKMSPISMLYIXXXXXXXXXYKQYEGMVVDRXG

SEQ ID NO: 22822 - protein, 43 aa, Artificial Sequence
  Non-cyclic GFR-binding peptide
  MOD_RES (5), (6), (40), (42): Xaa is C or S
  MOD_RES (20), (21), (22), (23), (24): Xaa is A or G
  MOD_RES (25), (26), (27), (28): Xaa is A or G or is absent
SAGPXXTPTKMSPISMLYIXXXXXXXXXYKQYEGMVVDRXGXS

SEQ ID NO: 22823 - protein, 35 aa, Artificial Sequence
  Non-cyclic GFR-binding peptide
  MOD_RES (3), (4): Xaa is C or S
GPXXTPTKMSPISMLYINDKQQIIYKQYEGMVVDR

SEQ ID NO: 22824 - protein, 38 aa, Artificial Sequence
  Non-cyclic GFR-binding peptide
  MOD_RES (2), (3), (35), (37): Xaa is C or S
PXXTPTKMSPISMLYINDKQQIIYKQYEGMVVDRXGXS

SEQ ID NO: 22825 - protein, 35 aa, Artificial Sequence
  Non-cyclic GFR-binding peptide
  MOD_RES (1), (2): Xaa is C or S
  MOD_RES (16), (17), (18), (19), (20): Xaa is A or G
  MOD_RES (21), (22), (23), (24): Xaa is A or G or is absent
XXTPTKMSPISMLYIXXXXXXXXXYKQYEGMVVDR

SEQ ID NO: 22826 - protein, 34 aa, Artificial Sequence
  Non-cyclic GFR-binding peptide
  MOD_RES (1), (2), (33): Xaa is C or S
XXAPVKTSPISMLYIDNGRVLLYKQYEMIVEEXG

SEQ ID NO: 22827 - protein, 39 aa, Artificial Sequence
  Non-cyclic GFR-binding peptide
  MOD_RES (3), (4), (38): Xaa is C or S
  MOD_RES (18), (19), (20), (21), (22): Xaa is A or G
  MOD_RES (23), (24), (25), (26): Xaa is A or G or is absent
GPXXTPTKMSPISMLYIXXXXXXXXXYKQYEGMVVDRXG

SEQ ID NO: 22828 - protein, 38 aa, Artificial Sequence
  Non-cyclic GFR-binding peptide
  MOD_RES (3), (4), (37): Xaa is C or S
  MOD_RES (18), (19), (20), (21), (22): Xaa is A or G
  MOD_RES (23), (24), (25), (26): Xaa is A or G or is absent
STXXAPVKTSPISMLYIXXXXXXXXXYKQYEMIVEEXG

SEQ ID NO: 22829 - protein, 38 aa, Artificial Sequence
  Non-cyclic GFR-binding peptide
  MOD_RES (6), (7), (38): Xaa is C or S
RVPSTXXAPVKTSPISMLYIDNGRVLLYKQYEMIVEEX

SEQ ID NO: 22830 - protein, 36 aa, Artificial Sequence
  Non-cyclic GFR-binding peptide
  MOD_RES (34), (36): Xaa is C or S
  MOD_RES (14), (15), (16), (17), (18): Xaa is A or G
  MOD_RES (19), (20), (21), (22): Xaa is A or G or is absent
TPTKMSPISMLYIXXXXXXXXXYKQYEGMVVDRXGX

SEQ ID NO: 22831 - protein, 36 aa, Artificial Sequence
  Non-cyclic GFR-binding peptide
  MOD_RES (3), (4): Xaa is C or S
  MOD_RES (18), (19), (20), (21), (22): Xaa is A or G
  MOD_RES (23), (24), (25), (26): Xaa is A or G or is absent
GPXXTPTKMSPISMLYIXXXXXXXXXYKQYEGMVVD

SEQ ID NO: 22832 - protein, 42 aa, Artificial Sequence
  Non-cyclic GFR-binding peptide
  MOD_RES (6), (7), (39), (41): Xaa is C or S
HVPKPXXAPTKLSPISVLYIDDSSNVIYKQYENMVVRSXGXH

SEQ ID NO: 22833 - protein, 39 aa, Artificial Sequence
  Non-cyclic GFR-binding peptide
  MOD_RES (2), (3), (37), (39): Xaa is C or S
  MOD_RES (17), (18), (19), (20), (21): Xaa is A or G
  MOD_RES (22), (23), (24), (25): Xaa is A or G or is absent
PXXTPTKMSPISMLYIXXXXXXXXXYKQYEGMVVDRXGX

SEQ ID NO: 22834 - protein, 34 aa, Artificial Sequence
  Non-cyclic GFR-binding peptide
  MOD_RES (1), (2), (34): Xaa is C or S
XXTPTKMSPISMLYINDKQQIIYKQYEGMVVDRX

SEQ ID NO: 22835 - protein, 42 aa, Artificial Sequence
  Non-cyclic GFR-binding peptide
  MOD_RES (6), (7), (40), (42): Xaa is C or S
  MOD_RES (21), (22), (23), (24), (25): Xaa is A or G
  MOD_RES (26), (27), (28), (29): Xaa is A or G or is absent
RVPSTXXAPVKTSPISMLYIXXXXXXXXXYKQYEMIVEEXGX

SEQ ID NO: 22836 - protein, 36 aa, Artificial Sequence
  Non-cyclic GFR-binding peptide
  MOD_RES (3), (4), (35): Xaa is C or S
STXXAPVKTSPISMLYIDNGRVLLYKQYEMIVEEXG

SEQ ID NO: 22837 - protein, 38 aa, Artificial Sequence
  Non-cyclic GFR-binding peptide
  MOD_RES (3), (4), (38): Xaa is C or S
  MOD_RES (18), (19), (20), (21), (22): Xaa is A or G
  MOD_RES (23), (24), (25), (26): Xaa is A or G or is absent
GPXXTPTKMSPISMLYIXXXXXXXXXYKQYEGMVVDRX

SEQ ID NO: 22838 - protein, 38 aa, Artificial Sequence
  Non-cyclic GFR-binding peptide
  MOD_RES (5), (6): Xaa is C or S
  MOD_RES (20), (21), (22), (23), (24): Xaa is A or G
  MOD_RES (25), (26), (27), (28): Xaa is A or G or is absent
SAGPXXTPTKMSPISMLYIXXXXXXXXXYKQYEGMVVD

SEQ ID NO: 22839 - protein, 34 aa, Artificial Sequence
  Non-cyclic GFR-binding peptide
  MOD_RES (1), (2): Xaa is C or S
  MOD_RES (16), (17), (18), (19), (20): Xaa is A or G
  MOD_RES (21), (22), (23), (24): Xaa is A or G or is absent
XXAPVKTSPISMLYIXXXXXXXXXYKQYEMIVEE

SEQ ID NO: 22840 - protein, 37 aa, Artificial Sequence
  Non-cyclic GFR-binding peptide
  MOD_RES (5), (6): Xaa is C or S
SAGPXXTPTKMSPISMLYINDKQQIIYKQYEGMVVDR

SEQ ID NO: 22841 - protein, 40 aa, Artificial Sequence
  Non-cyclic GFR-binding peptide
  MOD_RES (1), (3), (36), (37): Xaa is C or S
XGXEAVSMGEPYVKLTPVGMDDFFLVSLSSLKTPVXXAKG

SEQ ID NO: 22842 - protein, 33 aa, Artificial Sequence
  Non-cyclic GFR-binding peptide
  MOD_RES (12), (13), (14), (15), (16): Xaa is A or G
  MOD_RES (17), (18), (19), (20): Xaa is A or G or is absent
GEVVMEPYVKLXXXXXXXXXFFLMSLSSLETPV

SEQ ID NO: 22843 - protein, 38 aa, Artificial Sequence
  Non-cyclic GFR-binding peptide
  MOD_RES (2), (4), (35), (36): Xaa is C or S
SXKXSKVVMPYVKLVKPTRGVFFLISLSSLDQPVXXPS

SEQ ID NO: 22844 - protein, 41 aa, Artificial Sequence
  Non-cyclic GFR-binding peptide
  MOD_RES (1), (3), (35), (36): Xaa is C or S
XGXSRVVMNPYVKLIVNSSDDFFLVSLSSLKTPAXXPKPVY

SEQ ID NO: 22845 - protein, 43 aa, Artificial Sequence
  Non-cyclic GFR-binding peptide
  MOD_RES (2), (4), (38), (39): Xaa is C or S
  MOD_RES (16), (17), (18), (19), (20): Xaa is A or G
  MOD_RES (21), (22), (23), (24): Xaa is A or G or is absent
RXGXAEVVMDPYVKLXXXXXXXXXFFLISLSSLRAPVXXSAPA

SEQ ID NO: 22846 - protein, 32 aa, Artificial Sequence
  Non-cyclic GFR-binding peptide
  MOD_RES (1), (1): Xaa is C or S
XAKVVMNPYVKLIVNNSSDFFLVSLSSLKTPA

SEQ ID NO: 22847 - protein, 37 aa, Artificial Sequence
  Non-cyclic GFR-binding peptide
  MOD_RES (1), (3), (34), (35): Xaa is C or S
XKXSKVVMPYVKLVKPTRGVFFLISLSSLDQPVXXPS

SEQ ID NO: 22848 - protein, 31 aa, Artificial Sequence
  Non-cyclic GFR-binding peptide
  MOD_RES (31), (31): Xaa is C or S
KVVMNPYVKLIVNNSSDFFLVSLSSLKTPAX

SEQ ID NO: 22849 - protein, 35 aa, Artificial Sequence
  Non-cyclic GFR-binding peptide
  MOD_RES (2), (2): Xaa is C or S
  MOD_RES (14), (15), (16), (17), (18): Xaa is A or G
  MOD_RES (19), (20), (21), (22): Xaa is A or G or is absent
GXRDVVMGPYVKLXXXXXXXXXFFLMSLSSMKTPT

SEQ ID NO: 22850 - protein, 40 aa, Artificial Sequence
  Non-cyclic GFR-binding peptide
  MOD_RES (1), (35): Xaa is C or S
  MOD_RES (13), (14), (15), (16), (17): Xaa is A or G
  MOD_RES (18), (19), (20), (21): Xaa is A or G or is absent
XKNHQLFPYVKLXXXXXXXXXFFLMSLSSEETPVXELGED

SEQ ID NO: 22851 - protein, 34 aa, Artificial Sequence
  Non-cyclic GFR-binding peptide
  MOD_RES (33), (34): Xaa is C or S
  MOD_RES (11), (12), (13), (14), (15): Xaa is A or G
  MOD_RES (16), (17), (18), (19): Xaa is A or G or is absent
SKVIMPYVKLXXXXXXXXXFFLISLSSLDQSVXX

SEQ ID NO: 22852 - protein, 32 aa, Artificial Sequence
  Non-cyclic GFR-binding peptide
  MOD_RES (1), (1): Xaa is C or S
XGEVVMEPYVKLVVKDYEDFFLMSLSSLETPV

SEQ ID NO: 22853 - protein, 34 aa, Artificial Sequence
  Non-cyclic GFR-binding peptide
  MOD_RES (1), (33), (34): Xaa is C or S
XAEVVMDPYVKLVVNNAADFFLISLSSLRAPVXX

SEQ ID NO: 22854 - protein, 40 aa, Artificial Sequence
  Non-cyclic GFR-binding peptide
  MOD_RES (2), (36): Xaa is C or S
  MOD_RES (14), (15), (16), (17), (18): Xaa is A or G
  MOD_RES (19), (20), (21), (22): Xaa is A or G or is absent
GXSRVVMNPYVKLXXXXXXXXXFFLVSLSSLKTPAXTPKT

SEQ ID NO: 22855 - protein, 33 aa, Artificial Sequence
  Non-cyclic GFR-binding peptide
  MOD_RES (2), (33): Xaa is C or S
KXSKVIMPYVKLIKPTKGIFFLISLSSLDQSVX

SEQ ID NO: 22856 - protein, 34 aa, Artificial Sequence
  Non-cyclic GFR-binding peptide
  MOD_RES (1), (1): Xaa is C or S
  MOD_RES (13), (14), (15), (16), (17): Xaa is A or G
  MOD_RES (18), (19), (20), (21): Xaa is A or G or is absent
XGEVVMEPYVKLXXXXXXXXXFFLMSLSSLETPV

SEQ ID NO: 22857 - protein, 41 aa, Artificial Sequence
  Non-cyclic GFR-binding peptide
  MOD_RES (2), (4), (37), (38): Xaa is C or S
RXGXEAVSMGEPYVKLTPVGMDDFFLVSLSSLKTPVXXAKG

SEQ ID NO: 22858 - protein, 36 aa, Artificial Sequence
  Non-cyclic GFR-binding peptide
  MOD_RES (1), (34), (35): Xaa is C or S
XEAVSMGEPYVKLTPVGMDDFFLVSLSSLKTPVXXA

SEQ ID NO: 22859 - protein, 40 aa, Artificial Sequence
  Non-cyclic GFR-binding peptide
  MOD_RES (2), (4): Xaa is C or S
AXAXELHEELRPYVKLLKPKKRVYEFFLVSLSSHHVRSPQ

SEQ ID NO: 22860 - protein, 41 aa, Artificial Sequence
  Non-cyclic GFR-binding peptide
  MOD_RES (1), (3), (36), (37): Xaa is C or S
  MOD_RES (14), (15), (16), (17), (18): Xaa is A or G
  MOD_RES (19), (20), (21), (22): Xaa is A or G or is absent
XKXSRVIMPYVKLXXXXXXXXXFFLISLSSLAQPVXXPAAS

SEQ ID NO: 22861 - protein, 36 aa, Artificial Sequence
  Non-cyclic GFR-binding peptide
  MOD_RES (2), (36): Xaa is C or S
EXKNHQLFPYVKLHQGQHPKIRFFLMSLSSEETPVX

SEQ ID NO: 22862 - protein, 38 aa, Artificial Sequence
  Non-cyclic GFR-binding peptide
  MOD_RES (1), (33): Xaa is C or S
XSRVVMNPYVKLIVNSSDDFFLVSLSSLKTPAXTPKTV

SEQ ID NO: 22863 - protein, 36 aa, Artificial Sequence
  Non-cyclic GFR-binding peptide
  MOD_RES (32), (33): Xaa is C or S
ARVVMNPYVKLIVNSSDDFFLVSLSSLQTPAXXPKP

SEQ ID NO: 22864 - protein, 39 aa, Artificial Sequence
  Non-cyclic GFR-binding peptide
  MOD_RES (1), (3), (37), (38): Xaa is C or S
  MOD_RES (15), (16), (17), (18), (19): Xaa is A or G
  MOD_RES (20), (21), (22), (23): Xaa is A or G or is absent
XGXAKVVMNPYVKLXXXXXXXXXFFLVSLSSLKTPAXXA

SEQ ID NO: 22865 - protein, 35 aa, Artificial Sequence
  Non-cyclic GFR-binding peptide
  MOD_RES (34), (35): Xaa is C or S
  MOD_RES (12), (13), (14), (15), (16): Xaa is A or G
  MOD_RES (17), (18), (19), (20): Xaa is A or G or is absent
AEVVMDPYVKLXXXXXXXXXFFLISLSSLRAPVXX

SEQ ID NO: 22866 - protein, 39 aa, Artificial Sequence
  Non-cyclic GFR-binding peptide
  MOD_RES (2), (4), (38), (39): Xaa is C or S
  MOD_RES (16), (17), (18), (19), (20): Xaa is A or G
  MOD_RES (21), (22), (23), (24): Xaa is A or G or is absent
HXGXARVVMNPYVKLXXXXXXXXXFFLVSLSSLQTPAXX

SEQ ID NO: 22867 - protein, 34 aa, Artificial Sequence
  Non-cyclic GFR-binding peptide
  MOD_RES (2), (2): Xaa is C or S
  MOD_RES (13), (14), (15), (16), (17): Xaa is A or G
  MOD_RES (18), (19), (20), (21): Xaa is A or G or is absent
KXSKVVMPYVKLXXXXXXXXXFFLISLSSLDQPV

SEQ ID NO: 22868 - protein, 41 aa, Artificial Sequence
  Non-cyclic GFR-binding peptide
  MOD_RES (2), (4), (36), (37): Xaa is C or S
HXGXAKVVMNPYVKLIVNNSSDFFLVSLSSLKTPAXXAKPV

SEQ ID NO: 22869 - protein, 39 aa, Artificial Sequence
  Non-cyclic GFR-binding peptide
  MOD_RES (1), (3), (37), (38): Xaa is C or S
  MOD_RES (15), (16), (17), (18), (19): Xaa is A or G
  MOD_RES (20), (21), (22), (23): Xaa is A or G or is absent
XGXRDVVMGPYVKLXXXXXXXXXFFLMSLSSMKTPTXXP

SEQ ID NO: 22870 - protein, 40 aa, Artificial Sequence
  Non-cyclic GFR-binding peptide
  MOD_RES (34), (35): Xaa is C or S
  MOD_RES (12), (13), (14), (15), (16): Xaa is A or G
  MOD_RES (17), (18), (19), (20): Xaa is A or G or is absent
SEVVMDPYVKLXXXXXXXXXFFLISLSSLRTPVXXTPPTS

SEQ ID NO: 22871 - protein, 39 aa, Artificial Sequence
  Non-cyclic GFR-binding peptide
  MOD_RES (1), (3), (34), (35): Xaa is C or S
XGXEEVIMPYVKLLLVRGNDFFLMSLSSTKVPAXXTSPV

SEQ ID NO: 22872 - protein, 33 aa, Artificial Sequence
  Non-cyclic GFR-binding peptide
  MOD_RES (1), (33): Xaa is C or S
XSEVVMDPYVKLVVNNASDFFLISLSSLRTPVX

SEQ ID NO: 22873 - protein, 33 aa, Artificial Sequence
  Non-cyclic GFR-binding peptide
  MOD_RES (31), (32): Xaa is C or S
EVVMDPYVKLVVNNAADFFLISLSSLRAPVXXS

SEQ ID NO: 22874 - protein, 40 aa, Artificial Sequence
  Non-cyclic GFR-binding peptide
  MOD_RES (2), (4), (36), (37): Xaa is C or S
HXGXARVVMNPYVKLIVNSSDDFFLVSLSSLQTPAXXPKP

SEQ ID NO: 22875 - protein, 44 aa, Artificial Sequence
  Non-cyclic GFR-binding peptide
  MOD_RES (2), (4), (38), (39): Xaa is C or S
  MOD_RES (16), (17), (18), (19), (20): Xaa is A or G
  MOD_RES (21), (22), (23), (24): Xaa is A or G or is absent
RXGXESVAMGPYVKLXXXXXXXXXFFLISLSSLKTPVXXAKSAK

SEQ ID NO: 22876 - protein, 40 aa, Artificial Sequence
  Non-cyclic GFR-binding peptide
  MOD_RES (1), (3), (34), (35): Xaa is C or S
XGXEEVIMPYVKLLLVRGNDFFLMSLSSTKVPAXXTSPVR

SEQ ID NO: 22877 - protein, 36 aa, Artificial Sequence
  Non-cyclic GFR-binding peptide
  MOD_RES (31), (32): Xaa is C or S
SVAMGPYVKLYTVVGKDFFLISLSSLKTPVXXAKSA

SEQ ID NO: 22878 - protein, 34 aa, Artificial Sequence
  Non-cyclic GFR-binding peptide
  MOD_RES (32), (33): Xaa is C or S
RDVVMGPYVKLIIQQKDNFFLMSLSSMKTPTXXP

SEQ ID NO: 22879 - protein, 37 aa, Artificial Sequence
  Non-cyclic GFR-binding peptide
  MOD_RES (1), (3), (37): Xaa is C or S
  MOD_RES (15), (16), (17), (18), (19): Xaa is A or G
  MOD_RES (20), (21), (22), (23): Xaa is A or G or is absent
XGXARVVMNPYVKLXXXXXXXXXFFLVSLSSLQTPAX

SEQ ID NO: 22880 - protein, 36 aa, Artificial Sequence
  Non-cyclic GFR-binding peptide
  MOD_RES (36), (36): Xaa is C or S
  MOD_RES (12), (13), (14), (15), (16): Xaa is A or G
  MOD_RES (17), (18), (19), (20): Xaa is A or G or is absent
LHEELRPYVKLXXXXXXXXXFFLVSLSSHHVRSPQX

SEQ ID NO: 22881 - protein, 38 aa, Artificial Sequence
  Non-cyclic GFR-binding peptide
  MOD_RES (2), (4), (38): Xaa is C or S
  MOD_RES (16), (17), (18), (19), (20): Xaa is A or G
  MOD_RES (21), (22), (23), (24): Xaa is A or G or is absent
HXGXAKVVMNPYVKLXXXXXXXXXFFLVSLSSLKTPAX

SEQ ID NO: 22882 - protein, 38 aa, Artificial Sequence
  Non-cyclic GFR-binding peptide
  MOD_RES (1), (3): Xaa is C or S
  MOD_RES (16), (17), (18), (19), (20): Xaa is A or G
  MOD_RES (21), (22), (23), (24): Xaa is A or G or is absent
XAXELHEELRPYVKLXXXXXXXXXFFLVSLSSHHVRSP

SEQ ID NO: 22883 - protein, 34 aa, Artificial Sequence
  Non-cyclic GFR-binding peptide
  MOD_RES (2), (34): Xaa is C or S
GXAEVVMDPYVKLVVNNAADFFLISLSSLRAPVX

SEQ ID NO: 22884 - protein, 39 aa, Artificial Sequence
  Non-cyclic GFR-binding peptide
  MOD_RES (1), (35), (36): Xaa is C or S
  MOD_RES (13), (14), (15), (16), (17): Xaa is A or G
  MOD_RES (18), (19), (20), (21): Xaa is A or G or is absent
XRDVVMGPYVKLXXXXXXXXXFFLMSLSSMKTPTXXPGA

SEQ ID NO: 22885 - protein, 34 aa, Artificial Sequence
  Non-cyclic GFR-binding peptide
  MOD_RES (31), (31): Xaa is C or S
RVVMNPYVKLIVNSSDDFFLVSLSSLKTPAXTPK

SEQ ID NO: 22886 - protein, 45 aa, Artificial Sequence
  Non-cyclic GFR-binding peptide
  MOD_RES (2), (4), (41): Xaa is C or S
  MOD_RES (17), (18), (19), (20), (21): Xaa is A or G
  MOD_RES (22), (23), (24), (25): Xaa is A or G or is absent
AXAXELHEELRPYVKLXXXXXXXXXFFLVSLSSHHVRSPQXKVSS

SEQ ID NO: 22887 - protein, 33 aa, Artificial Sequence
  Non-cyclic GFR-binding peptide
  MOD_RES (32), (33): Xaa is C or S
AEVVMDPYVKLVVNNAADFFLISLSSLRAPVXX

SEQ ID NO: 22888 - protein, 34 aa, Artificial Sequence
  Non-cyclic GFR-binding peptide
  MOD_RES (32), (32): Xaa is C or S
SRVVMNPYVKLIVNSSDDFFLVSLSSLKTPAXTP

SEQ ID NO: 22889 - protein, 34 aa, Artificial Sequence
  Non-cyclic GFR-binding peptide
  MOD_RES (1), (3): Xaa is C or S
XGXESVAMGPYVKLYTVVGKDFFLISLSSLKTPV

SEQ ID NO: 22890 - protein, 33 aa, Artificial Sequence
  Non-cyclic GFR-binding peptide
  MOD_RES (2), (2): Xaa is C or S
GXARVVMNPYVKLIVNSSDDFFLVSLSSLQTPA

SEQ ID NO: 22891 - protein, 41 aa, Artificial Sequence
  Non-cyclic GFR-binding peptide
  MOD_RES (2), (36), (37): Xaa is C or S
  MOD_RES (14), (15), (16), (17), (18): Xaa is A or G
  MOD_RES (19), (20), (21), (22): Xaa is A or G or is absent
GXARVVMNPYVKLXXXXXXXXXFFLVSLSSLQTPAXXPKPV

SEQ ID NO: 22892 - protein, 36 aa, Artificial Sequence
  Non-cyclic GFR-binding peptide
  MOD_RES (2), (36): Xaa is C or S
  MOD_RES (14), (15), (16), (17), (18): Xaa is A or G
  MOD_RES (19), (20), (21), (22): Xaa is A or G or is absent
GXSRVVMNPYVKLXXXXXXXXXFFLVSLSSLKTPAX

SEQ ID NO: 22893 - protein, 32 aa, Artificial Sequence
  Non-cyclic GFR-binding peptide
  MOD_RES (32), (32): Xaa is C or S
RDVVMGPYVKLIIQQKDNFFLMSLSSMKTPTX

SEQ ID NO: 22894 - protein, 38 aa, Artificial Sequence
  Non-cyclic GFR-binding peptide
  MOD_RES (32), (33): Xaa is C or S
ESVAMGPYVKLYTVVGKDFFLISLSSLKTPVXXAKSAK

SEQ ID NO: 22895 - protein, 39 aa, Artificial Sequence
  Non-cyclic GFR-binding peptide
  MOD_RES (1), (3), (34), (35): Xaa is C or S
XKXSKVVMPYVKLVKPTRGVFFLISLSSLDQPVXXPSAS

SEQ ID NO: 22896 - protein, 37 aa, Artificial Sequence
  Non-cyclic GFR-binding peptide
  MOD_RES (36), (36): Xaa is C or S
  MOD_RES (12), (13), (14), (15), (16): Xaa is A or G
  MOD_RES (17), (18), (19), (20): Xaa is A or G or is absent
LHEELRPYVKLXXXXXXXXXFFLVSLSSHHVRSPQXK

SEQ ID NO: 22897 - protein, 38 aa, Artificial Sequence
  Non-cyclic GFR-binding peptide
  MOD_RES (33), (33): Xaa is C or S
  MOD_RES (11), (12), (13), (14), (15): Xaa is A or G
  MOD_RES (16), (17), (18), (19): Xaa is A or G or is absent
NHQLFPYVKLXXXXXXXXXFFLMSLSSEETPVXELGED

SEQ ID NO: 22898 - protein, 39 aa, Artificial Sequence
  Non-cyclic GFR-binding peptide
  MOD_RES (1), (33), (34): Xaa is C or S
XARVVMNPYVKLIVNSSDDFFLVSLSSLQTPAXXPKPVT

SEQ ID NO: 22899 - protein, 39 aa, Artificial Sequence
  Non-cyclic GFR-binding peptide
  MOD_RES (34), (35): Xaa is C or S
  MOD_RES (12), (13), (14), (15), (16): Xaa is A or G
  MOD_RES (17), (18), (19), (20): Xaa is A or G or is absent
AKVVMNPYVKLXXXXXXXXXFFLVSLSSLKTPAXXAKPV

SEQ ID NO: 22900 - protein, 36 aa, Artificial Sequence
  Non-cyclic GFR-binding peptide
  MOD_RES (34), (34): Xaa is C or S
  MOD_RES (12), (13), (14), (15), (16): Xaa is A or G
  MOD_RES (17), (18), (19), (20): Xaa is A or G or is absent
KNHQLFPYVKLXXXXXXXXXFFLMSLSSEETPVXEL

SEQ ID NO: 22901 - protein, 34 aa, Artificial Sequence
  Non-cyclic GFR-binding peptide
  MOD_RES (31), (32): Xaa is C or S
SRVIMPYVKLVKPKRGVFFLISLSSLAQPVXXPA

SEQ ID NO: 22902 - protein, 38 aa, Artificial Sequence
  Non-cyclic GFR-binding peptide
  MOD_RES (1), (3), (37), (38): Xaa is C or S
  MOD_RES (15), (16), (17), (18), (19): Xaa is A or G
  MOD_RES (20), (21), (22), (23): Xaa is A or G or is absent
XGXGEVVMEPYVKLXXXXXXXXXFFLMSLSSLETPVXX

SEQ ID NO: 22903 - protein, 40 aa, Artificial Sequence
  Non-cyclic GFR-binding peptide
  MOD_RES (34), (35): Xaa is C or S
  MOD_RES (12), (13), (14), (15), (16): Xaa is A or G
  MOD_RES (17), (18), (19), (20): Xaa is A or G or is absent
SRVVMNPYVKLXXXXXXXXXFFLVSLSSLKTPAXXPKPVY

SEQ ID NO: 22904 - protein, 43 aa, Artificial Sequence
  Non-cyclic GFR-binding peptide
  MOD_RES (2), (4), (37), (38): Xaa is C or S
RXGXEAVSMGEPYVKLTPVGMDDFFLVSLSSLKTPVXXAKGVK

SEQ ID NO: 22905 - protein, 39 aa, Artificial Sequence
  Non-cyclic GFR-binding peptide
  MOD_RES (1), (3), (35), (36): Xaa is C or S
XGXESVAMGPYVKLYTVVGKDFFLISLSSLKTPVXXAKS

SEQ ID NO: 22906 - protein, 39 aa, Artificial Sequence
  Non-cyclic GFR-binding peptide
  MOD_RES (33), (34): Xaa is C or S
  MOD_RES (11), (12), (13), (14), (15): Xaa is A or G
  MOD_RES (16), (17), (18), (19): Xaa is A or G or is absent
RVVMNPYVKLXXXXXXXXXFFLVSLSSLKTPAXXPKPVY

SEQ ID NO: 22907 - protein, 35 aa, Artificial Sequence
  Non-cyclic GFR-binding peptide
  MOD_RES (31), (32): Xaa is C or S
EVVMDPYVKLVVNNAADFFLISLSSLRAPVXXSAP

SEQ ID NO: 22908 - protein, 35 aa, Artificial Sequence
  Non-cyclic GFR-binding peptide
  MOD_RES (31), (32): Xaa is C or S
EVVMDPYVKLVVNNASDFFLISLSSLRTPVXXTPP

SEQ ID NO: 22909 - protein, 41 aa, Artificial Sequence
  Non-cyclic GFR-binding peptide
  MOD_RES (1), (3), (37), (38): Xaa is C or S
  MOD_RES (15), (16), (17), (18), (19): Xaa is A or G
  MOD_RES (20), (21), (22), (23): Xaa is A or G or is absent
XGXAEVVMDPYVKLXXXXXXXXXFFLISLSSLRAPVXXSAP

SEQ ID NO: 22910 - protein, 37 aa, Artificial Sequence
  Non-cyclic GFR-binding peptide
  MOD_RES (1), (3), (36), (37): Xaa is C or S
  MOD_RES (14), (15), (16), (17), (18): Xaa is A or G
  MOD_RES (19), (20), (21), (22): Xaa is A or G or is absent
XKXSKVIMPYVKLXXXXXXXXXFFLISLSSLDQSVXX

SEQ ID NO: 22911 - protein, 37 aa, Artificial Sequence
  Non-cyclic GFR-binding peptide
  MOD_RES (2), (4), (35), (36): Xaa is C or S
LXGXEEVIMPYVKLLLVRGNDFFLMSLSSTKVPAXXT

SEQ ID NO: 22912 - protein, 40 aa, Artificial Sequence
  Non-cyclic GFR-binding peptide
  MOD_RES (2), (4), (35), (36): Xaa is C or S
SXKXSKVVMPYVKLVKPTRGVFFLISLSSLDQPVXXPSAS

SEQ ID NO: 22913 - protein, 33 aa, Artificial Sequence
  Non-cyclic GFR-binding peptide
  MOD_RES (33), (33): Xaa is C or S
  MOD_RES (11), (12), (13), (14), (15): Xaa is A or G
  MOD_RES (16), (17), (18), (19): Xaa is A or G or is absent
SKVVMPYVKLXXXXXXXXXFFLISLSSLDQPVX

SEQ ID NO: 22914 - protein, 38 aa, Artificial Sequence
  Non-cyclic GFR-binding peptide
  MOD_RES (1), (35), (36): Xaa is C or S
  MOD_RES (13), (14), (15), (16), (17): Xaa is A or G
  MOD_RES (18), (19), (20), (21): Xaa is A or G or is absent
XSRVVMNPYVKLXXXXXXXXXFFLVSLSSLKTPAXXPK

SEQ ID NO: 22915 - protein, 39 aa, Artificial Sequence
  Non-cyclic GFR-binding peptide
  MOD_RES (2), (39): Xaa is C or S
  MOD_RES (15), (16), (17), (18), (19): Xaa is A or G
  MOD_RES (20), (21), (22), (23): Xaa is A or G or is absent
AXELHEELRPYVKLXXXXXXXXXFFLVSLSSHHVRSPQX

SEQ ID NO: 22916 - protein, 39 aa, Artificial Sequence
  Non-cyclic GFR-binding peptide
  MOD_RES (33), (34): Xaa is C or S
  MOD_RES (11), (12), (13), (14), (15): Xaa is A or G
  MOD_RES (16), (17), (18), (19): Xaa is A or G or is absent
EVVMEPYVKLXXXXXXXXXFFLMSLSSLETPVXXAKPIS

SEQ ID NO: 22917 - protein, 42 aa, Artificial Sequence
  Non-cyclic GFR-binding peptide
  MOD_RES (1), (3), (38), (39): Xaa is C or S
  MOD_RES (16), (17), (18), (19), (20): Xaa is A or G
  MOD_RES (21), (22), (23), (24): Xaa is A or G or is absent
XGXEAVSMGEPYVKLXXXXXXXXXFFLVSLSSLKTPVXXAKG

SEQ ID NO: 22918 - protein, 38 aa, Artificial Sequence
  Non-cyclic GFR-binding peptide
  MOD_RES (1), (3), (37), (38): Xaa is C or S
  MOD_RES (15), (16), (17), (18), (19): Xaa is A or G
  MOD_RES (20), (21), (22), (23): Xaa is A or G or is absent
XGXSRVVMNPYVKLXXXXXXXXXFFLVSLSSLKTPAXX

SEQ ID NO: 22919 - protein, 33 aa, Artificial Sequence
  Non-cyclic GFR-binding peptide
  MOD_RES (2), (2): Xaa is C or S
GXAKVVMNPYVKLIVNNSSDFFLVSLSSLKTPA

SEQ ID NO: 22920 - protein, 34 aa, Artificial Sequence
  Non-cyclic GFR-binding peptide
  MOD_RES (31), (32): Xaa is C or S
EVVMEPYVKLVVKDYEDFFLMSLSSLETPVXXAK

SEQ ID NO: 22921 - protein, 35 aa, Artificial Sequence
  Non-cyclic GFR-binding peptide
  MOD_RES (1), (34), (35): Xaa is C or S
  MOD_RES (12), (13), (14), (15), (16): Xaa is A or G
  MOD_RES (17), (18), (19), (20): Xaa is A or G or is absent
XSRVIMPYVKLXXXXXXXXXFFLISLSSLAQPVXX

SEQ ID NO: 22922 - protein, 40 aa, Artificial Sequence
  Non-cyclic GFR-binding peptide
  MOD_RES (2), (36), (37): Xaa is C or S
  MOD_RES (14), (15), (16), (17), (18): Xaa is A or G
  MOD_RES (19), (20), (21), (22): Xaa is A or G or is absent
GXSRVVMNPYVKLXXXXXXXXXFFLVSLSSLKTPAXXPKP

SEQ ID NO: 22923 - protein, 40 aa, Artificial Sequence
  Non-cyclic GFR-binding peptide
  MOD_RES (34), (35): Xaa is C or S
  MOD_RES (12), (13), (14), (15), (16): Xaa is A or G
  MOD_RES (17), (18), (19), (20): Xaa is A or G or is absent
RDVVMGPYVKLXXXXXXXXXFFLMSLSSMKTPTXXPGASG

SEQ ID NO: 22924 - protein, 35 aa, Artificial Sequence
  Non-cyclic GFR-binding peptide
  MOD_RES (1), (3): Xaa is C or S
  MOD_RES (14), (15), (16), (17), (18): Xaa is A or G
  MOD_RES (19), (20), (21), (22): Xaa is A or G or is absent
XKXSKVVMPYVKLXXXXXXXXXFFLISLSSLDQPV

SEQ ID NO: 22925 - protein, 43 aa, Artificial Sequence
  Non-cyclic GFR-binding peptide
  MOD_RES (1), (3), (37), (38): Xaa is C or S
  MOD_RES (15), (16), (17), (18), (19): Xaa is A or G
  MOD_RES (20), (21), (22), (23): Xaa is A or G or is absent
XGXARVVMNPYVKLXXXXXXXXXFFLVSLSSLQTPAXXPKPVT

SEQ ID NO: 22926 - protein, 40 aa, Artificial Sequence
  Non-cyclic GFR-binding peptide
  MOD_RES (2), (4), (37), (38): Xaa is C or S
RXGXEAVSMGEPYVKLTPVGMDDFFLVSLSSLKTPVXXAK

SEQ ID NO: 22927 - protein, 36 aa, Artificial Sequence
  Non-cyclic GFR-binding peptide
  MOD_RES (1), (3): Xaa is C or S
  MOD_RES (15), (16), (17), (18), (19): Xaa is A or G
  MOD_RES (20), (21), (22), (23): Xaa is A or G or is absent
XGXSEVVMDPYVKLXXXXXXXXXFFLISLSSLRTPV

SEQ ID NO: 22928 - protein, 42 aa, Artificial Sequence
  Non-cyclic GFR-binding peptide
  MOD_RES (1), (3), (37), (38): Xaa is C or S
  MOD_RES (15), (16), (17), (18), (19): Xaa is A or G
  MOD_RES (20), (21), (22), (23): Xaa is A or G or is absent
XGXAKVVMNPYVKLXXXXXXXXXFFLVSLSSLKTPAXXAKPV

SEQ ID NO: 22929 - protein, 43 aa, Artificial Sequence
  Non-cyclic GFR-binding peptide
  MOD_RES (1), (3), (37): Xaa is C or S
  MOD_RES (15), (16), (17), (18), (19): Xaa is A or G
  MOD_RES (20), (21), (22), (23): Xaa is A or G or is absent
XGXSRVVMNPYVKLXXXXXXXXXFFLVSLSSLKTPAXTPKTVH

SEQ ID NO: 22930 - protein, 36 aa, Artificial Sequence
  Non-cyclic GFR-binding peptide
  MOD_RES (1), (32), (33): Xaa is C or S
XSKVIMPYVKLIKPTKGIFFLISLSSLDQSVXXPSA

SEQ ID NO: 22931 - protein, 36 aa, Artificial Sequence
  Non-cyclic GFR-binding peptide
  MOD_RES (1), (3), (36): Xaa is C or S
  MOD_RES (14), (15), (16), (17), (18): Xaa is A or G
  MOD_RES (19), (20), (21), (22): Xaa is A or G or is absent
XKXSKVVMPYVKLXXXXXXXXXFFLISLSSLDQPVX

SEQ ID NO: 22932 - protein, 37 aa, Artificial Sequence
  Non-cyclic GFR-binding peptide
  MOD_RES (33), (34): Xaa is C or S
  MOD_RES (11), (12), (13), (14), (15): Xaa is A or G
  MOD_RES (16), (17), (18), (19): Xaa is A or G or is absent
SVAMGPYVKLXXXXXXXXXFFLISLSSLKTPVXXAKS

SEQ ID NO: 22933 - protein, 41 aa, Artificial Sequence
  Non-cyclic GFR-binding peptide
  MOD_RES (2), (4), (36), (37): Xaa is C or S
RXGXSEVVMDPYVKLVVNNASDFFLISLSSLRTPVXXTPPT

SEQ ID NO: 22934 - protein, 37 aa, Artificial Sequence
  Non-cyclic GFR-binding peptide
  MOD_RES (2), (36), (37): Xaa is C or S
  MOD_RES (14), (15), (16), (17), (18): Xaa is A or G
  MOD_RES (19), (20), (21), (22): Xaa is A or G or is absent
GXRDVVMGPYVKLXXXXXXXXXFFLMSLSSMKTPTXX

SEQ ID NO: 22935 - protein, 41 aa, Artificial Sequence
  Non-cyclic GFR-binding peptide
  MOD_RES (1), (38): Xaa is C or S
  MOD_RES (14), (15), (16), (17), (18): Xaa is A or G
  MOD_RES (19), (20), (21), (22): Xaa is A or G or is absent
XELHEELRPYVKLXXXXXXXXXFFLVSLSSHHVRSPQXKVS

SEQ ID NO: 22936 - protein, 34 aa, Artificial Sequence
  Non-cyclic GFR-binding peptide
  MOD_RES (2), (4): Xaa is C or S
SXKXSKVVMPYVKLVKPTRGVFFLISLSSLDQPV

SEQ ID NO: 22937 - protein, 34 aa, Artificial Sequence
  Non-cyclic GFR-binding peptide
  MOD_RES (2), (34): Xaa is C or S
GXAKVVMNPYVKLIVNNSSDFFLVSLSSLKTPAX

SEQ ID NO: 22938 - protein, 34 aa, Artificial Sequence
  Non-cyclic GFR-binding peptide
  MOD_RES (1), (32), (33): Xaa is C or S
XEEVIMPYVKLLLVRGNDFFLMSLSSTKVPAXXT

SEQ ID NO: 22939 - protein, 37 aa, Artificial Sequence
  Non-cyclic GFR-binding peptide
  MOD_RES (31), (32): Xaa is C or S
SKVIMPYVKLIKPTKGIFFLISLSSLDQSVXXPSASA

SEQ ID NO: 22940 - protein, 38 aa, Artificial Sequence
  Non-cyclic GFR-binding peptide
  MOD_RES (1), (33), (34): Xaa is C or S
XSRVVMNPYVKLIVNSSDDFFLVSLSSLKTPAXXPKPV

SEQ ID NO: 22941 - protein, 37 aa, Artificial Sequence
  Non-cyclic GFR-binding peptide
  MOD_RES (2), (36), (37): Xaa is C or S
  MOD_RES (14), (15), (16), (17), (18): Xaa is A or G
  MOD_RES (19), (20), (21), (22): Xaa is A or G or is absent
GXSEVVMDPYVKLXXXXXXXXXFFLISLSSLRTPVXX

SEQ ID NO: 22942 - protein, 38 aa, Artificial Sequence
  Non-cyclic GFR-binding peptide
  MOD_RES (36), (36): Xaa is C or S
LHEELRPYVKLLKPKKRVYEFFLVSLSSHHVRSPQXKV

SEQ ID NO: 22943 - protein, 38 aa, Artificial Sequence
  Non-cyclic GFR-binding peptide
  MOD_RES (37), (37): Xaa is C or S
ELHEELRPYVKLLKPKKRVYEFFLVSLSSHHVRSPQXK

SEQ ID NO: 22944 - protein, 34 aa, Artificial Sequence
  Non-cyclic GFR-binding peptide
  MOD_RES (1), (1): Xaa is C or S
  MOD_RES (13), (14), (15), (16), (17): Xaa is A or G
  MOD_RES (18), (19), (20), (21): Xaa is A or G or is absent
XAKVVMNPYVKLXXXXXXXXXFFLVSLSSLKTPA

SEQ ID NO: 22945 - protein, 41 aa, Artificial Sequence
  Non-cyclic GFR-binding peptide
  MOD_RES (35), (36): Xaa is C or S
  MOD_RES (13), (14), (15), (16), (17): Xaa is A or G
  MOD_RES (18), (19), (20), (21): Xaa is A or G or is absent
EAVSMGEPYVKLXXXXXXXXXFFLVSLSSLKTPVXXAKGVK

SEQ ID NO: 22946 - protein, 36 aa, Artificial Sequence
  Non-cyclic GFR-binding peptide
  MOD_RES (1), (3), (35), (36): Xaa is C or S
XGXESVAMGPYVKLYTVVGKDFFLISLSSLKTPVXX

SEQ ID NO: 22947 - protein, 36 aa, Artificial Sequence
  Non-cyclic GFR-binding peptide
  MOD_RES (35), (35): Xaa is C or S
  MOD_RES (11), (12), (13), (14), (15): Xaa is A or G
  MOD_RES (16), (17), (18), (19): Xaa is A or G or is absent
HEELRPYVKLXXXXXXXXXFFLVSLSSHHVRSPQXK

SEQ ID NO: 22948 - protein, 40 aa, Artificial Sequence
  Non-cyclic GFR-binding peptide
  MOD_RES (1), (3), (35), (36): Xaa is C or S
XGXSEVVMDPYVKLVVNNASDFFLISLSSLRTPVXXTPPT

SEQ ID NO: 22949 - protein, 34 aa, Artificial Sequence
  Non-cyclic GFR-binding peptide
  MOD_RES (2), (34): Xaa is C or S
GXARVVMNPYVKLIVNSSDDFFLVSLSSLQTPAX

SEQ ID NO: 22950 - protein, 40 aa, Artificial Sequence
  Non-cyclic GFR-binding peptide
  MOD_RES (1), (3), (40): Xaa is C or S
  MOD_RES (16), (17), (18), (19), (20): Xaa is A or G
  MOD_RES (21), (22), (23), (24): Xaa is A or G or is absent
XAXELHEELRPYVKLXXXXXXXXXFFLVSLSSHHVRSPQX

SEQ ID NO: 22951 - protein, 37 aa, Artificial Sequence
  Non-cyclic GFR-binding peptide
  MOD_RES (2), (4): Xaa is C or S
  MOD_RES (16), (17), (18), (19), (20): Xaa is A or G
  MOD_RES (21), (22), (23), (24): Xaa is A or G or is absent
SXGXRDVVMGPYVKLXXXXXXXXXFFLMSLSSMKTPT

SEQ ID NO: 22952 - protein, 40 aa, Artificial Sequence
  Non-cyclic GFR-binding peptide
  MOD_RES (1), (3), (36), (37): Xaa is C or S
  MOD_RES (14), (15), (16), (17), (18): Xaa is A or G
  MOD_RES (19), (20), (21), (22): Xaa is A or G or is absent
XKXSKVVMPYVKLXXXXXXXXXFFLISLSSLDQPVXXPSA

SEQ ID NO: 22953 - protein, 32 aa, Artificial Sequence
  Non-cyclic GFR-binding peptide
  MOD_RES (32), (32): Xaa is C or S
AKVVMNPYVKLIVNNSSDFFLVSLSSLKTPAX

SEQ ID NO: 22954 - protein, 36 aa, Artificial Sequence
  Non-cyclic GFR-binding peptide
  MOD_RES (2), (36): Xaa is C or S
  MOD_RES (14), (15), (16), (17), (18): Xaa is A or G
  MOD_RES (19), (20), (21), (22): Xaa is A or G or is absent
GXESVAMGPYVKLXXXXXXXXXFFLISLSSLKTPVX

SEQ ID NO: 22955 - protein, 39 aa, Artificial Sequence
  Non-cyclic GFR-binding peptide
  MOD_RES (2), (35), (36): Xaa is C or S
  MOD_RES (13), (14), (15), (16), (17): Xaa is A or G
  MOD_RES (18), (19), (20), (21): Xaa is A or G or is absent
KXSKVIMPYVKLXXXXXXXXXFFLISLSSLDQSVXXPSA

SEQ ID NO: 22956 - protein, 35 aa, Artificial Sequence
  Non-cyclic GFR-binding peptide
  MOD_RES (1), (3), (35): Xaa is C or S
XGXARVVMNPYVKLIVNSSDDFFLVSLSSLQTPAX

SEQ ID NO: 22957 - protein, 42 aa, Artificial Sequence
  Non-cyclic GFR-binding peptide
  MOD_RES (2), (4), (36), (37): Xaa is C or S
RXGXAEVVMDPYVKLVVNNAADFFLISLSSLRAPVXXSAPAA

SEQ ID NO: 22958 - protein, 35 aa, Artificial Sequence
  Non-cyclic GFR-binding peptide
  MOD_RES (1), (32), (33): Xaa is C or S
XSKVIMPYVKLIKPTKGIFFLISLSSLDQSVXXPS

SEQ ID NO: 22959 - protein, 40 aa, Artificial Sequence
  Non-cyclic GFR-binding peptide
  MOD_RES (1), (3), (35), (36): Xaa is C or S
XGXAEVVMDPYVKLVVNNAADFFLISLSSLRAPVXXSAPA

SEQ ID NO: 22960 - protein, 37 aa, Artificial Sequence
  Non-cyclic GFR-binding peptide
  MOD_RES (33), (34): Xaa is C or S
  MOD_RES (11), (12), (13), (14), (15): Xaa is A or G
  MOD_RES (16), (17), (18), (19): Xaa is A or G or is absent
EVVMEPYVKLXXXXXXXXXFFLMSLSSLETPVXXAKP

SEQ ID NO: 22961 - protein, 33 aa, Artificial Sequence
  Non-cyclic GFR-binding peptide
  MOD_RES (33), (33): Xaa is C or S
NHQLFPYVKLHQGQHPKIRFFLMSLSSEETPVX

SEQ ID NO: 22962 - protein, 34 aa, Artificial Sequence
  Non-cyclic GFR-binding peptide
ELHEELRPYVKLLKPKKRVYEFFLVSLSSHHVRS

SEQ ID NO: 22963 - protein, 36 aa, Artificial Sequence
  Non-cyclic GFR-binding peptide
  MOD_RES (2), (4): Xaa is C or S
  MOD_RES (15), (16), (17), (18), (19): Xaa is A or G
  MOD_RES (20), (21), (22), (23): Xaa is A or G or is absent
LXGXEEVIMPYVKLXXXXXXXXXFFLMSLSSTKVPA

SEQ ID NO: 22964 - protein, 39 aa, Artificial Sequence
  Non-cyclic GFR-binding peptide
  MOD_RES (2), (4), (39): Xaa is C or S
  MOD_RES (17), (18), (19), (20), (21): Xaa is A or G
  MOD_RES (22), (23), (24), (25): Xaa is A or G or is absent
RXGXEAVSMGEPYVKLXXXXXXXXXFFLVSLSSLKTPVX

SEQ ID NO: 22965 - protein, 37 aa, Artificial Sequence
  Non-cyclic GFR-binding peptide
  MOD_RES (1), (33), (34): Xaa is C or S
XESVAMGPYVKLYTVVGKDFFLISLSSLKTPVXXAKS

SEQ ID NO: 22966 - protein, 40 aa, Artificial Sequence
  Non-cyclic GFR-binding peptide
  MOD_RES (37), (37): Xaa is C or S
ELHEELRPYVKLLKPKKRVYEFFLVSLSSHHVRSPQXKVS

SEQ ID NO: 22967 - protein, 31 aa, Artificial Sequence
  Non-cyclic GFR-binding peptide
  MOD_RES (1), (1): Xaa is C or S
XSKVVMPYVKLVKPTRGVFFLISLSSLDQPV

SEQ ID NO: 22968 - protein, 39 aa, Artificial Sequence
  Non-cyclic GFR-binding peptide
  MOD_RES (1), (3), (36), (37): Xaa is C or S
  MOD_RES (14), (15), (16), (17), (18): Xaa is A or G
  MOD_RES (19), (20), (21), (22): Xaa is A or G or is absent
XKXSKVIMPYVKLXXXXXXXXXFFLISLSSLDQSVXXPS

SEQ ID NO: 22969 - protein, 39 aa, Artificial Sequence
  Non-cyclic GFR-binding peptide
  MOD_RES (34), (35): Xaa is C or S
  MOD_RES (12), (13), (14), (15), (16): Xaa is A or G
  MOD_RES (17), (18), (19), (20): Xaa is A or G or is absent
RDVVMGPYVKLXXXXXXXXXFFLMSLSSMKTPTXXPGAS

SEQ ID NO: 22970 - protein, 41 aa, Artificial Sequence
  Non-cyclic GFR-binding peptide
  MOD_RES (1), (3), (37), (38): Xaa is C or S
  MOD_RES (15), (16), (17), (18), (19): Xaa is A or G
  MOD_RES (20), (21), (22), (23): Xaa is A or G or is absent
XGXSRVVMNPYVKLXXXXXXXXXFFLVSLSSLKTPAXXPKP

SEQ ID NO: 22971 - protein, 32 aa, Artificial Sequence
  Non-cyclic GFR-binding peptide
HEELRPYVKLLKPKKRVYEFFLVSLSSHHVRS

SEQ ID NO: 22972 - protein, 38 aa, Artificial Sequence
  Non-cyclic GFR-binding peptide
  MOD_RES (2), (4), (38): Xaa is C or S
  MOD_RES (16), (17), (18), (19), (20): Xaa is A or G
  MOD_RES (21), (22), (23), (24): Xaa is A or G or is absent
RXGXESVAMGPYVKLXXXXXXXXXFFLISLSSLKTPVX

SEQ ID NO: 22973 - protein, 38 aa, Artificial Sequence
  Non-cyclic GFR-binding peptide
  MOD_RES (1), (36), (37): Xaa is C or S
  MOD_RES (14), (15), (16), (17), (18): Xaa is A or G
  MOD_RES (19), (20), (21), (22): Xaa is A or G or is absent
XEAVSMGEPYVKLXXXXXXXXXFFLVSLSSLKTPVXXA

SEQ ID NO: 22974 - protein, 38 aa, Artificial Sequence
  Non-cyclic GFR-binding peptide
  MOD_RES (33), (34): Xaa is C or S
  MOD_RES (11), (12), (13), (14), (15): Xaa is A or G
  MOD_RES (16), (17), (18), (19): Xaa is A or G or is absent
SRVIMPYVKLXXXXXXXXXFFLISLSSLAQPVXXPAAS

SEQ ID NO: 22975 - protein, 41 aa, Artificial Sequence
  Non-cyclic GFR-binding peptide
  MOD_RES (1), (3), (35), (36): Xaa is C or S
XGXESVAMGPYVKLYTVVGKDFFLISLSSLKTPVXXAKSAK

SEQ ID NO: 22976 - protein, 39 aa, Artificial Sequence
  Non-cyclic GFR-binding peptide
  MOD_RES (2), (4), (35), (36): Xaa is C or S
SXKXSRVIMPYVKLVKPKRGVFFLISLSSLAQPVXXPAA

SEQ ID NO: 22977 - protein, 39 aa, Artificial Sequence
  Non-cyclic GFR-binding peptide
  MOD_RES (2), (34), (35): Xaa is C or S
GXSRVVMNPYVKLIVNSSDDFFLVSLSSLKTPAXXPKPV

SEQ ID NO: 22978 - protein, 41 aa, Artificial Sequence
  Non-cyclic GFR-binding peptide
  MOD_RES (1), (3), (37): Xaa is C or S
  MOD_RES (15), (16), (17), (18), (19): Xaa is A or G
  MOD_RES (20), (21), (22), (23): Xaa is A or G or is absent
XGXSRVVMNPYVKLXXXXXXXXXFFLVSLSSLKTPAXTPKT

SEQ ID NO: 22979 - protein, 42 aa, Artificial Sequence
  Non-cyclic GFR-binding peptide
  MOD_RES (2), (4), (38), (39): Xaa is C or S
  MOD_RES (16), (17), (18), (19), (20): Xaa is A or G
  MOD_RES (21), (22), (23), (24): Xaa is A or G or is absent
RXGXGEVVMEPYVKLXXXXXXXXXFFLMSLSSLETPVXXAKP

SEQ ID NO: 22980 - protein, 41 aa, Artificial Sequence
  Non-cyclic GFR-binding peptide
  MOD_RES (2), (4), (38), (39): Xaa is C or S
  MOD_RES (16), (17), (18), (19), (20): Xaa is A or G
  MOD_RES (21), (22), (23), (24): Xaa is A or G or is absent
RXGXAEVVMDPYVKLXXXXXXXXXFFLISLSSLRAPVXXSA

SEQ ID NO: 22981 - protein, 38 aa, Artificial Sequence
  Non-cyclic GFR-binding peptide
  MOD_RES (1), (3), (37): Xaa is C or S
  MOD_RES (15), (16), (17), (18), (19): Xaa is A or G
  MOD_RES (20), (21), (22), (23): Xaa is A or G or is absent
XGXSRVVMNPYVKLXXXXXXXXXFFLVSLSSLKTPAXT

SEQ ID NO: 22982 - protein, 39 aa, Artificial Sequence
  Non-cyclic GFR-binding peptide
  MOD_RES (1), (35), (36): Xaa is C or S
  MOD_RES (13), (14), (15), (16), (17): Xaa is A or G
  MOD_RES (18), (19), (20), (21): Xaa is A or G or is absent
XSEVVMDPYVKLXXXXXXXXXFFLISLSSLRTPVXXTPP

SEQ ID NO: 22983 - protein, 34 aa, Artificial Sequence
  Non-cyclic GFR-binding peptide
  MOD_RES (31), (32): Xaa is C or S
DVVMGPYVKLIIQQKDNFFLMSLSSMKTPTXXPG

SEQ ID NO: 22984 - protein, 41 aa, Artificial Sequence
  Non-cyclic GFR-binding peptide
  MOD_RES (2), (4), (36), (37): Xaa is C or S
RXGXGEVVMEPYVKLVVKDYEDFFLMSLSSLETPVXXAKPI

SEQ ID NO: 22985 - protein, 37 aa, Artificial Sequence
  Non-cyclic GFR-binding peptide
  MOD_RES (1), (3), (37): Xaa is C or S
  MOD_RES (15), (16), (17), (18), (19): Xaa is A or G
  MOD_RES (20), (21), (22), (23): Xaa is A or G or is absent
XGXRDVVMGPYVKLXXXXXXXXXFFLMSLSSMKTPTX

SEQ ID NO: 22986 - protein, 35 aa, Artificial Sequence
  Non-cyclic GFR-binding peptide
  MOD_RES (34), (34): Xaa is C or S
KNHQLFPYVKLHQGQHPKIRFFLMSLSSEETPVXE

SEQ ID NO: 22987 - protein, 38 aa, Artificial Sequence
  Non-cyclic GFR-binding peptide
  MOD_RES (1), (3), (34), (35): Xaa is C or S
XGXEEVIMPYVKLLLVRGNDFFLMSLSSTKVPAXXTSP

SEQ ID NO: 22988 - protein, 38 aa, Artificial Sequence
  Non-cyclic GFR-binding peptide
  MOD_RES (1), (32), (33): Xaa is C or S
XEEVIMPYVKLLLVRGNDFFLMSLSSTKVPAXXTSPVR

SEQ ID NO: 22989 - protein, 32 aa, Artificial Sequence
  Non-cyclic GFR-binding peptide
  MOD_RES (11), (12), (13), (14), (15): Xaa is A or G
  MOD_RES (16), (17), (18), (19): Xaa is A or G or is absent
SVAMGPYVKLXXXXXXXXXFFLISLSSLKTPV

SEQ ID NO: 22990 - protein, 41 aa, Artificial Sequence
  Non-cyclic GFR-binding peptide
  MOD_RES (2), (4), (37), (38): Xaa is C or S
  MOD_RES (15), (16), (17), (18), (19): Xaa is A or G
  MOD_RES (20), (21), (22), (23): Xaa is A or G or is absent
SXKXSRVIMPYVKLXXXXXXXXXFFLISLSSLAQPVXXPAA

SEQ ID NO: 22991 - protein, 39 aa, Artificial Sequence
  Non-cyclic GFR-binding peptide
  MOD_RES (2), (4), (38), (39): Xaa is C or S
  MOD_RES (16), (17), (18), (19), (20): Xaa is A or G
  MOD_RES (21), (22), (23), (24): Xaa is A or G or is absent
RXGXGEVVMEPYVKLXXXXXXXXXFFLMSLSSLETPVXX

SEQ ID NO: 22992 - protein, 36 aa, Artificial Sequence
  Non-cyclic GFR-binding peptide
  MOD_RES (2), (4), (35), (36): Xaa is C or S
SXKXSKVVMPYVKLVKPTRGVFFLISLSSLDQPVXX

SEQ ID NO: 22993 - protein, 40 aa, Artificial Sequence
  Non-cyclic GFR-binding peptide
  MOD_RES (2), (36), (37): Xaa is C or S
  MOD_RES (14), (15), (16), (17), (18): Xaa is A or G
  MOD_RES (19), (20), (21), (22): Xaa is A or G or is absent
GXGEVVMEPYVKLXXXXXXXXXFFLMSLSSLETPVXXAKP

SEQ ID NO: 22994 - protein, 37 aa, Artificial Sequence
  Non-cyclic GFR-binding peptide
  MOD_RES (1), (3), (35), (36): Xaa is C or S
XGXSEVVMDPYVKLVVNNASDFFLISLSSLRTPVXXT

SEQ ID NO: 22995 - protein, 35 aa, Artificial Sequence
  Non-cyclic GFR-binding peptide
  MOD_RES (2), (35): Xaa is C or S
  MOD_RES (13), (14), (15), (16), (17): Xaa is A or G
  MOD_RES (18), (19), (20), (21): Xaa is A or G or is absent
KXSKVIMPYVKLXXXXXXXXXFFLISLSSLDQSVX

SEQ ID NO: 22996 - protein, 31 aa, Artificial Sequence
  Non-cyclic GFR-binding peptide
  MOD_RES (31), (31): Xaa is C or S
EVVMDPYVKLVVNNAADFFLISLSSLRAPVX

SEQ ID NO: 22997 - protein, 41 aa, Artificial Sequence
  Non-cyclic GFR-binding peptide
  MOD_RES (2), (4), (35), (36): Xaa is C or S
SXKXSKVVMPYVKLVKPTRGVFFLISLSSLDQPVXXPSASA

SEQ ID NO: 22998 - protein, 35 aa, Artificial Sequence
  Non-cyclic GFR-binding peptide
  MOD_RES (1), (3): Xaa is C or S
  MOD_RES (14), (15), (16), (17), (18): Xaa is A or G
  MOD_RES (19), (20), (21), (22): Xaa is A or G or is absent
XKXSKVIMPYVKLXXXXXXXXXFFLISLSSLDQSV

SEQ ID NO: 22999 - protein, 33 aa, Artificial Sequence
  Non-cyclic GFR-binding peptide
  MOD_RES (33), (33): Xaa is C or S
  MOD_RES (11), (12), (13), (14), (15): Xaa is A or G
  MOD_RES (16), (17), (18), (19): Xaa is A or G or is absent
SKVIMPYVKLXXXXXXXXXFFLISLSSLDQSVX

SEQ ID NO: 23000 - protein, 36 aa, Artificial Sequence
  Non-cyclic GFR-binding peptide
  MOD_RES (1), (33), (34): Xaa is C or S
XGEVVMEPYVKLVVKDYEDFFLMSLSSLETPVXXAK

SEQ ID NO: 23001 - protein, 36 aa, Artificial Sequence
  Non-cyclic GFR-binding peptide
  MOD_RES (31), (32): Xaa is C or S
SRVIMPYVKLVKPKRGVFFLISLSSLAQPVXXPAAS

SEQ ID NO: 23002 - protein, 35 aa, Artificial Sequence
  Non-cyclic GFR-binding peptide
  MOD_RES (1), (34), (35): Xaa is C or S
XEAVSMGEPYVKLTPVGMDDFFLVSLSSLKTPVXX

SEQ ID NO: 23003 - protein, 35 aa, Artificial Sequence
  Non-cyclic GFR-binding peptide
  MOD_RES (2), (2): Xaa is C or S
  MOD_RES (14), (15), (16), (17), (18): Xaa is A or G
  MOD_RES (19), (20), (21), (22): Xaa is A or G or is absent
GXSEVVMDPYVKLXXXXXXXXXFFLISLSSLRTPV

SEQ ID NO: 23004 - protein, 42 aa, Artificial Sequence
  Non-cyclic GFR-binding peptide
  MOD_RES (2), (4), (39), (40): Xaa is C or S
  MOD_RES (17), (18), (19), (20), (21): Xaa is A or G
  MOD_RES (22), (23), (24), (25): Xaa is A or G or is absent
RXGXEAVSMGEPYVKLXXXXXXXXXFFLVSLSSLKTPVXXAK

SEQ ID NO: 23005 - protein, 38 aa, Artificial Sequence
  Non-cyclic GFR-binding peptide
  MOD_RES (2), (4), (36), (37): Xaa is C or S
RXGXESVAMGPYVKLYTVVGKDFFLISLSSLKTPVXXA

SEQ ID NO: 23006 - protein, 41 aa, Artificial Sequence
  Non-cyclic GFR-binding peptide
  MOD_RES (1), (3), (36), (37): Xaa is C or S
  MOD_RES (14), (15), (16), (17), (18): Xaa is A or G
  MOD_RES (19), (20), (21), (22): Xaa is A or G or is absent
XKXSKVIMPYVKLXXXXXXXXXFFLISLSSLDQSVXXPSAS

SEQ ID NO: 23007 - protein, 44 aa, Artificial Sequence
  Non-cyclic GFR-binding peptide
  MOD_RES (1), (3), (38), (39): Xaa is C or S
  MOD_RES (16), (17), (18), (19), (20): Xaa is A or G
  MOD_RES (21), (22), (23), (24): Xaa is A or G or is absent
XGXEAVSMGEPYVKLXXXXXXXXXFFLVSLSSLKTPVXXAKGVK

SEQ ID NO: 23008 - protein, 43 aa, Artificial Sequence
  Non-cyclic GFR-binding peptide
  MOD_RES (2), (39): Xaa is C or S
AXELHEELRPYVKLLKPKKRVYEFFLVSLSSHHVRSPQXKVSS

SEQ ID NO: 23009 - protein, 34 aa, Artificial Sequence
  Non-cyclic GFR-binding peptide
  MOD_RES (1), (33), (34): Xaa is C or S
XRDVVMGPYVKLIIQQKDNFFLMSLSSMKTPTXX

SEQ ID NO: 23010 - protein, 36 aa, Artificial Sequence
  Non-cyclic GFR-binding peptide
  MOD_RES (1), (33), (34): Xaa is C or S
XSRVVMNPYVKLIVNSSDDFFLVSLSSLKTPAXXPK

SEQ ID NO: 23011 - protein, 36 aa, Artificial Sequence
  Non-cyclic GFR-binding peptide
  MOD_RES (1), (34), (35): Xaa is C or S
  MOD_RES (12), (13), (14), (15), (16): Xaa is A or G
  MOD_RES (17), (18), (19), (20): Xaa is A or G or is absent
XEEVIMPYVKLXXXXXXXXXFFLMSLSSTKVPAXXT

SEQ ID NO: 23012 - protein, 38 aa, Artificial Sequence
  Non-cyclic GFR-binding peptide
  MOD_RES (1), (3), (35), (36): Xaa is C or S
XGXSRVVMNPYVKLIVNSSDDFFLVSLSSLKTPAXXPK

SEQ ID NO: 23013 - protein, 45 aa, Artificial Sequence
  Non-cyclic GFR-binding peptide
  MOD_RES (2), (4), (39), (40): Xaa is C or S
  MOD_RES (17), (18), (19), (20), (21): Xaa is A or G
  MOD_RES (22), (23), (24), (25): Xaa is A or G or is absent
RXGXEAVSMGEPYVKLXXXXXXXXXFFLVSLSSLKTPVXXAKGVK

SEQ ID NO: 23014 - protein, 42 aa, Artificial Sequence
  Non-cyclic GFR-binding peptide
  MOD_RES (2), (36), (37): Xaa is C or S
  MOD_RES (14), (15), (16), (17), (18): Xaa is A or G
  MOD_RES (19), (20), (21), (22): Xaa is A or G or is absent
GXAKVVMNPYVKLXXXXXXXXXFFLVSLSSLKTPAXXAKPVA

SEQ ID NO: 23015 - protein, 44 aa, Artificial Sequence
  Non-cyclic GFR-binding peptide
  MOD_RES (2), (4), (39), (40): Xaa is C or S
  MOD_RES (17), (18), (19), (20), (21): Xaa is A or G
  MOD_RES (22), (23), (24), (25): Xaa is A or G or is absent
RXGXEAVSMGEPYVKLXXXXXXXXXFFLVSLSSLKTPVXXAKGV

SEQ ID NO: 23016 - protein, 38 aa, Artificial Sequence
  Non-cyclic GFR-binding peptide
  MOD_RES (2), (4): Xaa is C or S
  MOD_RES (17), (18), (19), (20), (21): Xaa is A or G
  MOD_RES (22), (23), (24), (25): Xaa is A or G or is absent
AXAXELHEELRPYVKLXXXXXXXXXFFLVSLSSHHVRS

SEQ ID NO: 23017 - protein, 35 aa, Artificial Sequence
  Non-cyclic GFR-binding peptide
  MOD_RES (1), (3), (34), (35): Xaa is C or S
XKXSRVIMPYVKLVKPKRGVFFLISLSSLAQPVXX

SEQ ID NO: 23018 - protein, 39 aa, Artificial Sequence
  Non-cyclic GFR-binding peptide
  MOD_RES (1), (3): Xaa is C or S
XAXELHEELRPYVKLLKPKKRVYEFFLVSLSSHHVRSPQ

SEQ ID NO: 23019 - protein, 42 aa, Artificial Sequence
  Non-cyclic GFR-binding peptide
  MOD_RES (2), (37), (38): Xaa is C or S
  MOD_RES (15), (16), (17), (18), (19): Xaa is A or G
  MOD_RES (20), (21), (22), (23): Xaa is A or G or is absent
GXEAVSMGEPYVKLXXXXXXXXXFFLVSLSSLKTPVXXAKGV

SEQ ID NO: 23020 - protein, 37 aa, Artificial Sequence
  Non-cyclic GFR-binding peptide
  MOD_RES (1), (3), (35): Xaa is C or S
XGXSRVVMNPYVKLIVNSSDDFFLVSLSSLKTPAXTP

SEQ ID NO: 23021 - protein, 35 aa, Artificial Sequence
  Non-cyclic GFR-binding peptide
  MOD_RES (34), (35): Xaa is C or S
  MOD_RES (12), (13), (14), (15), (16): Xaa is A or G
  MOD_RES (17), (18), (19), (20): Xaa is A or G or is absent
SEVVMDPYVKLXXXXXXXXXFFLISLSSLRTPVXX

SEQ ID NO: 23022 - protein, 44 aa, Artificial Sequence
  Non-cyclic GFR-binding peptide
  MOD_RES (2), (4), (38), (39): Xaa is C or S
  MOD_RES (16), (17), (18), (19), (20): Xaa is A or G
  MOD_RES (21), (22), (23), (24): Xaa is A or G or is absent
SXGXRDVVMGPYVKLXXXXXXXXXFFLMSLSSMKTPTXXPGASG

SEQ ID NO: 23023 - protein, 37 aa, Artificial Sequence
  Non-cyclic GFR-binding peptide
  MOD_RES (2), (34): Xaa is C or S
GXSRVVMNPYVKLIVNSSDDFFLVSLSSLKTPAXTPK

SEQ ID NO: 23024 - protein, 42 aa, Artificial Sequence
  Non-cyclic GFR-binding peptide
  MOD_RES (2), (36): Xaa is C or S
  MOD_RES (14), (15), (16), (17), (18): Xaa is A or G
  MOD_RES (19), (20), (21), (22): Xaa is A or G or is absent
GXSRVVMNPYVKLXXXXXXXXXFFLVSLSSLKTPAXTPKTVH

SEQ ID NO: 23025 - protein, 42 aa, Artificial Sequence
  Non-cyclic GFR-binding peptide
  MOD_RES (1), (3), (37), (38): Xaa is C or S
  MOD_RES (15), (16), (17), (18), (19): Xaa is A or G
  MOD_RES (20), (21), (22), (23): Xaa is A or G or is absent
XGXARVVMNPYVKLXXXXXXXXXFFLVSLSSLQTPAXXPKPV

SEQ ID NO: 23026 - protein, 38 aa, Artificial Sequence
  Non-cyclic GFR-binding peptide
  MOD_RES (1), (3), (34), (35): Xaa is C or S
XKXSRVIMPYVKLVKPKRGVFFLISLSSLAQPVXXPAA

SEQ ID NO: 23027 - protein, 37 aa, Artificial Sequence
  Non-cyclic GFR-binding peptide
  MOD_RES (1), (1): Xaa is C or S
XELHEELRPYVKLLKPKKRVYEFFLVSLSSHHVRSPQ

SEQ ID NO: 23028 - protein, 39 aa, Artificial Sequence
  Non-cyclic GFR-binding peptide
  MOD_RES (34), (34): Xaa is C or S
  MOD_RES (12), (13), (14), (15), (16): Xaa is A or G
  MOD_RES (17), (18), (19), (20): Xaa is A or G or is absent
KNHQLFPYVKLXXXXXXXXXFFLMSLSSEETPVXELGED

SEQ ID NO: 23029 - protein, 35 aa, Artificial Sequence
  Non-cyclic GFR-binding peptide
  MOD_RES (2), (4), (35): Xaa is C or S
SXKXSKVIMPYVKLIKPTKGIFFLISLSSLDQSVX

SEQ ID NO: 23030 - protein, 36 aa, Artificial Sequence
  Non-cyclic GFR-binding peptide
  MOD_RES (33), (34): Xaa is C or S
  MOD_RES (11), (12), (13), (14), (15): Xaa is A or G
  MOD_RES (16), (17), (18), (19): Xaa is A or G or is absent
EVVMDPYVKLXXXXXXXXXFFLISLSSLRTPVXXTP

SEQ ID NO: 23031 - protein, 38 aa, Artificial Sequence
  Non-cyclic GFR-binding peptide
  MOD_RES (33), (34): Xaa is C or S
  MOD_RES (11), (12), (13), (14), (15): Xaa is A or G
  MOD_RES (16), (17), (18), (19): Xaa is A or G or is absent
RVVMNPYVKLXXXXXXXXXFFLVSLSSLKTPAXXPKPV

SEQ ID NO: 23032 - protein, 40 aa, Artificial Sequence
  Non-cyclic GFR-binding peptide
  MOD_RES (2), (4), (37), (38): Xaa is C or S
  MOD_RES (15), (16), (17), (18), (19): Xaa is A or G
  MOD_RES (20), (21), (22), (23): Xaa is A or G or is absent
SXKXSKVVMPYVKLXXXXXXXXXFFLISLSSLDQPVXXPS

SEQ ID NO: 23033 - protein, 39 aa, Artificial Sequence
  Non-cyclic GFR-binding peptide
  MOD_RES (1), (38): Xaa is C or S
  MOD_RES (14), (15), (16), (17), (18): Xaa is A or G
  MOD_RES (19), (20), (21), (22): Xaa is A or G or is absent
XELHEELRPYVKLXXXXXXXXXFFLVSLSSHHVRSPQXK

SEQ ID NO: 23034 - protein, 43 aa, Artificial Sequence
  Non-cyclic GFR-binding peptide
  MOD_RES (2), (4), (38), (39): Xaa is C or S
  MOD_RES (16), (17), (18), (19), (20): Xaa is A or G
  MOD_RES (21), (22), (23), (24): Xaa is A or G or is absent
HXGXARVVMNPYVKLXXXXXXXXXFFLVSLSSLQTPAXXPKPV

SEQ ID NO: 23035 - protein, 43 aa, Artificial Sequence
  Non-cyclic GFR-binding peptide
  MOD_RES (1), (3), (37), (38): Xaa is C or S
  MOD_RES (15), (16), (17), (18), (19): Xaa is A or G
  MOD_RES (20), (21), (22), (23): Xaa is A or G or is absent
XGXAEVVMDPYVKLXXXXXXXXXFFLISLSSLRAPVXXSAPAA

SEQ ID NO: 23036 - protein, 33 aa, Artificial Sequence
  Non-cyclic GFR-binding peptide
  MOD_RES (31), (32): Xaa is C or S
KVVMNPYVKLIVNNSSDFFLVSLSSLKTPAXXA

SEQ ID NO: 23037 - protein, 35 aa, Artificial Sequence
  Non-cyclic GFR-binding peptide
  MOD_RES (2), (2): Xaa is C or S
  MOD_RES (14), (15), (16), (17), (18): Xaa is A or G
  MOD_RES (19), (20), (21), (22): Xaa is A or G or is absent
GXAKVVMNPYVKLXXXXXXXXXFFLVSLSSLKTPA

SEQ ID NO: 23038 - protein, 35 aa, Artificial Sequence
  Non-cyclic GFR-binding peptide
  MOD_RES (1), (35): Xaa is C or S
  MOD_RES (13), (14), (15), (16), (17): Xaa is A or G
  MOD_RES (18), (19), (20), (21): Xaa is A or G or is absent
XKNHQLFPYVKLXXXXXXXXXFFLMSLSSEETPVX

SEQ ID NO: 23039 - protein, 36 aa, Artificial Sequence
  Non-cyclic GFR-binding peptide
  MOD_RES (1), (3): Xaa is C or S
XEXKNHQLFPYVKLHQGQHPKIRFFLMSLSSEETPV

SEQ ID NO: 23040 - protein, 38 aa, Artificial Sequence
  Non-cyclic GFR-binding peptide
  MOD_RES (33), (34): Xaa is C or S
  MOD_RES (11), (12), (13), (14), (15): Xaa is A or G
  MOD_RES (16), (17), (18), (19): Xaa is A or G or is absent
EEVIMPYVKLXXXXXXXXXFFLMSLSSTKVPAXXTSPV

SEQ ID NO: 23041 - protein, 38 aa, Artificial Sequence
  Non-cyclic GFR-binding peptide
  MOD_RES (2), (34), (35): Xaa is C or S
GXGEVVMEPYVKLVVKDYEDFFLMSLSSLETPVXXAKP

SEQ ID NO: 23042 - protein, 34 aa, Artificial Sequence
  Non-cyclic GFR-binding peptide
  MOD_RES (32), (33): Xaa is C or S
SEVVMDPYVKLVVNNASDFFLISLSSLRTPVXXT

SEQ ID NO: 23043 - protein, 33 aa, Artificial Sequence
  Non-cyclic GFR-binding peptide
  MOD_RES (12), (13), (14), (15), (16): Xaa is A or G
  MOD_RES (17), (18), (19), (20): Xaa is A or G or is absent
RDVVMGPYVKLXXXXXXXXXFFLMSLSSMKTPT

SEQ ID NO: 23044 - protein, 38 aa, Artificial Sequence
  Non-cyclic GFR-binding peptide
  MOD_RES (1), (32), (33): Xaa is C or S
XSKVIMPYVKLIKPTKGIFFLISLSSLDQSVXXPSASA

SEQ ID NO: 23045 - protein, 34 aa, Artificial Sequence
  Non-cyclic GFR-binding peptide
  MOD_RES (1), (3): Xaa is C or S
XGXAEVVMDPYVKLVVNNAADFFLISLSSLRAPV

SEQ ID NO: 23046 - protein, 43 aa, Artificial Sequence
  Non-cyclic GFR-binding peptide
  MOD_RES (1), (3), (37), (38): Xaa is C or S
  MOD_RES (15), (16), (17), (18), (19): Xaa is A or G
  MOD_RES (20), (21), (22), (23): Xaa is A or G or is absent
XGXSEVVMDPYVKLXXXXXXXXXFFLISLSSLRTPVXXTPPTS

SEQ ID NO: 23047 - protein, 36 aa, Artificial Sequence
  Non-cyclic GFR-binding peptide
  MOD_RES (34), (35): Xaa is C or S
  MOD_RES (12), (13), (14), (15), (16): Xaa is A or G
  MOD_RES (17), (18), (19), (20): Xaa is A or G or is absent
GEVVMEPYVKLXXXXXXXXXFFLMSLSSLETPVXXA

SEQ ID NO: 23048 - protein, 38 aa, Artificial Sequence
  Non-cyclic GFR-binding peptide
  MOD_RES (2), (4), (37), (38): Xaa is C or S
  MOD_RES (15), (16), (17), (18), (19): Xaa is A or G
  MOD_RES (20), (21), (22), (23): Xaa is A or G or is absent
LXGXEEVIMPYVKLXXXXXXXXXFFLMSLSSTKVPAXX

SEQ ID NO: 23049 - protein, 41 aa, Artificial Sequence
  Non-cyclic GFR-binding peptide
  MOD_RES (2), (4), (36), (37): Xaa is C or S
RXGXESVAMGPYVKLYTVVGKDFFLISLSSLKTPVXXAKSA

SEQ ID NO: 23050 - protein, 40 aa, Artificial Sequence
  Non-cyclic GFR-binding peptide
  MOD_RES (1), (3), (36), (37): Xaa is C or S
  MOD_RES (14), (15), (16), (17), (18): Xaa is A or G
  MOD_RES (19), (20), (21), (22): Xaa is A or G or is absent
XKXSRVIMPYVKLXXXXXXXXXFFLISLSSLAQPVXXPAA

SEQ ID NO: 23051 - protein, 36 aa, Artificial Sequence
  Non-cyclic GFR-binding peptide
  MOD_RES (2), (34), (35): Xaa is C or S
GXSEVVMDPYVKLVVNNASDFFLISLSSLRTPVXXT

SEQ ID NO: 23052 - protein, 36 aa, Artificial Sequence
  Non-cyclic GFR-binding peptide
  MOD_RES (2), (4), (36): Xaa is C or S
RXGXSEVVMDPYVKLVVNNASDFFLISLSSLRTPVX

SEQ ID NO: 23053 - protein, 37 aa, Artificial Sequence
  Non-cyclic GFR-binding peptide
  MOD_RES (1), (33), (34): Xaa is C or S
XSEVVMDPYVKLVVNNASDFFLISLSSLRTPVXXTPP

SEQ ID NO: 23054 - protein, 34 aa, Artificial Sequence
  Non-cyclic GFR-binding peptide
  MOD_RES (2), (2): Xaa is C or S
GXEAVSMGEPYVKLTPVGMDDFFLVSLSSLKTPV

SEQ ID NO: 23055 - protein, 33 aa, Artificial Sequence
  Non-cyclic GFR-binding peptide
  MOD_RES (1), (3): Xaa is C or S
XKXSKVVMPYVKLVKPTRGVFFLISLSSLDQPV

SEQ ID NO: 23056 - protein, 41 aa, Artificial Sequence
  Non-cyclic GFR-binding peptide
  MOD_RES (2), (36), (37): Xaa is C or S
  MOD_RES (14), (15), (16), (17), (18): Xaa is A or G
  MOD_RES (19), (20), (21), (22): Xaa is A or G or is absent
GXAEVVMDPYVKLXXXXXXXXXFFLISLSSLRAPVXXSAPA

SEQ ID NO: 23057 - protein, 38 aa, Artificial Sequence
  Non-cyclic GFR-binding peptide
  MOD_RES (1), (3), (37), (38): Xaa is C or S
  MOD_RES (15), (16), (17), (18), (19): Xaa is A or G
  MOD_RES (20), (21), (22), (23): Xaa is A or G or is absent
XGXAEVVMDPYVKLXXXXXXXXXFFLISLSSLRAPVXX

SEQ ID NO: 23058 - protein, 35 aa, Artificial Sequence
  Non-cyclic GFR-binding peptide
  MOD_RES (1), (1): Xaa is C or S
  MOD_RES (14), (15), (16), (17), (18): Xaa is A or G
  MOD_RES (19), (20), (21), (22): Xaa is A or G or is absent
XELHEELRPYVKLXXXXXXXXXFFLVSLSSHHVRS

SEQ ID NO: 23059 - protein, 34 aa, Artificial Sequence
  Non-cyclic GFR-binding peptide
  MOD_RES (31), (32): Xaa is C or S
SKVVMPYVKLVKPTRGVFFLISLSSLDQPVXXPS

SEQ ID NO: 23060 - protein, 38 aa, Artificial Sequence
  Non-cyclic GFR-binding peptide
  MOD_RES (1), (3): Xaa is C or S
XAXELHEELRPYVKLLKPKKRVYEFFLVSLSSHHVRSP

SEQ ID NO: 23061 - protein, 42 aa, Artificial Sequence
  Non-cyclic GFR-binding peptide
  MOD_RES (1), (3), (37): Xaa is C or S
XEXKNHQLFPYVKLHQGQHPKIRFFLMSLSSEETPVXELGED

SEQ ID NO: 23062 - protein, 33 aa, Artificial Sequence
  Non-cyclic GFR-binding peptide
  MOD_RES (1), (32), (33): Xaa is C or S
XSRVIMPYVKLVKPKRGVFFLISLSSLAQPVXX

SEQ ID NO: 23063 - protein, 36 aa, Artificial Sequence
  Non-cyclic GFR-binding peptide
  MOD_RES (1), (1): Xaa is C or S
XELHEELRPYVKLLKPKKRVYEFFLVSLSSHHVRSP

SEQ ID NO: 23064 - protein, 38 aa, Artificial Sequence
  Non-cyclic GFR-binding peptide
  MOD_RES (2), (34), (35): Xaa is C or S
GXAEVVMDPYVKLVVNNAADFFLISLSSLRAPVXXSAP

SEQ ID NO: 23065 - protein, 38 aa, Artificial Sequence
  Non-cyclic GFR-binding peptide
  MOD_RES (1), (3), (36), (37): Xaa is C or S
XGXEAVSMGEPYVKLTPVGMDDFFLVSLSSLKTPVXXA

SEQ ID NO: 23066 - protein, 38 aa, Artificial Sequence
  Non-cyclic GFR-binding peptide
  MOD_RES (2), (4), (38): Xaa is C or S
  MOD_RES (16), (17), (18), (19), (20): Xaa is A or G
  MOD_RES (21), (22), (23), (24): Xaa is A or G or is absent
SXGXRDVVMGPYVKLXXXXXXXXXFFLMSLSSMKTPTX

SEQ ID NO: 23067 - protein, 43 aa, Artificial Sequence
  Non-cyclic GFR-binding peptide
  MOD_RES (2), (4), (38): Xaa is C or S
  MOD_RES (16), (17), (18), (19), (20): Xaa is A or G
  MOD_RES (21), (22), (23), (24): Xaa is A or G or is absent
RXEXKNHQLFPYVKLXXXXXXXXXFFLMSLSSEETPVXELGED

SEQ ID NO: 23068 - protein, 36 aa, Artificial Sequence
  Non-cyclic GFR-binding peptide
  MOD_RES (31), (32): Xaa is C or S
SKVIMPYVKLIKPTKGIFFLISLSSLDQSVXXPSAS

SEQ ID NO: 23069 - protein, 37 aa, Artificial Sequence
  Non-cyclic GFR-binding peptide
  MOD_RES (2), (2): Xaa is C or S
  MOD_RES (15), (16), (17), (18), (19): Xaa is A or G
  MOD_RES (20), (21), (22), (23): Xaa is A or G or is absent
AXELHEELRPYVKLXXXXXXXXXFFLVSLSSHHVRSP

SEQ ID NO: 23070 - protein, 42 aa, Artificial Sequence
  Non-cyclic GFR-binding peptide
  MOD_RES (1), (3), (36), (37): Xaa is C or S
  MOD_RES (14), (15), (16), (17), (18): Xaa is A or G
  MOD_RES (19), (20), (21), (22): Xaa is A or G or is absent
XKXSRVIMPYVKLXXXXXXXXXFFLISLSSLAQPVXXPAASA

SEQ ID NO: 23071 - protein, 33 aa, Artificial Sequence
  Non-cyclic GFR-binding peptide
  MOD_RES (1), (33): Xaa is C or S
XSRVVMNPYVKLIVNSSDDFFLVSLSSLKTPAX

SEQ ID NO: 23072 - protein, 33 aa, Artificial Sequence
  Non-cyclic GFR-binding peptide
  MOD_RES (1), (33): Xaa is C or S
XESVAMGPYVKLYTVVGKDFFLISLSSLKTPVX

SEQ ID NO: 23073 - protein, 34 aa, Artificial Sequence
  Non-cyclic GFR-binding peptide
  MOD_RES (31), (32): Xaa is C or S
SKVIMPYVKLIKPTKGIFFLISLSSLDQSVXXPS

SEQ ID NO: 23074 - protein, 36 aa, Artificial Sequence
  Non-cyclic GFR-binding peptide
  MOD_RES (31), (32): Xaa is C or S
SKVVMPYVKLVKPTRGVFFLISLSSLDQPVXXPSAS

SEQ ID NO: 23075 - protein, 37 aa, Artificial Sequence
  Non-cyclic GFR-binding peptide
  MOD_RES (31), (32): Xaa is C or S
SRVIMPYVKLVKPKRGVFFLISLSSLAQPVXXPAASA

SEQ ID NO: 23076 - protein, 41 aa, Artificial Sequence
  Non-cyclic GFR-binding peptide
  MOD_RES (2), (4), (37), (38): Xaa is C or S
  MOD_RES (15), (16), (17), (18), (19): Xaa is A or G
  MOD_RES (20), (21), (22), (23): Xaa is A or G or is absent
SXKXSKVVMPYVKLXXXXXXXXXFFLISLSSLDQPVXXPSA

SEQ ID NO: 23077 - protein, 35 aa, Artificial Sequence
  Non-cyclic GFR-binding peptide
  MOD_RES (1), (33), (34): Xaa is C or S
XGEVVMEPYVKLVVKDYEDFFLMSLSSLETPVXXA

SEQ ID NO: 23078 - protein, 34 aa, Artificial Sequence
  Non-cyclic GFR-binding peptide
  MOD_RES (33), (34): Xaa is C or S
  MOD_RES (11), (12), (13), (14), (15): Xaa is A or G
  MOD_RES (16), (17), (18), (19): Xaa is A or G or is absent
RVVMNPYVKLXXXXXXXXXFFLVSLSSLKTPAXX

SEQ ID NO: 23079 - protein, 32 aa, Artificial Sequence
  Non-cyclic GFR-binding peptide
  MOD_RES (32), (32): Xaa is C or S
GEVVMEPYVKLVVKDYEDFFLMSLSSLETPVX

SEQ ID NO: 23080 - protein, 42 aa, Artificial Sequence
  Non-cyclic GFR-binding peptide
  MOD_RES (1), (3), (37), (38): Xaa is C or S
  MOD_RES (15), (16), (17), (18), (19): Xaa is A or G
  MOD_RES (20), (21), (22), (23): Xaa is A or G or is absent
XGXRDVVMGPYVKLXXXXXXXXXFFLMSLSSMKTPTXXPGAS

SEQ ID NO: 23081 - protein, 34 aa, Artificial Sequence
  Non-cyclic GFR-binding peptide
  MOD_RES (33), (34): Xaa is C or S
  MOD_RES (11), (12), (13), (14), (15): Xaa is A or G
  MOD_RES (16), (17), (18), (19): Xaa is A or G or is absent
KVVMNPYVKLXXXXXXXXXFFLVSLSSLKTPAXX

SEQ ID NO: 23082 - protein, 31 aa, Artificial Sequence
  Non-cyclic GFR-binding peptide
  MOD_RES (31), (31): Xaa is C or S
RVVMNPYVKLIVNSSDDFFLVSLSSLKTPAX

SEQ ID NO: 23083 - protein, 38 aa, Artificial Sequence
  Non-cyclic GFR-binding peptide
  MOD_RES (2), (36), (37): Xaa is C or S
  MOD_RES (14), (15), (16), (17), (18): Xaa is A or G
  MOD_RES (19), (20), (21), (22): Xaa is A or G or is absent
GXRDVVMGPYVKLXXXXXXXXXFFLMSLSSMKTPTXXP

SEQ ID NO: 23084 - protein, 40 aa, Artificial Sequence
  Non-cyclic GFR-binding peptide
  MOD_RES (2), (4), (38): Xaa is C or S
  MOD_RES (16), (17), (18), (19), (20): Xaa is A or G
  MOD_RES (21), (22), (23), (24): Xaa is A or G or is absent
HXGXSRVVMNPYVKLXXXXXXXXXFFLVSLSSLKTPAXTP

SEQ ID NO: 23085 - protein, 38 aa, Artificial Sequence
  Non-cyclic GFR-binding peptide
  MOD_RES (2), (4), (36), (37): Xaa is C or S
RXGXSEVVMDPYVKLVVNNASDFFLISLSSLRTPVXXT

SEQ ID NO: 23086 - protein, 42 aa, Artificial Sequence
  Non-cyclic GFR-binding peptide
  MOD_RES (2), (4), (38): Xaa is C or S
RXEXKNHQLFPYVKLHQGQHPKIRFFLMSLSSEETPVXELGE

SEQ ID NO: 23087 - protein, 40 aa, Artificial Sequence
  Non-cyclic GFR-binding peptide
  MOD_RES (1), (3), (36), (37): Xaa is C or S
  MOD_RES (14), (15), (16), (17), (18): Xaa is A or G
  MOD_RES (19), (20), (21), (22): Xaa is A or G or is absent
XKXSKVIMPYVKLXXXXXXXXXFFLISLSSLDQSVXXPSA

SEQ ID NO: 23088 - protein, 37 aa, Artificial Sequence
  Non-cyclic GFR-binding peptide
  MOD_RES (1), (35): Xaa is C or S
XKNHQLFPYVKLHQGQHPKIRFFLMSLSSEETPVXEL

SEQ ID NO: 23089 - protein, 44 aa, Artificial Sequence
  Non-cyclic GFR-binding peptide
  MOD_RES (2), (4), (41): Xaa is C or S
  MOD_RES (17), (18), (19), (20), (21): Xaa is A or G
  MOD_RES (22), (23), (24), (25): Xaa is A or G or is absent
AXAXELHEELRPYVKLXXXXXXXXXFFLVSLSSHHVRSPQXKVS

SEQ ID NO: 23090 - protein, 39 aa, Artificial Sequence
  Non-cyclic GFR-binding peptide
  MOD_RES (2), (36), (37): Xaa is C or S
  MOD_RES (14), (15), (16), (17), (18): Xaa is A or G
  MOD_RES (19), (20), (21), (22): Xaa is A or G or is absent
GXARVVMNPYVKLXXXXXXXXXFFLVSLSSLQTPAXXPK

SEQ ID NO: 23091 - protein, 31 aa, Artificial Sequence
  Non-cyclic GFR-binding peptide
ESVAMGPYVKLYTVVGKDFFLISLSSLKTPV

SEQ ID NO: 23092 - protein, 34 aa, Artificial Sequence
  Non-cyclic GFR-binding peptide
  MOD_RES (12), (13), (14), (15), (16): Xaa is A or G
  MOD_RES (17), (18), (19), (20): Xaa is A or G or is absent
LHEELRPYVKLXXXXXXXXXFFLVSLSSHHVRSP

SEQ ID NO: 23093 - protein, 30 aa, Artificial Sequence
  Non-cyclic GFR-binding peptide
EEVIMPYVKLLLVRGNDFFLMSLSSTKVPA

SEQ ID NO: 23094 - protein, 36 aa, Artificial Sequence
  Non-cyclic GFR-binding peptide
  MOD_RES (33), (34): Xaa is C or S
  MOD_RES (11), (12), (13), (14), (15): Xaa is A or G
  MOD_RES (16), (17), (18), (19): Xaa is A or G or is absent
SVAMGPYVKLXXXXXXXXXFFLISLSSLKTPVXXAK

SEQ ID NO: 23095 - protein, 32 aa, Artificial Sequence
  Non-cyclic GFR-binding peptide
  MOD_RES (1), (32): Xaa is C or S
XSKVVMPYVKLVKPTRGVFFLISLSSLDQPVX

SEQ ID NO: 23096 - protein, 42 aa, Artificial Sequence
  Non-cyclic GFR-binding peptide
  MOD_RES (2), (4), (37), (38): Xaa is C or S
  MOD_RES (15), (16), (17), (18), (19): Xaa is A or G
  MOD_RES (20), (21), (22), (23): Xaa is A or G or is absent
LXGXEEVIMPYVKLXXXXXXXXXFFLMSLSSTKVPAXXTSPV

SEQ ID NO: 23097 - protein, 35 aa, Artificial Sequence
  Non-cyclic GFR-binding peptide
  MOD_RES (2), (2): Xaa is C or S
  MOD_RES (14), (15), (16), (17), (18): Xaa is A or G
  MOD_RES (19), (20), (21), (22): Xaa is A or G or is absent
GXGEVVMEPYVKLXXXXXXXXXFFLMSLSSLETPV

SEQ ID NO: 23098 - protein, 40 aa, Artificial Sequence
  Non-cyclic GFR-binding peptide
  MOD_RES (1), (3), (35), (36): Xaa is C or S
XGXESVAMGPYVKLYTVVGKDFFLISLSSLKTPVXXAKSA

SEQ ID NO: 23099 - protein, 36 aa, Artificial Sequence
  Non-cyclic GFR-binding peptide
  MOD_RES (1), (35), (36): Xaa is C or S
  MOD_RES (13), (14), (15), (16), (17): Xaa is A or G
  MOD_RES (18), (19), (20), (21): Xaa is A or G or is absent
XAEVVMDPYVKLXXXXXXXXXFFLISLSSLRAPVXX

SEQ ID NO: 23100 - protein, 36 aa, Artificial Sequence
  Non-cyclic GFR-binding peptide
  MOD_RES (1), (3), (35), (36): Xaa is C or S
XGXAEVVMDPYVKLVVNNAADFFLISLSSLRAPVXX

SEQ ID NO: 23101 - protein, 40 aa, Artificial Sequence
  Non-cyclic GFR-binding peptide
  MOD_RES (1), (3), (35), (36): Xaa is C or S
XGXGEVVMEPYVKLVVKDYEDFFLMSLSSLETPVXXAKPI

SEQ ID NO: 23102 - protein, 38 aa, Artificial Sequence
  Non-cyclic GFR-binding peptide
  MOD_RES (34), (34): Xaa is C or S
KNHQLFPYVKLHQGQHPKIRFFLMSLSSEETPVXELGE

SEQ ID NO: 23103 - protein, 33 aa, Artificial Sequence
  Non-cyclic GFR-binding peptide
  MOD_RES (32), (33): Xaa is C or S
SRVVMNPYVKLIVNSSDDFFLVSLSSLKTPAXX

SEQ ID NO: 23104 - protein, 42 aa, Artificial Sequence
  Non-cyclic GFR-binding peptide
  MOD_RES (2), (4), (38), (39): Xaa is C or S
  MOD_RES (16), (17), (18), (19), (20): Xaa is A or G
  MOD_RES (21), (22), (23), (24): Xaa is A or G or is absent
HXGXARVVMNPYVKLXXXXXXXXXFFLVSLSSLQTPAXXPKP

SEQ ID NO: 23105 - protein, 37 aa, Artificial Sequence
  Non-cyclic GFR-binding peptide
  MOD_RES (2), (4): Xaa is C or S
  MOD_RES (16), (17), (18), (19), (20): Xaa is A or G
  MOD_RES (21), (22), (23), (24): Xaa is A or G or is absent
RXGXESVAMGPYVKLXXXXXXXXXFFLISLSSLKTPV

SEQ ID NO: 23106 - protein, 39 aa, Artificial Sequence
  Non-cyclic GFR-binding peptide
  MOD_RES (2), (34), (35): Xaa is C or S
GXSEVVMDPYVKLVVNNASDFFLISLSSLRTPVXXTPPT

SEQ ID NO: 23107 - protein, 42 aa, Artificial Sequence
  Non-cyclic GFR-binding peptide
  MOD_RES (1), (3), (36), (37): Xaa is C or S
  MOD_RES (14), (15), (16), (17), (18): Xaa is A or G
  MOD_RES (19), (20), (21), (22): Xaa is A or G or is absent
XKXSKVIMPYVKLXXXXXXXXXFFLISLSSLDQSVXXPSASA

SEQ ID NO: 23108 - protein, 38 aa, Artificial Sequence
  Non-cyclic GFR-binding peptide
  MOD_RES (2), (36), (37): Xaa is C or S
  MOD_RES (14), (15), (16), (17), (18): Xaa is A or G
  MOD_RES (19), (20), (21), (22): Xaa is A or G or is absent
GXSRVVMNPYVKLXXXXXXXXXFFLVSLSSLKTPAXXP

SEQ ID NO: 23109 - protein, 39 aa, Artificial Sequence
  Non-cyclic GFR-binding peptide
  MOD_RES (2), (4), (38), (39): Xaa is C or S
  MOD_RES (16), (17), (18), (19), (20): Xaa is A or G
  MOD_RES (21), (22), (23), (24): Xaa is A or G or is absent
SXGXRDVVMGPYVKLXXXXXXXXXFFLMSLSSMKTPTXX

SEQ ID NO: 23110 - protein, 37 aa, Artificial Sequence
  Non-cyclic GFR-binding peptide
  MOD_RES (2), (36), (37): Xaa is C or S
  MOD_RES (14), (15), (16), (17), (18): Xaa is A or G
  MOD_RES (19), (20), (21), (22): Xaa is A or G or is absent
GXAEVVMDPYVKLXXXXXXXXXFFLISLSSLRAPVXX

SEQ ID NO: 23111 - protein, 41 aa, Artificial Sequence
  Non-cyclic GFR-binding peptide
  MOD_RES (2), (4), (38): Xaa is C or S
  MOD_RES (16), (17), (18), (19), (20): Xaa is A or G
  MOD_RES (21), (22), (23), (24): Xaa is A or G or is absent
HXGXSRVVMNPYVKLXXXXXXXXXFFLVSLSSLKTPAXTPK

SEQ ID NO: 23112 - protein, 35 aa, Artificial Sequence
  Non-cyclic GFR-binding peptide
  MOD_RES (1), (34), (35): Xaa is C or S
  MOD_RES (12), (13), (14), (15), (16): Xaa is A or G
  MOD_RES (17), (18), (19), (20): Xaa is A or G or is absent
XEEVIMPYVKLXXXXXXXXXFFLMSLSSTKVPAXX

SEQ ID NO: 23113 - protein, 37 aa, Artificial Sequence
  Non-cyclic GFR-binding peptide
  MOD_RES (34), (35): Xaa is C or S
  MOD_RES (12), (13), (14), (15), (16): Xaa is A or G
  MOD_RES (17), (18), (19), (20): Xaa is A or G or is absent
GEVVMEPYVKLXXXXXXXXXFFLMSLSSLETPVXXAK

SEQ ID NO: 23114 - protein, 35 aa, Artificial Sequence
  Non-cyclic GFR-binding peptide
  MOD_RES (31), (32): Xaa is C or S
EEVIMPYVKLLLVRGNDFFLMSLSSTKVPAXXTSP

SEQ ID NO: 23115 - protein, 41 aa, Artificial Sequence
  Non-cyclic GFR-binding peptide
  MOD_RES (1), (35): Xaa is C or S
  MOD_RES (13), (14), (15), (16), (17): Xaa is A or G
  MOD_RES (18), (19), (20), (21): Xaa is A or G or is absent
XSRVVMNPYVKLXXXXXXXXXFFLVSLSSLKTPAXTPKTVH

SEQ ID NO: 23116 - protein, 41 aa, Artificial Sequence
  Non-cyclic GFR-binding peptide
  MOD_RES (1), (35), (36): Xaa is C or S
  MOD_RES (13), (14), (15), (16), (17): Xaa is A or G
  MOD_RES (18), (19), (20), (21): Xaa is A or G or is absent
XRDVVMGPYVKLXXXXXXXXXFFLMSLSSMKTPTXXPGASG

SEQ ID NO: 23117 - protein, 35 aa, Artificial Sequence
  Non-cyclic GFR-binding peptide
  MOD_RES (2), (33), (34): Xaa is C or S
GXEEVIMPYVKLLLVRGNDFFLMSLSSTKVPAXXT

SEQ ID NO: 23118 - protein, 38 aa, Artificial Sequence
  Non-cyclic GFR-binding peptide
  MOD_RES (2), (34), (35): Xaa is C or S
GXRDVVMGPYVKLIIQQKDNFFLMSLSSMKTPTXXPGA

SEQ ID NO: 23119 - protein, 36 aa, Artificial Sequence
  Non-cyclic GFR-binding peptide
  MOD_RES (1), (3): Xaa is C or S
  MOD_RES (15), (16), (17), (18), (19): Xaa is A or G
  MOD_RES (20), (21), (22), (23): Xaa is A or G or is absent
XGXESVAMGPYVKLXXXXXXXXXFFLISLSSLKTPV

SEQ ID NO: 23120 - protein, 41 aa, Artificial Sequence
  Non-cyclic GFR-binding peptide
  MOD_RES (2), (36): Xaa is C or S
EXKNHQLFPYVKLHQGQHPKIRFFLMSLSSEETPVXELGED

SEQ ID NO: 23121 - protein, 37 aa, Artificial Sequence
  Non-cyclic GFR-binding peptide
  MOD_RES (34), (34): Xaa is C or S
  MOD_RES (12), (13), (14), (15), (16): Xaa is A or G
  MOD_RES (17), (18), (19), (20): Xaa is A or G or is absent
KNHQLFPYVKLXXXXXXXXXFFLMSLSSEETPVXELG

SEQ ID NO: 23122 - protein, 37 aa, Artificial Sequence
  Non-cyclic GFR-binding peptide
  MOD_RES (2), (34), (35): Xaa is C or S
GXSEVVMDPYVKLVVNNASDFFLISLSSLRTPVXXTP

SEQ ID NO: 23123 - protein, 39 aa, Artificial Sequence
  Non-cyclic GFR-binding peptide
  MOD_RES (1), (3), (34), (35): Xaa is C or S
XKXSRVIMPYVKLVKPKRGVFFLISLSSLAQPVXXPAAS

SEQ ID NO: 23124 - protein, 36 aa, Artificial Sequence
  Non-cyclic GFR-binding peptide
  MOD_RES (1), (32), (33): Xaa is C or S
XEEVIMPYVKLLLVRGNDFFLMSLSSTKVPAXXTSP

SEQ ID NO: 23125 - protein, 37 aa, Artificial Sequence
  Non-cyclic GFR-binding peptide
  MOD_RES (1), (34), (35): Xaa is C or S
  MOD_RES (12), (13), (14), (15), (16): Xaa is A or G
  MOD_RES (17), (18), (19), (20): Xaa is A or G or is absent
XSKVIMPYVKLXXXXXXXXXFFLISLSSLDQSVXXPS

SEQ ID NO: 23126 - protein, 41 aa, Artificial Sequence
  Non-cyclic GFR-binding peptide
  MOD_RES (1), (3), (36), (37): Xaa is C or S
  MOD_RES (14), (15), (16), (17), (18): Xaa is A or G
  MOD_RES (19), (20), (21), (22): Xaa is A or G or is absent
XKXSKVVMPYVKLXXXXXXXXXFFLISLSSLDQPVXXPSAS

SEQ ID NO: 23127 - protein, 36 aa, Artificial Sequence
  Non-cyclic GFR-binding peptide
  MOD_RES (2), (33), (34): Xaa is C or S
KXSKVVMPYVKLVKPTRGVFFLISLSSLDQPVXXPS

SEQ ID NO: 23128 - protein, 39 aa, Artificial Sequence
  Non-cyclic GFR-binding peptide
  MOD_RES (2), (4), (37), (38): Xaa is C or S
RXGXEAVSMGEPYVKLTPVGMDDFFLVSLSSLKTPVXXA

SEQ ID NO: 23129 - protein, 35 aa, Artificial Sequence
  Non-cyclic GFR-binding peptide
  MOD_RES (31), (32): Xaa is C or S
SVAMGPYVKLYTVVGKDFFLISLSSLKTPVXXAKS

SEQ ID NO: 23130 - protein, 38 aa, Artificial Sequence
  Non-cyclic GFR-binding peptide
  MOD_RES (2), (33), (34): Xaa is C or S
KXSRVIMPYVKLVKPKRGVFFLISLSSLAQPVXXPAAS

SEQ ID NO: 23131 - protein, 34 aa, Artificial Sequence
  Non-cyclic GFR-binding peptide
  MOD_RES (31), (32): Xaa is C or S
SVAMGPYVKLYTVVGKDFFLISLSSLKTPVXXAK

SEQ ID NO: 23132 - protein, 36 aa, Artificial Sequence
  Non-cyclic GFR-binding peptide
  MOD_RES (2), (35), (36): Xaa is C or S
GXEAVSMGEPYVKLTPVGMDDFFLVSLSSLKTPVXX

SEQ ID NO: 23133 - protein, 36 aa, Artificial Sequence
  Non-cyclic GFR-binding peptide
  MOD_RES (1), (32), (33): Xaa is C or S
XSRVIMPYVKLVKPKRGVFFLISLSSLAQPVXXPAA

SEQ ID NO: 23134 - protein, 38 aa, Artificial Sequence
  Non-cyclic GFR-binding peptide
  MOD_RES (34), (35): Xaa is C or S
  MOD_RES (12), (13), (14), (15), (16): Xaa is A or G
  MOD_RES (17), (18), (19), (20): Xaa is A or G or is absent
ESVAMGPYVKLXXXXXXXXXFFLISLSSLKTPVXXAKS

SEQ ID NO: 23135 - protein, 35 aa, Artificial Sequence
  Non-cyclic GFR-binding peptide
  MOD_RES (1), (35): Xaa is C or S
  MOD_RES (13), (14), (15), (16), (17): Xaa is A or G
  MOD_RES (18), (19), (20), (21): Xaa is A or G or is absent
XAEVVMDPYVKLXXXXXXXXXFFLISLSSLRAPVX

SEQ ID NO: 23136 - protein, 41 aa, Artificial Sequence
  Non-cyclic GFR-binding peptide
  MOD_RES (2), (35), (36): Xaa is C or S
  MOD_RES (13), (14), (15), (16), (17): Xaa is A or G
  MOD_RES (18), (19), (20), (21): Xaa is A or G or is absent
KXSRVIMPYVKLXXXXXXXXXFFLISLSSLAQPVXXPAASA

SEQ ID NO: 23137 - protein, 35 aa, Artificial Sequence
  Non-cyclic GFR-binding peptide
  MOD_RES (2), (35): Xaa is C or S
GXEAVSMGEPYVKLTPVGMDDFFLVSLSSLKTPVX

SEQ ID NO: 23138 - protein, 38 aa, Artificial Sequence
  Non-cyclic GFR-binding peptide
  MOD_RES (2), (4), (36), (37): Xaa is C or S
HXGXAKVVMNPYVKLIVNNSSDFFLVSLSSLKTPAXXA

SEQ ID NO: 23139 - protein, 34 aa, Artificial Sequence
  Non-cyclic GFR-binding peptide
  MOD_RES (1), (1): Xaa is C or S
  MOD_RES (13), (14), (15), (16), (17): Xaa is A or G
  MOD_RES (18), (19), (20), (21): Xaa is A or G or is absent
XRDVVMGPYVKLXXXXXXXXXFFLMSLSSMKTPT

SEQ ID NO: 23140 - protein, 33 aa, Artificial Sequence
  Non-cyclic GFR-binding peptide
KNHQLFPYVKLHQGQHPKIRFFLMSLSSEETPV

SEQ ID NO: 23141 - protein, 41 aa, Artificial Sequence
  Non-cyclic GFR-binding peptide
  MOD_RES (1), (35): Xaa is C or S
XKNHQLFPYVKLHQGQHPKIRFFLMSLSSEETPVXELGEDN

SEQ ID NO: 23142 - protein, 37 aa, Artificial Sequence
  Non-cyclic GFR-binding peptide
  MOD_RES (1), (34), (35): Xaa is C or S
  MOD_RES (12), (13), (14), (15), (16): Xaa is A or G
  MOD_RES (17), (18), (19), (20): Xaa is A or G or is absent
XSRVIMPYVKLXXXXXXXXXFFLISLSSLAQPVXXPA

SEQ ID NO: 23143 - protein, 39 aa, Artificial Sequence
  Non-cyclic GFR-binding peptide
  MOD_RES (2), (33), (34): Xaa is C or S
KXSKVVMPYVKLVKPTRGVFFLISLSSLDQPVXXPSASA

SEQ ID NO: 23144 - protein, 36 aa, Artificial Sequence
  Non-cyclic GFR-binding peptide
  MOD_RES (1), (35): Xaa is C or S
  MOD_RES (13), (14), (15), (16), (17): Xaa is A or G
  MOD_RES (18), (19), (20), (21): Xaa is A or G or is absent
XSRVVMNPYVKLXXXXXXXXXFFLVSLSSLKTPAXT

SEQ ID NO: 23145 - protein, 36 aa, Artificial Sequence
  Non-cyclic GFR-binding peptide
  MOD_RES (32), (33): Xaa is C or S
GEVVMEPYVKLVVKDYEDFFLMSLSSLETPVXXAKP

SEQ ID NO: 23146 - protein, 37 aa, Artificial Sequence
  Non-cyclic GFR-binding peptide
  MOD_RES (31), (32): Xaa is C or S
RVVMNPYVKLIVNSSDDFFLVSLSSLQTPAXXPKPVT

SEQ ID NO: 23147 - protein, 30 aa, Artificial Sequence
  Non-cyclic GFR-binding peptide
RVVMNPYVKLIVNSSDDFFLVSLSSLQTPA

SEQ ID NO: 23148 - protein, 32 aa, Artificial Sequence
  Non-cyclic GFR-binding peptide
  MOD_RES (31), (32): Xaa is C or S
SKVVMPYVKLVKPTRGVFFLISLSSLDQPVXX

SEQ ID NO: 23149 - protein, 36 aa, Artificial Sequence
  Non-cyclic GFR-binding peptide
  MOD_RES (31), (31): Xaa is C or S
RVVMNPYVKLIVNSSDDFFLVSLSSLKTPAXTPKTV

SEQ ID NO: 23150 - protein, 33 aa, Artificial Sequence
  Non-cyclic GFR-binding peptide
  MOD_RES (2), (2): Xaa is C or S
GXGEVVMEPYVKLVVKDYEDFFLMSLSSLETPV

SEQ ID NO: 23151 - protein, 39 aa, Artificial Sequence
  Non-cyclic GFR-binding peptide
  MOD_RES (2), (36), (37): Xaa is C or S
  MOD_RES (14), (15), (16), (17), (18): Xaa is A or G
  MOD_RES (19), (20), (21), (22): Xaa is A or G or is absent
GXAEVVMDPYVKLXXXXXXXXXFFLISLSSLRAPVXXSA

SEQ ID NO: 23152 - protein, 36 aa, Artificial Sequence
  Non-cyclic GFR-binding peptide
  MOD_RES (2), (35), (36): Xaa is C or S
  MOD_RES (13), (14), (15), (16), (17): Xaa is A or G
  MOD_RES (18), (19), (20), (21): Xaa is A or G or is absent
KXSKVIMPYVKLXXXXXXXXXFFLISLSSLDQSVXX

SEQ ID NO: 23153 - protein, 39 aa, Artificial Sequence
  Non-cyclic GFR-binding peptide
  MOD_RES (1), (3), (36), (37): Xaa is C or S
  MOD_RES (14), (15), (16), (17), (18): Xaa is A or G
  MOD_RES (19), (20), (21), (22): Xaa is A or G or is absent
XKXSRVIMPYVKLXXXXXXXXXFFLISLSSLAQPVXXPA

SEQ ID NO: 23154 - protein, 39 aa, Artificial Sequence
  Non-cyclic GFR-binding peptide
  MOD_RES (1), (33), (34): Xaa is C or S
XSEVVMDPYVKLVVNNASDFFLISLSSLRTPVXXTPPTS

SEQ ID NO: 23155 - protein, 38 aa, Artificial Sequence
  Non-cyclic GFR-binding peptide
  MOD_RES (2), (34), (35): Xaa is C or S
GXAKVVMNPYVKLIVNNSSDFFLVSLSSLKTPAXXAKP

SEQ ID NO: 23156 - protein, 35 aa, Artificial Sequence
  Non-cyclic GFR-binding peptide
  MOD_RES (1), (33), (34): Xaa is C or S
XARVVMNPYVKLIVNSSDDFFLVSLSSLQTPAXXP

SEQ ID NO: 23157 - protein, 34 aa, Artificial Sequence
  Non-cyclic GFR-binding peptide
  MOD_RES (33), (34): Xaa is C or S
  MOD_RES (11), (12), (13), (14), (15): Xaa is A or G
  MOD_RES (16), (17), (18), (19): Xaa is A or G or is absent
EVVMDPYVKLXXXXXXXXXFFLISLSSLRAPVXX

SEQ ID NO: 23158 - protein, 38 aa, Artificial Sequence
  Non-cyclic GFR-binding peptide
  MOD_RES (32), (33): Xaa is C or S
AEVVMDPYVKLVVNNAADFFLISLSSLRAPVXXSAPAA

SEQ ID NO: 23159 - protein, 32 aa, Artificial Sequence
  Non-cyclic GFR-binding peptide
  MOD_RES (32), (32): Xaa is C or S
ARVVMNPYVKLIVNSSDDFFLVSLSSLQTPAX

SEQ ID NO: 23160 - protein, 37 aa, Artificial Sequence
  Non-cyclic GFR-binding peptide
  MOD_RES (2), (4), (35), (36): Xaa is C or S
SXKXSKVIMPYVKLIKPTKGIFFLISLSSLDQSVXXP

SEQ ID NO: 23161 - protein, 43 aa, Artificial Sequence
  Non-cyclic GFR-binding peptide
  MOD_RES (2), (4), (41): Xaa is C or S
AXAXELHEELRPYVKLLKPKKRVYEFFLVSLSSHHVRSPQXKV

SEQ ID NO: 23162 - protein, 39 aa, Artificial Sequence
  Non-cyclic GFR-binding peptide
  MOD_RES (33), (34): Xaa is C or S
  MOD_RES (11), (12), (13), (14), (15): Xaa is A or G
  MOD_RES (16), (17), (18), (19): Xaa is A or G or is absent
SVAMGPYVKLXXXXXXXXXFFLISLSSLKTPVXXAKSAK

SEQ ID NO: 23163 - protein, 37 aa, Artificial Sequence
  Non-cyclic GFR-binding peptide
  MOD_RES (2), (4), (37): Xaa is C or S
  MOD_RES (15), (16), (17), (18), (19): Xaa is A or G
  MOD_RES (20), (21), (22), (23): Xaa is A or G or is absent
SXKXSKVIMPYVKLXXXXXXXXXFFLISLSSLDQSVX

SEQ ID NO: 23164 - protein, 36 aa, Artificial Sequence
  Non-cyclic GFR-binding peptide
  MOD_RES (1), (35), (36): Xaa is C or S
  MOD_RES (13), (14), (15), (16), (17): Xaa is A or G
  MOD_RES (18), (19), (20), (21): Xaa is A or G or is absent
XSEVVMDPYVKLXXXXXXXXXFFLISLSSLRTPVXX

SEQ ID NO: 23165 - protein, 40 aa, Artificial Sequence
  Non-cyclic GFR-binding peptide
  MOD_RES (2), (4), (38), (39): Xaa is C or S
  MOD_RES (16), (17), (18), (19), (20): Xaa is A or G
  MOD_RES (21), (22), (23), (24): Xaa is A or G or is absent
HXGXSRVVMNPYVKLXXXXXXXXXFFLVSLSSLKTPAXXP

SEQ ID NO: 23166 - protein, 38 aa, Artificial Sequence
  Non-cyclic GFR-binding peptide
  MOD_RES (33), (34): Xaa is C or S
  MOD_RES (11), (12), (13), (14), (15): Xaa is A or G
  MOD_RES (16), (17), (18), (19): Xaa is A or G or is absent
RVVMNPYVKLXXXXXXXXXFFLVSLSSLQTPAXXPKPV

SEQ ID NO: 23167 - protein, 33 aa, Artificial Sequence
  Non-cyclic GFR-binding peptide
  MOD_RES (2), (33): Xaa is C or S
KXSKVVMPYVKLVKPTRGVFFLISLSSLDQPVX

SEQ ID NO: 23168 - protein, 38 aa, Artificial Sequence
  Non-cyclic GFR-binding peptide
  MOD_RES (2), (4), (38): Xaa is C or S
  MOD_RES (16), (17), (18), (19), (20): Xaa is A or G
  MOD_RES (21), (22), (23), (24): Xaa is A or G or is absent
RXGXGEVVMEPYVKLXXXXXXXXXFFLMSLSSLETPVX

SEQ ID NO: 23169 - protein, 42 aa, Artificial Sequence
  Non-cyclic GFR-binding peptide
  MOD_RES (2), (36), (37): Xaa is C or S
  MOD_RES (14), (15), (16), (17), (18): Xaa is A or G
  MOD_RES (19), (20), (21), (22): Xaa is A or G or is absent
GXSRVVMNPYVKLXXXXXXXXXFFLVSLSSLKTPAXXPKPVH

SEQ ID NO: 23170 - protein, 44 aa, Artificial Sequence
  Non-cyclic GFR-binding peptide
  MOD_RES (2), (4), (38), (39): Xaa is C or S
  MOD_RES (16), (17), (18), (19), (20): Xaa is A or G
  MOD_RES (21), (22), (23), (24): Xaa is A or G or is absent
HXGXSRVVMNPYVKLXXXXXXXXXFFLVSLSSLKTPAXXPKPVH

SEQ ID NO: 23171 - protein, 41 aa, Artificial Sequence
  Non-cyclic GFR-binding peptide
  MOD_RES (1), (35), (36): Xaa is C or S
  MOD_RES (13), (14), (15), (16), (17): Xaa is A or G
  MOD_RES (18), (19), (20), (21): Xaa is A or G or is absent
XGEVVMEPYVKLXXXXXXXXXFFLMSLSSLETPVXXAKPIS

SEQ ID NO: 23172 - protein, 41 aa, Artificial Sequence
  Non-cyclic GFR-binding peptide
  MOD_RES (1), (35), (36): Xaa is C or S
  MOD_RES (13), (14), (15), (16), (17): Xaa is A or G
  MOD_RES (18), (19), (20), (21): Xaa is A or G or is absent
XARVVMNPYVKLXXXXXXXXXFFLVSLSSLQTPAXXPKPVT

SEQ ID NO: 23173 - protein, 31 aa, Artificial Sequence
  Non-cyclic GFR-binding peptide
  MOD_RES (31), (31): Xaa is C or S
SKVVMPYVKLVKPTRGVFFLISLSSLDQPVX

SEQ ID NO: 23174 - protein, 40 aa, Artificial Sequence
  Non-cyclic GFR-binding peptide
  MOD_RES (2), (35), (36): Xaa is C or S
  MOD_RES (13), (14), (15), (16), (17): Xaa is A or G
  MOD_RES (18), (19), (20), (21): Xaa is A or G or is absent
KXSKVVMPYVKLXXXXXXXXXFFLISLSSLDQPVXXPSAS

SEQ ID NO: 23175 - protein, 41 aa, Artificial Sequence
  Non-cyclic GFR-binding peptide
  MOD_RES (1), (3), (35), (36): Xaa is C or S
XGXGEVVMEPYVKLVVKDYEDFFLMSLSSLETPVXXAKPIS

SEQ ID NO: 23176 - protein, 39 aa, Artificial Sequence
  Non-cyclic GFR-binding peptide
  MOD_RES (2), (4), (36), (37): Xaa is C or S
RXGXGEVVMEPYVKLVVKDYEDFFLMSLSSLETPVXXAK

SEQ ID NO: 23177 - protein, 40 aa, Artificial Sequence
  Non-cyclic GFR-binding peptide
  MOD_RES (2), (36): Xaa is C or S
EXKNHQLFPYVKLHQGQHPKIRFFLMSLSSEETPVXELGE

SEQ ID NO: 23178 - protein, 40 aa, Artificial Sequence
  Non-cyclic GFR-binding peptide
  MOD_RES (34), (35): Xaa is C or S
  MOD_RES (12), (13), (14), (15), (16): Xaa is A or G
  MOD_RES (17), (18), (19), (20): Xaa is A or G or is absent
AKVVMNPYVKLXXXXXXXXXFFLVSLSSLKTPAXXAKPVA

SEQ ID NO: 23179 - protein, 39 aa, Artificial Sequence
  Non-cyclic GFR-binding peptide
  MOD_RES (1), (3), (37), (38): Xaa is C or S
  MOD_RES (15), (16), (17), (18), (19): Xaa is A or G
  MOD_RES (20), (21), (22), (23): Xaa is A or G or is absent
XGXARVVMNPYVKLXXXXXXXXXFFLVSLSSLQTPAXXP

SEQ ID NO: 23180 - protein, 37 aa, Artificial Sequence
  Non-cyclic GFR-binding peptide
  MOD_RES (32), (33): Xaa is C or S
AEVVMDPYVKLVVNNAADFFLISLSSLRAPVXXSAPA

SEQ ID NO: 23181 - protein, 38 aa, Artificial Sequence
  Non-cyclic GFR-binding peptide
  MOD_RES (1), (3), (37), (38): Xaa is C or S
  MOD_RES (15), (16), (17), (18), (19): Xaa is A or G
  MOD_RES (20), (21), (22), (23): Xaa is A or G or is absent
XGXESVAMGPYVKLXXXXXXXXXFFLISLSSLKTPVXX

SEQ ID NO: 23182 - protein, 36 aa, Artificial Sequence
  Non-cyclic GFR-binding peptide
  MOD_RES (1), (33), (34): Xaa is C or S
XAKVVMNPYVKLIVNNSSDFFLVSLSSLKTPAXXAK

SEQ ID NO: 23183 - protein, 40 aa, Artificial Sequence
  Non-cyclic GFR-binding peptide
  MOD_RES (1), (3), (40): Xaa is C or S
XAXELHEELRPYVKLLKPKKRVYEFFLVSLSSHHVRSPQX

SEQ ID NO: 23184 - protein, 40 aa, Artificial Sequence
  Non-cyclic GFR-binding peptide
  MOD_RES (1), (3), (36), (37): Xaa is C or S
  MOD_RES (14), (15), (16), (17), (18): Xaa is A or G
  MOD_RES (19), (20), (21), (22): Xaa is A or G or is absent
XGXEEVIMPYVKLXXXXXXXXXFFLMSLSSTKVPAXXTSP

SEQ ID NO: 23185 - protein, 35 aa, Artificial Sequence
  Non-cyclic GFR-binding peptide
  MOD_RES (1), (35): Xaa is C or S
  MOD_RES (13), (14), (15), (16), (17): Xaa is A or G
  MOD_RES (18), (19), (20), (21): Xaa is A or G or is absent
XGEVVMEPYVKLXXXXXXXXXFFLMSLSSLETPVX

SEQ ID NO: 23186 - protein, 37 aa, Artificial Sequence
  Non-cyclic GFR-binding peptide
  MOD_RES (2), (35), (36): Xaa is C or S
  MOD_RES (13), (14), (15), (16), (17): Xaa is A or G
  MOD_RES (18), (19), (20), (21): Xaa is A or G or is absent
KXSRVIMPYVKLXXXXXXXXXFFLISLSSLAQPVXXP

SEQ ID NO: 23187 - protein, 36 aa, Artificial Sequence
  Non-cyclic GFR-binding peptide
  MOD_RES (34), (35): Xaa is C or S
  MOD_RES (12), (13), (14), (15), (16): Xaa is A or G
  MOD_RES (17), (18), (19), (20): Xaa is A or G or is absent
AKVVMNPYVKLXXXXXXXXXFFLVSLSSLKTPAXXA

SEQ ID NO: 23188 - protein, 39 aa, Artificial Sequence
  Non-cyclic GFR-binding peptide
  MOD_RES (1), (3), (35), (36): Xaa is C or S
XGXSEVVMDPYVKLVVNNASDFFLISLSSLRTPVXXTPP

SEQ ID NO: 23189 - protein, 41 aa, Artificial Sequence
  Non-cyclic GFR-binding peptide
  MOD_RES (2), (4), (36), (37): Xaa is C or S
RXGXAEVVMDPYVKLVVNNAADFFLISLSSLRAPVXXSAPA

SEQ ID NO: 23190 - protein, 43 aa, Artificial Sequence
  Non-cyclic GFR-binding peptide
  MOD_RES (2), (4), (38): Xaa is C or S
RXEXKNHQLFPYVKLHQGQHPKIRFFLMSLSSEETPVXELGED

SEQ ID NO: 23191 - protein, 35 aa, Artificial Sequence
  Non-cyclic GFR-binding peptide
  MOD_RES (2), (34): Xaa is C or S
GXSRVVMNPYVKLIVNSSDDFFLVSLSSLKTPAXT

SEQ ID NO: 23192 - protein, 37 aa, Artificial Sequence
  Non-cyclic GFR-binding peptide
  MOD_RES (33), (34): Xaa is C or S
  MOD_RES (11), (12), (13), (14), (15): Xaa is A or G
  MOD_RES (16), (17), (18), (19): Xaa is A or G or is absent
DVVMGPYVKLXXXXXXXXXFFLMSLSSMKTPTXXPGA

SEQ ID NO: 23193 - protein, 41 aa, Artificial Sequence
  Non-cyclic GFR-binding peptide
  MOD_RES (2), (36): Xaa is C or S
  MOD_RES (14), (15), (16), (17), (18): Xaa is A or G
  MOD_RES (19), (20), (21), (22): Xaa is A or G or is absent
GXSRVVMNPYVKLXXXXXXXXXFFLVSLSSLKTPAXTPKTV

SEQ ID NO: 23194 - protein, 36 aa, Artificial Sequence
  Non-cyclic GFR-binding peptide
  MOD_RES (2), (4), (36): Xaa is C or S
HXGXSRVVMNPYVKLIVNSSDDFFLVSLSSLKTPAX

SEQ ID NO: 23195 - protein, 38 aa, Artificial Sequence
  Non-cyclic GFR-binding peptide
  MOD_RES (2), (4), (36), (37): Xaa is C or S
HXGXSRVVMNPYVKLIVNSSDDFFLVSLSSLKTPAXXP

SEQ ID NO: 23196 - protein, 41 aa, Artificial Sequence
  Non-cyclic GFR-binding peptide
  MOD_RES (1), (3), (37): Xaa is C or S
  MOD_RES (15), (16), (17), (18), (19): Xaa is A or G
  MOD_RES (20), (21), (22), (23): Xaa is A or G or is absent
XEXKNHQLFPYVKLXXXXXXXXXFFLMSLSSEETPVXELGE

SEQ ID NO: 23197 - protein, 34 aa, Artificial Sequence
  Non-cyclic GFR-binding peptide
  MOD_RES (1), (3): Xaa is C or S
XGXSRVVMNPYVKLIVNSSDDFFLVSLSSLKTPA

SEQ ID NO: 23198 - protein, 37 aa, Artificial Sequence
  Non-cyclic GFR-binding peptide
  MOD_RES (2), (4), (36), (37): Xaa is C or S
RXGXAEVVMDPYVKLVVNNAADFFLISLSSLRAPVXX

SEQ ID NO: 23199 - protein, 37 aa, Artificial Sequence
  Non-cyclic GFR-binding peptide
  MOD_RES (2), (34), (35): Xaa is C or S
GXESVAMGPYVKLYTVVGKDFFLISLSSLKTPVXXAK

SEQ ID NO: 23200 - protein, 36 aa, Artificial Sequence
  Non-cyclic GFR-binding peptide
  MOD_RES (1), (3): Xaa is C or S
  MOD_RES (15), (16), (17), (18), (19): Xaa is A or G
  MOD_RES (20), (21), (22), (23): Xaa is A or G or is absent
XGXGEVVMEPYVKLXXXXXXXXXFFLMSLSSLETPV

SEQ ID NO: 23201 - protein, 37 aa, Artificial Sequence
  Non-cyclic GFR-binding peptide
  MOD_RES (1), (3), (36), (37): Xaa is C or S
  MOD_RES (14), (15), (16), (17), (18): Xaa is A or G
  MOD_RES (19), (20), (21), (22): Xaa is A or G or is absent
XKXSKVVMPYVKLXXXXXXXXXFFLISLSSLDQPVXX

SEQ ID NO: 23202 - protein, 34 aa, Artificial Sequence
  Non-cyclic GFR-binding peptide
  MOD_RES (33), (33): Xaa is C or S
  MOD_RES (11), (12), (13), (14), (15): Xaa is A or G
  MOD_RES (16), (17), (18), (19): Xaa is A or G or is absent
RVVMNPYVKLXXXXXXXXXFFLVSLSSLKTPAXT

SEQ ID NO: 23203 - protein, 39 aa, Artificial Sequence
  Non-cyclic GFR-binding peptide
  MOD_RES (2), (33), (34): Xaa is C or S
GXEEVIMPYVKLLLVRGNDFFLMSLSSTKVPAXXTSPVR

SEQ ID NO: 23204 - protein, 38 aa, Artificial Sequence
  Non-cyclic GFR-binding peptide
  MOD_RES (1), (33), (34): Xaa is C or S
XAKVVMNPYVKLIVNNSSDFFLVSLSSLKTPAXXAKPV

SEQ ID NO: 23205 - protein, 39 aa, Artificial Sequence
  Non-cyclic GFR-binding peptide
  MOD_RES (1), (3), (36), (37): Xaa is C or S
  MOD_RES (14), (15), (16), (17), (18): Xaa is A or G
  MOD_RES (19), (20), (21), (22): Xaa is A or G or is absent
XGXEEVIMPYVKLXXXXXXXXXFFLMSLSSTKVPAXXTS

SEQ ID NO: 23206 - protein, 39 aa, Artificial Sequence
  Non-cyclic GFR-binding peptide
  MOD_RES (36), (36): Xaa is C or S
  MOD_RES (12), (13), (14), (15), (16): Xaa is A or G
  MOD_RES (17), (18), (19), (20): Xaa is A or G or is absent
LHEELRPYVKLXXXXXXXXXFFLVSLSSHHVRSPQXKVS

SEQ ID NO: 23207 - protein, 41 aa, Artificial Sequence
  Non-cyclic GFR-binding peptide
  MOD_RES (2), (35), (36): Xaa is C or S
GXEAVSMGEPYVKLTPVGMDDFFLVSLSSLKTPVXXAKGVK

SEQ ID NO: 23208 - protein, 37 aa, Artificial Sequence
  Non-cyclic GFR-binding peptide
  MOD_RES (2), (4): Xaa is C or S
  MOD_RES (16), (17), (18), (19), (20): Xaa is A or G
  MOD_RES (21), (22), (23), (24): Xaa is A or G or is absent
HXGXAKVVMNPYVKLXXXXXXXXXFFLVSLSSLKTPA

SEQ ID NO: 23209 - protein, 34 aa, Artificial Sequence
  Non-cyclic GFR-binding peptide
  MOD_RES (2), (4): Xaa is C or S
SXKXSKVIMPYVKLIKPTKGIFFLISLSSLDQSV

SEQ ID NO: 23210 - protein, 43 aa, Artificial Sequence
  Non-cyclic GFR-binding peptide
  MOD_RES (1), (3), (38), (39): Xaa is C or S
  MOD_RES (16), (17), (18), (19), (20): Xaa is A or G
  MOD_RES (21), (22), (23), (24): Xaa is A or G or is absent
XGXEAVSMGEPYVKLXXXXXXXXXFFLVSLSSLKTPVXXAKGV

SEQ ID NO: 23211 - protein, 41 aa, Artificial Sequence
  Non-cyclic GFR-binding peptide
  MOD_RES (2), (4), (41): Xaa is C or S
  MOD_RES (17), (18), (19), (20), (21): Xaa is A or G
  MOD_RES (22), (23), (24), (25): Xaa is A or G or is absent
AXAXELHEELRPYVKLXXXXXXXXXFFLVSLSSHHVRSPQX

SEQ ID NO: 23212 - protein, 42 aa, Artificial Sequence
  Non-cyclic GFR-binding peptide
  MOD_RES (1), (3), (37), (38): Xaa is C or S
  MOD_RES (15), (16), (17), (18), (19): Xaa is A or G
  MOD_RES (20), (21), (22), (23): Xaa is A or G or is absent
XGXSEVVMDPYVKLXXXXXXXXXFFLISLSSLRTPVXXTPPT

SEQ ID NO: 23213 - protein, 41 aa, Artificial Sequence
  Non-cyclic GFR-binding peptide
  MOD_RES (2), (39): Xaa is C or S
AXELHEELRPYVKLLKPKKRVYEFFLVSLSSHHVRSPQXKV

SEQ ID NO: 23214 - protein, 32 aa, Artificial Sequence
  Non-cyclic GFR-binding peptide
  MOD_RES (32), (32): Xaa is C or S
SEVVMDPYVKLVVNNASDFFLISLSSLRTPVX

SEQ ID NO: 23215 - protein, 34 aa, Artificial Sequence
  Non-cyclic GFR-binding peptide
  MOD_RES (1), (3): Xaa is C or S
XGXRDVVMGPYVKLIIQQKDNFFLMSLSSMKTPT

SEQ ID NO: 23216 - protein, 39 aa, Artificial Sequence
  Non-cyclic GFR-binding peptide
  MOD_RES (2), (36), (37): Xaa is C or S
  MOD_RES (14), (15), (16), (17), (18): Xaa is A or G
  MOD_RES (19), (20), (21), (22): Xaa is A or G or is absent
GXESVAMGPYVKLXXXXXXXXXFFLISLSSLKTPVXXAK

SEQ ID NO: 23217 - protein, 40 aa, Artificial Sequence
  Non-cyclic GFR-binding peptide
  MOD_RES (2), (4), (38), (39): Xaa is C or S
  MOD_RES (16), (17), (18), (19), (20): Xaa is A or G
  MOD_RES (21), (22), (23), (24): Xaa is A or G or is absent
RXGXAEVVMDPYVKLXXXXXXXXXFFLISLSSLRAPVXXS

SEQ ID NO: 23218 - protein, 36 aa, Artificial Sequence
  Non-cyclic GFR-binding peptide
  MOD_RES (2), (36): Xaa is C or S
  MOD_RES (14), (15), (16), (17), (18): Xaa is A or G
  MOD_RES (19), (20), (21), (22): Xaa is A or G or is absent
GXAKVVMNPYVKLXXXXXXXXXFFLVSLSSLKTPAX

SEQ ID NO: 23219 - protein, 37 aa, Artificial Sequence
  Non-cyclic GFR-binding peptide
  MOD_RES (2), (33), (34): Xaa is C or S
KXSKVVMPYVKLVKPTRGVFFLISLSSLDQPVXXPSA

SEQ ID NO: 23220 - protein, 42 aa, Artificial Sequence
  Non-cyclic GFR-binding peptide
  MOD_RES (2), (4), (38), (39): Xaa is C or S
  MOD_RES (16), (17), (18), (19), (20): Xaa is A or G
  MOD_RES (21), (22), (23), (24): Xaa is A or G or is absent
RXGXESVAMGPYVKLXXXXXXXXXFFLISLSSLKTPVXXAKS

SEQ ID NO: 23221 - protein, 41 aa, Artificial Sequence
  Non-cyclic GFR-binding peptide
  MOD_RES (2), (36), (37): Xaa is C or S
  MOD_RES (14), (15), (16), (17), (18): Xaa is A or G
  MOD_RES (19), (20), (21), (22): Xaa is A or G or is absent
GXAKVVMNPYVKLXXXXXXXXXFFLVSLSSLKTPAXXAKPV

SEQ ID NO: 23222 - protein, 34 aa, Artificial Sequence
  Non-cyclic GFR-binding peptide
  MOD_RES (1), (32), (33): Xaa is C or S
XSKVVMPYVKLVKPTRGVFFLISLSSLDQPVXXP

SEQ ID NO: 23223 - protein, 36 aa, Artificial Sequence
  Non-cyclic GFR-binding peptide
  MOD_RES (32), (33): Xaa is C or S
AKVVMNPYVKLIVNNSSDFFLVSLSSLKTPAXXAKP

SEQ ID NO: 23224 - protein, 37 aa, Artificial Sequence
  Non-cyclic GFR-binding peptide
  MOD_RES (1), (34), (35): Xaa is C or S
  MOD_RES (12), (13), (14), (15), (16): Xaa is A or G
  MOD_RES (17), (18), (19), (20): Xaa is A or G or is absent
XSKVVMPYVKLXXXXXXXXXFFLISLSSLDQPVXXPS

SEQ ID NO: 23225 - protein, 32 aa, Artificial Sequence
  Non-cyclic GFR-binding peptide
  MOD_RES (2), (2): Xaa is C or S
KXSRVIMPYVKLVKPKRGVFFLISLSSLAQPV

SEQ ID NO: 23226 - protein, 42 aa, Artificial Sequence
  Non-cyclic GFR-binding peptide
  MOD_RES (2), (4), (38), (39): Xaa is C or S
  MOD_RES (16), (17), (18), (19), (20): Xaa is A or G
  MOD_RES (21), (22), (23), (24): Xaa is A or G or is absent
SXGXRDVVMGPYVKLXXXXXXXXXFFLMSLSSMKTPTXXPGA

SEQ ID NO: 23227 - protein, 38 aa, Artificial Sequence
  Non-cyclic GFR-binding peptide
  MOD_RES (1), (3), (35), (36): Xaa is C or S
XGXAKVVMNPYVKLIVNNSSDFFLVSLSSLKTPAXXAK

SEQ ID NO: 23228 - protein, 38 aa, Artificial Sequence
  Non-cyclic GFR-binding peptide
  MOD_RES (1), (3), (37): Xaa is C or S
XEXKNHQLFPYVKLHQGQHPKIRFFLMSLSSEETPVXE

SEQ ID NO: 23229 - protein, 40 aa, Artificial Sequence
  Non-cyclic GFR-binding peptide
  MOD_RES (1), (3), (37): Xaa is C or S
  MOD_RES (15), (16), (17), (18), (19): Xaa is A or G
  MOD_RES (20), (21), (22), (23): Xaa is A or G or is absent
XEXKNHQLFPYVKLXXXXXXXXXFFLMSLSSEETPVXELG

SEQ ID NO: 23230 - protein, 37 aa, Artificial Sequence
  Non-cyclic GFR-binding peptide
  MOD_RES (1), (35), (36): Xaa is C or S
  MOD_RES (13), (14), (15), (16), (17): Xaa is A or G
  MOD_RES (18), (19), (20), (21): Xaa is A or G or is absent
XAEVVMDPYVKLXXXXXXXXXFFLISLSSLRAPVXXS

SEQ ID NO: 23231 - protein, 34 aa, Artificial Sequence
  Non-cyclic GFR-binding peptide
  MOD_RES (13), (14), (15), (16), (17): Xaa is A or G
  MOD_RES (18), (19), (20), (21): Xaa is A or G or is absent
ELHEELRPYVKLXXXXXXXXXFFLVSLSSHHVRS

SEQ ID NO: 23232 - protein, 40 aa, Artificial Sequence
  Non-cyclic GFR-binding peptide
  MOD_RES (2), (4), (36), (37): Xaa is C or S
RXGXGEVVMEPYVKLVVKDYEDFFLMSLSSLETPVXXAKP

SEQ ID NO: 23233 - protein, 40 aa, Artificial Sequence
  Non-cyclic GFR-binding peptide
  MOD_RES (2), (37), (38): Xaa is C or S
  MOD_RES (15), (16), (17), (18), (19): Xaa is A or G
  MOD_RES (20), (21), (22), (23): Xaa is A or G or is absent
GXEAVSMGEPYVKLXXXXXXXXXFFLVSLSSLKTPVXXAK

SEQ ID NO: 23234 - protein, 38 aa, Artificial Sequence
  Non-cyclic GFR-binding peptide
  MOD_RES (1), (35), (36): Xaa is C or S
  MOD_RES (13), (14), (15), (16), (17): Xaa is A or G
  MOD_RES (18), (19), (20), (21): Xaa is A or G or is absent
XAEVVMDPYVKLXXXXXXXXXFFLISLSSLRAPVXXSA

SEQ ID NO: 23235 - protein, 38 aa, Artificial Sequence
  Non-cyclic GFR-binding peptide
  MOD_RES (33), (34): Xaa is C or S
  MOD_RES (11), (12), (13), (14), (15): Xaa is A or G
  MOD_RES (16), (17), (18), (19): Xaa is A or G or is absent
EVVMDPYVKLXXXXXXXXXFFLISLSSLRAPVXXSAPA

SEQ ID NO: 23236 - protein, 44 aa, Artificial Sequence
  Non-cyclic GFR-binding peptide
  MOD_RES (1), (3), (40): Xaa is C or S
  MOD_RES (16), (17), (18), (19), (20): Xaa is A or G
  MOD_RES (21), (22), (23), (24): Xaa is A or G or is absent
XAXELHEELRPYVKLXXXXXXXXXFFLVSLSSHHVRSPQXKVSS

SEQ ID NO: 23237 - protein, 38 aa, Artificial Sequence
  Non-cyclic GFR-binding peptide
  MOD_RES (1), (3), (34), (35): Xaa is C or S
XKXSKVVMPYVKLVKPTRGVFFLISLSSLDQPVXXPSA

SEQ ID NO: 23238 - protein, 33 aa, Artificial Sequence
  Non-cyclic GFR-binding peptide
  MOD_RES (12), (13), (14), (15), (16): Xaa is A or G
  MOD_RES (17), (18), (19), (20): Xaa is A or G or is absent
SEVVMDPYVKLXXXXXXXXXFFLISLSSLRTPV

SEQ ID NO: 23239 - protein, 37 aa, Artificial Sequence
  Non-cyclic GFR-binding peptide
  MOD_RES (32), (33): Xaa is C or S
ESVAMGPYVKLYTVVGKDFFLISLSSLKTPVXXAKSA

SEQ ID NO: 23240 - protein, 34 aa, Artificial Sequence
  Non-cyclic GFR-binding peptide
  MOD_RES (2), (4): Xaa is C or S
SXKXSRVIMPYVKLVKPKRGVFFLISLSSLAQPV

SEQ ID NO: 23241 - protein, 38 aa, Artificial Sequence
  Non-cyclic GFR-binding peptide
  MOD_RES (2), (4), (38): Xaa is C or S
RXEXKNHQLFPYVKLHQGQHPKIRFFLMSLSSEETPVX

SEQ ID NO: 23242 - protein, 39 aa, Artificial Sequence
  Non-cyclic GFR-binding peptide
  MOD_RES (33), (34): Xaa is C or S
  MOD_RES (11), (12), (13), (14), (15): Xaa is A or G
  MOD_RES (16), (17), (18), (19): Xaa is A or G or is absent
SKVIMPYVKLXXXXXXXXXFFLISLSSLDQSVXXPSASA

SEQ ID NO: 23243 - protein, 38 aa, Artificial Sequence
  Non-cyclic GFR-binding peptide
  MOD_RES (34), (35): Xaa is C or S
  MOD_RES (12), (13), (14), (15), (16): Xaa is A or G
  MOD_RES (17), (18), (19), (20): Xaa is A or G or is absent
AKVVMNPYVKLXXXXXXXXXFFLVSLSSLKTPAXXAKP

SEQ ID NO: 23244 - protein, 36 aa, Artificial Sequence
  Non-cyclic GFR-binding peptide
  MOD_RES (1), (33): Xaa is C or S
XSRVVMNPYVKLIVNSSDDFFLVSLSSLKTPAXTPK

SEQ ID NO: 23245 - protein, 35 aa, Artificial Sequence
  Non-cyclic GFR-binding peptide
  MOD_RES (1), (35): Xaa is C or S
  MOD_RES (13), (14), (15), (16), (17): Xaa is A or G
  MOD_RES (18), (19), (20), (21): Xaa is A or G or is absent
XESVAMGPYVKLXXXXXXXXXFFLISLSSLKTPVX

SEQ ID NO: 23246 - protein, 37 aa, Artificial Sequence
  Non-cyclic GFR-binding peptide
  MOD_RES (35), (35): Xaa is C or S
HEELRPYVKLLKPKKRVYEFFLVSLSSHHVRSPQXKV

SEQ ID NO: 23247 - protein, 40 aa, Artificial Sequence
  Non-cyclic GFR-binding peptide
  MOD_RES (36), (36): Xaa is C or S
  MOD_RES (12), (13), (14), (15), (16): Xaa is A or G
  MOD_RES (17), (18), (19), (20): Xaa is A or G or is absent
LHEELRPYVKLXXXXXXXXXFFLVSLSSHHVRSPQXKVSS

SEQ ID NO: 23248 - protein, 31 aa, Artificial Sequence
  Non-cyclic GFR-binding peptide
  MOD_RES (31), (31): Xaa is C or S
DVVMGPYVKLIIQQKDNFFLMSLSSMKTPTX

SEQ ID NO: 23249 - protein, 37 aa, Artificial Sequence
  Non-cyclic GFR-binding peptide
  MOD_RES (2), (34), (35): Xaa is C or S
GXSRVVMNPYVKLIVNSSDDFFLVSLSSLKTPAXXPK

SEQ ID NO: 23250 - protein, 37 aa, Artificial Sequence
  Non-cyclic GFR-binding peptide
  MOD_RES (33), (34): Xaa is C or S
  MOD_RES (11), (12), (13), (14), (15): Xaa is A or G
  MOD_RES (16), (17), (18), (19): Xaa is A or G or is absent
RVVMNPYVKLXXXXXXXXXFFLVSLSSLQTPAXXPKP

SEQ ID NO: 23251 - protein, 38 aa, Artificial Sequence
  Non-cyclic GFR-binding peptide
  MOD_RES (33), (34): Xaa is C or S
  MOD_RES (11), (12), (13), (14), (15): Xaa is A or G
  MOD_RES (16), (17), (18), (19): Xaa is A or G or is absent
SKVVMPYVKLXXXXXXXXXFFLISLSSLDQPVXXPSAS

SEQ ID NO: 23252 - protein, 40 aa, Artificial Sequence
  Non-cyclic GFR-binding peptide
  MOD_RES (2), (36), (37): Xaa is C or S
  MOD_RES (14), (15), (16), (17), (18): Xaa is A or G
  MOD_RES (19), (20), (21), (22): Xaa is A or G or is absent
GXESVAMGPYVKLXXXXXXXXXFFLISLSSLKTPVXXAKS

SEQ ID NO: 23253 - protein, 38 aa, Artificial Sequence
  Non-cyclic GFR-binding peptide
  MOD_RES (2), (4), (37), (38): Xaa is C or S
RXGXEAVSMGEPYVKLTPVGMDDFFLVSLSSLKTPVXX

SEQ ID NO: 23254 - protein, 38 aa, Artificial Sequence
  Non-cyclic GFR-binding peptide
  MOD_RES (34), (35): Xaa is C or S
  MOD_RES (12), (13), (14), (15), (16): Xaa is A or G
  MOD_RES (17), (18), (19), (20): Xaa is A or G or is absent
AEVVMDPYVKLXXXXXXXXXFFLISLSSLRAPVXXSAP

SEQ ID NO: 23255 - protein, 33 aa, Artificial Sequence
  Non-cyclic GFR-binding peptide
  MOD_RES (31), (32): Xaa is C or S
SKVIMPYVKLIKPTKGIFFLISLSSLDQSVXXP

SEQ ID NO: 23256 - protein, 33 aa, Artificial Sequence
  Non-cyclic GFR-binding peptide
  MOD_RES (11), (12), (13), (14), (15): Xaa is A or G
  MOD_RES (16), (17), (18), (19): Xaa is A or G or is absent
HEELRPYVKLXXXXXXXXXFFLVSLSSHHVRSP

SEQ ID NO: 23257 - protein, 39 aa, Artificial Sequence
  Non-cyclic GFR-binding peptide
  MOD_RES (1), (34), (35): Xaa is C or S
  MOD_RES (12), (13), (14), (15), (16): Xaa is A or G
  MOD_RES (17), (18), (19), (20): Xaa is A or G or is absent
XSKVVMPYVKLXXXXXXXXXFFLISLSSLDQPVXXPSAS

SEQ ID NO: 23258 - protein, 43 aa, Artificial Sequence
  Non-cyclic GFR-binding peptide
  MOD_RES (2), (4), (38), (39): Xaa is C or S
  MOD_RES (16), (17), (18), (19), (20): Xaa is A or G
  MOD_RES (21), (22), (23), (24): Xaa is A or G or is absent
SXGXRDVVMGPYVKLXXXXXXXXXFFLMSLSSMKTPTXXPGAS

SEQ ID NO: 23259 - protein, 42 aa, Artificial Sequence
  Non-cyclic GFR-binding peptide
  MOD_RES (2), (4), (36), (37): Xaa is C or S
SXGXRDVVMGPYVKLIIQQKDNFFLMSLSSMKTPTXXPGASG

SEQ ID NO: 23260 - protein, 36 aa, Artificial Sequence
  Non-cyclic GFR-binding peptide
  MOD_RES (2), (36): Xaa is C or S
  MOD_RES (14), (15), (16), (17), (18): Xaa is A or G
  MOD_RES (19), (20), (21), (22): Xaa is A or G or is absent
EXKNHQLFPYVKLXXXXXXXXXFFLMSLSSEETPVX

SEQ ID NO: 23261 - protein, 40 aa, Artificial Sequence
  Non-cyclic GFR-binding peptide
  MOD_RES (2), (4), (38), (39): Xaa is C or S
  MOD_RES (16), (17), (18), (19), (20): Xaa is A or G
  MOD_RES (21), (22), (23), (24): Xaa is A or G or is absent
RXGXGEVVMEPYVKLXXXXXXXXXFFLMSLSSLETPVXXA

SEQ ID NO: 23262 - protein, 37 aa, Artificial Sequence
  Non-cyclic GFR-binding peptide
  MOD_RES (1), (3), (35), (36): Xaa is C or S
XGXARVVMNPYVKLIVNSSDDFFLVSLSSLQTPAXXP

SEQ ID NO: 23263 - protein, 35 aa, Artificial Sequence
  Non-cyclic GFR-binding peptide
  MOD_RES (1), (35): Xaa is C or S
  MOD_RES (13), (14), (15), (16), (17): Xaa is A or G
  MOD_RES (18), (19), (20), (21): Xaa is A or G or is absent
XAKVVMNPYVKLXXXXXXXXXFFLVSLSSLKTPAX

SEQ ID NO: 23264 - protein, 37 aa, Artificial Sequence
  Non-cyclic GFR-binding peptide
  MOD_RES (31), (32): Xaa is C or S
EVVMDPYVKLVVNNAADFFLISLSSLRAPVXXSAPAA

SEQ ID NO: 23265 - protein, 36 aa, Artificial Sequence
  Non-cyclic GFR-binding peptide
  MOD_RES (1), (35), (36): Xaa is C or S
  MOD_RES (13), (14), (15), (16), (17): Xaa is A or G
  MOD_RES (18), (19), (20), (21): Xaa is A or G or is absent
XESVAMGPYVKLXXXXXXXXXFFLISLSSLKTPVXX

SEQ ID NO: 23266 - protein, 38 aa, Artificial Sequence
  Non-cyclic GFR-binding peptide
  MOD_RES (2), (4), (36), (37): Xaa is C or S
RXGXGEVVMEPYVKLVVKDYEDFFLMSLSSLETPVXXA

SEQ ID NO: 23267 - protein, 37 aa, Artificial Sequence
  Non-cyclic GFR-binding peptide
  MOD_RES (1), (3), (37): Xaa is C or S
  MOD_RES (15), (16), (17), (18), (19): Xaa is A or G
  MOD_RES (20), (21), (22), (23): Xaa is A or G or is absent
XGXSEVVMDPYVKLXXXXXXXXXFFLISLSSLRTPVX

SEQ ID NO: 23268 - protein, 41 aa, Artificial Sequence
  Non-cyclic GFR-binding peptide
  MOD_RES (1), (35), (36): Xaa is C or S
  MOD_RES (13), (14), (15), (16), (17): Xaa is A or G
  MOD_RES (18), (19), (20), (21): Xaa is A or G or is absent
XESVAMGPYVKLXXXXXXXXXFFLISLSSLKTPVXXAKSAK

SEQ ID NO: 23269 - protein, 43 aa, Artificial Sequence
  Non-cyclic GFR-binding peptide
  MOD_RES (2), (4), (38): Xaa is C or S
  MOD_RES (16), (17), (18), (19), (20): Xaa is A or G
  MOD_RES (21), (22), (23), (24): Xaa is A or G or is absent
HXGXSRVVMNPYVKLXXXXXXXXXFFLVSLSSLKTPAXTPKTV

SEQ ID NO: 23270 - protein, 40 aa, Artificial Sequence
  Non-cyclic GFR-binding peptide
  MOD_RES (1), (3), (37), (38): Xaa is C or S
  MOD_RES (15), (16), (17), (18), (19): Xaa is A or G
  MOD_RES (20), (21), (22), (23): Xaa is A or G or is absent
XGXARVVMNPYVKLXXXXXXXXXFFLVSLSSLQTPAXXPK

SEQ ID NO: 23271 - protein, 34 aa, Artificial Sequence
  Non-cyclic GFR-binding peptide
  MOD_RES (33), (34): Xaa is C or S
  MOD_RES (11), (12), (13), (14), (15): Xaa is A or G
  MOD_RES (16), (17), (18), (19): Xaa is A or G or is absent
SVAMGPYVKLXXXXXXXXXFFLISLSSLKTPVXX

SEQ ID NO: 23272 - protein, 41 aa, Artificial Sequence
  Non-cyclic GFR-binding peptide
  MOD_RES (1), (35), (36): Xaa is C or S
  MOD_RES (13), (14), (15), (16), (17): Xaa is A or G
  MOD_RES (18), (19), (20), (21): Xaa is A or G or is absent
XSEVVMDPYVKLXXXXXXXXXFFLISLSSLRTPVXXTPPTS

SEQ ID NO: 23273 - protein, 32 aa, Artificial Sequence
  Non-cyclic GFR-binding peptide
  MOD_RES (1), (32): Xaa is C or S
XSKVIMPYVKLIKPTKGIFFLISLSSLDQSVX

SEQ ID NO: 23274 - protein, 36 aa, Artificial Sequence
  Non-cyclic GFR-binding peptide
  MOD_RES (2), (36): Xaa is C or S
  MOD_RES (14), (15), (16), (17), (18): Xaa is A or G
  MOD_RES (19), (20), (21), (22): Xaa is A or G or is absent
GXSEVVMDPYVKLXXXXXXXXXFFLISLSSLRTPVX

SEQ ID NO: 23275 - protein, 37 aa, Artificial Sequence
  Non-cyclic GFR-binding peptide
  MOD_RES (1), (35), (36): Xaa is C or S
  MOD_RES (13), (14), (15), (16), (17): Xaa is A or G
  MOD_RES (18), (19), (20), (21): Xaa is A or G or is absent
XARVVMNPYVKLXXXXXXXXXFFLVSLSSLQTPAXXP

SEQ ID NO: 23276 - protein, 37 aa, Artificial Sequence
  Non-cyclic GFR-binding peptide
  MOD_RES (1), (3): Xaa is C or S
  MOD_RES (16), (17), (18), (19), (20): Xaa is A or G
  MOD_RES (21), (22), (23), (24): Xaa is A or G or is absent
XGXEAVSMGEPYVKLXXXXXXXXXFFLVSLSSLKTPV

SEQ ID NO: 23277 - protein, 38 aa, Artificial Sequence
  Non-cyclic GFR-binding peptide
  MOD_RES (33), (34): Xaa is C or S
  MOD_RES (11), (12), (13), (14), (15): Xaa is A or G
  MOD_RES (16), (17), (18), (19): Xaa is A or G or is absent
DVVMGPYVKLXXXXXXXXXFFLMSLSSMKTPTXXPGAS

SEQ ID NO: 23278 - protein, 32 aa, Artificial Sequence
  Non-cyclic GFR-binding peptide
  MOD_RES (31), (32): Xaa is C or S
EVVMDPYVKLVVNNAADFFLISLSSLRAPVXX

SEQ ID NO: 23279 - protein, 37 aa, Artificial Sequence
  Non-cyclic GFR-binding peptide
  MOD_RES (2), (33), (34): Xaa is C or S
KXSRVIMPYVKLVKPKRGVFFLISLSSLAQPVXXPAA

SEQ ID NO: 23280 - protein, 41 aa, Artificial Sequence
  Non-cyclic GFR-binding peptide
  MOD_RES (1), (3), (37), (38): Xaa is C or S
  MOD_RES (15), (16), (17), (18), (19): Xaa is A or G
  MOD_RES (20), (21), (22), (23): Xaa is A or G or is absent
XGXGEVVMEPYVKLXXXXXXXXXFFLMSLSSLETPVXXAKP

SEQ ID NO: 23281 - protein, 35 aa, Artificial Sequence
  Non-cyclic GFR-binding peptide
  MOD_RES (2), (4): Xaa is C or S
HXGXSRVVMNPYVKLIVNSSDDFFLVSLSSLKTPA

SEQ ID NO: 23282 - protein, 32 aa, Artificial Sequence
  Non-cyclic GFR-binding peptide
  MOD_RES (1), (1): Xaa is C or S
XAEVVMDPYVKLVVNNAADFFLISLSSLRAPV

SEQ ID NO: 23283 - protein, 36 aa, Artificial Sequence
  Non-cyclic GFR-binding peptide
  MOD_RES (1), (35), (36): Xaa is C or S
  MOD_RES (13), (14), (15), (16), (17): Xaa is A or G
  MOD_RES (18), (19), (20), (21): Xaa is A or G or is absent
XGEVVMEPYVKLXXXXXXXXXFFLMSLSSLETPVXX

SEQ ID NO: 23284 - protein, 31 aa, Artificial Sequence
  Non-cyclic GFR-binding peptide
ARVVMNPYVKLIVNSSDDFFLVSLSSLQTPA

SEQ ID NO: 23285 - protein, 33 aa, Artificial Sequence
  Non-cyclic GFR-binding peptide
  MOD_RES (31), (32): Xaa is C or S
SRVIMPYVKLVKPKRGVFFLISLSSLAQPVXXP

SEQ ID NO: 23286 - protein, 39 aa, Artificial Sequence
  Non-cyclic GFR-binding peptide
  MOD_RES (34), (35): Xaa is C or S
  MOD_RES (12), (13), (14), (15), (16): Xaa is A or G
  MOD_RES (17), (18), (19), (20): Xaa is A or G or is absent
GEVVMEPYVKLXXXXXXXXXFFLMSLSSLETPVXXAKPI

SEQ ID NO: 23287 - protein, 37 aa, Artificial Sequence
  Non-cyclic GFR-binding peptide
  MOD_RES (1), (3), (36), (37): Xaa is C or S
  MOD_RES (14), (15), (16), (17), (18): Xaa is A or G
  MOD_RES (19), (20), (21), (22): Xaa is A or G or is absent
XKXSRVIMPYVKLXXXXXXXXXFFLISLSSLAQPVXX

SEQ ID NO: 23288 - protein, 37 aa, Artificial Sequence
  Non-cyclic GFR-binding peptide
  MOD_RES (2), (36): Xaa is C or S
  MOD_RES (14), (15), (16), (17), (18): Xaa is A or G
  MOD_RES (19), (20), (21), (22): Xaa is A or G or is absent
EXKNHQLFPYVKLXXXXXXXXXFFLMSLSSEETPVXE

SEQ ID NO: 23289 - protein, 41 aa, Artificial Sequence
  Non-cyclic GFR-binding peptide
  MOD_RES (1), (3), (40): Xaa is C or S
  MOD_RES (16), (17), (18), (19), (20): Xaa is A or G
  MOD_RES (21), (22), (23), (24): Xaa is A or G or is absent
XAXELHEELRPYVKLXXXXXXXXXFFLVSLSSHHVRSPQXK

SEQ ID NO: 23290 - protein, 37 aa, Artificial Sequence
  Non-cyclic GFR-binding peptide
  MOD_RES (2), (36): Xaa is C or S
  MOD_RES (14), (15), (16), (17), (18): Xaa is A or G
  MOD_RES (19), (20), (21), (22): Xaa is A or G or is absent
GXSRVVMNPYVKLXXXXXXXXXFFLVSLSSLKTPAXT

SEQ ID NO: 23291 - protein, 36 aa, Artificial Sequence
  Non-cyclic GFR-binding peptide
  MOD_RES (2), (33), (34): Xaa is C or S
KXSKVIMPYVKLIKPTKGIFFLISLSSLDQSVXXPS

SEQ ID NO: 23292 - protein, 35 aa, Artificial Sequence
  Non-cyclic GFR-binding peptide
  MOD_RES (12), (13), (14), (15), (16): Xaa is A or G
  MOD_RES (17), (18), (19), (20): Xaa is A or G or is absent
LHEELRPYVKLXXXXXXXXXFFLVSLSSHHVRSPQ

SEQ ID NO: 23293 - protein, 40 aa, Artificial Sequence
  Non-cyclic GFR-binding peptide
  MOD_RES (2), (4), (38), (39): Xaa is C or S
  MOD_RES (16), (17), (18), (19), (20): Xaa is A or G
  MOD_RES (21), (22), (23), (24): Xaa is A or G or is absent
HXGXARVVMNPYVKLXXXXXXXXXFFLVSLSSLQTPAXXP

SEQ ID NO: 23294 - protein, 33 aa, Artificial Sequence
  Non-cyclic GFR-binding peptide
  MOD_RES (2), (33): Xaa is C or S
GXEEVIMPYVKLLLVRGNDFFLMSLSSTKVPAX

SEQ ID NO: 23295 - protein, 36 aa, Artificial Sequence
  Non-cyclic GFR-binding peptide
  MOD_RES (1), (3), (34), (35): Xaa is C or S
XKXSKVIMPYVKLIKPTKGIFFLISLSSLDQSVXXP

SEQ ID NO: 23296 - protein, 39 aa, Artificial Sequence
  Non-cyclic GFR-binding peptide
  MOD_RES (1), (33), (34): Xaa is C or S
XAKVVMNPYVKLIVNNSSDFFLVSLSSLKTPAXXAKPVA

SEQ ID NO: 23297 - protein, 33 aa, Artificial Sequence
  Non-cyclic GFR-binding peptide
  MOD_RES (1), (33): Xaa is C or S
XARVVMNPYVKLIVNSSDDFFLVSLSSLQTPAX

SEQ ID NO: 23298 - protein, 35 aa, Artificial Sequence
  Non-cyclic GFR-binding peptide
  MOD_RES (2), (4): Xaa is C or S
RXGXAEVVMDPYVKLVVNNAADFFLISLSSLRAPV

SEQ ID NO: 23299 - protein, 34 aa, Artificial Sequence
  Non-cyclic GFR-binding peptide
  MOD_RES (1), (34): Xaa is C or S
  MOD_RES (12), (13), (14), (15), (16): Xaa is A or G
  MOD_RES (17), (18), (19), (20): Xaa is A or G or is absent
XSRVIMPYVKLXXXXXXXXXFFLISLSSLAQPVX

SEQ ID NO: 23300 - protein, 39 aa, Artificial Sequence
  Non-cyclic GFR-binding peptide
  MOD_RES (2), (4), (37), (38): Xaa is C or S
  MOD_RES (15), (16), (17), (18), (19): Xaa is A or G
  MOD_RES (20), (21), (22), (23): Xaa is A or G or is absent
SXKXSKVIMPYVKLXXXXXXXXXFFLISLSSLDQSVXXP

SEQ ID NO: 23301 - protein, 39 aa, Artificial Sequence
  Non-cyclic GFR-binding peptide
  MOD_RES (2), (4), (35), (36): Xaa is C or S
LXGXEEVIMPYVKLLLVRGNDFFLMSLSSTKVPAXXTSP

SEQ ID NO: 23302 - protein, 35 aa, Artificial Sequence
  Non-cyclic GFR-binding peptide
  MOD_RES (32), (33): Xaa is C or S
SEVVMDPYVKLVVNNASDFFLISLSSLRTPVXXTP

SEQ ID NO: 23303 - protein, 36 aa, Artificial Sequence
  Non-cyclic GFR-binding peptide
  MOD_RES (1), (3), (34), (35): Xaa is C or S
XKXSRVIMPYVKLVKPKRGVFFLISLSSLAQPVXXP

SEQ ID NO: 23304 - protein, 38 aa, Artificial Sequence
  Non-cyclic GFR-binding peptide
  MOD_RES (2), (34), (35): Xaa is C or S
GXSEVVMDPYVKLVVNNASDFFLISLSSLRTPVXXTPP

SEQ ID NO: 23305 - protein, 42 aa, Artificial Sequence
  Non-cyclic GFR-binding peptide
  MOD_RES (2), (4), (38): Xaa is C or S
  MOD_RES (16), (17), (18), (19), (20): Xaa is A or G
  MOD_RES (21), (22), (23), (24): Xaa is A or G or is absent
RXEXKNHQLFPYVKLXXXXXXXXXFFLMSLSSEETPVXELGE

SEQ ID NO: 23306 - protein, 42 aa, Artificial Sequence
  Non-cyclic GFR-binding peptide
  MOD_RES (2), (4), (37), (38): Xaa is C or S
  MOD_RES (15), (16), (17), (18), (19): Xaa is A or G
  MOD_RES (20), (21), (22), (23): Xaa is A or G or is absent
SXKXSKVIMPYVKLXXXXXXXXXFFLISLSSLDQSVXXPSAS

SEQ ID NO: 23307 - protein, 37 aa, Artificial Sequence
  Non-cyclic GFR-binding peptide
  MOD_RES (2), (34), (35): Xaa is C or S
GXAEVVMDPYVKLVVNNAADFFLISLSSLRAPVXXSA

SEQ ID NO: 23308 - protein, 37 aa, Artificial Sequence
  Non-cyclic GFR-binding peptide
  MOD_RES (1), (32), (33): Xaa is C or S
XSKVVMPYVKLVKPTRGVFFLISLSSLDQPVXXPSAS

SEQ ID NO: 23309 - protein, 34 aa, Artificial Sequence
  Non-cyclic GFR-binding peptide
  MOD_RES (32), (33): Xaa is C or S
ARVVMNPYVKLIVNSSDDFFLVSLSSLQTPAXXP

SEQ ID NO: 23310 - protein, 36 aa, Artificial Sequence
  Non-cyclic GFR-binding peptide
  MOD_RES (2), (34): Xaa is C or S
GXSRVVMNPYVKLIVNSSDDFFLVSLSSLKTPAXTP

SEQ ID NO: 23311 - protein, 38 aa, Artificial Sequence
  Non-cyclic GFR-binding peptide
  MOD_RES (1), (35), (36): Xaa is C or S
  MOD_RES (13), (14), (15), (16), (17): Xaa is A or G
  MOD_RES (18), (19), (20), (21): Xaa is A or G or is absent
XSEVVMDPYVKLXXXXXXXXXFFLISLSSLRTPVXXTP

SEQ ID NO: 23312 - protein, 39 aa, Artificial Sequence
  Non-cyclic GFR-binding peptide
  MOD_RES (1), (3), (35), (36): Xaa is C or S
XGXRDVVMGPYVKLIIQQKDNFFLMSLSSMKTPTXXPGA

SEQ ID NO: 23313 - protein, 40 aa, Artificial Sequence
  Non-cyclic GFR-binding peptide
  MOD_RES (2), (39): Xaa is C or S
AXELHEELRPYVKLLKPKKRVYEFFLVSLSSHHVRSPQXK

SEQ ID NO: 23314 - protein, 38 aa, Artificial Sequence
  Non-cyclic GFR-binding peptide
  MOD_RES (34), (34): Xaa is C or S
  MOD_RES (12), (13), (14), (15), (16): Xaa is A or G
  MOD_RES (17), (18), (19), (20): Xaa is A or G or is absent
SRVVMNPYVKLXXXXXXXXXFFLVSLSSLKTPAXTPKT

SEQ ID NO: 23315 - protein, 38 aa, Artificial Sequence
  Non-cyclic GFR-binding peptide
  MOD_RES (1), (35), (36): Xaa is C or S
  MOD_RES (13), (14), (15), (16), (17): Xaa is A or G
  MOD_RES (18), (19), (20), (21): Xaa is A or G or is absent
XAKVVMNPYVKLXXXXXXXXXFFLVSLSSLKTPAXXAK

SEQ ID NO: 23316 - protein, 38 aa, Artificial Sequence
  Non-cyclic GFR-binding peptide
  MOD_RES (1), (3), (36), (37): Xaa is C or S
  MOD_RES (14), (15), (16), (17), (18): Xaa is A or G
  MOD_RES (19), (20), (21), (22): Xaa is A or G or is absent
XGXEEVIMPYVKLXXXXXXXXXFFLMSLSSTKVPAXXT

SEQ ID NO: 23317 - protein, 41 aa, Artificial Sequence
  Non-cyclic GFR-binding peptide
  MOD_RES (2), (4), (38), (39): Xaa is C or S
  MOD_RES (16), (17), (18), (19), (20): Xaa is A or G
  MOD_RES (21), (22), (23), (24): Xaa is A or G or is absent
HXGXSRVVMNPYVKLXXXXXXXXXFFLVSLSSLKTPAXXPK

SEQ ID NO: 23318 - protein, 31 aa, Artificial Sequence
  Non-cyclic GFR-binding peptide
GEVVMEPYVKLVVKDYEDFFLMSLSSLETPV

SEQ ID NO: 23319 - protein, 45 aa, Artificial Sequence
  Non-cyclic GFR-binding peptide
  MOD_RES (2), (4), (41): Xaa is C or S
AXAXELHEELRPYVKLLKPKKRVYEFFLVSLSSHHVRSPQXKVSS

SEQ ID NO: 23320 - protein, 40 aa, Artificial Sequence
  Non-cyclic GFR-binding peptide
  MOD_RES (1), (35), (36): Xaa is C or S
  MOD_RES (13), (14), (15), (16), (17): Xaa is A or G
  MOD_RES (18), (19), (20), (21): Xaa is A or G or is absent
XSRVVMNPYVKLXXXXXXXXXFFLVSLSSLKTPAXXPKPV

SEQ ID NO: 23321 - protein, 37 aa, Artificial Sequence
  Non-cyclic GFR-binding peptide
  MOD_RES (2), (36), (37): Xaa is C or S
  MOD_RES (14), (15), (16), (17), (18): Xaa is A or G
  MOD_RES (19), (20), (21), (22): Xaa is A or G or is absent
GXSRVVMNPYVKLXXXXXXXXXFFLVSLSSLKTPAXX

SEQ ID NO: 23322 - protein, 35 aa, Artificial Sequence
  Non-cyclic GFR-binding peptide
  MOD_RES (33), (34): Xaa is C or S
  MOD_RES (11), (12), (13), (14), (15): Xaa is A or G
  MOD_RES (16), (17), (18), (19): Xaa is A or G or is absent
EEVIMPYVKLXXXXXXXXXFFLMSLSSTKVPAXXT

SEQ ID NO: 23323 - protein, 39 aa, Artificial Sequence
  Non-cyclic GFR-binding peptide
  MOD_RES (1), (35), (36): Xaa is C or S
  MOD_RES (13), (14), (15), (16), (17): Xaa is A or G
  MOD_RES (18), (19), (20), (21): Xaa is A or G or is absent
XARVVMNPYVKLXXXXXXXXXFFLVSLSSLQTPAXXPKP

SEQ ID NO: 23324 - protein, 40 aa, Artificial Sequence
  Non-cyclic GFR-binding peptide
  MOD_RES (2), (4), (37), (38): Xaa is C or S
  MOD_RES (15), (16), (17), (18), (19): Xaa is A or G
  MOD_RES (20), (21), (22), (23): Xaa is A or G or is absent
LXGXEEVIMPYVKLXXXXXXXXXFFLMSLSSTKVPAXXTS

SEQ ID NO: 23325 - protein, 39 aa, Artificial Sequence
  Non-cyclic GFR-binding peptide
  MOD_RES (2), (33), (34): Xaa is C or S
KXSKVIMPYVKLIKPTKGIFFLISLSSLDQSVXXPSASA

SEQ ID NO: 23326 - protein, 36 aa, Artificial Sequence
  Non-cyclic GFR-binding peptide
  MOD_RES (34), (34): Xaa is C or S
KNHQLFPYVKLHQGQHPKIRFFLMSLSSEETPVXEL

SEQ ID NO: 23327 - protein, 34 aa, Artificial Sequence
  Non-cyclic GFR-binding peptide
  MOD_RES (1), (1): Xaa is C or S
XKNHQLFPYVKLHQGQHPKIRFFLMSLSSEETPV

SEQ ID NO: 23328 - protein, 39 aa, Artificial Sequence
  Non-cyclic GFR-binding peptide
  MOD_RES (2), (34), (35): Xaa is C or S
GXRDVVMGPYVKLIIQQKDNFFLMSLSSMKTPTXXPGAS

SEQ ID NO: 23329 - protein, 37 aa, Artificial Sequence
  Non-cyclic GFR-binding peptide
  MOD_RES (2), (36), (37): Xaa is C or S
  MOD_RES (14), (15), (16), (17), (18): Xaa is A or G
  MOD_RES (19), (20), (21), (22): Xaa is A or G or is absent
GXGEVVMEPYVKLXXXXXXXXXFFLMSLSSLETPVXX

SEQ ID NO: 23330 - protein, 42 aa, Artificial Sequence
  Non-cyclic GFR-binding peptide
  MOD_RES (2), (4), (36), (37): Xaa is C or S
RXGXGEVVMDPYVKLVVKENEDFFLMSLSSLETPVXXAKPIK

SEQ ID NO: 23331 - protein, 33 aa, Artificial Sequence
  Non-cyclic GFR-binding peptide
  MOD_RES (1), (33): Xaa is C or S
XAEVVMDPYVKLVVNNAADFFLISLSSLRAPVX

SEQ ID NO: 23332 - protein, 32 aa, Artificial Sequence
  Non-cyclic GFR-binding peptide
  MOD_RES (31), (32): Xaa is C or S
SRVIMPYVKLVKPKRGVFFLISLSSLAQPVXX

SEQ ID NO: 23333 - protein, 37 aa, Artificial Sequence
  Non-cyclic GFR-binding peptide
  MOD_RES (31), (32): Xaa is C or S
SVAMGPYVKLYTVVGKDFFLISLSSLKTPVXXAKSAK

SEQ ID NO: 23334 - protein, 38 aa, Artificial Sequence
  Non-cyclic GFR-binding peptide
  MOD_RES (2), (34): Xaa is C or S
GXSRVVMNPYVKLIVNSSDDFFLVSLSSLKTPAXTPKT

SEQ ID NO: 23335 - protein, 40 aa, Artificial Sequence
  Non-cyclic GFR-binding peptide
  MOD_RES (2), (4), (36), (37): Xaa is C or S
HXGXAKVVMNPYVKLIVNNSSDFFLVSLSSLKTPAXXAKP

SEQ ID NO: 23336 - protein, 36 aa, Artificial Sequence
  Non-cyclic GFR-binding peptide
  MOD_RES (1), (3), (35), (36): Xaa is C or S
XGXRDVVMGPYVKLIIQQKDNFFLMSLSSMKTPTXX

SEQ ID NO: 23337 - protein, 36 aa, Artificial Sequence
  Non-cyclic GFR-binding peptide
  MOD_RES (1), (35), (36): Xaa is C or S
  MOD_RES (13), (14), (15), (16), (17): Xaa is A or G
  MOD_RES (18), (19), (20), (21): Xaa is A or G or is absent
XRDVVMGPYVKLXXXXXXXXXFFLMSLSSMKTPTXX

SEQ ID NO: 23338 - protein, 40 aa, Artificial Sequence
  Non-cyclic GFR-binding peptide
  MOD_RES (2), (39): Xaa is C or S
  MOD_RES (15), (16), (17), (18), (19): Xaa is A or G
  MOD_RES (20), (21), (22), (23): Xaa is A or G or is absent
AXELHEELRPYVKLXXXXXXXXXFFLVSLSSHHVRSPQXK

SEQ ID NO: 23339 - protein, 36 aa, Artificial Sequence
  Non-cyclic GFR-binding peptide
  MOD_RES (1), (34), (35): Xaa is C or S
  MOD_RES (12), (13), (14), (15), (16): Xaa is A or G
  MOD_RES (17), (18), (19), (20): Xaa is A or G or is absent
XSRVIMPYVKLXXXXXXXXXFFLISLSSLAQPVXXP

SEQ ID NO: 23340 - protein, 32 aa, Artificial Sequence
  Non-cyclic GFR-binding peptide
  MOD_RES (11), (12), (13), (14), (15): Xaa is A or G
  MOD_RES (16), (17), (18), (19): Xaa is A or G or is absent
SKVIMPYVKLXXXXXXXXXFFLISLSSLDQSV

SEQ ID NO: 23341 - protein, 36 aa, Artificial Sequence
  Non-cyclic GFR-binding peptide
  MOD_RES (33), (33): Xaa is C or S
  MOD_RES (11), (12), (13), (14), (15): Xaa is A or G
  MOD_RES (16), (17), (18), (19): Xaa is A or G or is absent
RVVMNPYVKLXXXXXXXXXFFLVSLSSLKTPAXTPK

SEQ ID NO: 23342 - protein, 39 aa, Artificial Sequence
  Non-cyclic GFR-binding peptide
  MOD_RES (2), (34), (35): Xaa is C or S
GXESVAMGPYVKLYTVVGKDFFLISLSSLKTPVXXAKSA

SEQ ID NO: 23343 - protein, 38 aa, Artificial Sequence
  Non-cyclic GFR-binding peptide
  MOD_RES (35), (35): Xaa is C or S
HEELRPYVKLLKPKKRVYEFFLVSLSSHHVRSPQXKVS

SEQ ID NO: 23344 - protein, 39 aa, Artificial Sequence
  Non-cyclic GFR-binding peptide
  MOD_RES (33), (34): Xaa is C or S
  MOD_RES (11), (12), (13), (14), (15): Xaa is A or G
  MOD_RES (16), (17), (18), (19): Xaa is A or G or is absent
RVVMNPYVKLXXXXXXXXXFFLVSLSSLQTPAXXPKPVT

SEQ ID NO: 23345 - protein, 39 aa, Artificial Sequence
  Non-cyclic GFR-binding peptide
  MOD_RES (1), (35), (36): Xaa is C or S
  MOD_RES (13), (14), (15), (16), (17): Xaa is A or G
  MOD_RES (18), (19), (20), (21): Xaa is A or G or is absent
XAEVVMDPYVKLXXXXXXXXXFFLISLSSLRAPVXXSAP

SEQ ID NO: 23346 - protein, 31 aa, Artificial Sequence
  Non-cyclic GFR-binding peptide
SRVVMNPYVKLIVNSSDDFFLVSLSSLKTPA

SEQ ID NO: 23347 - protein, 35 aa, Artificial Sequence
  Non-cyclic GFR-binding peptide
  MOD_RES (1), (3): Xaa is C or S
XGXEAVSMGEPYVKLTPVGMDDFFLVSLSSLKTPV

SEQ ID NO: 23348 - protein, 41 aa, Artificial Sequence
  Non-cyclic GFR-binding peptide
  MOD_RES (2), (4), (38), (39): Xaa is C or S
  MOD_RES (16), (17), (18), (19), (20): Xaa is A or G
  MOD_RES (21), (22), (23), (24): Xaa is A or G or is absent
RXGXSEVVMDPYVKLXXXXXXXXXFFLISLSSLRTPVXXTP

SEQ ID NO: 23349 - protein, 35 aa, Artificial Sequence
  Non-cyclic GFR-binding peptide
  MOD_RES (1), (3), (35): Xaa is C or S
XGXAKVVMNPYVKLIVNNSSDFFLVSLSSLKTPAX

SEQ ID NO: 23350 - protein, 41 aa, Artificial Sequence
  Non-cyclic GFR-binding peptide
  MOD_RES (2), (4), (35), (36): Xaa is C or S
SXKXSKVIMPYVKLIKPTKGIFFLISLSSLDQSVXXPSASA

SEQ ID NO: 23351 - protein, 39 aa, Artificial Sequence
  Non-cyclic GFR-binding peptide
  MOD_RES (2), (4), (37), (38): Xaa is C or S
  MOD_RES (15), (16), (17), (18), (19): Xaa is A or G
  MOD_RES (20), (21), (22), (23): Xaa is A or G or is absent
SXKXSKVVMPYVKLXXXXXXXXXFFLISLSSLDQPVXXP

SEQ ID NO: 23352 - protein, 34 aa, Artificial Sequence
  Non-cyclic GFR-binding peptide
  MOD_RES (34), (34): Xaa is C or S
  MOD_RES (12), (13), (14), (15), (16): Xaa is A or G
  MOD_RES (17), (18), (19), (20): Xaa is A or G or is absent
SEVVMDPYVKLXXXXXXXXXFFLISLSSLRTPVX

SEQ ID NO: 23353 - protein, 31 aa, Artificial Sequence
  Non-cyclic GFR-binding peptide
  MOD_RES (1), (1): Xaa is C or S
XSRVIMPYVKLVKPKRGVFFLISLSSLAQPV

SEQ ID NO: 23354 - protein, 38 aa, Artificial Sequence
  Non-cyclic GFR-binding peptide
  MOD_RES (32), (33): Xaa is C or S
GEVVMEPYVKLVVKDYEDFFLMSLSSLETPVXXAKPIS

SEQ ID NO: 23355 - protein, 38 aa, Artificial Sequence
  Non-cyclic GFR-binding peptide
  MOD_RES (2), (4), (38): Xaa is C or S
  MOD_RES (16), (17), (18), (19), (20): Xaa is A or G
  MOD_RES (21), (22), (23), (24): Xaa is A or G or is absent
RXEXKNHQLFPYVKLXXXXXXXXXFFLMSLSSEETPVX

SEQ ID NO: 23356 - protein, 36 aa, Artificial Sequence
  Non-cyclic GFR-binding peptide
  MOD_RES (34), (35): Xaa is C or S
  MOD_RES (12), (13), (14), (15), (16): Xaa is A or G
  MOD_RES (17), (18), (19), (20): Xaa is A or G or is absent
SRVVMNPYVKLXXXXXXXXXFFLVSLSSLKTPAXXP

SEQ ID NO: 23357 - protein, 33 aa, Artificial Sequence
  Non-cyclic GFR-binding peptide
  MOD_RES (1), (33): Xaa is C or S
XRDVVMGPYVKLIIQQKDNFFLMSLSSMKTPTX

SEQ ID NO: 23358 - protein, 33 aa, Artificial Sequence
  Non-cyclic GFR-binding peptide
  MOD_RES (33), (33): Xaa is C or S
  MOD_RES (11), (12), (13), (14), (15): Xaa is A or G
  MOD_RES (16), (17), (18), (19): Xaa is A or G or is absent
SVAMGPYVKLXXXXXXXXXFFLISLSSLKTPVX

SEQ ID NO: 23359 - protein, 35 aa, Artificial Sequence
  Non-cyclic GFR-binding peptide
  MOD_RES (2), (2): Xaa is C or S
  MOD_RES (14), (15), (16), (17), (18): Xaa is A or G
  MOD_RES (19), (20), (21), (22): Xaa is A or G or is absent
GXSRVVMNPYVKLXXXXXXXXXFFLVSLSSLKTPA

SEQ ID NO: 23360 - protein, 33 aa, Artificial Sequence
  Non-cyclic GFR-binding peptide
  MOD_RES (31), (32): Xaa is C or S
EVVMDPYVKLVVNNASDFFLISLSSLRTPVXXT

SEQ ID NO: 23361 - protein, 37 aa, Artificial Sequence
  Non-cyclic GFR-binding peptide
  MOD_RES (1), (34), (35): Xaa is C or S
XEAVSMGEPYVKLTPVGMDDFFLVSLSSLKTPVXXAK

SEQ ID NO: 23362 - protein, 37 aa, Artificial Sequence
  Non-cyclic GFR-binding peptide
  MOD_RES (2), (35), (36): Xaa is C or S
  MOD_RES (13), (14), (15), (16), (17): Xaa is A or G
  MOD_RES (18), (19), (20), (21): Xaa is A or G or is absent
KXSKVIMPYVKLXXXXXXXXXFFLISLSSLDQSVXXP

SEQ ID NO: 23363 - protein, 32 aa, Artificial Sequence
  Non-cyclic GFR-binding peptide
  MOD_RES (1), (32): Xaa is C or S
XSRVIMPYVKLVKPKRGVFFLISLSSLAQPVX

SEQ ID NO: 23364 - protein, 36 aa, Artificial Sequence
  Non-cyclic GFR-binding peptide
  MOD_RES (1), (3): Xaa is C or S
  MOD_RES (15), (16), (17), (18), (19): Xaa is A or G
  MOD_RES (20), (21), (22), (23): Xaa is A or G or is absent
XGXAEVVMDPYVKLXXXXXXXXXFFLISLSSLRAPV

SEQ ID NO: 23365 - protein, 34 aa, Artificial Sequence
  Non-cyclic GFR-binding peptide
  MOD_RES (33), (34): Xaa is C or S
EAVSMGEPYVKLTPVGMDDFFLVSLSSLKTPVXX

SEQ ID NO: 23366 - protein, 39 aa, Artificial Sequence
  Non-cyclic GFR-binding peptide
  MOD_RES (35), (35): Xaa is C or S
  MOD_RES (11), (12), (13), (14), (15): Xaa is A or G
  MOD_RES (16), (17), (18), (19): Xaa is A or G or is absent
HEELRPYVKLXXXXXXXXXFFLVSLSSHHVRSPQXKVSS

SEQ ID NO: 23367 - protein, 37 aa, Artificial Sequence
  Non-cyclic GFR-binding peptide
  MOD_RES (1), (36), (37): Xaa is C or S
  MOD_RES (14), (15), (16), (17), (18): Xaa is A or G
  MOD_RES (19), (20), (21), (22): Xaa is A or G or is absent
XEAVSMGEPYVKLXXXXXXXXXFFLVSLSSLKTPVXX

SEQ ID NO: 23368 - protein, 38 aa, Artificial Sequence
  Non-cyclic GFR-binding peptide
  MOD_RES (33), (34): Xaa is C or S
  MOD_RES (11), (12), (13), (14), (15): Xaa is A or G
  MOD_RES (16), (17), (18), (19): Xaa is A or G or is absent
SKVIMPYVKLXXXXXXXXXFFLISLSSLDQSVXXPSAS

SEQ ID NO: 23369 - protein, 32 aa, Artificial Sequence
  Non-cyclic GFR-binding peptide
NHQLFPYVKLHQGQHPKIRFFLMSLSSEETPV

SEQ ID NO: 23370 - protein, 37 aa, Artificial Sequence
  Non-cyclic GFR-binding peptide
  MOD_RES (2), (4), (37): Xaa is C or S
  MOD_RES (15), (16), (17), (18), (19): Xaa is A or G
  MOD_RES (20), (21), (22), (23): Xaa is A or G or is absent
SXKXSKVVMPYVKLXXXXXXXXXFFLISLSSLDQPVX

SEQ ID NO: 23371 - protein, 34 aa, Artificial Sequence
  Non-cyclic GFR-binding peptide
  MOD_RES (32), (33): Xaa is C or S
SRVVMNPYVKLIVNSSDDFFLVSLSSLKTPAXXP

SEQ ID NO: 23372 - protein, 37 aa, Artificial Sequence
  Non-cyclic GFR-binding peptide
  MOD_RES (32), (32): Xaa is C or S
SRVVMNPYVKLIVNSSDDFFLVSLSSLKTPAXTPKTV

SEQ ID NO: 23373 - protein, 35 aa, Artificial Sequence
  Non-cyclic GFR-binding peptide
  MOD_RES (1), (32), (33): Xaa is C or S
XSRVIMPYVKLVKPKRGVFFLISLSSLAQPVXXPA

SEQ ID NO: 23374 - protein, 36 aa, Artificial Sequence
  Non-cyclic GFR-binding peptide
  MOD_RES (1), (35), (36): Xaa is C or S
  MOD_RES (13), (14), (15), (16), (17): Xaa is A or G
  MOD_RES (18), (19), (20), (21): Xaa is A or G or is absent
XSRVVMNPYVKLXXXXXXXXXFFLVSLSSLKTPAXX

SEQ ID NO: 23375 - protein, 40 aa, Artificial Sequence
  Non-cyclic GFR-binding peptide
  MOD_RES (1), (3), (37), (38): Xaa is C or S
  MOD_RES (15), (16), (17), (18), (19): Xaa is A or G
  MOD_RES (20), (21), (22), (23): Xaa is A or G or is absent
XGXGEVVMEPYVKLXXXXXXXXXFFLMSLSSLETPVXXAK

SEQ ID NO: 23376 - protein, 34 aa, Artificial Sequence
  Non-cyclic GFR-binding peptide
  MOD_RES (1), (1): Xaa is C or S
  MOD_RES (13), (14), (15), (16), (17): Xaa is A or G
  MOD_RES (18), (19), (20), (21): Xaa is A or G or is absent
XKNHQLFPYVKLXXXXXXXXXFFLMSLSSEETPV

SEQ ID NO: 23377 - protein, 38 aa, Artificial Sequence
  Non-cyclic GFR-binding peptide
  MOD_RES (2), (37), (38): Xaa is C or S
  MOD_RES (15), (16), (17), (18), (19): Xaa is A or G
  MOD_RES (20), (21), (22), (23): Xaa is A or G or is absent
GXEAVSMGEPYVKLXXXXXXXXXFFLVSLSSLKTPVXX

SEQ ID NO: 23378 - protein, 35 aa, Artificial Sequence
  Non-cyclic GFR-binding peptide
  MOD_RES (33), (34): Xaa is C or S
  MOD_RES (11), (12), (13), (14), (15): Xaa is A or G
  MOD_RES (16), (17), (18), (19): Xaa is A or G or is absent
DVVMGPYVKLXXXXXXXXXFFLMSLSSMKTPTXXP

SEQ ID NO: 23379 - protein, 41 aa, Artificial Sequence
  Non-cyclic GFR-binding peptide
  MOD_RES (2), (4), (36): Xaa is C or S
HXGXSRVVMNPYVKLIVNSSDDFFLVSLSSLKTPAXTPKTV

SEQ ID NO: 23380 - protein, 32 aa, Artificial Sequence
  Non-cyclic GFR-binding peptide
  MOD_RES (31), (32): Xaa is C or S
SKVIMPYVKLIKPTKGIFFLISLSSLDQSVXX

SEQ ID NO: 23381 - protein, 36 aa, Artificial Sequence
  Non-cyclic GFR-binding peptide
  MOD_RES (2), (35), (36): Xaa is C or S
  MOD_RES (13), (14), (15), (16), (17): Xaa is A or G
  MOD_RES (18), (19), (20), (21): Xaa is A or G or is absent
KXSKVVMPYVKLXXXXXXXXXFFLISLSSLDQPVXX

SEQ ID NO: 23382 - protein, 35 aa, Artificial Sequence
  Non-cyclic GFR-binding peptide
  MOD_RES (33), (34): Xaa is C or S
  MOD_RES (11), (12), (13), (14), (15): Xaa is A or G
  MOD_RES (16), (17), (18), (19): Xaa is A or G or is absent
SVAMGPYVKLXXXXXXXXXFFLISLSSLKTPVXXA

SEQ ID NO: 23383 - protein, 35 aa, Artificial Sequence
  Non-cyclic GFR-binding peptide
  MOD_RES (34), (35): Xaa is C or S
  MOD_RES (12), (13), (14), (15), (16): Xaa is A or G
  MOD_RES (17), (18), (19), (20): Xaa is A or G or is absent
AKVVMNPYVKLXXXXXXXXXFFLVSLSSLKTPAXX

SEQ ID NO: 23384 - protein, 33 aa, Artificial Sequence
  Non-cyclic GFR-binding peptide
  MOD_RES (33), (33): Xaa is C or S
  MOD_RES (11), (12), (13), (14), (15): Xaa is A or G
  MOD_RES (16), (17), (18), (19): Xaa is A or G or is absent
EVVMDPYVKLXXXXXXXXXFFLISLSSLRAPVX

SEQ ID NO: 23385 - protein, 40 aa, Artificial Sequence
  Non-cyclic GFR-binding peptide
  MOD_RES (1), (38): Xaa is C or S
  MOD_RES (14), (15), (16), (17), (18): Xaa is A or G
  MOD_RES (19), (20), (21), (22): Xaa is A or G or is absent
XELHEELRPYVKLXXXXXXXXXFFLVSLSSHHVRSPQXKV

SEQ ID NO: 23386 - protein, 38 aa, Artificial Sequence
  Non-cyclic GFR-binding peptide
  MOD_RES (33), (34): Xaa is C or S
  MOD_RES (11), (12), (13), (14), (15): Xaa is A or G
  MOD_RES (16), (17), (18), (19): Xaa is A or G or is absent
EVVMDPYVKLXXXXXXXXXFFLISLSSLRTPVXXTPPT

SEQ ID NO: 23387 - protein, 33 aa, Artificial Sequence
  Non-cyclic GFR-binding peptide
  MOD_RES (33), (33): Xaa is C or S
  MOD_RES (11), (12), (13), (14), (15): Xaa is A or G
  MOD_RES (16), (17), (18), (19): Xaa is A or G or is absent
SRVIMPYVKLXXXXXXXXXFFLISLSSLAQPVX

SEQ ID NO: 23388 - protein, 40 aa, Artificial Sequence
  Non-cyclic GFR-binding peptide
  MOD_RES (2), (4), (38): Xaa is C or S
  MOD_RES (16), (17), (18), (19), (20): Xaa is A or G
  MOD_RES (21), (22), (23), (24): Xaa is A or G or is absent
RXEXKNHQLFPYVKLXXXXXXXXXFFLMSLSSEETPVXEL

SEQ ID NO: 23389 - protein, 39 aa, Artificial Sequence
  Non-cyclic GFR-binding peptide
  MOD_RES (1), (38): Xaa is C or S
XELHEELRPYVKLLKPKKRVYEFFLVSLSSHHVRSPQXK

SEQ ID NO: 23390 - protein, 39 aa, Artificial Sequence
  Non-cyclic GFR-binding peptide
  MOD_RES (1), (33), (34): Xaa is C or S
XSRVVMNPYVKLIVNSSDDFFLVSLSSLKTPAXXPKPVH

SEQ ID NO: 23391 - protein, 34 aa, Artificial Sequence
  Non-cyclic GFR-binding peptide
  MOD_RES (2), (33), (34): Xaa is C or S
KXSRVIMPYVKLVKPKRGVFFLISLSSLAQPVXX

SEQ ID NO: 23392 - protein, 41 aa, Artificial Sequence
  Non-cyclic GFR-binding peptide
  MOD_RES (2), (36), (37): Xaa is C or S
  MOD_RES (14), (15), (16), (17), (18): Xaa is A or G
  MOD_RES (19), (20), (21), (22): Xaa is A or G or is absent
GXSRVVMNPYVKLXXXXXXXXXFFLVSLSSLKTPAXXPKPV

SEQ ID NO: 23393 - protein, 43 aa, Artificial Sequence
  Non-cyclic GFR-binding peptide
  MOD_RES (2), (4), (38), (39): Xaa is C or S
  MOD_RES (16), (17), (18), (19), (20): Xaa is A or G
  MOD_RES (21), (22), (23), (24): Xaa is A or G or is absent
RXGXSEVVMDPYVKLXXXXXXXXXFFLISLSSLRTPVXXTPPT

SEQ ID NO: 23394 - protein, 36 aa, Artificial Sequence
  Non-cyclic GFR-binding peptide
  MOD_RES (33), (34): Xaa is C or S
  MOD_RES (11), (12), (13), (14), (15): Xaa is A or G
  MOD_RES (16), (17), (18), (19): Xaa is A or G or is absent
EVVMEPYVKLXXXXXXXXXFFLMSLSSLETPVXXAK

SEQ ID NO: 23395 - protein, 31 aa, Artificial Sequence
  Non-cyclic GFR-binding peptide
  MOD_RES (31), (31): Xaa is C or S
SKVIMPYVKLIKPTKGIFFLISLSSLDQSVX

SEQ ID NO: 23396 - protein, 36 aa, Artificial Sequence
  Non-cyclic GFR-binding peptide
  MOD_RES (1), (3): Xaa is C or S
  MOD_RES (15), (16), (17), (18), (19): Xaa is A or G
  MOD_RES (20), (21), (22), (23): Xaa is A or G or is absent
XEXKNHQLFPYVKLXXXXXXXXXFFLMSLSSEETPV

SEQ ID NO: 23397 - protein, 42 aa, Artificial Sequence
  Non-cyclic GFR-binding peptide
  MOD_RES (1), (3), (37), (38): Xaa is C or S
  MOD_RES (15), (16), (17), (18), (19): Xaa is A or G
  MOD_RES (20), (21), (22), (23): Xaa is A or G or is absent
XGXGEVVMEPYVKLXXXXXXXXXFFLMSLSSLETPVXXAKPI

SEQ ID NO: 23398 - protein, 35 aa, Artificial Sequence
  Non-cyclic GFR-binding peptide
  MOD_RES (1), (3), (34), (35): Xaa is C or S
XKXSKVVMPYVKLVKPTRGVFFLISLSSLDQPVXX

SEQ ID NO: 23399 - protein, 39 aa, Artificial Sequence
  Non-cyclic GFR-binding peptide
  MOD_RES (34), (34): Xaa is C or S
  MOD_RES (12), (13), (14), (15), (16): Xaa is A or G
  MOD_RES (17), (18), (19), (20): Xaa is A or G or is absent
SRVVMNPYVKLXXXXXXXXXFFLVSLSSLKTPAXTPKTV

SEQ ID NO: 23400 - protein, 36 aa, Artificial Sequence
  Non-cyclic GFR-binding peptide
  MOD_RES (2), (4), (36): Xaa is C or S
RXGXESVAMGPYVKLYTVVGKDFFLISLSSLKTPVX

SEQ ID NO: 23401 - protein, 33 aa, Artificial Sequence
  Non-cyclic GFR-binding peptide
  MOD_RES (32), (33): Xaa is C or S
SEVVMDPYVKLVVNNASDFFLISLSSLRTPVXX

SEQ ID NO: 23402 - protein, 42 aa, Artificial Sequence
  Non-cyclic GFR-binding peptide
  MOD_RES (1), (3), (36), (37): Xaa is C or S
  MOD_RES (14), (15), (16), (17), (18): Xaa is A or G
  MOD_RES (19), (20), (21), (22): Xaa is A or G or is absent
XGXEEVIMPYVKLXXXXXXXXXFFLMSLSSTKVPAXXTSPVR

SEQ ID NO: 23403 - protein, 38 aa, Artificial Sequence
  Non-cyclic GFR-binding peptide
  MOD_RES (1), (35), (36): Xaa is C or S
  MOD_RES (13), (14), (15), (16), (17): Xaa is A or G
  MOD_RES (18), (19), (20), (21): Xaa is A or G or is absent
XGEVVMEPYVKLXXXXXXXXXFFLMSLSSLETPVXXAK

SEQ ID NO: 23404 - protein, 37 aa, Artificial Sequence
  Non-cyclic GFR-binding peptide
  MOD_RES (1), (1): Xaa is C or S
  MOD_RES (14), (15), (16), (17), (18): Xaa is A or G
  MOD_RES (19), (20), (21), (22): Xaa is A or G or is absent
XELHEELRPYVKLXXXXXXXXXFFLVSLSSHHVRSPQ

SEQ ID NO: 23405 - protein, 40 aa, Artificial Sequence
  Non-cyclic GFR-binding peptide
  MOD_RES (2), (4): Xaa is C or S
  MOD_RES (17), (18), (19), (20), (21): Xaa is A or G
  MOD_RES (22), (23), (24), (25): Xaa is A or G or is absent
AXAXELHEELRPYVKLXXXXXXXXXFFLVSLSSHHVRSPQ

SEQ ID NO: 23406 - protein, 37 aa, Artificial Sequence
  Non-cyclic GFR-binding peptide
  MOD_RES (34), (35): Xaa is C or S
  MOD_RES (12), (13), (14), (15), (16): Xaa is A or G
  MOD_RES (17), (18), (19), (20): Xaa is A or G or is absent
RDVVMGPYVKLXXXXXXXXXFFLMSLSSMKTPTXXPG

SEQ ID NO: 23407 - protein, 38 aa, Artificial Sequence
  Non-cyclic GFR-binding peptide
  MOD_RES (2), (4), (35), (36): Xaa is C or S
LXGXEEVIMPYVKLLLVRGNDFFLMSLSSTKVPAXXTS

SEQ ID NO: 23408 - protein, 35 aa, Artificial Sequence
  Non-cyclic GFR-binding peptide
  MOD_RES (1), (3), (35): Xaa is C or S
XGXSEVVMDPYVKLVVNNASDFFLISLSSLRTPVX

SEQ ID NO: 23409 - protein, 35 aa, Artificial Sequence
  Non-cyclic GFR-binding peptide
  MOD_RES (35), (35): Xaa is C or S
  MOD_RES (11), (12), (13), (14), (15): Xaa is A or G
  MOD_RES (16), (17), (18), (19): Xaa is A or G or is absent
HEELRPYVKLXXXXXXXXXFFLVSLSSHHVRSPQX

SEQ ID NO: 23410 - protein, 38 aa, Artificial Sequence
  Non-cyclic GFR-binding peptide
  MOD_RES (2), (36), (37): Xaa is C or S
  MOD_RES (14), (15), (16), (17), (18): Xaa is A or G
  MOD_RES (19), (20), (21), (22): Xaa is A or G or is absent
GXGEVVMEPYVKLXXXXXXXXXFFLMSLSSLETPVXXA

SEQ ID NO: 23411 - protein, 37 aa, Artificial Sequence
  Non-cyclic GFR-binding peptide
  MOD_RES (33), (33): Xaa is C or S
  MOD_RES (11), (12), (13), (14), (15): Xaa is A or G
  MOD_RES (16), (17), (18), (19): Xaa is A or G or is absent
RVVMNPYVKLXXXXXXXXXFFLVSLSSLKTPAXTPKT

SEQ ID NO: 23412 - protein, 36 aa, Artificial Sequence
  Non-cyclic GFR-binding peptide
  MOD_RES (2), (4): Xaa is C or S
  MOD_RES (15), (16), (17), (18), (19): Xaa is A or G
  MOD_RES (20), (21), (22), (23): Xaa is A or G or is absent
SXKXSKVVMPYVKLXXXXXXXXXFFLISLSSLDQPV

SEQ ID NO: 23413 - protein, 38 aa, Artificial Sequence
  Non-cyclic GFR-binding peptide
  MOD_RES (2), (34), (35): Xaa is C or S
GXSRVVMNPYVKLIVNSSDDFFLVSLSSLKTPAXXPKP

SEQ ID NO: 23414 - protein, 39 aa, Artificial Sequence
  Non-cyclic GFR-binding peptide
  MOD_RES (1), (3), (36), (37): Xaa is C or S
  MOD_RES (14), (15), (16), (17), (18): Xaa is A or G
  MOD_RES (19), (20), (21), (22): Xaa is A or G or is absent
XKXSKVVMPYVKLXXXXXXXXXFFLISLSSLDQPVXXPS

SEQ ID NO: 23415 - protein, 36 aa, Artificial Sequence
  Non-cyclic GFR-binding peptide
  MOD_RES (1), (3): Xaa is C or S
  MOD_RES (15), (16), (17), (18), (19): Xaa is A or G
  MOD_RES (20), (21), (22), (23): Xaa is A or G or is absent
XGXRDVVMGPYVKLXXXXXXXXXFFLMSLSSMKTPT

SEQ ID NO: 23416 - protein, 37 aa, Artificial Sequence
  Non-cyclic GFR-binding peptide
  MOD_RES (34), (35): Xaa is C or S
  MOD_RES (12), (13), (14), (15), (16): Xaa is A or G
  MOD_RES (17), (18), (19), (20): Xaa is A or G or is absent
SRVVMNPYVKLXXXXXXXXXFFLVSLSSLKTPAXXPK

SEQ ID NO: 23417 - protein, 42 aa, Artificial Sequence
  Non-cyclic GFR-binding peptide
  MOD_RES (2), (36), (37): Xaa is C or S
  MOD_RES (14), (15), (16), (17), (18): Xaa is A or G
  MOD_RES (19), (20), (21), (22): Xaa is A or G or is absent
GXSEVVMDPYVKLXXXXXXXXXFFLISLSSLRTPVXXTPPTS

SEQ ID NO: 23418 - protein, 43 aa, Artificial Sequence
  Non-cyclic GFR-binding peptide
  MOD_RES (2), (4), (37), (38): Xaa is C or S
  MOD_RES (15), (16), (17), (18), (19): Xaa is A or G
  MOD_RES (20), (21), (22), (23): Xaa is A or G or is absent
LXGXEEVIMPYVKLXXXXXXXXXFFLMSLSSTKVPAXXTSPVR

SEQ ID NO: 23419 - protein, 38 aa, Artificial Sequence
  Non-cyclic GFR-binding peptide
  MOD_RES (2), (4), (36), (37): Xaa is C or S
SXGXRDVVMGPYVKLIIQQKDNFFLMSLSSMKTPTXXP

SEQ ID NO: 23420 - protein, 36 aa, Artificial Sequence
  Non-cyclic GFR-binding peptide
  MOD_RES (31), (32): Xaa is C or S
EVVMDPYVKLVVNNAADFFLISLSSLRAPVXXSAPA

SEQ ID NO: 23421 - protein, 35 aa, Artificial Sequence
  Non-cyclic GFR-binding peptide
  MOD_RES (2), (2): Xaa is C or S
  MOD_RES (14), (15), (16), (17), (18): Xaa is A or G
  MOD_RES (19), (20), (21), (22): Xaa is A or G or is absent
GXAEVVMDPYVKLXXXXXXXXXFFLISLSSLRAPV

SEQ ID NO: 23422 - protein, 33 aa, Artificial Sequence
  Non-cyclic GFR-binding peptide
  MOD_RES (12), (13), (14), (15), (16): Xaa is A or G
  MOD_RES (17), (18), (19), (20): Xaa is A or G or is absent
SRVVMNPYVKLXXXXXXXXXFFLVSLSSLKTPA

SEQ ID NO: 23423 - protein, 40 aa, Artificial Sequence
  Non-cyclic GFR-binding peptide
  MOD_RES (1), (34), (35): Xaa is C or S
  MOD_RES (12), (13), (14), (15), (16): Xaa is A or G
  MOD_RES (17), (18), (19), (20): Xaa is A or G or is absent
XSKVIMPYVKLXXXXXXXXXFFLISLSSLDQSVXXPSASA

SEQ ID NO: 23424 - protein, 39 aa, Artificial Sequence
  Non-cyclic GFR-binding peptide
  MOD_RES (2), (4), (38): Xaa is C or S
  MOD_RES (16), (17), (18), (19), (20): Xaa is A or G
  MOD_RES (21), (22), (23), (24): Xaa is A or G or is absent
HXGXSRVVMNPYVKLXXXXXXXXXFFLVSLSSLKTPAXT

SEQ ID NO: 23425 - protein, 39 aa, Artificial Sequence
  Non-cyclic GFR-binding peptide
  MOD_RES (2), (4), (38), (39): Xaa is C or S
  MOD_RES (16), (17), (18), (19), (20): Xaa is A or G
  MOD_RES (21), (22), (23), (24): Xaa is A or G or is absent
RXGXAEVVMDPYVKLXXXXXXXXXFFLISLSSLRAPVXX

SEQ ID NO: 23426 - protein, 38 aa, Artificial Sequence
  Non-cyclic GFR-binding peptide
  MOD_RES (33), (34): Xaa is C or S
  MOD_RES (11), (12), (13), (14), (15): Xaa is A or G
  MOD_RES (16), (17), (18), (19): Xaa is A or G or is absent
KVVMNPYVKLXXXXXXXXXFFLVSLSSLKTPAXXAKPV

SEQ ID NO: 23427 - protein, 34 aa, Artificial Sequence
  Non-cyclic GFR-binding peptide
  MOD_RES (2), (34): Xaa is C or S
GXSEVVMDPYVKLVVNNASDFFLISLSSLRTPVX

SEQ ID NO: 23428 - protein, 37 aa, Artificial Sequence
  Non-cyclic GFR-binding peptide
  MOD_RES (1), (35), (36): Xaa is C or S
  MOD_RES (13), (14), (15), (16), (17): Xaa is A or G
  MOD_RES (18), (19), (20), (21): Xaa is A or G or is absent
XSRVVMNPYVKLXXXXXXXXXFFLVSLSSLKTPAXXP

SEQ ID NO: 23429 - protein, 38 aa, Artificial Sequence
  Non-cyclic GFR-binding peptide
  MOD_RES (1), (38): Xaa is C or S
XELHEELRPYVKLLKPKKRVYEFFLVSLSSHHVRSPQX

SEQ ID NO: 23430 - protein, 43 aa, Artificial Sequence
  Non-cyclic GFR-binding peptide
  MOD_RES (1), (3), (37): Xaa is C or S
XEXKNHQLFPYVKLHQGQHPKIRFFLMSLSSEETPVXELGEDN

SEQ ID NO: 23431 - protein, 40 aa, Artificial Sequence
  Non-cyclic GFR-binding peptide
  MOD_RES (2), (35), (36): Xaa is C or S
GXEAVSMGEPYVKLTPVGMDDFFLVSLSSLKTPVXXAKGV

SEQ ID NO: 23432 - protein, 32 aa, Artificial Sequence
  Non-cyclic GFR-binding peptide
  MOD_RES (11), (12), (13), (14), (15): Xaa is A or G
  MOD_RES (16), (17), (18), (19): Xaa is A or G or is absent
EVVMDPYVKLXXXXXXXXXFFLISLSSLRAPV

SEQ ID NO: 23433 - protein, 40 aa, Artificial Sequence
  Non-cyclic GFR-binding peptide
  MOD_RES (34), (35): Xaa is C or S
  MOD_RES (12), (13), (14), (15), (16): Xaa is A or G
  MOD_RES (17), (18), (19), (20): Xaa is A or G or is absent
ESVAMGPYVKLXXXXXXXXXFFLISLSSLKTPVXXAKSAK

SEQ ID NO: 23434 - protein, 35 aa, Artificial Sequence
  Non-cyclic GFR-binding peptide
  MOD_RES (1), (35): Xaa is C or S
  MOD_RES (13), (14), (15), (16), (17): Xaa is A or G
  MOD_RES (18), (19), (20), (21): Xaa is A or G or is absent
XSRVVMNPYVKLXXXXXXXXXFFLVSLSSLKTPAX

SEQ ID NO: 23435 - protein, 37 aa, Artificial Sequence
  Non-cyclic GFR-binding peptide
  MOD_RES (33), (34): Xaa is C or S
  MOD_RES (11), (12), (13), (14), (15): Xaa is A or G
  MOD_RES (16), (17), (18), (19): Xaa is A or G or is absent
EVVMDPYVKLXXXXXXXXXFFLISLSSLRTPVXXTPP

SEQ ID NO: 23436 - protein, 41 aa, Artificial Sequence
  Non-cyclic GFR-binding peptide
  MOD_RES (2), (4), (36), (37): Xaa is C or S
HXGXSRVVMNPYVKLIVNSSDDFFLVSLSSLKTPAXXPKPV

SEQ ID NO: 23437 - protein, 40 aa, Artificial Sequence
  Non-cyclic GFR-binding peptide
  MOD_RES (36), (36): Xaa is C or S
LHEELRPYVKLLKPKKRVYEFFLVSLSSHHVRSPQXKVSS

SEQ ID NO: 23438 - protein, 33 aa, Artificial Sequence
  Non-cyclic GFR-binding peptide
  MOD_RES (12), (13), (14), (15), (16): Xaa is A or G
  MOD_RES (17), (18), (19), (20): Xaa is A or G or is absent
ESVAMGPYVKLXXXXXXXXXFFLISLSSLKTPV

SEQ ID NO: 23439 - protein, 37 aa, Artificial Sequence
  Non-cyclic GFR-binding peptide
  MOD_RES (37), (37): Xaa is C or S
ELHEELRPYVKLLKPKKRVYEFFLVSLSSHHVRSPQX

SEQ ID NO: 23440 - protein, 37 aa, Artificial Sequence
  Non-cyclic GFR-binding peptide
  MOD_RES (1), (3), (34), (35): Xaa is C or S
XKXSRVIMPYVKLVKPKRGVFFLISLSSLAQPVXXPA

SEQ ID NO: 23441 - protein, 39 aa, Artificial Sequence
  Non-cyclic GFR-binding peptide
  MOD_RES (2), (4), (36): Xaa is C or S
HXGXSRVVMNPYVKLIVNSSDDFFLVSLSSLKTPAXTPK

SEQ ID NO: 23442 - protein, 37 aa, Artificial Sequence
  Non-cyclic GFR-binding peptide
  MOD_RES (2), (4): Xaa is C or S
  MOD_RES (16), (17), (18), (19), (20): Xaa is A or G
  MOD_RES (21), (22), (23), (24): Xaa is A or G or is absent
HXGXSRVVMNPYVKLXXXXXXXXXFFLVSLSSLKTPA

SEQ ID NO: 23443 - protein, 35 aa, Artificial Sequence
  Non-cyclic GFR-binding peptide
  MOD_RES (2), (4): Xaa is C or S
RXGXSEVVMDPYVKLVVNNASDFFLISLSSLRTPV

SEQ ID NO: 23444 - protein, 32 aa, Artificial Sequence
  Non-cyclic GFR-binding peptide
  MOD_RES (31), (32): Xaa is C or S
DVVMGPYVKLIIQQKDNFFLMSLSSMKTPTXX

SEQ ID NO: 23445 - protein, 39 aa, Artificial Sequence
  Non-cyclic GFR-binding peptide
  MOD_RES (1), (3), (36), (37): Xaa is C or S
XGXEAVSMGEPYVKLTPVGMDDFFLVSLSSLKTPVXXAK

SEQ ID NO: 23446 - protein, 34 aa, Artificial Sequence
  Non-cyclic GFR-binding peptide
  MOD_RES (1), (34): Xaa is C or S
  MOD_RES (12), (13), (14), (15), (16): Xaa is A or G
  MOD_RES (17), (18), (19), (20): Xaa is A or G or is absent
XSKVVMPYVKLXXXXXXXXXFFLISLSSLDQPVX

SEQ ID NO: 23447 - protein, 41 aa, Artificial Sequence
  Non-cyclic GFR-binding peptide
  MOD_RES (1), (3), (35), (36): Xaa is C or S
XGXRDVVMGPYVKLIIQQKDNFFLMSLSSMKTPTXXPGASG

SEQ ID NO: 23448 - protein, 35 aa, Artificial Sequence
  Non-cyclic GFR-binding peptide
  MOD_RES (33), (34): Xaa is C or S
  MOD_RES (11), (12), (13), (14), (15): Xaa is A or G
  MOD_RES (16), (17), (18), (19): Xaa is A or G or is absent
EVVMDPYVKLXXXXXXXXXFFLISLSSLRTPVXXT

SEQ ID NO: 23449 - protein, 32 aa, Artificial Sequence
  Non-cyclic GFR-binding peptide
  MOD_RES (1), (1): Xaa is C or S
XRDVVMGPYVKLIIQQKDNFFLMSLSSMKTPT

SEQ ID NO: 23450 - protein, 33 aa, Artificial Sequence
  Non-cyclic GFR-binding peptide
  MOD_RES (1), (32), (33): Xaa is C or S
XEEVIMPYVKLLLVRGNDFFLMSLSSTKVPAXX

SEQ ID NO: 23451 - protein, 39 aa, Artificial Sequence
  Non-cyclic GFR-binding peptide
  MOD_RES (1), (35): Xaa is C or S
  MOD_RES (13), (14), (15), (16), (17): Xaa is A or G
  MOD_RES (18), (19), (20), (21): Xaa is A or G or is absent
XSRVVMNPYVKLXXXXXXXXXFFLVSLSSLKTPAXTPKT

SEQ ID NO: 23452 - protein, 37 aa, Artificial Sequence
  Non-cyclic GFR-binding peptide
  MOD_RES (31), (32): Xaa is C or S
EEVIMPYVKLLLVRGNDFFLMSLSSTKVPAXXTSPVR

SEQ ID NO: 23453 - protein, 35 aa, Artificial Sequence
  Non-cyclic GFR-binding peptide
  MOD_RES (2), (35): Xaa is C or S
  MOD_RES (13), (14), (15), (16), (17): Xaa is A or G
  MOD_RES (18), (19), (20), (21): Xaa is A or G or is absent
GXEEVIMPYVKLXXXXXXXXXFFLMSLSSTKVPAX

SEQ ID NO: 23454 - protein, 41 aa, Artificial Sequence
  Non-cyclic GFR-binding peptide
  MOD_RES (2), (4), (38), (39): Xaa is C or S
  MOD_RES (16), (17), (18), (19), (20): Xaa is A or G
  MOD_RES (21), (22), (23), (24): Xaa is A or G or is absent
HXGXAKVVMNPYVKLXXXXXXXXXFFLVSLSSLKTPAXXAK

SEQ ID NO: 23455 - protein, 40 aa, Artificial Sequence
  Non-cyclic GFR-binding peptide
  MOD_RES (1), (3), (37), (38): Xaa is C or S
  MOD_RES (15), (16), (17), (18), (19): Xaa is A or G
  MOD_RES (20), (21), (22), (23): Xaa is A or G or is absent
XGXSEVVMDPYVKLXXXXXXXXXFFLISLSSLRTPVXXTP

SEQ ID NO: 23456 - protein, 44 aa, Artificial Sequence
  Non-cyclic GFR-binding peptide
  MOD_RES (2), (4), (38), (39): Xaa is C or S
  MOD_RES (16), (17), (18), (19), (20): Xaa is A or G
  MOD_RES (21), (22), (23), (24): Xaa is A or G or is absent
HXGXAKVVMNPYVKLXXXXXXXXXFFLVSLSSLKTPAXXAKPVA

SEQ ID NO: 23457 - protein, 39 aa, Artificial Sequence
  Non-cyclic GFR-binding peptide
  MOD_RES (2), (4), (35), (36): Xaa is C or S
SXKXSKVIMPYVKLIKPTKGIFFLISLSSLDQSVXXPSA

SEQ ID NO: 23458 - protein, 37 aa, Artificial Sequence
  Non-cyclic GFR-binding peptide
  MOD_RES (33), (34): Xaa is C or S
  MOD_RES (11), (12), (13), (14), (15): Xaa is A or G
  MOD_RES (16), (17), (18), (19): Xaa is A or G or is absent
SRVIMPYVKLXXXXXXXXXFFLISLSSLAQPVXXPAA

SEQ ID NO: 23459 - protein, 30 aa, Artificial Sequence
  Non-cyclic GFR-binding peptide
RVVMNPYVKLIVNSSDDFFLVSLSSLKTPA

SEQ ID NO: 23460 - protein, 43 aa, Artificial Sequence
  Non-cyclic GFR-binding peptide
  MOD_RES (1), (3), (37), (38): Xaa is C or S
  MOD_RES (15), (16), (17), (18), (19): Xaa is A or G
  MOD_RES (20), (21), (22), (23): Xaa is A or G or is absent
XGXAKVVMNPYVKLXXXXXXXXXFFLVSLSSLKTPAXXAKPVA

SEQ ID NO: 23461 - protein, 40 aa, Artificial Sequence
  Non-cyclic GFR-binding peptide
  MOD_RES (2), (4), (36), (37): Xaa is C or S
RXGXESVAMGPYVKLYTVVGKDFFLISLSSLKTPVXXAKS

SEQ ID NO: 23462 - protein, 33 aa, Artificial Sequence
  Non-cyclic GFR-binding peptide
  MOD_RES (31), (32): Xaa is C or S
DVVMGPYVKLIIQQKDNFFLMSLSSMKTPTXXP

SEQ ID NO: 23463 - protein, 38 aa, Artificial Sequence
  Non-cyclic GFR-binding peptide
  MOD_RES (1), (3), (36), (37): Xaa is C or S
  MOD_RES (14), (15), (16), (17), (18): Xaa is A or G
  MOD_RES (19), (20), (21), (22): Xaa is A or G or is absent
XKXSKVIMPYVKLXXXXXXXXXFFLISLSSLDQSVXXP

SEQ ID NO: 23464 - protein, 35 aa, Artificial Sequence
  Non-cyclic GFR-binding peptide
  MOD_RES (33), (34): Xaa is C or S
  MOD_RES (11), (12), (13), (14), (15): Xaa is A or G
  MOD_RES (16), (17), (18), (19): Xaa is A or G or is absent
RVVMNPYVKLXXXXXXXXXFFLVSLSSLKTPAXXP

SEQ ID NO: 23465 - protein, 34 aa, Artificial Sequence
  Non-cyclic GFR-binding peptide
  MOD_RES (31), (32): Xaa is C or S
EEVIMPYVKLLLVRGNDFFLMSLSSTKVPAXXTS

SEQ ID NO: 23466 - protein, 36 aa, Artificial Sequence
  Non-cyclic GFR-binding peptide
  MOD_RES (2), (4): Xaa is C or S
  MOD_RES (15), (16), (17), (18), (19): Xaa is A or G
  MOD_RES (20), (21), (22), (23): Xaa is A or G or is absent
SXKXSKVIMPYVKLXXXXXXXXXFFLISLSSLDQSV

SEQ ID NO: 23467 - protein, 36 aa, Artificial Sequence
  Non-cyclic GFR-binding peptide
  MOD_RES (2), (34), (35): Xaa is C or S
GXGEVVMEPYVKLVVKDYEDFFLMSLSSLETPVXXA

SEQ ID NO: 23468 - protein, 34 aa, Artificial Sequence
  Non-cyclic GFR-binding peptide
  MOD_RES (33), (34): Xaa is C or S
  MOD_RES (11), (12), (13), (14), (15): Xaa is A or G
  MOD_RES (16), (17), (18), (19): Xaa is A or G or is absent
DVVMGPYVKLXXXXXXXXXFFLMSLSSMKTPTXX

SEQ ID NO: 23469 - protein, 37 aa, Artificial Sequence
  Non-cyclic GFR-binding peptide
  MOD_RES (2), (4), (36), (37): Xaa is C or S
HXGXAKVVMNPYVKLIVNNSSDFFLVSLSSLKTPAXX

SEQ ID NO: 23470 - protein, 40 aa, Artificial Sequence
  Non-cyclic GFR-binding peptide
  MOD_RES (2), (34), (35): Xaa is C or S
GXESVAMGPYVKLYTVVGKDFFLISLSSLKTPVXXAKSAK

SEQ ID NO: 23471 - protein, 42 aa, Artificial Sequence
  Non-cyclic GFR-binding peptide
  MOD_RES (2), (36): Xaa is C or S
  MOD_RES (14), (15), (16), (17), (18): Xaa is A or G
  MOD_RES (19), (20), (21), (22): Xaa is A or G or is absent
EXKNHQLFPYVKLXXXXXXXXXFFLMSLSSEETPVXELGEDN

SEQ ID NO: 23472 - protein, 36 aa, Artificial Sequence
  Non-cyclic GFR-binding peptide
  MOD_RES (2), (35), (36): Xaa is C or S
  MOD_RES (13), (14), (15), (16), (17): Xaa is A or G
  MOD_RES (18), (19), (20), (21): Xaa is A or G or is absent
GXEEVIMPYVKLXXXXXXXXXFFLMSLSSTKVPAXX

SEQ ID NO: 23473 - protein, 37 aa, Artificial Sequence
  Non-cyclic GFR-binding peptide
  MOD_RES (2), (36), (37): Xaa is C or S
  MOD_RES (14), (15), (16), (17), (18): Xaa is A or G
  MOD_RES (19), (20), (21), (22): Xaa is A or G or is absent
GXARVVMNPYVKLXXXXXXXXXFFLVSLSSLQTPAXX

SEQ ID NO: 23474 - protein, 32 aa, Artificial Sequence
  Non-cyclic GFR-binding peptide
  MOD_RES (11), (12), (13), (14), (15): Xaa is A or G
  MOD_RES (16), (17), (18), (19): Xaa is A or G or is absent
SKVVMPYVKLXXXXXXXXXFFLISLSSLDQPV

SEQ ID NO: 23475 - protein, 39 aa, Artificial Sequence
  Non-cyclic GFR-binding peptide
  MOD_RES (2), (36): Xaa is C or S
  MOD_RES (14), (15), (16), (17), (18): Xaa is A or G
  MOD_RES (19), (20), (21), (22): Xaa is A or G or is absent
EXKNHQLFPYVKLXXXXXXXXXFFLMSLSSEETPVXELG

SEQ ID NO: 23476 - protein, 38 aa, Artificial Sequence
  Non-cyclic GFR-binding peptide
  MOD_RES (1), (33), (34): Xaa is C or S
XARVVMNPYVKLIVNSSDDFFLVSLSSLQTPAXXPKPV

SEQ ID NO: 23477 - protein, 37 aa, Artificial Sequence
  Non-cyclic GFR-binding peptide
  MOD_RES (2), (4), (37): Xaa is C or S
  MOD_RES (15), (16), (17), (18), (19): Xaa is A or G
  MOD_RES (20), (21), (22), (23): Xaa is A or G or is absent
LXGXEEVIMPYVKLXXXXXXXXXFFLMSLSSTKVPAX

SEQ ID NO: 23478 - protein, 34 aa, Artificial Sequence
  Non-cyclic GFR-binding peptide
  MOD_RES (2), (2): Xaa is C or S
  MOD_RES (13), (14), (15), (16), (17): Xaa is A or G
  MOD_RES (18), (19), (20), (21): Xaa is A or G or is absent
KXSKVIMPYVKLXXXXXXXXXFFLISLSSLDQSV

SEQ ID NO: 23479 - protein, 38 aa, Artificial Sequence
  Non-cyclic GFR-binding peptide
  MOD_RES (1), (35): Xaa is C or S
  MOD_RES (13), (14), (15), (16), (17): Xaa is A or G
  MOD_RES (18), (19), (20), (21): Xaa is A or G or is absent
XSRVVMNPYVKLXXXXXXXXXFFLVSLSSLKTPAXTPK

SEQ ID NO: 23480 - protein, 31 aa, Artificial Sequence
  Non-cyclic GFR-binding peptide
  MOD_RES (31), (31): Xaa is C or S
EEVIMPYVKLLLVRGNDFFLMSLSSTKVPAX

SEQ ID NO: 23481 - protein, 38 aa, Artificial Sequence
  Non-cyclic GFR-binding peptide
  MOD_RES (37), (37): Xaa is C or S
  MOD_RES (13), (14), (15), (16), (17): Xaa is A or G
  MOD_RES (18), (19), (20), (21): Xaa is A or G or is absent
ELHEELRPYVKLXXXXXXXXXFFLVSLSSHHVRSPQXK

SEQ ID NO: 23482 - protein, 41 aa, Artificial Sequence
  Non-cyclic GFR-binding peptide
  MOD_RES (1), (3), (35), (36): Xaa is C or S
XGXSEVVMDPYVKLVVNNASDFFLISLSSLRTPVXXTPPTS

SEQ ID NO: 23483 - protein, 39 aa, Artificial Sequence
  Non-cyclic GFR-binding peptide
  MOD_RES (33), (34): Xaa is C or S
  MOD_RES (11), (12), (13), (14), (15): Xaa is A or G
  MOD_RES (16), (17), (18), (19): Xaa is A or G or is absent
DVVMGPYVKLXXXXXXXXXFFLMSLSSMKTPTXXPGASG

SEQ ID NO: 23484 - protein, 31 aa, Artificial Sequence
  Non-cyclic GFR-binding peptide
  MOD_RES (31), (31): Xaa is C or S
SRVIMPYVKLVKPKRGVFFLISLSSLAQPVX

SEQ ID NO: 23485 - protein, 41 aa, Artificial Sequence
  Non-cyclic GFR-binding peptide
  MOD_RES (1), (35), (36): Xaa is C or S
  MOD_RES (13), (14), (15), (16), (17): Xaa is A or G
  MOD_RES (18), (19), (20), (21): Xaa is A or G or is absent
XAEVVMDPYVKLXXXXXXXXXFFLISLSSLRAPVXXSAPAA

SEQ ID NO: 23486 - protein, 42 aa, Artificial Sequence
  Non-cyclic GFR-binding peptide
  MOD_RES (2), (36), (37): Xaa is C or S
  MOD_RES (14), (15), (16), (17), (18): Xaa is A or G
  MOD_RES (19), (20), (21), (22): Xaa is A or G or is absent
GXGEVVMEPYVKLXXXXXXXXXFFLMSLSSLETPVXXAKPIS

SEQ ID NO: 23487 - protein, 39 aa, Artificial Sequence
  Non-cyclic GFR-binding peptide
  MOD_RES (2), (34), (35): Xaa is C or S
GXAEVVMDPYVKLVVNNAADFFLISLSSLRAPVXXSAPA

SEQ ID NO: 23488 - protein, 39 aa, Artificial Sequence
  Non-cyclic GFR-binding peptide
  MOD_RES (1), (3), (35), (36): Xaa is C or S
XGXGEVVMEPYVKLVVKDYEDFFLMSLSSLETPVXXAKP

SEQ ID NO: 23489 - protein, 40 aa, Artificial Sequence
  Non-cyclic GFR-binding peptide
  MOD_RES (1), (34), (35): Xaa is C or S
  MOD_RES (12), (13), (14), (15), (16): Xaa is A or G
  MOD_RES (17), (18), (19), (20): Xaa is A or G or is absent
XEEVIMPYVKLXXXXXXXXXFFLMSLSSTKVPAXXTSPVR

SEQ ID NO: 23490 - protein, 38 aa, Artificial Sequence
  Non-cyclic GFR-binding peptide
  MOD_RES (1), (32), (33): Xaa is C or S
XSKVVMPYVKLVKPTRGVFFLISLSSLDQPVXXPSASA

SEQ ID NO: 23491 - protein, 39 aa, Artificial Sequence
  Non-cyclic GFR-binding peptide
  MOD_RES (34), (35): Xaa is C or S
  MOD_RES (12), (13), (14), (15), (16): Xaa is A or G
  MOD_RES (17), (18), (19), (20): Xaa is A or G or is absent
SRVVMNPYVKLXXXXXXXXXFFLVSLSSLKTPAXXPKPV

SEQ ID NO: 23492 - protein, 38 aa, Artificial Sequence
  Non-cyclic GFR-binding peptide
  MOD_RES (2), (4), (37), (38): Xaa is C or S
  MOD_RES (15), (16), (17), (18), (19): Xaa is A or G
  MOD_RES (20), (21), (22), (23): Xaa is A or G or is absent
SXKXSKVVMPYVKLXXXXXXXXXFFLISLSSLDQPVXX

SEQ ID NO: 23493 - protein, 39 aa, Artificial Sequence
  Non-cyclic GFR-binding peptide
  MOD_RES (37), (37): Xaa is C or S
ELHEELRPYVKLLKPKKRVYEFFLVSLSSHHVRSPQXKV

SEQ ID NO: 23494 - protein, 34 aa, Artificial Sequence
  Non-cyclic GFR-binding peptide
  MOD_RES (2), (2): Xaa is C or S
  MOD_RES (13), (14), (15), (16), (17): Xaa is A or G
  MOD_RES (18), (19), (20), (21): Xaa is A or G or is absent
GXEEVIMPYVKLXXXXXXXXXFFLMSLSSTKVPA

SEQ ID NO: 23495 - protein, 38 aa, Artificial Sequence
  Non-cyclic GFR-binding peptide
  MOD_RES (32), (32): Xaa is C or S
SRVVMNPYVKLIVNSSDDFFLVSLSSLKTPAXTPKTVH

SEQ ID NO: 23496 - protein, 35 aa, Artificial Sequence
  Non-cyclic GFR-binding peptide
  MOD_RES (1), (33), (34): Xaa is C or S
XAKVVMNPYVKLIVNNSSDFFLVSLSSLKTPAXXA

SEQ ID NO: 23497 - protein, 42 aa, Artificial Sequence
  Non-cyclic GFR-binding peptide
  MOD_RES (2), (36), (37): Xaa is C or S
  MOD_RES (14), (15), (16), (17), (18): Xaa is A or G
  MOD_RES (19), (20), (21), (22): Xaa is A or G or is absent
GXAEVVMDPYVKLXXXXXXXXXFFLISLSSLRAPVXXSAPAA

SEQ ID NO: 23498 - protein, 37 aa, Artificial Sequence
  Non-cyclic GFR-binding peptide
  MOD_RES (1), (33), (34): Xaa is C or S
XARVVMNPYVKLIVNSSDDFFLVSLSSLQTPAXXPKP

SEQ ID NO: 23499 - protein, 36 aa, Artificial Sequence
  Non-cyclic GFR-binding peptide
  MOD_RES (2), (2): Xaa is C or S
AXELHEELRPYVKLLKPKKRVYEFFLVSLSSHHVRS

SEQ ID NO: 23500 - protein, 32 aa, Artificial Sequence
  Non-cyclic GFR-binding peptide
  MOD_RES (1), (1): Xaa is C or S
XARVVMNPYVKLIVNSSDDFFLVSLSSLQTPA

SEQ ID NO: 23501 - protein, 37 aa, Artificial Sequence
  Non-cyclic GFR-binding peptide
  MOD_RES (2), (4), (36), (37): Xaa is C or S
HXGXARVVMNPYVKLIVNSSDDFFLVSLSSLQTPAXX

SEQ ID NO: 23502 - protein, 38 aa, Artificial Sequence
  Non-cyclic GFR-binding peptide
  MOD_RES (34), (35): Xaa is C or S
  MOD_RES (12), (13), (14), (15), (16): Xaa is A or G
  MOD_RES (17), (18), (19), (20): Xaa is A or G or is absent
SRVVMNPYVKLXXXXXXXXXFFLVSLSSLKTPAXXPKP

SEQ ID NO: 23503 - protein, 35 aa, Artificial Sequence
  Non-cyclic GFR-binding peptide
  MOD_RES (2), (34), (35): Xaa is C or S
GXAKVVMNPYVKLIVNNSSDFFLVSLSSLKTPAXX

SEQ ID NO: 23504 - protein, 34 aa, Artificial Sequence
  Non-cyclic GFR-binding peptide
  MOD_RES (34), (34): Xaa is C or S
  MOD_RES (12), (13), (14), (15), (16): Xaa is A or G
  MOD_RES (17), (18), (19), (20): Xaa is A or G or is absent
RDVVMGPYVKLXXXXXXXXXFFLMSLSSMKTPTX

SEQ ID NO: 23505 - protein, 33 aa, Artificial Sequence
  Non-cyclic GFR-binding peptide
  MOD_RES (31), (32): Xaa is C or S
SVAMGPYVKLYTVVGKDFFLISLSSLKTPVXXA

SEQ ID NO: 23506 - protein, 31 aa, Artificial Sequence
  Non-cyclic GFR-binding peptide
AEVVMDPYVKLVVNNAADFFLISLSSLRAPV

SEQ ID NO: 23507 - protein, 41 aa, Artificial Sequence
  Non-cyclic GFR-binding peptide
  MOD_RES (1), (3), (35), (36): Xaa is C or S
XGXAEVVMDPYVKLVVNNAADFFLISLSSLRAPVXXSAPAA

SEQ ID NO: 23508 - protein, 41 aa, Artificial Sequence
  Non-cyclic GFR-binding peptide
  MOD_RES (1), (38): Xaa is C or S
XELHEELRPYVKLLKPKKRVYEFFLVSLSSHHVRSPQXKVS

SEQ ID NO: 23509 - protein, 39 aa, Artificial Sequence
  Non-cyclic GFR-binding peptide
  MOD_RES (33), (34): Xaa is C or S
  MOD_RES (11), (12), (13), (14), (15): Xaa is A or G
  MOD_RES (16), (17), (18), (19): Xaa is A or G or is absent
RVVMNPYVKLXXXXXXXXXFFLVSLSSLKTPAXXPKPVH

SEQ ID NO: 23510 - protein, 38 aa, Artificial Sequence
  Non-cyclic GFR-binding peptide
  MOD_RES (1), (3), (35), (36): Xaa is C or S
XGXESVAMGPYVKLYTVVGKDFFLISLSSLKTPVXXAK

SEQ ID NO: 23511 - protein, 36 aa, Artificial Sequence
  Non-cyclic GFR-binding peptide
  MOD_RES (1), (35): Xaa is C or S
  MOD_RES (13), (14), (15), (16), (17): Xaa is A or G
  MOD_RES (18), (19), (20), (21): Xaa is A or G or is absent
XKNHQLFPYVKLXXXXXXXXXFFLMSLSSEETPVXE

SEQ ID NO: 23512 - protein, 41 aa, Artificial Sequence
  Non-cyclic GFR-binding peptide
  MOD_RES (2), (4), (41): Xaa is C or S
AXAXELHEELRPYVKLLKPKKRVYEFFLVSLSSHHVRSPQX

SEQ ID NO: 23513 - protein, 41 aa, Artificial Sequence
  Non-cyclic GFR-binding peptide
  MOD_RES (2), (4), (38), (39): Xaa is C or S
  MOD_RES (16), (17), (18), (19), (20): Xaa is A or G
  MOD_RES (21), (22), (23), (24): Xaa is A or G or is absent
RXGXESVAMGPYVKLXXXXXXXXXFFLISLSSLKTPVXXAK

SEQ ID NO: 23514 - protein, 38 aa, Artificial Sequence
  Non-cyclic GFR-binding peptide
  MOD_RES (1), (3), (35), (36): Xaa is C or S
XGXGEVVMEPYVKLVVKDYEDFFLMSLSSLETPVXXAK

SEQ ID NO: 23515 - protein, 35 aa, Artificial Sequence
  Non-cyclic GFR-binding peptide
  MOD_RES (1), (33), (34): Xaa is C or S
XESVAMGPYVKLYTVVGKDFFLISLSSLKTPVXXA

SEQ ID NO: 23516 - protein, 30 aa, Artificial Sequence
  Non-cyclic GFR-binding peptide
EVVMEPYVKLVVKDYEDFFLMSLSSLETPV

SEQ ID NO: 23517 - protein, 40 aa, Artificial Sequence
  Non-cyclic GFR-binding peptide
  MOD_RES (1), (34), (35): Xaa is C or S
XEAVSMGEPYVKLTPVGMDDFFLVSLSSLKTPVXXAKGVK

SEQ ID NO: 23518 - protein, 36 aa, Artificial Sequence
  Non-cyclic GFR-binding peptide
  MOD_RES (2), (4): Xaa is C or S
RXGXEAVSMGEPYVKLTPVGMDDFFLVSLSSLKTPV

SEQ ID NO: 23519 - protein, 39 aa, Artificial Sequence
  Non-cyclic GFR-binding peptide
  MOD_RES (2), (4), (36), (37): Xaa is C or S
HXGXSRVVMNPYVKLIVNSSDDFFLVSLSSLKTPAXXPK

SEQ ID NO: 23520 - protein, 35 aa, Artificial Sequence
  Non-cyclic GFR-binding peptide
  MOD_RES (2), (35): Xaa is C or S
  MOD_RES (13), (14), (15), (16), (17): Xaa is A or G
  MOD_RES (18), (19), (20), (21): Xaa is A or G or is absent
KXSKVVMPYVKLXXXXXXXXXFFLISLSSLDQPVX

SEQ ID NO: 23521 - protein, 38 aa, Artificial Sequence
  Non-cyclic GFR-binding peptide
  MOD_RES (2), (36): Xaa is C or S
EXKNHQLFPYVKLHQGQHPKIRFFLMSLSSEETPVXEL

SEQ ID NO: 23522 - protein, 37 aa, Artificial Sequence
  Non-cyclic GFR-binding peptide
  MOD_RES (2), (35), (36): Xaa is C or S
  MOD_RES (13), (14), (15), (16), (17): Xaa is A or G
  MOD_RES (18), (19), (20), (21): Xaa is A or G or is absent
KXSKVVMPYVKLXXXXXXXXXFFLISLSSLDQPVXXP

SEQ ID NO: 23523 - protein, 32 aa, Artificial Sequence
  Non-cyclic GFR-binding peptide
  MOD_RES (2), (2): Xaa is C or S
GXEEVIMPYVKLLLVRGNDFFLMSLSSTKVPA

SEQ ID NO: 23524 - protein, 36 aa, Artificial Sequence
  Non-cyclic GFR-binding peptide
  MOD_RES (1), (33), (34): Xaa is C or S
XRDVVMGPYVKLIIQQKDNFFLMSLSSMKTPTXXPG

SEQ ID NO: 23525 - protein, 39 aa, Artificial Sequence
  Non-cyclic GFR-binding peptide
  MOD_RES (1), (3), (37): Xaa is C or S
  MOD_RES (15), (16), (17), (18), (19): Xaa is A or G
  MOD_RES (20), (21), (22), (23): Xaa is A or G or is absent
XEXKNHQLFPYVKLXXXXXXXXXFFLMSLSSEETPVXEL

SEQ ID NO: 23526 - protein, 37 aa, Artificial Sequence
  Non-cyclic GFR-binding peptide
  MOD_RES (33), (34): Xaa is C or S
  MOD_RES (11), (12), (13), (14), (15): Xaa is A or G
  MOD_RES (16), (17), (18), (19): Xaa is A or G or is absent
KVVMNPYVKLXXXXXXXXXFFLVSLSSLKTPAXXAKP

SEQ ID NO: 23527 - protein, 35 aa, Artificial Sequence
  Non-cyclic GFR-binding peptide
  MOD_RES (1), (32), (33): Xaa is C or S
XEEVIMPYVKLLLVRGNDFFLMSLSSTKVPAXXTS

SEQ ID NO: 23528 - protein, 37 aa, Artificial Sequence
  Non-cyclic GFR-binding peptide
  MOD_RES (2), (35), (36): Xaa is C or S
  MOD_RES (13), (14), (15), (16), (17): Xaa is A or G
  MOD_RES (18), (19), (20), (21): Xaa is A or G or is absent
GXEEVIMPYVKLXXXXXXXXXFFLMSLSSTKVPAXXT

SEQ ID NO: 23529 - protein, 38 aa, Artificial Sequence
  Non-cyclic GFR-binding peptide
  MOD_RES (35), (36): Xaa is C or S
  MOD_RES (13), (14), (15), (16), (17): Xaa is A or G
  MOD_RES (18), (19), (20), (21): Xaa is A or G or is absent
EAVSMGEPYVKLXXXXXXXXXFFLVSLSSLKTPVXXAK

SEQ ID NO: 23530 - protein, 34 aa, Artificial Sequence
  Non-cyclic GFR-binding peptide
  MOD_RES (1), (1): Xaa is C or S
  MOD_RES (13), (14), (15), (16), (17): Xaa is A or G
  MOD_RES (18), (19), (20), (21): Xaa is A or G or is absent
XSRVVMNPYVKLXXXXXXXXXFFLVSLSSLKTPA

SEQ ID NO: 23531 - protein, 37 aa, Artificial Sequence
  Non-cyclic GFR-binding peptide
  MOD_RES (2), (36), (37): Xaa is C or S
  MOD_RES (14), (15), (16), (17), (18): Xaa is A or G
  MOD_RES (19), (20), (21), (22): Xaa is A or G or is absent
GXAKVVMNPYVKLXXXXXXXXXFFLVSLSSLKTPAXX

SEQ ID NO: 23532 - protein, 33 aa, Artificial Sequence
  Non-cyclic GFR-binding peptide
  MOD_RES (2), (2): Xaa is C or S
GXAEVVMDPYVKLVVNNAADFFLISLSSLRAPV

SEQ ID NO: 23533 - protein, 36 aa, Artificial Sequence
  Non-cyclic GFR-binding peptide
  MOD_RES (1), (3), (36): Xaa is C or S
  MOD_RES (14), (15), (16), (17), (18): Xaa is A or G
  MOD_RES (19), (20), (21), (22): Xaa is A or G or is absent
XKXSKVIMPYVKLXXXXXXXXXFFLISLSSLDQSVX

SEQ ID NO: 23534 - protein, 35 aa, Artificial Sequence
  Non-cyclic GFR-binding peptide
  MOD_RES (1), (34), (35): Xaa is C or S
  MOD_RES (12), (13), (14), (15), (16): Xaa is A or G
  MOD_RES (17), (18), (19), (20): Xaa is A or G or is absent
XSKVIMPYVKLXXXXXXXXXFFLISLSSLDQSVXX

SEQ ID NO: 23535 - protein, 40 aa, Artificial Sequence
  Non-cyclic GFR-binding peptide
  MOD_RES (2), (4), (38): Xaa is C or S
RXEXKNHQLFPYVKLHQGQHPKIRFFLMSLSSEETPVXEL

SEQ ID NO: 23536 - protein, 42 aa, Artificial Sequence
  Non-cyclic GFR-binding peptide
  MOD_RES (2), (4), (36), (37): Xaa is C or S
HXGXSRVVMNPYVKLIVNSSDDFFLVSLSSLKTPAXXPKPVH

SEQ ID NO: 23537 - protein, 36 aa, Artificial Sequence
  Non-cyclic GFR-binding peptide
  MOD_RES (1), (35), (36): Xaa is C or S
  MOD_RES (13), (14), (15), (16), (17): Xaa is A or G
  MOD_RES (18), (19), (20), (21): Xaa is A or G or is absent
XAKVVMNPYVKLXXXXXXXXXFFLVSLSSLKTPAXX

SEQ ID NO: 23538 - protein, 39 aa, Artificial Sequence
  Non-cyclic GFR-binding peptide
  MOD_RES (2), (4), (36), (37): Xaa is C or S
RXGXAEVVMDPYVKLVVNNAADFFLISLSSLRAPVXXSA

SEQ ID NO: 23539 - protein, 42 aa, Artificial Sequence
  Non-cyclic GFR-binding peptide
  MOD_RES (1), (3), (37), (38): Xaa is C or S
  MOD_RES (15), (16), (17), (18), (19): Xaa is A or G
  MOD_RES (20), (21), (22), (23): Xaa is A or G or is absent
XGXAEVVMDPYVKLXXXXXXXXXFFLISLSSLRAPVXXSAPA

SEQ ID NO: 23540 - protein, 38 aa, Artificial Sequence
  Non-cyclic GFR-binding peptide
  MOD_RES (2), (4), (38): Xaa is C or S
  MOD_RES (16), (17), (18), (19), (20): Xaa is A or G
  MOD_RES (21), (22), (23), (24): Xaa is A or G or is absent
HXGXARVVMNPYVKLXXXXXXXXXFFLVSLSSLQTPAX

SEQ ID NO: 23541 - protein, 35 aa, Artificial Sequence
  Non-cyclic GFR-binding peptide
  MOD_RES (34), (35): Xaa is C or S
  MOD_RES (12), (13), (14), (15), (16): Xaa is A or G
  MOD_RES (17), (18), (19), (20): Xaa is A or G or is absent
ESVAMGPYVKLXXXXXXXXXFFLISLSSLKTPVXX

SEQ ID NO: 23542 - protein, 36 aa, Artificial Sequence
  Non-cyclic GFR-binding peptide
  MOD_RES (2), (36): Xaa is C or S
  MOD_RES (14), (15), (16), (17), (18): Xaa is A or G
  MOD_RES (19), (20), (21), (22): Xaa is A or G or is absent
GXRDVVMGPYVKLXXXXXXXXXFFLMSLSSMKTPTX

SEQ ID NO: 23543 - protein, 43 aa, Artificial Sequence
  Non-cyclic GFR-binding peptide
  MOD_RES (1), (3), (37), (38): Xaa is C or S
  MOD_RES (15), (16), (17), (18), (19): Xaa is A or G
  MOD_RES (20), (21), (22), (23): Xaa is A or G or is absent
XGXGEVVMEPYVKLXXXXXXXXXFFLMSLSSLETPVXXAKPIS

SEQ ID NO: 23544 - protein, 40 aa, Artificial Sequence
  Non-cyclic GFR-binding peptide
  MOD_RES (1), (3), (34), (35): Xaa is C or S
XKXSKVIMPYVKLIKPTKGIFFLISLSSLDQSVXXPSASA

SEQ ID NO: 23545 - protein, 33 aa, Artificial Sequence
  Non-cyclic GFR-binding peptide
  MOD_RES (1), (3): Xaa is C or S
XKXSRVIMPYVKLVKPKRGVFFLISLSSLAQPV

SEQ ID NO: 23546 - protein, 35 aa, Artificial Sequence
  Non-cyclic GFR-binding peptide
  MOD_RES (2), (4): Xaa is C or S
RXGXESVAMGPYVKLYTVVGKDFFLISLSSLKTPV

SEQ ID NO: 23547 - protein, 34 aa, Artificial Sequence
  Non-cyclic GFR-binding peptide
  MOD_RES (32), (33): Xaa is C or S
GEVVMEPYVKLVVKDYEDFFLMSLSSLETPVXXA

SEQ ID NO: 23548 - protein, 39 aa, Artificial Sequence
  Non-cyclic GFR-binding peptide
  MOD_RES (2), (34), (35): Xaa is C or S
GXAKVVMNPYVKLIVNNSSDFFLVSLSSLKTPAXXAKPV

SEQ ID NO: 23549 - protein, 33 aa, Artificial Sequence
  Non-cyclic GFR-binding peptide
  MOD_RES (2), (2): Xaa is C or S
GXESVAMGPYVKLYTVVGKDFFLISLSSLKTPV

SEQ ID NO: 23550 - protein, 34 aa, Artificial Sequence
  Non-cyclic GFR-binding peptide
  MOD_RES (31), (32): Xaa is C or S
EVVMDPYVKLVVNNASDFFLISLSSLRTPVXXTP

SEQ ID NO: 23551 - protein, 34 aa, Artificial Sequence
  Non-cyclic GFR-binding peptide
  MOD_RES (1), (3): Xaa is C or S
XGXGEVVMEPYVKLVVKDYEDFFLMSLSSLETPV

SEQ ID NO: 23552 - protein, 37 aa, Artificial Sequence
  Non-cyclic GFR-binding peptide
  MOD_RES (31), (31): Xaa is C or S
RVVMNPYVKLIVNSSDDFFLVSLSSLKTPAXTPKTVH

SEQ ID NO: 23553 - protein, 34 aa, Artificial Sequence
  Non-cyclic GFR-binding peptide
  MOD_RES (34), (34): Xaa is C or S
  MOD_RES (12), (13), (14), (15), (16): Xaa is A or G
  MOD_RES (17), (18), (19), (20): Xaa is A or G or is absent
KNHQLFPYVKLXXXXXXXXXFFLMSLSSEETPVX

SEQ ID NO: 23554 - protein, 39 aa, Artificial Sequence
  Non-cyclic GFR-binding peptide
  MOD_RES (1), (3): Xaa is C or S
  MOD_RES (16), (17), (18), (19), (20): Xaa is A or G
  MOD_RES (21), (22), (23), (24): Xaa is A or G or is absent
XAXELHEELRPYVKLXXXXXXXXXFFLVSLSSHHVRSPQ

SEQ ID NO: 23555 - protein, 38 aa, Artificial Sequence
  Non-cyclic GFR-binding peptide
  MOD_RES (2), (4), (37), (38): Xaa is C or S
  MOD_RES (15), (16), (17), (18), (19): Xaa is A or G
  MOD_RES (20), (21), (22), (23): Xaa is A or G or is absent
SXKXSKVIMPYVKLXXXXXXXXXFFLISLSSLDQSVXX

SEQ ID NO: 23556 - protein, 35 aa, Artificial Sequence
  Non-cyclic GFR-binding peptide
  MOD_RES (2), (33), (34): Xaa is C or S
KXSKVVMPYVKLVKPTRGVFFLISLSSLDQPVXXP

SEQ ID NO: 23557 - protein, 37 aa, Artificial Sequence
  Non-cyclic GFR-binding peptide
  MOD_RES (2), (36): Xaa is C or S
EXKNHQLFPYVKLHQGQHPKIRFFLMSLSSEETPVXE

SEQ ID NO: 23558 - protein, 39 aa, Artificial Sequence
  Non-cyclic GFR-binding peptide
  MOD_RES (1), (3), (34), (35): Xaa is C or S
XKXSKVIMPYVKLIKPTKGIFFLISLSSLDQSVXXPSAS

SEQ ID NO: 23559 - protein, 37 aa, Artificial Sequence
  Non-cyclic GFR-binding peptide
  MOD_RES (2), (34), (35): Xaa is C or S
GXARVVMNPYVKLIVNSSDDFFLVSLSSLQTPAXXPK

SEQ ID NO: 23560 - protein, 36 aa, Artificial Sequence
  Non-cyclic GFR-binding peptide
  MOD_RES (1), (3), (36): Xaa is C or S
XGXEAVSMGEPYVKLTPVGMDDFFLVSLSSLKTPVX

SEQ ID NO: 23561 - protein, 41 aa, Artificial Sequence
  Non-cyclic GFR-binding peptide
  MOD_RES (2), (36): Xaa is C or S
  MOD_RES (14), (15), (16), (17), (18): Xaa is A or G
  MOD_RES (19), (20), (21), (22): Xaa is A or G or is absent
EXKNHQLFPYVKLXXXXXXXXXFFLMSLSSEETPVXELGED

SEQ ID NO: 23562 - protein, 36 aa, Artificial Sequence
  Non-cyclic GFR-binding peptide
  MOD_RES (2), (2): Xaa is C or S
  MOD_RES (15), (16), (17), (18), (19): Xaa is A or G
  MOD_RES (20), (21), (22), (23): Xaa is A or G or is absent
AXELHEELRPYVKLXXXXXXXXXFFLVSLSSHHVRS

SEQ ID NO: 23563 - protein, 41 aa, Artificial Sequence
  Non-cyclic GFR-binding peptide
  MOD_RES (1), (3), (37), (38): Xaa is C or S
  MOD_RES (15), (16), (17), (18), (19): Xaa is A or G
  MOD_RES (20), (21), (22), (23): Xaa is A or G or is absent
XGXRDVVMGPYVKLXXXXXXXXXFFLMSLSSMKTPTXXPGA

SEQ ID NO: 23564 - protein, 35 aa, Artificial Sequence
  Non-cyclic GFR-binding peptide
  MOD_RES (32), (33): Xaa is C or S
AKVVMNPYVKLIVNNSSDFFLVSLSSLKTPAXXAK

SEQ ID NO: 23565 - protein, 37 aa, Artificial Sequence
  Non-cyclic GFR-binding peptide
  MOD_RES (34), (35): Xaa is C or S
  MOD_RES (12), (13), (14), (15), (16): Xaa is A or G
  MOD_RES (17), (18), (19), (20): Xaa is A or G or is absent
AKVVMNPYVKLXXXXXXXXXFFLVSLSSLKTPAXXAK

SEQ ID NO: 23566 - protein, 38 aa, Artificial Sequence
  Non-cyclic GFR-binding peptide
  MOD_RES (33), (34): Xaa is C or S
  MOD_RES (11), (12), (13), (14), (15): Xaa is A or G
  MOD_RES (16), (17), (18), (19): Xaa is A or G or is absent
SVAMGPYVKLXXXXXXXXXFFLISLSSLKTPVXXAKSA

SEQ ID NO: 23567 - protein, 38 aa, Artificial Sequence
  Non-cyclic GFR-binding peptide
  MOD_RES (32), (33): Xaa is C or S
SRVVMNPYVKLIVNSSDDFFLVSLSSLKTPAXXPKPVY

SEQ ID NO: 23568 - protein, 33 aa, Artificial Sequence
  Non-cyclic GFR-binding peptide
  MOD_RES (1), (33): Xaa is C or S
XGEVVMEPYVKLVVKDYEDFFLMSLSSLETPVX

SEQ ID NO: 23569 - protein, 34 aa, Artificial Sequence
  Non-cyclic GFR-binding peptide
  MOD_RES (1), (34): Xaa is C or S
XEAVSMGEPYVKLTPVGMDDFFLVSLSSLKTPVX

SEQ ID NO: 23570 - protein, 38 aa, Artificial Sequence
  Non-cyclic GFR-binding peptide
  MOD_RES (2), (35), (36): Xaa is C or S
GXEAVSMGEPYVKLTPVGMDDFFLVSLSSLKTPVXXAK

SEQ ID NO: 23571 - protein, 36 aa, Artificial Sequence
  Non-cyclic GFR-binding peptide
  MOD_RES (31), (32): Xaa is C or S
EVVMEPYVKLVVKDYEDFFLMSLSSLETPVXXAKPI

SEQ ID NO: 23572 - protein, 40 aa, Artificial Sequence
  Non-cyclic GFR-binding peptide
  MOD_RES (34), (34): Xaa is C or S
KNHQLFPYVKLHQGQHPKIRFFLMSLSSEETPVXELGEDN

SEQ ID NO: 23573 - protein, 38 aa, Artificial Sequence
  Non-cyclic GFR-binding peptide
  MOD_RES (2), (2): Xaa is C or S
  MOD_RES (15), (16), (17), (18), (19): Xaa is A or G
  MOD_RES (20), (21), (22), (23): Xaa is A or G or is absent
AXELHEELRPYVKLXXXXXXXXXFFLVSLSSHHVRSPQ

SEQ ID NO: 23574 - protein, 35 aa, Artificial Sequence
  Non-cyclic GFR-binding peptide
  MOD_RES (2), (34), (35): Xaa is C or S
GXGEVVMEPYVKLVVKDYEDFFLMSLSSLETPVXX

SEQ ID NO: 23575 - protein, 33 aa, Artificial Sequence
  Non-cyclic GFR-binding peptide
  MOD_RES (2), (2): Xaa is C or S
GXSRVVMNPYVKLIVNSSDDFFLVSLSSLKTPA

SEQ ID NO: 23576 - protein, 42 aa, Artificial Sequence
  Non-cyclic GFR-binding peptide
  MOD_RES (1), (3), (40): Xaa is C or S
XAXELHEELRPYVKLLKPKKRVYEFFLVSLSSHHVRSPQXKV

SEQ ID NO: 23577 - protein, 42 aa, Artificial Sequence
  Non-cyclic GFR-binding peptide
  MOD_RES (1), (36), (37): Xaa is C or S
  MOD_RES (14), (15), (16), (17), (18): Xaa is A or G
  MOD_RES (19), (20), (21), (22): Xaa is A or G or is absent
XEAVSMGEPYVKLXXXXXXXXXFFLVSLSSLKTPVXXAKGVK

SEQ ID NO: 23578 - protein, 40 aa, Artificial Sequence
  Non-cyclic GFR-binding peptide
  MOD_RES (34), (35): Xaa is C or S
  MOD_RES (12), (13), (14), (15), (16): Xaa is A or G
  MOD_RES (17), (18), (19), (20): Xaa is A or G or is absent
GEVVMEPYVKLXXXXXXXXXFFLMSLSSLETPVXXAKPIS

SEQ ID NO: 23579 - protein, 34 aa, Artificial Sequence
  Non-cyclic GFR-binding peptide
  MOD_RES (1), (3), (34): Xaa is C or S
XKXSRVIMPYVKLVKPKRGVFFLISLSSLAQPVX

SEQ ID NO: 23580 - protein, 42 aa, Artificial Sequence
  Non-cyclic GFR-binding peptide
  MOD_RES (1), (3), (36), (37): Xaa is C or S
  MOD_RES (14), (15), (16), (17), (18): Xaa is A or G
  MOD_RES (19), (20), (21), (22): Xaa is A or G or is absent
XKXSKVVMPYVKLXXXXXXXXXFFLISLSSLDQPVXXPSASA

SEQ ID NO: 23581 - protein, 37 aa, Artificial Sequence
  Non-cyclic GFR-binding peptide
  MOD_RES (32), (33): Xaa is C or S
SEVVMDPYVKLVVNNASDFFLISLSSLRTPVXXTPPT

SEQ ID NO: 23582 - protein, 43 aa, Artificial Sequence
  Non-cyclic GFR-binding peptide
  MOD_RES (1), (3), (37), (38): Xaa is C or S
  MOD_RES (15), (16), (17), (18), (19): Xaa is A or G
  MOD_RES (20), (21), (22), (23): Xaa is A or G or is absent
XGXSRVVMNPYVKLXXXXXXXXXFFLVSLSSLKTPAXXPKPVY

SEQ ID NO: 23583 - protein, 39 aa, Artificial Sequence
  Non-cyclic GFR-binding peptide
  MOD_RES (2), (36), (37): Xaa is C or S
  MOD_RES (14), (15), (16), (17), (18): Xaa is A or G
  MOD_RES (19), (20), (21), (22): Xaa is A or G or is absent
GXSRVVMNPYVKLXXXXXXXXXFFLVSLSSLKTPAXXPK

SEQ ID NO: 23584 - protein, 40 aa, Artificial Sequence
  Non-cyclic GFR-binding peptide
  MOD_RES (1), (3), (37), (38): Xaa is C or S
  MOD_RES (15), (16), (17), (18), (19): Xaa is A or G
  MOD_RES (20), (21), (22), (23): Xaa is A or G or is absent
XGXSRVVMNPYVKLXXXXXXXXXFFLVSLSSLKTPAXXPK

SEQ ID NO: 23585 - protein, 35 aa, Artificial Sequence
  Non-cyclic GFR-binding peptide
  MOD_RES (34), (35): Xaa is C or S
  MOD_RES (12), (13), (14), (15), (16): Xaa is A or G
  MOD_RES (17), (18), (19), (20): Xaa is A or G or is absent
RDVVMGPYVKLXXXXXXXXXFFLMSLSSMKTPTXX

SEQ ID NO: 23586 - protein, 41 aa, Artificial Sequence
  Non-cyclic GFR-binding peptide
  MOD_RES (2), (36), (37): Xaa is C or S
  MOD_RES (14), (15), (16), (17), (18): Xaa is A or G
  MOD_RES (19), (20), (21), (22): Xaa is A or G or is absent
GXESVAMGPYVKLXXXXXXXXXFFLISLSSLKTPVXXAKSA

SEQ ID NO: 23587 - protein, 37 aa, Artificial Sequence
  Non-cyclic GFR-binding peptide
  MOD_RES (1), (3), (37): Xaa is C or S
  MOD_RES (15), (16), (17), (18), (19): Xaa is A or G
  MOD_RES (20), (21), (22), (23): Xaa is A or G or is absent
XGXGEVVMEPYVKLXXXXXXXXXFFLMSLSSLETPVX

SEQ ID NO: 23588 - protein, 34 aa, Artificial Sequence
  Non-cyclic GFR-binding peptide
  MOD_RES (34), (34): Xaa is C or S
  MOD_RES (12), (13), (14), (15), (16): Xaa is A or G
  MOD_RES (17), (18), (19), (20): Xaa is A or G or is absent
ESVAMGPYVKLXXXXXXXXXFFLISLSSLKTPVX

SEQ ID NO: 23589 - protein, 37 aa, Artificial Sequence
  Non-cyclic GFR-binding peptide
  MOD_RES (31), (32): Xaa is C or S
RVVMNPYVKLIVNSSDDFFLVSLSSLKTPAXXPKPVY

SEQ ID NO: 23590 - protein, 40 aa, Artificial Sequence
  Non-cyclic GFR-binding peptide
  MOD_RES (1), (35), (36): Xaa is C or S
  MOD_RES (13), (14), (15), (16), (17): Xaa is A or G
  MOD_RES (18), (19), (20), (21): Xaa is A or G or is absent
XGEVVMEPYVKLXXXXXXXXXFFLMSLSSLETPVXXAKPI

SEQ ID NO: 23591 - protein, 40 aa, Artificial Sequence
  Non-cyclic GFR-binding peptide
  MOD_RES (1), (3), (34), (35): Xaa is C or S
XKXSKVVMPYVKLVKPTRGVFFLISLSSLDQPVXXPSASA

SEQ ID NO: 23592 - protein, 38 aa, Artificial Sequence
  Non-cyclic GFR-binding peptide
  MOD_RES (1), (33), (34): Xaa is C or S
XRDVVMGPYVKLIIQQKDNFFLMSLSSMKTPTXXPGAS

SEQ ID NO: 23593 - protein, 42 aa, Artificial Sequence
  Non-cyclic GFR-binding peptide
  MOD_RES (2), (4), (37), (38): Xaa is C or S
  MOD_RES (15), (16), (17), (18), (19): Xaa is A or G
  MOD_RES (20), (21), (22), (23): Xaa is A or G or is absent
SXKXSKVVMPYVKLXXXXXXXXXFFLISLSSLDQPVXXPSAS

SEQ ID NO: 23594 - protein, 34 aa, Artificial Sequence
  Non-cyclic GFR-binding peptide
  MOD_RES (1), (33), (34): Xaa is C or S
XGEVVMEPYVKLVVKDYEDFFLMSLSSLETPVXX

SEQ ID NO: 23595 - protein, 34 aa, Artificial Sequence
  Non-cyclic GFR-binding peptide
  MOD_RES (2), (33), (34): Xaa is C or S
KXSKVIMPYVKLIKPTKGIFFLISLSSLDQSVXX

SEQ ID NO: 23596 - protein, 36 aa, Artificial Sequence
  Non-cyclic GFR-binding peptide
  MOD_RES (1), (33), (34): Xaa is C or S
XARVVMNPYVKLIVNSSDDFFLVSLSSLQTPAXXPK

SEQ ID NO: 23597 - protein, 35 aa, Artificial Sequence
  Non-cyclic GFR-binding peptide
  MOD_RES (1), (1): Xaa is C or S
XELHEELRPYVKLLKPKKRVYEFFLVSLSSHHVRS

SEQ ID NO: 23598 - protein, 33 aa, Artificial Sequence
  Non-cyclic GFR-binding peptide
  MOD_RES (12), (13), (14), (15), (16): Xaa is A or G
  MOD_RES (17), (18), (19), (20): Xaa is A or G or is absent
AKVVMNPYVKLXXXXXXXXXFFLVSLSSLKTPA

SEQ ID NO: 23599 - protein, 36 aa, Artificial Sequence
  Non-cyclic GFR-binding peptide
  MOD_RES (31), (32): Xaa is C or S
EVVMDPYVKLVVNNASDFFLISLSSLRTPVXXTPPT

SEQ ID NO: 23600 - protein, 36 aa, Artificial Sequence
  Non-cyclic GFR-binding peptide
  MOD_RES (1), (35): Xaa is C or S
XKNHQLFPYVKLHQGQHPKIRFFLMSLSSEETPVXE

SEQ ID NO: 23601 - protein, 39 aa, Artificial Sequence
  Non-cyclic GFR-binding peptide
  MOD_RES (1), (3), (37), (38): Xaa is C or S
  MOD_RES (15), (16), (17), (18), (19): Xaa is A or G
  MOD_RES (20), (21), (22), (23): Xaa is A or G or is absent
XGXESVAMGPYVKLXXXXXXXXXFFLISLSSLKTPVXXA

SEQ ID NO: 23602 - protein, 43 aa, Artificial Sequence
  Non-cyclic GFR-binding peptide
  MOD_RES (2), (4), (38), (39): Xaa is C or S
  MOD_RES (16), (17), (18), (19), (20): Xaa is A or G
  MOD_RES (21), (22), (23), (24): Xaa is A or G or is absent
RXGXGEVVMEPYVKLXXXXXXXXXFFLMSLSSLETPVXXAKPI

SEQ ID NO: 23603 - protein, 35 aa, Artificial Sequence
  Non-cyclic GFR-binding peptide
  MOD_RES (1), (3), (34), (35): Xaa is C or S
XGXEEVIMPYVKLLLVRGNDFFLMSLSSTKVPAXX

SEQ ID NO: 23604 - protein, 34 aa, Artificial Sequence
  Non-cyclic GFR-binding peptide
LHEELRPYVKLLKPKKRVYEFFLVSLSSHHVRSP

SEQ ID NO: 23605 - protein, 38 aa, Artificial Sequence
  Non-cyclic GFR-binding peptide
  MOD_RES (1), (3), (35): Xaa is C or S
XGXSRVVMNPYVKLIVNSSDDFFLVSLSSLKTPAXTPK

SEQ ID NO: 23606 - protein, 30 aa, Artificial Sequence
  Non-cyclic GFR-binding peptide
KVVMNPYVKLIVNNSSDFFLVSLSSLKTPA

SEQ ID NO: 23607 - protein, 36 aa, Artificial Sequence
  Non-cyclic GFR-binding peptide
  MOD_RES (1), (35), (36): Xaa is C or S
  MOD_RES (13), (14), (15), (16), (17): Xaa is A or G
  MOD_RES (18), (19), (20), (21): Xaa is A or G or is absent
XARVVMNPYVKLXXXXXXXXXFFLVSLSSLQTPAXX

SEQ ID NO: 23608 - protein, 44 aa, Artificial Sequence
  Non-cyclic GFR-binding peptide
  MOD_RES (2), (4), (38), (39): Xaa is C or S
  MOD_RES (16), (17), (18), (19), (20): Xaa is A or G
  MOD_RES (21), (22), (23), (24): Xaa is A or G or is absent
HXGXARVVMNPYVKLXXXXXXXXXFFLVSLSSLQTPAXXPKPVT

SEQ ID NO: 23609 - protein, 37 aa, Artificial Sequence
  Non-cyclic GFR-binding peptide
  MOD_RES (2), (4), (36), (37): Xaa is C or S
RXGXGEVVMEPYVKLVVKDYEDFFLMSLSSLETPVXX

SEQ ID NO: 23610 - protein, 37 aa, Artificial Sequence
  Non-cyclic GFR-binding peptide
  MOD_RES (2), (4), (36), (37): Xaa is C or S
SXGXRDVVMGPYVKLIIQQKDNFFLMSLSSMKTPTXX

SEQ ID NO: 23611 - protein, 40 aa, Artificial Sequence
  Non-cyclic GFR-binding peptide
  MOD_RES (2), (4), (36): Xaa is C or S
HXGXSRVVMNPYVKLIVNSSDDFFLVSLSSLKTPAXTPKT

SEQ ID NO: 23612 - protein, 42 aa, Artificial Sequence
  Non-cyclic GFR-binding peptide
  MOD_RES (2), (4), (37), (38): Xaa is C or S
  MOD_RES (15), (16), (17), (18), (19): Xaa is A or G
  MOD_RES (20), (21), (22), (23): Xaa is A or G or is absent
SXKXSRVIMPYVKLXXXXXXXXXFFLISLSSLAQPVXXPAAS

SEQ ID NO: 23613 - protein, 36 aa, Artificial Sequence
  Non-cyclic GFR-binding peptide
  MOD_RES (33), (34): Xaa is C or S
  MOD_RES (11), (12), (13), (14), (15): Xaa is A or G
  MOD_RES (16), (17), (18), (19): Xaa is A or G or is absent
RVVMNPYVKLXXXXXXXXXFFLVSLSSLQTPAXXPK

SEQ ID NO: 23614 - protein, 32 aa, Artificial Sequence
  Non-cyclic GFR-binding peptide
  MOD_RES (11), (12), (13), (14), (15): Xaa is A or G
  MOD_RES (16), (17), (18), (19): Xaa is A or G or is absent
RVVMNPYVKLXXXXXXXXXFFLVSLSSLQTPA

SEQ ID NO: 23615 - protein, 32 aa, Artificial Sequence
  Non-cyclic GFR-binding peptide
  MOD_RES (11), (12), (13), (14), (15): Xaa is A or G
  MOD_RES (16), (17), (18), (19): Xaa is A or G or is absent
SRVIMPYVKLXXXXXXXXXFFLISLSSLAQPV

SEQ ID NO: 23616 - protein, 31 aa, Artificial Sequence
  Non-cyclic GFR-binding peptide
SEVVMDPYVKLVVNNASDFFLISLSSLRTPV

SEQ ID NO: 23617 - protein, 39 aa, Artificial Sequence
  Non-cyclic GFR-binding peptide
  MOD_RES (2), (37), (38): Xaa is C or S
  MOD_RES (15), (16), (17), (18), (19): Xaa is A or G
  MOD_RES (20), (21), (22), (23): Xaa is A or G or is absent
GXEAVSMGEPYVKLXXXXXXXXXFFLVSLSSLKTPVXXA

SEQ ID NO: 23618 - protein, 38 aa, Artificial Sequence
  Non-cyclic GFR-binding peptide
  MOD_RES (34), (35): Xaa is C or S
  MOD_RES (12), (13), (14), (15), (16): Xaa is A or G
  MOD_RES (17), (18), (19), (20): Xaa is A or G or is absent
ARVVMNPYVKLXXXXXXXXXFFLVSLSSLQTPAXXPKP

SEQ ID NO: 23619 - protein, 38 aa, Artificial Sequence
  Non-cyclic GFR-binding peptide
  MOD_RES (2), (36), (37): Xaa is C or S
  MOD_RES (14), (15), (16), (17), (18): Xaa is A or G
  MOD_RES (19), (20), (21), (22): Xaa is A or G or is absent
GXAKVVMNPYVKLXXXXXXXXXFFLVSLSSLKTPAXXA

SEQ ID NO: 23620 - protein, 36 aa, Artificial Sequence
  Non-cyclic GFR-binding peptide
  MOD_RES (1), (3), (35), (36): Xaa is C or S
XGXAKVVMNPYVKLIVNNSSDFFLVSLSSLKTPAXX

SEQ ID NO: 23621 - protein, 37 aa, Artificial Sequence
  Non-cyclic GFR-binding peptide
  MOD_RES (1), (3), (35), (36): Xaa is C or S
XGXAEVVMDPYVKLVVNNAADFFLISLSSLRAPVXXS

SEQ ID NO: 23622 - protein, 33 aa, Artificial Sequence
  Non-cyclic GFR-binding peptide
  MOD_RES (12), (13), (14), (15), (16): Xaa is A or G
  MOD_RES (17), (18), (19), (20): Xaa is A or G or is absent
KNHQLFPYVKLXXXXXXXXXFFLMSLSSEETPV

SEQ ID NO: 23623 - protein, 36 aa, Artificial Sequence
  Non-cyclic GFR-binding peptide
  MOD_RES (1), (33), (34): Xaa is C or S
XAEVVMDPYVKLVVNNAADFFLISLSSLRAPVXXSA

SEQ ID NO: 23624 - protein, 42 aa, Artificial Sequence
  Non-cyclic GFR-binding peptide
  MOD_RES (2), (4), (36), (37): Xaa is C or S
RXGXSEVVMDPYVKLVVNNASDFFLISLSSLRTPVXXTPPTS

SEQ ID NO: 23625 - protein, 43 aa, Artificial Sequence
  Non-cyclic GFR-binding peptide
  MOD_RES (1), (3), (37): Xaa is C or S
  MOD_RES (15), (16), (17), (18), (19): Xaa is A or G
  MOD_RES (20), (21), (22), (23): Xaa is A or G or is absent
XEXKNHQLFPYVKLXXXXXXXXXFFLMSLSSEETPVXELGEDN

SEQ ID NO: 23626 - protein, 38 aa, Artificial Sequence
  Non-cyclic GFR-binding peptide
  MOD_RES (1), (34), (35): Xaa is C or S
XEAVSMGEPYVKLTPVGMDDFFLVSLSSLKTPVXXAKG

SEQ ID NO: 23627 - protein, 34 aa, Artificial Sequence
  Non-cyclic GFR-binding peptide
  MOD_RES (2), (34): Xaa is C or S
GXRDVVMGPYVKLIIQQKDNFFLMSLSSMKTPTX

SEQ ID NO: 23628 - protein, 33 aa, Artificial Sequence
  Non-cyclic GFR-binding peptide
LHEELRPYVKLLKPKKRVYEFFLVSLSSHHVRS

SEQ ID NO: 23629 - protein, 41 aa, Artificial Sequence
  Non-cyclic GFR-binding peptide
  MOD_RES (2), (36), (37): Xaa is C or S
  MOD_RES (14), (15), (16), (17), (18): Xaa is A or G
  MOD_RES (19), (20), (21), (22): Xaa is A or G or is absent
GXSEVVMDPYVKLXXXXXXXXXFFLISLSSLRTPVXXTPPT

SEQ ID NO: 23630 - protein, 37 aa, Artificial Sequence
  Non-cyclic GFR-binding peptide
  MOD_RES (1), (34), (35): Xaa is C or S
  MOD_RES (12), (13), (14), (15), (16): Xaa is A or G
  MOD_RES (17), (18), (19), (20): Xaa is A or G or is absent
XEEVIMPYVKLXXXXXXXXXFFLMSLSSTKVPAXXTS

SEQ ID NO: 23631 - protein, 44 aa, Artificial Sequence
  Non-cyclic GFR-binding peptide
  MOD_RES (2), (4), (38), (39): Xaa is C or S
  MOD_RES (16), (17), (18), (19), (20): Xaa is A or G
  MOD_RES (21), (22), (23), (24): Xaa is A or G or is absent
RXGXGEVVMDPYVKLXXXXXXXXXFFLMSLSSLETPVXXAKPIK

SEQ ID NO: 23632 - protein, 37 aa, Artificial Sequence
  Non-cyclic GFR-binding peptide
  MOD_RES (34), (35): Xaa is C or S
  MOD_RES (12), (13), (14), (15), (16): Xaa is A or G
  MOD_RES (17), (18), (19), (20): Xaa is A or G or is absent
AEVVMDPYVKLXXXXXXXXXFFLISLSSLRAPVXXSA

SEQ ID NO: 23633 - protein, 35 aa, Artificial Sequence
  Non-cyclic GFR-binding peptide
  MOD_RES (1), (3), (35): Xaa is C or S
XGXSRVVMNPYVKLIVNSSDDFFLVSLSSLKTPAX

SEQ ID NO: 23634 - protein, 40 aa, Artificial Sequence
  Non-cyclic GFR-binding peptide
  MOD_RES (2), (34), (35): Xaa is C or S
GXAEVVMDPYVKLVVNNAADFFLISLSSLRAPVXXSAPAA

SEQ ID NO: 23635 - protein, 34 aa, Artificial Sequence
  Non-cyclic GFR-binding peptide
  MOD_RES (2), (33), (34): Xaa is C or S
GXEEVIMPYVKLLLVRGNDFFLMSLSSTKVPAXX

SEQ ID NO: 23636 - protein, 33 aa, Artificial Sequence
  Non-cyclic GFR-binding peptide
  MOD_RES (32), (32): Xaa is C or S
SRVVMNPYVKLIVNSSDDFFLVSLSSLKTPAXT

SEQ ID NO: 23637 - protein, 35 aa, Artificial Sequence
  Non-cyclic GFR-binding peptide
  MOD_RES (1), (35): Xaa is C or S
  MOD_RES (13), (14), (15), (16), (17): Xaa is A or G
  MOD_RES (18), (19), (20), (21): Xaa is A or G or is absent
XARVVMNPYVKLXXXXXXXXXFFLVSLSSLQTPAX

SEQ ID NO: 23638 - protein, 39 aa, Artificial Sequence
  Non-cyclic GFR-binding peptide
  MOD_RES (1), (3), (38), (39): Xaa is C or S
  MOD_RES (16), (17), (18), (19), (20): Xaa is A or G
  MOD_RES (21), (22), (23), (24): Xaa is A or G or is absent
XGXEAVSMGEPYVKLXXXXXXXXXFFLVSLSSLKTPVXX

SEQ ID NO: 23639 - protein, 33 aa, Artificial Sequence
  Non-cyclic GFR-binding peptide
  MOD_RES (31), (32): Xaa is C or S
SKVVMPYVKLVKPTRGVFFLISLSSLDQPVXXP

SEQ ID NO: 23640 - protein, 39 aa, Artificial Sequence
  Non-cyclic GFR-binding peptide
  MOD_RES (1), (33), (34): Xaa is C or S
XGEVVMEPYVKLVVKDYEDFFLMSLSSLETPVXXAKPIS

SEQ ID NO: 23641 - protein, 42 aa, Artificial Sequence
  Non-cyclic GFR-binding peptide
  MOD_RES (1), (38): Xaa is C or S
  MOD_RES (14), (15), (16), (17), (18): Xaa is A or G
  MOD_RES (19), (20), (21), (22): Xaa is A or G or is absent
XELHEELRPYVKLXXXXXXXXXFFLVSLSSHHVRSPQXKVSS

SEQ ID NO: 23642 - protein, 36 aa, Artificial Sequence
  Non-cyclic GFR-binding peptide
  MOD_RES (2), (36): Xaa is C or S
  MOD_RES (14), (15), (16), (17), (18): Xaa is A or G
  MOD_RES (19), (20), (21), (22): Xaa is A or G or is absent
GXGEVVMEPYVKLXXXXXXXXXFFLMSLSSLETPVX

SEQ ID NO: 23643 - protein, 37 aa, Artificial Sequence
  Non-cyclic GFR-binding peptide
  MOD_RES (2), (33), (34): Xaa is C or S
GXEEVIMPYVKLLLVRGNDFFLMSLSSTKVPAXXTSP

SEQ ID NO: 23644 - protein, 41 aa, Artificial Sequence
  Non-cyclic GFR-binding peptide
  MOD_RES (2), (36), (37): Xaa is C or S
  MOD_RES (14), (15), (16), (17), (18): Xaa is A or G
  MOD_RES (19), (20), (21), (22): Xaa is A or G or is absent
GXGEVVMEPYVKLXXXXXXXXXFFLMSLSSLETPVXXAKPI

SEQ ID NO: 23645 - protein, 36 aa, Artificial Sequence
  Non-cyclic GFR-binding peptide
  MOD_RES (33), (34): Xaa is C or S
EAVSMGEPYVKLTPVGMDDFFLVSLSSLKTPVXXAK

SEQ ID NO: 23646 - protein, 36 aa, Artificial Sequence
  Non-cyclic GFR-binding peptide
  MOD_RES (2), (34), (35): Xaa is C or S
GXSRVVMNPYVKLIVNSSDDFFLVSLSSLKTPAXXP

SEQ ID NO: 23647 - protein, 39 aa, Artificial Sequence
  Non-cyclic GFR-binding peptide
  MOD_RES (1), (3), (35), (36): Xaa is C or S
XGXSRVVMNPYVKLIVNSSDDFFLVSLSSLKTPAXXPKP

SEQ ID NO: 23648 - protein, 36 aa, Artificial Sequence
  Non-cyclic GFR-binding peptide
  MOD_RES (1), (34), (35): Xaa is C or S
  MOD_RES (12), (13), (14), (15), (16): Xaa is A or G
  MOD_RES (17), (18), (19), (20): Xaa is A or G or is absent
XSKVVMPYVKLXXXXXXXXXFFLISLSSLDQPVXXP

SEQ ID NO: 23649 - protein, 39 aa, Artificial Sequence
  Non-cyclic GFR-binding peptide
  MOD_RES (2), (4): Xaa is C or S
AXAXELHEELRPYVKLLKPKKRVYEFFLVSLSSHHVRSP

SEQ ID NO: 23650 - protein, 37 aa, Artificial Sequence
  Non-cyclic GFR-binding peptide
  MOD_RES (33), (33): Xaa is C or S
  MOD_RES (11), (12), (13), (14), (15): Xaa is A or G
  MOD_RES (16), (17), (18), (19): Xaa is A or G or is absent
NHQLFPYVKLXXXXXXXXXFFLMSLSSEETPVXELGE

SEQ ID NO: 23651 - protein, 32 aa, Artificial Sequence
  Non-cyclic GFR-binding peptide
  MOD_RES (31), (32): Xaa is C or S
RVVMNPYVKLIVNSSDDFFLVSLSSLQTPAXX

SEQ ID NO: 23652 - protein, 31 aa, Artificial Sequence
  Non-cyclic GFR-binding peptide
  MOD_RES (31), (31): Xaa is C or S
SVAMGPYVKLYTVVGKDFFLISLSSLKTPVX

SEQ ID NO: 23653 - protein, 36 aa, Artificial Sequence
  Non-cyclic GFR-binding peptide
ELHEELRPYVKLLKPKKRVYEFFLVSLSSHHVRSPQ

SEQ ID NO: 23654 - protein, 34 aa, Artificial Sequence
  Non-cyclic GFR-binding peptide
  MOD_RES (34), (34): Xaa is C or S
  MOD_RES (12), (13), (14), (15), (16): Xaa is A or G
  MOD_RES (17), (18), (19), (20): Xaa is A or G or is absent
SRVVMNPYVKLXXXXXXXXXFFLVSLSSLKTPAX

SEQ ID NO: 23655 - protein, 36 aa, Artificial Sequence
  Non-cyclic GFR-binding peptide
  MOD_RES (33), (34): Xaa is C or S
  MOD_RES (11), (12), (13), (14), (15): Xaa is A or G
  MOD_RES (16), (17), (18), (19): Xaa is A or G or is absent
SRVIMPYVKLXXXXXXXXXFFLISLSSLAQPVXXPA

SEQ ID NO: 23656 - protein, 38 aa, Artificial Sequence
  Non-cyclic GFR-binding peptide
  MOD_RES (34), (35): Xaa is C or S
  MOD_RES (12), (13), (14), (15), (16): Xaa is A or G
  MOD_RES (17), (18), (19), (20): Xaa is A or G or is absent
RDVVMGPYVKLXXXXXXXXXFFLMSLSSMKTPTXXPGA

SEQ ID NO: 23657 - protein, 43 aa, Artificial Sequence
  Non-cyclic GFR-binding peptide
  MOD_RES (2), (4), (39), (40): Xaa is C or S
  MOD_RES (17), (18), (19), (20), (21): Xaa is A or G
  MOD_RES (22), (23), (24), (25): Xaa is A or G or is absent
RXGXEAVSMGEPYVKLXXXXXXXXXFFLVSLSSLKTPVXXAKG

SEQ ID NO: 23658 - protein, 40 aa, Artificial Sequence
  Non-cyclic GFR-binding peptide
  MOD_RES (2), (34), (35): Xaa is C or S
GXRDVVMGPYVKLIIQQKDNFFLMSLSSMKTPTXXPGASG

SEQ ID NO: 23659 - protein, 41 aa, Artificial Sequence
  Non-cyclic GFR-binding peptide
  MOD_RES (2), (35), (36): Xaa is C or S
  MOD_RES (13), (14), (15), (16), (17): Xaa is A or G
  MOD_RES (18), (19), (20), (21): Xaa is A or G or is absent
KXSKVIMPYVKLXXXXXXXXXFFLISLSSLDQSVXXPSASA

SEQ ID NO: 23660 - protein, 32 aa, Artificial Sequence
  Non-cyclic GFR-binding peptide
  MOD_RES (1), (1): Xaa is C or S
XSRVVMNPYVKLIVNSSDDFFLVSLSSLKTPA

SEQ ID NO: 23661 - protein, 33 aa, Artificial Sequence
  Non-cyclic GFR-binding peptide
  MOD_RES (32), (33): Xaa is C or S
AKVVMNPYVKLIVNNSSDFFLVSLSSLKTPAXX

SEQ ID NO: 23662 - protein, 32 aa, Artificial Sequence
  Non-cyclic GFR-binding peptide
  MOD_RES (11), (12), (13), (14), (15): Xaa is A or G
  MOD_RES (16), (17), (18), (19): Xaa is A or G or is absent
EVVMEPYVKLXXXXXXXXXFFLMSLSSLETPV

SEQ ID NO: 23663 - protein, 39 aa, Artificial Sequence
  Non-cyclic GFR-binding peptide
  MOD_RES (34), (35): Xaa is C or S
  MOD_RES (12), (13), (14), (15), (16): Xaa is A or G
  MOD_RES (17), (18), (19), (20): Xaa is A or G or is absent
ESVAMGPYVKLXXXXXXXXXFFLISLSSLKTPVXXAKSA

SEQ ID NO: 23664 - protein, 36 aa, Artificial Sequence
  Non-cyclic GFR-binding peptide
  MOD_RES (32), (32): Xaa is C or S
SRVVMNPYVKLIVNSSDDFFLVSLSSLKTPAXTPKT

SEQ ID NO: 23665 - protein, 34 aa, Artificial Sequence
  Non-cyclic GFR-binding peptide
  MOD_RES (33), (33): Xaa is C or S
NHQLFPYVKLHQGQHPKIRFFLMSLSSEETPVXE

SEQ ID NO: 23666 - protein, 40 aa, Artificial Sequence
  Non-cyclic GFR-binding peptide
  MOD_RES (2), (36): Xaa is C or S
  MOD_RES (14), (15), (16), (17), (18): Xaa is A or G
  MOD_RES (19), (20), (21), (22): Xaa is A or G or is absent
EXKNHQLFPYVKLXXXXXXXXXFFLMSLSSEETPVXELGE

SEQ ID NO: 23667 - protein, 32 aa, Artificial Sequence
  Non-cyclic GFR-binding peptide
  MOD_RES (31), (32): Xaa is C or S
EEVIMPYVKLLLVRGNDFFLMSLSSTKVPAXX

SEQ ID NO: 23668 - protein, 40 aa, Artificial Sequence
  Non-cyclic GFR-binding peptide
  MOD_RES (2), (4), (38), (39): Xaa is C or S
  MOD_RES (16), (17), (18), (19), (20): Xaa is A or G
  MOD_RES (21), (22), (23), (24): Xaa is A or G or is absent
RXGXESVAMGPYVKLXXXXXXXXXFFLISLSSLKTPVXXA

SEQ ID NO: 23669 - protein, 36 aa, Artificial Sequence
  Non-cyclic GFR-binding peptide
  MOD_RES (33), (34): Xaa is C or S
  MOD_RES (11), (12), (13), (14), (15): Xaa is A or G
  MOD_RES (16), (17), (18), (19): Xaa is A or G or is absent
KVVMNPYVKLXXXXXXXXXFFLVSLSSLKTPAXXAK

SEQ ID NO: 23670 - protein, 36 aa, Artificial Sequence
  Non-cyclic GFR-binding peptide
  MOD_RES (2), (36): Xaa is C or S
  MOD_RES (14), (15), (16), (17), (18): Xaa is A or G
  MOD_RES (19), (20), (21), (22): Xaa is A or G or is absent
GXAEVVMDPYVKLXXXXXXXXXFFLISLSSLRAPVX

SEQ ID NO: 23671 - protein, 37 aa, Artificial Sequence
  Non-cyclic GFR-binding peptide
  MOD_RES (1), (33), (34): Xaa is C or S
XRDVVMGPYVKLIIQQKDNFFLMSLSSMKTPTXXPGA

SEQ ID NO: 23672 - protein, 41 aa, Artificial Sequence
  Non-cyclic GFR-binding peptide
  MOD_RES (1), (3), (36), (37): Xaa is C or S
  MOD_RES (14), (15), (16), (17), (18): Xaa is A or G
  MOD_RES (19), (20), (21), (22): Xaa is A or G or is absent
XGXEEVIMPYVKLXXXXXXXXXFFLMSLSSTKVPAXXTSPV

SEQ ID NO: 23673 - protein, 42 aa, Artificial Sequence
  Non-cyclic GFR-binding peptide
  MOD_RES (2), (4), (36), (37): Xaa is C or S
RXGXGEVVMEPYVKLVVKDYEDFFLMSLSSLETPVXXAKPIS

SEQ ID NO: 23674 - protein, 36 aa, Artificial Sequence
  Non-cyclic GFR-binding peptide
  MOD_RES (2), (4): Xaa is C or S
  MOD_RES (15), (16), (17), (18), (19): Xaa is A or G
  MOD_RES (20), (21), (22), (23): Xaa is A or G or is absent
SXKXSRVIMPYVKLXXXXXXXXXFFLISLSSLAQPV

SEQ ID NO: 23675 - protein, 40 aa, Artificial Sequence
  Non-cyclic GFR-binding peptide
  MOD_RES (2), (4), (38), (39): Xaa is C or S
  MOD_RES (16), (17), (18), (19), (20): Xaa is A or G
  MOD_RES (21), (22), (23), (24): Xaa is A or G or is absent
RXGXSEVVMDPYVKLXXXXXXXXXFFLISLSSLRTPVXXT

SEQ ID NO: 23676 - protein, 39 aa, Artificial Sequence
  Non-cyclic GFR-binding peptide
  MOD_RES (2), (35), (36): Xaa is C or S
  MOD_RES (13), (14), (15), (16), (17): Xaa is A or G
  MOD_RES (18), (19), (20), (21): Xaa is A or G or is absent
GXEEVIMPYVKLXXXXXXXXXFFLMSLSSTKVPAXXTSP

SEQ ID NO: 23677 - protein, 38 aa, Artificial Sequence
  Non-cyclic GFR-binding peptide
  MOD_RES (1), (3), (37), (38): Xaa is C or S
  MOD_RES (15), (16), (17), (18), (19): Xaa is A or G
  MOD_RES (20), (21), (22), (23): Xaa is A or G or is absent
XGXRDVVMGPYVKLXXXXXXXXXFFLMSLSSMKTPTXX

SEQ ID NO: 23678 - protein, 34 aa, Artificial Sequence
  Non-cyclic GFR-binding peptide
  MOD_RES (1), (32), (33): Xaa is C or S
XSKVIMPYVKLIKPTKGIFFLISLSSLDQSVXXP

SEQ ID NO: 23679 - protein, 34 aa, Artificial Sequence
  Non-cyclic GFR-binding peptide
  MOD_RES (1), (3), (34): Xaa is C or S
XGXEEVIMPYVKLLLVRGNDFFLMSLSSTKVPAX

SEQ ID NO: 23680 - protein, 34 aa, Artificial Sequence
  Non-cyclic GFR-binding peptide
  MOD_RES (1), (1): Xaa is C or S
  MOD_RES (13), (14), (15), (16), (17): Xaa is A or G
  MOD_RES (18), (19), (20), (21): Xaa is A or G or is absent
XESVAMGPYVKLXXXXXXXXXFFLISLSSLKTPV

SEQ ID NO: 23681 - protein, 35 aa, Artificial Sequence
  Non-cyclic GFR-binding peptide
  MOD_RES (31), (32): Xaa is C or S
SKVIMPYVKLIKPTKGIFFLISLSSLDQSVXXPSA

SEQ ID NO: 23682 - protein, 42 aa, Artificial Sequence
  Non-cyclic GFR-binding peptide
  MOD_RES (2), (36), (37): Xaa is C or S
  MOD_RES (14), (15), (16), (17), (18): Xaa is A or G
  MOD_RES (19), (20), (21), (22): Xaa is A or G or is absent
GXSRVVMNPYVKLXXXXXXXXXFFLVSLSSLKTPAXXPKPVY

SEQ ID NO: 23683 - protein, 34 aa, Artificial Sequence
  Non-cyclic GFR-binding peptide
  MOD_RES (32), (33): Xaa is C or S
ESVAMGPYVKLYTVVGKDFFLISLSSLKTPVXXA

SEQ ID NO: 23684 - protein, 35 aa, Artificial Sequence
  Non-cyclic GFR-binding peptide
  MOD_RES (33), (34): Xaa is C or S
  MOD_RES (11), (12), (13), (14), (15): Xaa is A or G
  MOD_RES (16), (17), (18), (19): Xaa is A or G or is absent
KVVMNPYVKLXXXXXXXXXFFLVSLSSLKTPAXXA

SEQ ID NO: 23685 - protein, 39 aa, Artificial Sequence
  Non-cyclic GFR-binding peptide
  MOD_RES (2), (4), (38): Xaa is C or S
  MOD_RES (16), (17), (18), (19), (20): Xaa is A or G
  MOD_RES (21), (22), (23), (24): Xaa is A or G or is absent
RXEXKNHQLFPYVKLXXXXXXXXXFFLMSLSSEETPVXE

SEQ ID NO: 23686 - protein, 42 aa, Artificial Sequence
  Non-cyclic GFR-binding peptide
  MOD_RES (1), (3), (37), (38): Xaa is C or S
  MOD_RES (15), (16), (17), (18), (19): Xaa is A or G
  MOD_RES (20), (21), (22), (23): Xaa is A or G or is absent
XGXESVAMGPYVKLXXXXXXXXXFFLISLSSLKTPVXXAKSA

SEQ ID NO: 23687 - protein, 33 aa, Artificial Sequence
  Non-cyclic GFR-binding peptide
  MOD_RES (1), (1): Xaa is C or S
  MOD_RES (12), (13), (14), (15), (16): Xaa is A or G
  MOD_RES (17), (18), (19), (20): Xaa is A or G or is absent
XEEVIMPYVKLXXXXXXXXXFFLMSLSSTKVPA

SEQ ID NO: 23688 - protein, 38 aa, Artificial Sequence
  Non-cyclic GFR-binding peptide
  MOD_RES (34), (34): Xaa is C or S
  MOD_RES (12), (13), (14), (15), (16): Xaa is A or G
  MOD_RES (17), (18), (19), (20): Xaa is A or G or is absent
KNHQLFPYVKLXXXXXXXXXFFLMSLSSEETPVXELGE

SEQ ID NO: 23689 - protein, 39 aa, Artificial Sequence
  Non-cyclic GFR-binding peptide
  MOD_RES (2), (4), (38): Xaa is C or S
RXEXKNHQLFPYVKLHQGQHPKIRFFLMSLSSEETPVXE

SEQ ID NO: 23690 - protein, 37 aa, Artificial Sequence
  Non-cyclic GFR-binding peptide
  MOD_RES (1), (32), (33): Xaa is C or S
XSKVIMPYVKLIKPTKGIFFLISLSSLDQSVXXPSAS

SEQ ID NO: 23691 - protein, 39 aa, Artificial Sequence
  Non-cyclic GFR-binding peptide
  MOD_RES (1), (3), (35): Xaa is C or S
XGXSRVVMNPYVKLIVNSSDDFFLVSLSSLKTPAXTPKT

SEQ ID NO: 23692 - protein, 38 aa, Artificial Sequence
  Non-cyclic GFR-binding peptide
  MOD_RES (32), (33): Xaa is C or S
RDVVMGPYVKLIIQQKDNFFLMSLSSMKTPTXXPGASG

SEQ ID NO: 23693 - protein, 32 aa, Artificial Sequence
  Non-cyclic GFR-binding peptide
  MOD_RES (1), (1): Xaa is C or S
XESVAMGPYVKLYTVVGKDFFLISLSSLKTPV

SEQ ID NO: 23694 - protein, 34 aa, Artificial Sequence
  Non-cyclic GFR-binding peptide
  MOD_RES (1), (33), (34): Xaa is C or S
XARVVMNPYVKLIVNSSDDFFLVSLSSLQTPAXX

SEQ ID NO: 23695 - protein, 37 aa, Artificial Sequence
  Non-cyclic GFR-binding peptide
  MOD_RES (33), (34): Xaa is C or S
  MOD_RES (11), (12), (13), (14), (15): Xaa is A or G
  MOD_RES (16), (17), (18), (19): Xaa is A or G or is absent
RVVMNPYVKLXXXXXXXXXFFLVSLSSLKTPAXXPKP

SEQ ID NO: 23696 - protein, 36 aa, Artificial Sequence
  Non-cyclic GFR-binding peptide
  MOD_RES (32), (33): Xaa is C or S
SRVVMNPYVKLIVNSSDDFFLVSLSSLKTPAXXPKP

SEQ ID NO: 23697 - protein, 38 aa, Artificial Sequence
  Non-cyclic GFR-binding peptide
  MOD_RES (36), (36): Xaa is C or S
  MOD_RES (12), (13), (14), (15), (16): Xaa is A or G
  MOD_RES (17), (18), (19), (20): Xaa is A or G or is absent
LHEELRPYVKLXXXXXXXXXFFLVSLSSHHVRSPQXKV

SEQ ID NO: 23698 - protein, 35 aa, Artificial Sequence
  Non-cyclic GFR-binding peptide
  MOD_RES (33), (34): Xaa is C or S
EAVSMGEPYVKLTPVGMDDFFLVSLSSLKTPVXXA

SEQ ID NO: 23699 - protein, 31 aa, Artificial Sequence
  Non-cyclic GFR-binding peptide
RDVVMGPYVKLIIQQKDNFFLMSLSSMKTPT

SEQ ID NO: 23700 - protein, 35 aa, Artificial Sequence
  Non-cyclic GFR-binding peptide
  MOD_RES (2), (4), (35): Xaa is C or S
SXKXSRVIMPYVKLVKPKRGVFFLISLSSLAQPVX

SEQ ID NO: 23701 - protein, 32 aa, Artificial Sequence
  Non-cyclic GFR-binding peptide
  MOD_RES (1), (1): Xaa is C or S
XSEVVMDPYVKLVVNNASDFFLISLSSLRTPV

SEQ ID NO: 23702 - protein, 38 aa, Artificial Sequence
  Non-cyclic GFR-binding peptide
  MOD_RES (33), (34): Xaa is C or S
  MOD_RES (11), (12), (13), (14), (15): Xaa is A or G
  MOD_RES (16), (17), (18), (19): Xaa is A or G or is absent
EVVMEPYVKLXXXXXXXXXFFLMSLSSLETPVXXAKPI

SEQ ID NO: 23703 - protein, 40 aa, Artificial Sequence
  Non-cyclic GFR-binding peptide
  MOD_RES (34), (35): Xaa is C or S
  MOD_RES (12), (13), (14), (15), (16): Xaa is A or G
  MOD_RES (17), (18), (19), (20): Xaa is A or G or is absent
AEVVMDPYVKLXXXXXXXXXFFLISLSSLRAPVXXSAPAA

SEQ ID NO: 23704 - protein, 40 aa, Artificial Sequence
  Non-cyclic GFR-binding peptide
  MOD_RES (1), (36), (37): Xaa is C or S
  MOD_RES (14), (15), (16), (17), (18): Xaa is A or G
  MOD_RES (19), (20), (21), (22): Xaa is A or G or is absent
XEAVSMGEPYVKLXXXXXXXXXFFLVSLSSLKTPVXXAKG

SEQ ID NO: 23705 - protein, 40 aa, Artificial Sequence
  Non-cyclic GFR-binding peptide
  MOD_RES (34), (35): Xaa is C or S
  MOD_RES (12), (13), (14), (15), (16): Xaa is A or G
  MOD_RES (17), (18), (19), (20): Xaa is A or G or is absent
SRVVMNPYVKLXXXXXXXXXFFLVSLSSLKTPAXXPKPVH

SEQ ID NO: 23706 - protein, 38 aa, Artificial Sequence
  Non-cyclic GFR-binding peptide
  MOD_RES (2), (34), (35): Xaa is C or S
GXESVAMGPYVKLYTVVGKDFFLISLSSLKTPVXXAKS

SEQ ID NO: 23707 - protein, 35 aa, Artificial Sequence
  Non-cyclic GFR-binding peptide
  MOD_RES (32), (33): Xaa is C or S
GEVVMEPYVKLVVKDYEDFFLMSLSSLETPVXXAK

SEQ ID NO: 23708 - protein, 36 aa, Artificial Sequence
  Non-cyclic GFR-binding peptide
  MOD_RES (2), (4), (35), (36): Xaa is C or S
LXGXEEVIMPYVKLLLVRGNDFFLMSLSSTKVPAXX

SEQ ID NO: 23709 - protein, 39 aa, Artificial Sequence
  Non-cyclic GFR-binding peptide
  MOD_RES (2), (4), (36), (37): Xaa is C or S
HXGXAKVVMNPYVKLIVNNSSDFFLVSLSSLKTPAXXAK

SEQ ID NO: 23710 - protein, 36 aa, Artificial Sequence
  Non-cyclic GFR-binding peptide
  MOD_RES (1), (3), (35), (36): Xaa is C or S
XGXGEVVMEPYVKLVVKDYEDFFLMSLSSLETPVXX

SEQ ID NO: 23711 - protein, 37 aa, Artificial Sequence
  Non-cyclic GFR-binding peptide
  MOD_RES (1), (33): Xaa is C or S
XSRVVMNPYVKLIVNSSDDFFLVSLSSLKTPAXTPKT

SEQ ID NO: 23712 - protein, 38 aa, Artificial Sequence
  Non-cyclic GFR-binding peptide
  MOD_RES (1), (3), (37), (38): Xaa is C or S
  MOD_RES (15), (16), (17), (18), (19): Xaa is A or G
  MOD_RES (20), (21), (22), (23): Xaa is A or G or is absent
XGXARVVMNPYVKLXXXXXXXXXFFLVSLSSLQTPAXX

SEQ ID NO: 23713 - protein, 41 aa, Artificial Sequence
  Non-cyclic GFR-binding peptide
  MOD_RES (1), (35), (36): Xaa is C or S
  MOD_RES (13), (14), (15), (16), (17): Xaa is A or G
  MOD_RES (18), (19), (20), (21): Xaa is A or G or is absent
XSRVVMNPYVKLXXXXXXXXXFFLVSLSSLKTPAXXPKPVY

SEQ ID NO: 23714 - protein, 34 aa, Artificial Sequence
  Non-cyclic GFR-binding peptide
  MOD_RES (1), (1): Xaa is C or S
  MOD_RES (13), (14), (15), (16), (17): Xaa is A or G
  MOD_RES (18), (19), (20), (21): Xaa is A or G or is absent
XSEVVMDPYVKLXXXXXXXXXFFLISLSSLRTPV

SEQ ID NO: 23715 - protein, 36 aa, Artificial Sequence
  Non-cyclic GFR-binding peptide
  MOD_RES (2), (4), (36): Xaa is C or S
SXGXRDVVMGPYVKLIIQQKDNFFLMSLSSMKTPTX

SEQ ID NO: 23716 - protein, 33 aa, Artificial Sequence
  Non-cyclic GFR-binding peptide
  MOD_RES (1), (33): Xaa is C or S
XAKVVMNPYVKLIVNNSSDFFLVSLSSLKTPAX

SEQ ID NO: 23717 - protein, 43 aa, Artificial Sequence
  Non-cyclic GFR-binding peptide
  MOD_RES (1), (3), (37), (38): Xaa is C or S
  MOD_RES (15), (16), (17), (18), (19): Xaa is A or G
  MOD_RES (20), (21), (22), (23): Xaa is A or G or is absent
XGXRDVVMGPYVKLXXXXXXXXXFFLMSLSSMKTPTXXPGASG

SEQ ID NO: 23718 - protein, 35 aa, Artificial Sequence
  Non-cyclic GFR-binding peptide
  MOD_RES (2), (4): Xaa is C or S
RXGXGEVVMEPYVKLVVKDYEDFFLMSLSSLETPV

SEQ ID NO: 23719 - protein, 38 aa, Artificial Sequence
  Non-cyclic GFR-binding peptide
  MOD_RES (2), (2): Xaa is C or S
AXELHEELRPYVKLLKPKKRVYEFFLVSLSSHHVRSPQ

SEQ ID NO: 23720 - protein, 35 aa, Artificial Sequence
  Non-cyclic GFR-binding peptide
  MOD_RES (35), (35): Xaa is C or S
  MOD_RES (13), (14), (15), (16), (17): Xaa is A or G
  MOD_RES (18), (19), (20), (21): Xaa is A or G or is absent
EAVSMGEPYVKLXXXXXXXXXFFLVSLSSLKTPVX

SEQ ID NO: 23721 - protein, 38 aa, Artificial Sequence
  Non-cyclic GFR-binding peptide
  MOD_RES (2), (36): Xaa is C or S
  MOD_RES (14), (15), (16), (17), (18): Xaa is A or G
  MOD_RES (19), (20), (21), (22): Xaa is A or G or is absent
EXKNHQLFPYVKLXXXXXXXXXFFLMSLSSEETPVXEL

SEQ ID NO: 23722 - protein, 36 aa, Artificial Sequence
  Non-cyclic GFR-binding peptide
  MOD_RES (2), (34), (35): Xaa is C or S
GXAKVVMNPYVKLIVNNSSDFFLVSLSSLKTPAXXA

SEQ ID NO: 23723 - protein, 38 aa, Artificial Sequence
  Non-cyclic GFR-binding peptide
  MOD_RES (2), (33), (34): Xaa is C or S
KXSKVIMPYVKLIKPTKGIFFLISLSSLDQSVXXPSAS

SEQ ID NO: 23724 - protein, 33 aa, Artificial Sequence
  Non-cyclic GFR-binding peptide
  MOD_RES (33), (33): Xaa is C or S
  MOD_RES (11), (12), (13), (14), (15): Xaa is A or G
  MOD_RES (16), (17), (18), (19): Xaa is A or G or is absent
NHQLFPYVKLXXXXXXXXXFFLMSLSSEETPVX

SEQ ID NO: 23725 - protein, 39 aa, Artificial Sequence
  Non-cyclic GFR-binding peptide
  MOD_RES (2), (34): Xaa is C or S
GXSRVVMNPYVKLIVNSSDDFFLVSLSSLKTPAXTPKTV

SEQ ID NO: 23726 - protein, 34 aa, Artificial Sequence
  Non-cyclic GFR-binding peptide
  MOD_RES (1), (33): Xaa is C or S
XSRVVMNPYVKLIVNSSDDFFLVSLSSLKTPAXT

SEQ ID NO: 23727 - protein, 40 aa, Artificial Sequence
  Non-cyclic GFR-binding peptide
  MOD_RES (1), (38): Xaa is C or S
XELHEELRPYVKLLKPKKRVYEFFLVSLSSHHVRSPQXKV

SEQ ID NO: 23728 - protein, 37 aa, Artificial Sequence
  Non-cyclic GFR-binding peptide
  MOD_RES (2), (4), (36): Xaa is C or S
HXGXSRVVMNPYVKLIVNSSDDFFLVSLSSLKTPAXT

SEQ ID NO: 23729 - protein, 40 aa, Artificial Sequence
  Non-cyclic GFR-binding peptide
  MOD_RES (2), (4), (36), (37): Xaa is C or S
SXGXRDVVMGPYVKLIIQQKDNFFLMSLSSMKTPTXXPGA

SEQ ID NO: 23730 - protein, 40 aa, Artificial Sequence
  Non-cyclic GFR-binding peptide
  MOD_RES (35), (36): Xaa is C or S
  MOD_RES (13), (14), (15), (16), (17): Xaa is A or G
  MOD_RES (18), (19), (20), (21): Xaa is A or G or is absent
EAVSMGEPYVKLXXXXXXXXXFFLVSLSSLKTPVXXAKGV

SEQ ID NO: 23731 - protein, 32 aa, Artificial Sequence
  Non-cyclic GFR-binding peptide
  MOD_RES (11), (12), (13), (14), (15): Xaa is A or G
  MOD_RES (16), (17), (18), (19): Xaa is A or G or is absent
NHQLFPYVKLXXXXXXXXXFFLMSLSSEETPV

SEQ ID NO: 23732 - protein, 35 aa, Artificial Sequence
  Non-cyclic GFR-binding peptide
  MOD_RES (2), (35): Xaa is C or S
  MOD_RES (13), (14), (15), (16), (17): Xaa is A or G
  MOD_RES (18), (19), (20), (21): Xaa is A or G or is absent
KXSRVIMPYVKLXXXXXXXXXFFLISLSSLAQPVX

SEQ ID NO: 23733 - protein, 37 aa, Artificial Sequence
  Non-cyclic GFR-binding peptide
  MOD_RES (34), (35): Xaa is C or S
  MOD_RES (12), (13), (14), (15), (16): Xaa is A or G
  MOD_RES (17), (18), (19), (20): Xaa is A or G or is absent
SEVVMDPYVKLXXXXXXXXXFFLISLSSLRTPVXXTP

SEQ ID NO: 23734 - protein, 35 aa, Artificial Sequence
  Non-cyclic GFR-binding peptide
  MOD_RES (33), (34): Xaa is C or S
  MOD_RES (11), (12), (13), (14), (15): Xaa is A or G
  MOD_RES (16), (17), (18), (19): Xaa is A or G or is absent
EVVMDPYVKLXXXXXXXXXFFLISLSSLRAPVXXS

SEQ ID NO: 23735 - protein, 39 aa, Artificial Sequence
  Non-cyclic GFR-binding peptide
  MOD_RES (33), (34): Xaa is C or S
EAVSMGEPYVKLTPVGMDDFFLVSLSSLKTPVXXAKGVK

SEQ ID NO: 23736 - protein, 36 aa, Artificial Sequence
  Non-cyclic GFR-binding peptide
  MOD_RES (33), (34): Xaa is C or S
  MOD_RES (11), (12), (13), (14), (15): Xaa is A or G
  MOD_RES (16), (17), (18), (19): Xaa is A or G or is absent
EEVIMPYVKLXXXXXXXXXFFLMSLSSTKVPAXXTS

SEQ ID NO: 23737 - protein, 35 aa, Artificial Sequence
  Non-cyclic GFR-binding peptide
  MOD_RES (33), (33): Xaa is C or S
  MOD_RES (11), (12), (13), (14), (15): Xaa is A or G
  MOD_RES (16), (17), (18), (19): Xaa is A or G or is absent
RVVMNPYVKLXXXXXXXXXFFLVSLSSLKTPAXTP

SEQ ID NO: 23738 - protein, 32 aa, Artificial Sequence
  Non-cyclic GFR-binding peptide
  MOD_RES (31), (32): Xaa is C or S
EVVMEPYVKLVVKDYEDFFLMSLSSLETPVXX

SEQ ID NO: 23739 - protein, 34 aa, Artificial Sequence
  Non-cyclic GFR-binding peptide
  MOD_RES (31), (32): Xaa is C or S
RVVMNPYVKLIVNSSDDFFLVSLSSLQTPAXXPK

SEQ ID NO: 23740 - protein, 39 aa, Artificial Sequence
  Non-cyclic GFR-binding peptide
  MOD_RES (2), (4), (38), (39): Xaa is C or S
  MOD_RES (16), (17), (18), (19), (20): Xaa is A or G
  MOD_RES (21), (22), (23), (24): Xaa is A or G or is absent
RXGXSEVVMDPYVKLXXXXXXXXXFFLISLSSLRTPVXX

SEQ ID NO: 23741 - protein, 37 aa, Artificial Sequence
  Non-cyclic GFR-binding peptide
  MOD_RES (34), (35): Xaa is C or S
  MOD_RES (12), (13), (14), (15), (16): Xaa is A or G
  MOD_RES (17), (18), (19), (20): Xaa is A or G or is absent
ESVAMGPYVKLXXXXXXXXXFFLISLSSLKTPVXXAK

SEQ ID NO: 23742 - protein, 44 aa, Artificial Sequence
  Non-cyclic GFR-binding peptide
  MOD_RES (2), (4), (38), (39): Xaa is C or S
  MOD_RES (16), (17), (18), (19), (20): Xaa is A or G
  MOD_RES (21), (22), (23), (24): Xaa is A or G or is absent
RXGXSEVVMDPYVKLXXXXXXXXXFFLISLSSLRTPVXXTPPTS

SEQ ID NO: 23743 - protein, 37 aa, Artificial Sequence
  Non-cyclic GFR-binding peptide
  MOD_RES (2), (4): Xaa is C or S
  MOD_RES (16), (17), (18), (19), (20): Xaa is A or G
  MOD_RES (21), (22), (23), (24): Xaa is A or G or is absent
RXGXAEVVMDPYVKLXXXXXXXXXFFLISLSSLRAPV

SEQ ID NO: 23744 - protein, 35 aa, Artificial Sequence
  Non-cyclic GFR-binding peptide
  MOD_RES (1), (3), (35): Xaa is C or S
XGXRDVVMGPYVKLIIQQKDNFFLMSLSSMKTPTX

SEQ ID NO: 23745 - protein, 31 aa, Artificial Sequence
  Non-cyclic GFR-binding peptide
  MOD_RES (1), (1): Xaa is C or S
XSKVIMPYVKLIKPTKGIFFLISLSSLDQSV

SEQ ID NO: 23746 - protein, 32 aa, Artificial Sequence
  Non-cyclic GFR-binding peptide
  MOD_RES (2), (2): Xaa is C or S
KXSKVIMPYVKLIKPTKGIFFLISLSSLDQSV

SEQ ID NO: 23747 - protein, 32 aa, Artificial Sequence
  Non-cyclic GFR-binding peptide
  MOD_RES (32), (32): Xaa is C or S
AEVVMDPYVKLVVNNAADFFLISLSSLRAPVX

SEQ ID NO: 23748 - protein, 39 aa, Artificial Sequence
  Non-cyclic GFR-binding peptide
  MOD_RES (33), (34): Xaa is C or S
  MOD_RES (11), (12), (13), (14), (15): Xaa is A or G
  MOD_RES (16), (17), (18), (19): Xaa is A or G or is absent
KVVMNPYVKLXXXXXXXXXFFLVSLSSLKTPAXXAKPVA

SEQ ID NO: 23749 - protein, 39 aa, Artificial Sequence
  Non-cyclic GFR-binding peptide
  MOD_RES (1), (3), (37), (38): Xaa is C or S
  MOD_RES (15), (16), (17), (18), (19): Xaa is A or G
  MOD_RES (20), (21), (22), (23): Xaa is A or G or is absent
XGXSRVVMNPYVKLXXXXXXXXXFFLVSLSSLKTPAXXP

SEQ ID NO: 23750 - protein, 36 aa, Artificial Sequence
  Non-cyclic GFR-binding peptide
  MOD_RES (1), (32), (33): Xaa is C or S
XSKVVMPYVKLVKPTRGVFFLISLSSLDQPVXXPSA

SEQ ID NO: 23751 - protein, 35 aa, Artificial Sequence
  Non-cyclic GFR-binding peptide
  MOD_RES (1), (3), (34), (35): Xaa is C or S
XKXSKVIMPYVKLIKPTKGIFFLISLSSLDQSVXX

SEQ ID NO: 23752 - protein, 36 aa, Artificial Sequence
  Non-cyclic GFR-binding peptide
  MOD_RES (35), (35): Xaa is C or S
HEELRPYVKLLKPKKRVYEFFLVSLSSHHVRSPQXK

SEQ ID NO: 23753 - protein, 39 aa, Artificial Sequence
  Non-cyclic GFR-binding peptide
  MOD_RES (37), (37): Xaa is C or S
  MOD_RES (13), (14), (15), (16), (17): Xaa is A or G
  MOD_RES (18), (19), (20), (21): Xaa is A or G or is absent
ELHEELRPYVKLXXXXXXXXXFFLVSLSSHHVRSPQXKV

SEQ ID NO: 23754 - protein, 37 aa, Artificial Sequence
  Non-cyclic GFR-binding peptide
  MOD_RES (1), (35), (36): Xaa is C or S
  MOD_RES (13), (14), (15), (16), (17): Xaa is A or G
  MOD_RES (18), (19), (20), (21): Xaa is A or G or is absent
XGEVVMEPYVKLXXXXXXXXXFFLMSLSSLETPVXXA

SEQ ID NO: 23755 - protein, 38 aa, Artificial Sequence
  Non-cyclic GFR-binding peptide
  MOD_RES (2), (34), (35): Xaa is C or S
GXARVVMNPYVKLIVNSSDDFFLVSLSSLQTPAXXPKP

SEQ ID NO: 23756 - protein, 33 aa, Artificial Sequence
  Non-cyclic GFR-binding peptide
  MOD_RES (2), (33): Xaa is C or S
KXSRVIMPYVKLVKPKRGVFFLISLSSLAQPVX

SEQ ID NO: 23757 - protein, 38 aa, Artificial Sequence
  Non-cyclic GFR-binding peptide
  MOD_RES (2), (36), (37): Xaa is C or S
  MOD_RES (14), (15), (16), (17), (18): Xaa is A or G
  MOD_RES (19), (20), (21), (22): Xaa is A or G or is absent
GXARVVMNPYVKLXXXXXXXXXFFLVSLSSLQTPAXXP

SEQ ID NO: 23758 - protein, 37 aa, Artificial Sequence
  Non-cyclic GFR-binding peptide
  MOD_RES (1), (3), (37): Xaa is C or S
  MOD_RES (15), (16), (17), (18), (19): Xaa is A or G
  MOD_RES (20), (21), (22), (23): Xaa is A or G or is absent
XGXSRVVMNPYVKLXXXXXXXXXFFLVSLSSLKTPAX

SEQ ID NO: 23759 - protein, 37 aa, Artificial Sequence
  Non-cyclic GFR-binding peptide
  MOD_RES (32), (33): Xaa is C or S
ARVVMNPYVKLIVNSSDDFFLVSLSSLQTPAXXPKPV

SEQ ID NO: 23760 - protein, 42 aa, Artificial Sequence
  Non-cyclic GFR-binding peptide
  MOD_RES (2), (4), (41): Xaa is C or S
AXAXELHEELRPYVKLLKPKKRVYEFFLVSLSSHHVRSPQXK

SEQ ID NO: 23761 - protein, 32 aa, Artificial Sequence
  Non-cyclic GFR-binding peptide
  MOD_RES (2), (2): Xaa is C or S
KXSKVVMPYVKLVKPTRGVFFLISLSSLDQPV

SEQ ID NO: 23762 - protein, 38 aa, Artificial Sequence
  Non-cyclic GFR-binding peptide
  MOD_RES (2), (36), (37): Xaa is C or S
  MOD_RES (14), (15), (16), (17), (18): Xaa is A or G
  MOD_RES (19), (20), (21), (22): Xaa is A or G or is absent
GXAEVVMDPYVKLXXXXXXXXXFFLISLSSLRAPVXXS

SEQ ID NO: 23763 - protein, 34 aa, Artificial Sequence
  Non-cyclic GFR-binding peptide
  MOD_RES (34), (34): Xaa is C or S
  MOD_RES (12), (13), (14), (15), (16): Xaa is A or G
  MOD_RES (17), (18), (19), (20): Xaa is A or G or is absent
AKVVMNPYVKLXXXXXXXXXFFLVSLSSLKTPAX

SEQ ID NO: 23764 - protein, 40 aa, Artificial Sequence
  Non-cyclic GFR-binding peptide
  MOD_RES (2), (4), (36), (37): Xaa is C or S
RXGXSEVVMDPYVKLVVNNASDFFLISLSSLRTPVXXTPP

SEQ ID NO: 23765 - protein, 43 aa, Artificial Sequence
  Non-cyclic GFR-binding peptide
  MOD_RES (2), (37), (38): Xaa is C or S
  MOD_RES (15), (16), (17), (18), (19): Xaa is A or G
  MOD_RES (20), (21), (22), (23): Xaa is A or G or is absent
GXEAVSMGEPYVKLXXXXXXXXXFFLVSLSSLKTPVXXAKGVK

SEQ ID NO: 23766 - protein, 35 aa, Artificial Sequence
  Non-cyclic GFR-binding peptide
  MOD_RES (1), (35): Xaa is C or S
XKNHQLFPYVKLHQGQHPKIRFFLMSLSSEETPVX

SEQ ID NO: 23767 - protein, 34 aa, Artificial Sequence
  Non-cyclic GFR-binding peptide
  MOD_RES (2), (34): Xaa is C or S
GXSRVVMNPYVKLIVNSSDDFFLVSLSSLKTPAX

SEQ ID NO: 23768 - protein, 40 aa, Artificial Sequence
  Non-cyclic GFR-binding peptide
  MOD_RES (1), (35), (36): Xaa is C or S
  MOD_RES (13), (14), (15), (16), (17): Xaa is A or G
  MOD_RES (18), (19), (20), (21): Xaa is A or G or is absent
XAEVVMDPYVKLXXXXXXXXXFFLISLSSLRAPVXXSAPA

SEQ ID NO: 23769 - protein, 38 aa, Artificial Sequence
  Non-cyclic GFR-binding peptide
  MOD_RES (1), (3), (37), (38): Xaa is C or S
  MOD_RES (15), (16), (17), (18), (19): Xaa is A or G
  MOD_RES (20), (21), (22), (23): Xaa is A or G or is absent
XGXAKVVMNPYVKLXXXXXXXXXFFLVSLSSLKTPAXX

SEQ ID NO: 23770 - protein, 37 aa, Artificial Sequence
  Non-cyclic GFR-binding peptide
  MOD_RES (32), (33): Xaa is C or S
AKVVMNPYVKLIVNNSSDFFLVSLSSLKTPAXXAKPV

SEQ ID NO: 23771 - protein, 40 aa, Artificial Sequence
  Non-cyclic GFR-binding peptide
  MOD_RES (1), (3), (35), (36): Xaa is C or S
XGXAKVVMNPYVKLIVNNSSDFFLVSLSSLKTPAXXAKPV

SEQ ID NO: 23772 - protein, 44 aa, Artificial Sequence
  Non-cyclic GFR-binding peptide
  MOD_RES (2), (4), (38), (39): Xaa is C or S
  MOD_RES (16), (17), (18), (19), (20): Xaa is A or G
  MOD_RES (21), (22), (23), (24): Xaa is A or G or is absent
RXGXGEVVMEPYVKLXXXXXXXXXFFLMSLSSLETPVXXAKPIS

SEQ ID NO: 23773 - protein, 42 aa, Artificial Sequence
  Non-cyclic GFR-binding peptide
  MOD_RES (1), (3), (40): Xaa is C or S
  MOD_RES (16), (17), (18), (19), (20): Xaa is A or G
  MOD_RES (21), (22), (23), (24): Xaa is A or G or is absent
XAXELHEELRPYVKLXXXXXXXXXFFLVSLSSHHVRSPQXKV

SEQ ID NO: 23774 - protein, 33 aa, Artificial Sequence
  Non-cyclic GFR-binding peptide
  MOD_RES (1), (1): Xaa is C or S
XEAVSMGEPYVKLTPVGMDDFFLVSLSSLKTPV

SEQ ID NO: 23775 - protein, 39 aa, Artificial Sequence
  Non-cyclic GFR-binding peptide
  MOD_RES (36), (36): Xaa is C or S
LHEELRPYVKLLKPKKRVYEFFLVSLSSHHVRSPQXKVS

SEQ ID NO: 23776 - protein, 36 aa, Artificial Sequence
  Non-cyclic GFR-binding peptide
  MOD_RES (13), (14), (15), (16), (17): Xaa is A or G
  MOD_RES (18), (19), (20), (21): Xaa is A or G or is absent
ELHEELRPYVKLXXXXXXXXXFFLVSLSSHHVRSPQ

SEQ ID NO: 23777 - protein, 36 aa, Artificial Sequence
  Non-cyclic GFR-binding peptide
  MOD_RES (31), (32): Xaa is C or S
RVVMNPYVKLIVNSSDDFFLVSLSSLQTPAXXPKPV

SEQ ID NO: 23778 - protein, 40 aa, Artificial Sequence
  Non-cyclic GFR-binding peptide
  MOD_RES (2), (36), (37): Xaa is C or S
  MOD_RES (14), (15), (16), (17), (18): Xaa is A or G
  MOD_RES (19), (20), (21), (22): Xaa is A or G or is absent
GXARVVMNPYVKLXXXXXXXXXFFLVSLSSLQTPAXXPKP

SEQ ID NO: 23779 - protein, 34 aa, Artificial Sequence
  Non-cyclic GFR-binding peptide
  MOD_RES (1), (3): Xaa is C or S
XGXARVVMNPYVKLIVNSSDDFFLVSLSSLQTPA

SEQ ID NO: 23780 - protein, 32 aa, Artificial Sequence
  Non-cyclic GFR-binding peptide
  MOD_RES (31), (32): Xaa is C or S
SVAMGPYVKLYTVVGKDFFLISLSSLKTPVXX

SEQ ID NO: 23781 - protein, 41 aa, Artificial Sequence
  Non-cyclic GFR-binding peptide
  MOD_RES (2), (37), (38): Xaa is C or S
  MOD_RES (15), (16), (17), (18), (19): Xaa is A or G
  MOD_RES (20), (21), (22), (23): Xaa is A or G or is absent
GXEAVSMGEPYVKLXXXXXXXXXFFLVSLSSLKTPVXXAKG

SEQ ID NO: 23782 - protein, 39 aa, Artificial Sequence
  Non-cyclic GFR-binding peptide
  MOD_RES (1), (33), (34): Xaa is C or S
XSRVVMNPYVKLIVNSSDDFFLVSLSSLKTPAXXPKPVY

SEQ ID NO: 23783 - protein, 32 aa, Artificial Sequence
  Non-cyclic GFR-binding peptide
  MOD_RES (11), (12), (13), (14), (15): Xaa is A or G
  MOD_RES (16), (17), (18), (19): Xaa is A or G or is absent
EVVMDPYVKLXXXXXXXXXFFLISLSSLRTPV

SEQ ID NO: 23784 - protein, 36 aa, Artificial Sequence
  Non-cyclic GFR-binding peptide
  MOD_RES (1), (36): Xaa is C or S
  MOD_RES (14), (15), (16), (17), (18): Xaa is A or G
  MOD_RES (19), (20), (21), (22): Xaa is A or G or is absent
XEAVSMGEPYVKLXXXXXXXXXFFLVSLSSLKTPVX

SEQ ID NO: 23785 - protein, 37 aa, Artificial Sequence
  Non-cyclic GFR-binding peptide
  MOD_RES (1), (35): Xaa is C or S
  MOD_RES (13), (14), (15), (16), (17): Xaa is A or G
  MOD_RES (18), (19), (20), (21): Xaa is A or G or is absent
XKNHQLFPYVKLXXXXXXXXXFFLMSLSSEETPVXEL

SEQ ID NO: 23786 - protein, 35 aa, Artificial Sequence
  Non-cyclic GFR-binding peptide
  MOD_RES (31), (31): Xaa is C or S
RVVMNPYVKLIVNSSDDFFLVSLSSLKTPAXTPKT

SEQ ID NO: 23787 - protein, 38 aa, Artificial Sequence
  Non-cyclic GFR-binding peptide
  MOD_RES (2), (35), (36): Xaa is C or S
  MOD_RES (13), (14), (15), (16), (17): Xaa is A or G
  MOD_RES (18), (19), (20), (21): Xaa is A or G or is absent
KXSRVIMPYVKLXXXXXXXXXFFLISLSSLAQPVXXPA

SEQ ID NO: 23788 - protein, 40 aa, Artificial Sequence
  Non-cyclic GFR-binding peptide
  MOD_RES (2), (4), (39), (40): Xaa is C or S
  MOD_RES (17), (18), (19), (20), (21): Xaa is A or G
  MOD_RES (22), (23), (24), (25): Xaa is A or G or is absent
RXGXEAVSMGEPYVKLXXXXXXXXXFFLVSLSSLKTPVXX

SEQ ID NO: 23789 - protein, 33 aa, Artificial Sequence
  Non-cyclic GFR-binding peptide
  MOD_RES (33), (33): Xaa is C or S
  MOD_RES (11), (12), (13), (14), (15): Xaa is A or G
  MOD_RES (16), (17), (18), (19): Xaa is A or G or is absent
EVVMEPYVKLXXXXXXXXXFFLMSLSSLETPVX

SEQ ID NO: 23790 - protein, 42 aa, Artificial Sequence
  Non-cyclic GFR-binding peptide
  MOD_RES (2), (36), (37): Xaa is C or S
  MOD_RES (14), (15), (16), (17), (18): Xaa is A or G
  MOD_RES (19), (20), (21), (22): Xaa is A or G or is absent
GXARVVMNPYVKLXXXXXXXXXFFLVSLSSLQTPAXXPKPVT

SEQ ID NO: 23791 - protein, 40 aa, Artificial Sequence
  Non-cyclic GFR-binding peptide
  MOD_RES (1), (3), (35): Xaa is C or S
XGXSRVVMNPYVKLIVNSSDDFFLVSLSSLKTPAXTPKTV

SEQ ID NO: 23792 - protein, 41 aa, Artificial Sequence
  Non-cyclic GFR-binding peptide
  MOD_RES (2), (39): Xaa is C or S
  MOD_RES (15), (16), (17), (18), (19): Xaa is A or G
  MOD_RES (20), (21), (22), (23): Xaa is A or G or is absent
AXELHEELRPYVKLXXXXXXXXXFFLVSLSSHHVRSPQXKV

SEQ ID NO: 23793 - protein, 40 aa, Artificial Sequence
  Non-cyclic GFR-binding peptide
  MOD_RES (1), (3), (34), (35): Xaa is C or S
XKXSRVIMPYVKLVKPKRGVFFLISLSSLAQPVXXPAASA

SEQ ID NO: 23794 - protein, 41 aa, Artificial Sequence
  Non-cyclic GFR-binding peptide
  MOD_RES (1), (3), (37), (38): Xaa is C or S
  MOD_RES (15), (16), (17), (18), (19): Xaa is A or G
  MOD_RES (20), (21), (22), (23): Xaa is A or G or is absent
XGXAKVVMNPYVKLXXXXXXXXXFFLVSLSSLKTPAXXAKP

SEQ ID NO: 23795 - protein, 34 aa, Artificial Sequence
  Non-cyclic GFR-binding peptide
  MOD_RES (1), (1): Xaa is C or S
  MOD_RES (13), (14), (15), (16), (17): Xaa is A or G
  MOD_RES (18), (19), (20), (21): Xaa is A or G or is absent
XAEVVMDPYVKLXXXXXXXXXFFLISLSSLRAPV

SEQ ID NO: 23796 - protein, 41 aa, Artificial Sequence
  Non-cyclic GFR-binding peptide
  MOD_RES (2), (4), (39), (40): Xaa is C or S
  MOD_RES (17), (18), (19), (20), (21): Xaa is A or G
  MOD_RES (22), (23), (24), (25): Xaa is A or G or is absent
RXGXEAVSMGEPYVKLXXXXXXXXXFFLVSLSSLKTPVXXA

SEQ ID NO: 23797 - protein, 39 aa, Artificial Sequence
  Non-cyclic GFR-binding peptide
  MOD_RES (1), (35), (36): Xaa is C or S
  MOD_RES (13), (14), (15), (16), (17): Xaa is A or G
  MOD_RES (18), (19), (20), (21): Xaa is A or G or is absent
XAKVVMNPYVKLXXXXXXXXXFFLVSLSSLKTPAXXAKP

SEQ ID NO: 23798 - protein, 38 aa, Artificial Sequence
  Non-cyclic GFR-binding peptide
  MOD_RES (2), (4), (35), (36): Xaa is C or S
SXKXSRVIMPYVKLVKPKRGVFFLISLSSLAQPVXXPA

SEQ ID NO: 23799 - protein, 35 aa, Artificial Sequence
  Non-cyclic GFR-binding peptide
  MOD_RES (2), (34), (35): Xaa is C or S
GXARVVMNPYVKLIVNSSDDFFLVSLSSLQTPAXX

SEQ ID NO: 23800 - protein, 37 aa, Artificial Sequence
  Non-cyclic GFR-binding peptide
  MOD_RES (2), (4): Xaa is C or S
  MOD_RES (16), (17), (18), (19), (20): Xaa is A or G
  MOD_RES (21), (22), (23), (24): Xaa is A or G or is absent
RXGXSEVVMDPYVKLXXXXXXXXXFFLISLSSLRTPV

SEQ ID NO: 23801 - protein, 38 aa, Artificial Sequence
  Non-cyclic GFR-binding peptide
  MOD_RES (1), (3), (35), (36): Xaa is C or S
XGXRDVVMGPYVKLIIQQKDNFFLMSLSSMKTPTXXPG

SEQ ID NO: 23802 - protein, 36 aa, Artificial Sequence
  Non-cyclic GFR-binding peptide
  MOD_RES (1), (3): Xaa is C or S
  MOD_RES (15), (16), (17), (18), (19): Xaa is A or G
  MOD_RES (20), (21), (22), (23): Xaa is A or G or is absent
XGXAKVVMNPYVKLXXXXXXXXXFFLVSLSSLKTPA

SEQ ID NO: 23803 - protein, 36 aa, Artificial Sequence
  Non-cyclic GFR-binding peptide
  MOD_RES (2), (36): Xaa is C or S
  MOD_RES (14), (15), (16), (17), (18): Xaa is A or G
  MOD_RES (19), (20), (21), (22): Xaa is A or G or is absent
GXARVVMNPYVKLXXXXXXXXXFFLVSLSSLQTPAX

SEQ ID NO: 23804 - protein, 33 aa, Artificial Sequence
  Non-cyclic GFR-binding peptide
  MOD_RES (32), (33): Xaa is C or S
ARVVMNPYVKLIVNSSDDFFLVSLSSLQTPAXX

SEQ ID NO: 23805 - protein, 37 aa, Artificial Sequence
  Non-cyclic GFR-binding peptide
  MOD_RES (1), (3), (36), (37): Xaa is C or S
  MOD_RES (14), (15), (16), (17), (18): Xaa is A or G
  MOD_RES (19), (20), (21), (22): Xaa is A or G or is absent
XGXEEVIMPYVKLXXXXXXXXXFFLMSLSSTKVPAXX

SEQ ID NO: 23806 - protein, 39 aa, Artificial Sequence
  Non-cyclic GFR-binding peptide
  MOD_RES (34), (34): Xaa is C or S
KNHQLFPYVKLHQGQHPKIRFFLMSLSSEETPVXELGED

SEQ ID NO: 23807 - protein, 38 aa, Artificial Sequence
  Non-cyclic GFR-binding peptide
  MOD_RES (2), (4): Xaa is C or S
AXAXELHEELRPYVKLLKPKKRVYEFFLVSLSSHHVRS

SEQ ID NO: 23808 - protein, 36 aa, Artificial Sequence
  Non-cyclic GFR-binding peptide
  MOD_RES (32), (33): Xaa is C or S
ESVAMGPYVKLYTVVGKDFFLISLSSLKTPVXXAKS

SEQ ID NO: 23809 - protein, 38 aa, Artificial Sequence
  Non-cyclic GFR-binding peptide
  MOD_RES (1), (38): Xaa is C or S
  MOD_RES (14), (15), (16), (17), (18): Xaa is A or G
  MOD_RES (19), (20), (21), (22): Xaa is A or G or is absent
XELHEELRPYVKLXXXXXXXXXFFLVSLSSHHVRSPQX

SEQ ID NO: 23810 - protein, 33 aa, Artificial Sequence
  Non-cyclic GFR-binding peptide
  MOD_RES (1), (1): Xaa is C or S
  MOD_RES (12), (13), (14), (15), (16): Xaa is A or G
  MOD_RES (17), (18), (19), (20): Xaa is A or G or is absent
XSKVVMPYVKLXXXXXXXXXFFLISLSSLDQPV

SEQ ID NO: 23811 - protein, 41 aa, Artificial Sequence
  Non-cyclic GFR-binding peptide
  MOD_RES (1), (3), (35), (36): Xaa is C or S
XGXAKVVMNPYVKLIVNNSSDFFLVSLSSLKTPAXXAKPVA

SEQ ID NO: 23812 - protein, 36 aa, Artificial Sequence
  Non-cyclic GFR-binding peptide
  MOD_RES (1), (33), (34): Xaa is C or S
XESVAMGPYVKLYTVVGKDFFLISLSSLKTPVXXAK

SEQ ID NO: 23813 - protein, 41 aa, Artificial Sequence
  Non-cyclic GFR-binding peptide
  MOD_RES (1), (3), (38), (39): Xaa is C or S
  MOD_RES (16), (17), (18), (19), (20): Xaa is A or G
  MOD_RES (21), (22), (23), (24): Xaa is A or G or is absent
XGXEAVSMGEPYVKLXXXXXXXXXFFLVSLSSLKTPVXXAK

SEQ ID NO: 23814 - protein, 41 aa, Artificial Sequence
  Non-cyclic GFR-binding peptide
  MOD_RES (2), (4), (35), (36): Xaa is C or S
SXKXSRVIMPYVKLVKPKRGVFFLISLSSLAQPVXXPAASA

SEQ ID NO: 23815 - protein, 38 aa, Artificial Sequence
  Non-cyclic GFR-binding peptide
  MOD_RES (2), (33), (34): Xaa is C or S
KXSKVVMPYVKLVKPTRGVFFLISLSSLDQPVXXPSAS

SEQ ID NO: 23816 - protein, 42 aa, Artificial Sequence
  Non-cyclic GFR-binding peptide
  MOD_RES (2), (4), (38), (39): Xaa is C or S
  MOD_RES (16), (17), (18), (19), (20): Xaa is A or G
  MOD_RES (21), (22), (23), (24): Xaa is A or G or is absent
RXGXSEVVMDPYVKLXXXXXXXXXFFLISLSSLRTPVXXTPP

SEQ ID NO: 23817 - protein, 41 aa, Artificial Sequence
  Non-cyclic GFR-binding peptide
  MOD_RES (2), (35), (36): Xaa is C or S
  MOD_RES (13), (14), (15), (16), (17): Xaa is A or G
  MOD_RES (18), (19), (20), (21): Xaa is A or G or is absent
KXSKVVMPYVKLXXXXXXXXXFFLISLSSLDQPVXXPSASA

SEQ ID NO: 23818 - protein, 35 aa, Artificial Sequence
  Non-cyclic GFR-binding peptide
  MOD_RES (31), (32): Xaa is C or S
SRVIMPYVKLVKPKRGVFFLISLSSLAQPVXXPAA

SEQ ID NO: 23819 - protein, 34 aa, Artificial Sequence
  Non-cyclic GFR-binding peptide
  MOD_RES (34), (34): Xaa is C or S
  MOD_RES (12), (13), (14), (15), (16): Xaa is A or G
  MOD_RES (17), (18), (19), (20): Xaa is A or G or is absent
ARVVMNPYVKLXXXXXXXXXFFLVSLSSLQTPAX

SEQ ID NO: 23820 - protein, 36 aa, Artificial Sequence
  Non-cyclic GFR-binding peptide
  MOD_RES (33), (33): Xaa is C or S
NHQLFPYVKLHQGQHPKIRFFLMSLSSEETPVXELG

SEQ ID NO: 23821 - protein, 38 aa, Artificial Sequence
  Non-cyclic GFR-binding peptide
  MOD_RES (1), (35): Xaa is C or S
  MOD_RES (13), (14), (15), (16), (17): Xaa is A or G
  MOD_RES (18), (19), (20), (21): Xaa is A or G or is absent
XKNHQLFPYVKLXXXXXXXXXFFLMSLSSEETPVXELG

SEQ ID NO: 23822 - protein, 34 aa, Artificial Sequence
  Non-cyclic GFR-binding peptide
  MOD_RES (1), (33), (34): Xaa is C or S
XESVAMGPYVKLYTVVGKDFFLISLSSLKTPVXX

SEQ ID NO: 23823 - protein, 35 aa, Artificial Sequence
  Non-cyclic GFR-binding peptide
  MOD_RES (1), (33), (34): Xaa is C or S
XRDVVMGPYVKLIIQQKDNFFLMSLSSMKTPTXXP

SEQ ID NO: 23824 - protein, 33 aa, Artificial Sequence
  Non-cyclic GFR-binding peptide
  MOD_RES (33), (33): Xaa is C or S
  MOD_RES (11), (12), (13), (14), (15): Xaa is A or G
  MOD_RES (16), (17), (18), (19): Xaa is A or G or is absent
RVVMNPYVKLXXXXXXXXXFFLVSLSSLQTPAX

SEQ ID NO: 23825 - protein, 37 aa, Artificial Sequence
  Non-cyclic GFR-binding peptide
  MOD_RES (1), (3): Xaa is C or S
XAXELHEELRPYVKLLKPKKRVYEFFLVSLSSHHVRS

SEQ ID NO: 23826 - protein, 37 aa, Artificial Sequence
  Non-cyclic GFR-binding peptide
  MOD_RES (1), (35), (36): Xaa is C or S
  MOD_RES (13), (14), (15), (16), (17): Xaa is A or G
  MOD_RES (18), (19), (20), (21): Xaa is A or G or is absent
XSEVVMDPYVKLXXXXXXXXXFFLISLSSLRTPVXXT

SEQ ID NO: 23827 - protein, 41 aa, Artificial Sequence
  Non-cyclic GFR-binding peptide
  MOD_RES (2), (4), (37), (38): Xaa is C or S
  MOD_RES (15), (16), (17), (18), (19): Xaa is A or G
  MOD_RES (20), (21), (22), (23): Xaa is A or G or is absent
SXKXSKVIMPYVKLXXXXXXXXXFFLISLSSLDQSVXXPSA

SEQ ID NO: 23828 - protein, 40 aa, Artificial Sequence
  Non-cyclic GFR-binding peptide
  MOD_RES (1), (3), (37), (38): Xaa is C or S
  MOD_RES (15), (16), (17), (18), (19): Xaa is A or G
  MOD_RES (20), (21), (22), (23): Xaa is A or G or is absent
XGXRDVVMGPYVKLXXXXXXXXXFFLMSLSSMKTPTXXPG

SEQ ID NO: 23829 - protein, 40 aa, Artificial Sequence
  Non-cyclic GFR-binding peptide
  MOD_RES (1), (3), (35), (36): Xaa is C or S
XGXRDVVMGPYVKLIIQQKDNFFLMSLSSMKTPTXXPGAS

SEQ ID NO: 23830 - protein, 36 aa, Artificial Sequence
  Non-cyclic GFR-binding peptide
  MOD_RES (34), (35): Xaa is C or S
  MOD_RES (12), (13), (14), (15), (16): Xaa is A or G
  MOD_RES (17), (18), (19), (20): Xaa is A or G or is absent
AEVVMDPYVKLXXXXXXXXXFFLISLSSLRAPVXXS

SEQ ID NO: 23831 - protein, 38 aa, Artificial Sequence
  Non-cyclic GFR-binding peptide
  MOD_RES (1), (3), (36), (37): Xaa is C or S
  MOD_RES (14), (15), (16), (17), (18): Xaa is A or G
  MOD_RES (19), (20), (21), (22): Xaa is A or G or is absent
XKXSKVVMPYVKLXXXXXXXXXFFLISLSSLDQPVXXP

SEQ ID NO: 23832 - protein, 36 aa, Artificial Sequence
  Non-cyclic GFR-binding peptide
  MOD_RES (1), (3), (35): Xaa is C or S
XGXSRVVMNPYVKLIVNSSDDFFLVSLSSLKTPAXT

SEQ ID NO: 23833 - protein, 34 aa, Artificial Sequence
  Non-cyclic GFR-binding peptide
  MOD_RES (2), (4): Xaa is C or S
LXGXEEVIMPYVKLLLVRGNDFFLMSLSSTKVPA

SEQ ID NO: 23834 - protein, 36 aa, Artificial Sequence
  Non-cyclic GFR-binding peptide
  MOD_RES (1), (33), (34): Xaa is C or S
XSEVVMDPYVKLVVNNASDFFLISLSSLRTPVXXTP

SEQ ID NO: 23835 - protein, 40 aa, Artificial Sequence
  Non-cyclic GFR-binding peptide
  MOD_RES (2), (36), (37): Xaa is C or S
  MOD_RES (14), (15), (16), (17), (18): Xaa is A or G
  MOD_RES (19), (20), (21), (22): Xaa is A or G or is absent
GXRDVVMGPYVKLXXXXXXXXXFFLMSLSSMKTPTXXPGA

SEQ ID NO: 23836 - protein, 35 aa, Artificial Sequence
  Non-cyclic GFR-binding peptide
  MOD_RES (32), (33): Xaa is C or S
RDVVMGPYVKLIIQQKDNFFLMSLSSMKTPTXXPG

SEQ ID NO: 23837 - protein, 40 aa, Artificial Sequence
  Non-cyclic GFR-binding peptide
  MOD_RES (34), (34): Xaa is C or S
  MOD_RES (12), (13), (14), (15), (16): Xaa is A or G
  MOD_RES (17), (18), (19), (20): Xaa is A or G or is absent
SRVVMNPYVKLXXXXXXXXXFFLVSLSSLKTPAXTPKTVH

SEQ ID NO: 23838 - protein, 36 aa, Artificial Sequence
  Non-cyclic GFR-binding peptide
  MOD_RES (1), (3), (34), (35): Xaa is C or S
XKXSKVVMPYVKLVKPTRGVFFLISLSSLDQPVXXP

SEQ ID NO: 23839 - protein, 42 aa, Artificial Sequence
  Non-cyclic GFR-binding peptide
  MOD_RES (2), (4), (36): Xaa is C or S
HXGXSRVVMNPYVKLIVNSSDDFFLVSLSSLKTPAXTPKTVH

SEQ ID NO: 23840 - protein, 39 aa, Artificial Sequence
  Non-cyclic GFR-binding peptide
  MOD_RES (33), (34): Xaa is C or S
  MOD_RES (11), (12), (13), (14), (15): Xaa is A or G
  MOD_RES (16), (17), (18), (19): Xaa is A or G or is absent
SKVVMPYVKLXXXXXXXXXFFLISLSSLDQPVXXPSASA

SEQ ID NO: 23841 - protein, 38 aa, Artificial Sequence
  Non-cyclic GFR-binding peptide
  MOD_RES (1), (33), (34): Xaa is C or S
XSEVVMDPYVKLVVNNASDFFLISLSSLRTPVXXTPPT

SEQ ID NO: 23842 - protein, 35 aa, Artificial Sequence
  Non-cyclic GFR-binding peptide
LHEELRPYVKLLKPKKRVYEFFLVSLSSHHVRSPQ

SEQ ID NO: 23843 - protein, 35 aa, Artificial Sequence
  Non-cyclic GFR-binding peptide
  MOD_RES (31), (32): Xaa is C or S
DVVMGPYVKLIIQQKDNFFLMSLSSMKTPTXXPGA

SEQ ID NO: 23844 - protein, 40 aa, Artificial Sequence
  Non-cyclic GFR-binding peptide
  MOD_RES (2), (4), (37), (38): Xaa is C or S
  MOD_RES (15), (16), (17), (18), (19): Xaa is A or G
  MOD_RES (20), (21), (22), (23): Xaa is A or G or is absent
SXKXSKVIMPYVKLXXXXXXXXXFFLISLSSLDQSVXXPS

SEQ ID NO: 23845 - protein, 39 aa, Artificial Sequence
  Non-cyclic GFR-binding peptide
  MOD_RES (1), (35), (36): Xaa is C or S
  MOD_RES (13), (14), (15), (16), (17): Xaa is A or G
  MOD_RES (18), (19), (20), (21): Xaa is A or G or is absent
XGEVVMEPYVKLXXXXXXXXXFFLMSLSSLETPVXXAKP

SEQ ID NO: 23846 - protein, 36 aa, Artificial Sequence
  Non-cyclic GFR-binding peptide
  MOD_RES (36), (36): Xaa is C or S
LHEELRPYVKLLKPKKRVYEFFLVSLSSHHVRSPQX

SEQ ID NO: 23847 - protein, 40 aa, Artificial Sequence
  Non-cyclic GFR-binding peptide
  MOD_RES (2), (36), (37): Xaa is C or S
  MOD_RES (14), (15), (16), (17), (18): Xaa is A or G
  MOD_RES (19), (20), (21), (22): Xaa is A or G or is absent
GXAKVVMNPYVKLXXXXXXXXXFFLVSLSSLKTPAXXAKP

SEQ ID NO: 23848 - protein, 38 aa, Artificial Sequence
  Non-cyclic GFR-binding peptide
  MOD_RES (2), (4), (36), (37): Xaa is C or S
RXGXAEVVMDPYVKLVVNNAADFFLISLSSLRAPVXXS

SEQ ID NO: 23849 - protein, 34 aa, Artificial Sequence
  Non-cyclic GFR-binding peptide
  MOD_RES (1), (34): Xaa is C or S
  MOD_RES (12), (13), (14), (15), (16): Xaa is A or G
  MOD_RES (17), (18), (19), (20): Xaa is A or G or is absent
XEEVIMPYVKLXXXXXXXXXFFLMSLSSTKVPAX

SEQ ID NO: 23850 - protein, 38 aa, Artificial Sequence
  Non-cyclic GFR-binding peptide
  MOD_RES (1), (34), (35): Xaa is C or S
  MOD_RES (12), (13), (14), (15), (16): Xaa is A or G
  MOD_RES (17), (18), (19), (20): Xaa is A or G or is absent
XSKVIMPYVKLXXXXXXXXXFFLISLSSLDQSVXXPSA

SEQ ID NO: 23851 - protein, 42 aa, Artificial Sequence
  Non-cyclic GFR-binding peptide
  MOD_RES (2), (4), (37), (38): Xaa is C or S
RXGXEAVSMGEPYVKLTPVGMDDFFLVSLSSLKTPVXXAKGV

SEQ ID NO: 23852 - protein, 35 aa, Artificial Sequence
  Non-cyclic GFR-binding peptide
  MOD_RES (34), (35): Xaa is C or S
  MOD_RES (12), (13), (14), (15), (16): Xaa is A or G
  MOD_RES (17), (18), (19), (20): Xaa is A or G or is absent
SRVVMNPYVKLXXXXXXXXXFFLVSLSSLKTPAXX

SEQ ID NO: 23853 - protein, 34 aa, Artificial Sequence
  Non-cyclic GFR-binding peptide
  MOD_RES (31), (32): Xaa is C or S
RVVMNPYVKLIVNSSDDFFLVSLSSLKTPAXXPK

SEQ ID NO: 23854 - protein, 35 aa, Artificial Sequence
  Non-cyclic GFR-binding peptide
  MOD_RES (2), (4), (35): Xaa is C or S
SXKXSKVVMPYVKLVKPTRGVFFLISLSSLDQPVX

SEQ ID NO: 23855 - protein, 40 aa, Artificial Sequence
  Non-cyclic GFR-binding peptide
  MOD_RES (2), (4), (38), (39): Xaa is C or S
  MOD_RES (16), (17), (18), (19), (20): Xaa is A or G
  MOD_RES (21), (22), (23), (24): Xaa is A or G or is absent
SXGXRDVVMGPYVKLXXXXXXXXXFFLMSLSSMKTPTXXP

SEQ ID NO: 23856 - protein, 39 aa, Artificial Sequence
  Non-cyclic GFR-binding peptide
  MOD_RES (35), (36): Xaa is C or S
  MOD_RES (13), (14), (15), (16), (17): Xaa is A or G
  MOD_RES (18), (19), (20), (21): Xaa is A or G or is absent
EAVSMGEPYVKLXXXXXXXXXFFLVSLSSLKTPVXXAKG

SEQ ID NO: 23857 - protein, 39 aa, Artificial Sequence
  Non-cyclic GFR-binding peptide
  MOD_RES (2), (4), (36), (37): Xaa is C or S
RXGXESVAMGPYVKLYTVVGKDFFLISLSSLKTPVXXAK

SEQ ID NO: 23858 - protein, 35 aa, Artificial Sequence
  Non-cyclic GFR-binding peptide
  MOD_RES (31), (32): Xaa is C or S
KVVMNPYVKLIVNNSSDFFLVSLSSLKTPAXXAKP

SEQ ID NO: 23859 - protein, 39 aa, Artificial Sequence
  Non-cyclic GFR-binding peptide
  MOD_RES (2), (36): Xaa is C or S
EXKNHQLFPYVKLHQGQHPKIRFFLMSLSSEETPVXELG

SEQ ID NO: 23860 - protein, 44 aa, Artificial Sequence
  Non-cyclic GFR-binding peptide
  MOD_RES (2), (4), (38), (39): Xaa is C or S
  MOD_RES (16), (17), (18), (19), (20): Xaa is A or G
  MOD_RES (21), (22), (23), (24): Xaa is A or G or is absent
HXGXSRVVMNPYVKLXXXXXXXXXFFLVSLSSLKTPAXXPKPVY

SEQ ID NO: 23861 - protein, 40 aa, Artificial Sequence
  Non-cyclic GFR-binding peptide
  MOD_RES (1), (35), (36): Xaa is C or S
  MOD_RES (13), (14), (15), (16), (17): Xaa is A or G
  MOD_RES (18), (19), (20), (21): Xaa is A or G or is absent
XAKVVMNPYVKLXXXXXXXXXFFLVSLSSLKTPAXXAKPV

SEQ ID NO: 23862 - protein, 33 aa, Artificial Sequence
  Non-cyclic GFR-binding peptide
  MOD_RES (32), (33): Xaa is C or S
RDVVMGPYVKLIIQQKDNFFLMSLSSMKTPTXX

SEQ ID NO: 23863 - protein, 35 aa, Artificial Sequence
  Non-cyclic GFR-binding peptide
  MOD_RES (2), (34), (35): Xaa is C or S
GXAEVVMDPYVKLVVNNAADFFLISLSSLRAPVXX

SEQ ID NO: 23864 - protein, 39 aa, Artificial Sequence
  Non-cyclic GFR-binding peptide
  MOD_RES (1), (3), (37): Xaa is C or S
XEXKNHQLFPYVKLHQGQHPKIRFFLMSLSSEETPVXEL

SEQ ID NO: 23865 - protein, 36 aa, Artificial Sequence
  Non-cyclic GFR-binding peptide
  MOD_RES (1), (3), (36): Xaa is C or S
  MOD_RES (14), (15), (16), (17), (18): Xaa is A or G
  MOD_RES (19), (20), (21), (22): Xaa is A or G or is absent
XGXEEVIMPYVKLXXXXXXXXXFFLMSLSSTKVPAX

SEQ ID NO: 23866 - protein, 39 aa, Artificial Sequence
  Non-cyclic GFR-binding peptide
  MOD_RES (1), (33): Xaa is C or S
XSRVVMNPYVKLIVNSSDDFFLVSLSSLKTPAXTPKTVH

SEQ ID NO: 23867 - protein, 35 aa, Artificial Sequence
  Non-cyclic GFR-binding peptide
  MOD_RES (33), (34): Xaa is C or S
  MOD_RES (11), (12), (13), (14), (15): Xaa is A or G
  MOD_RES (16), (17), (18), (19): Xaa is A or G or is absent
SRVIMPYVKLXXXXXXXXXFFLISLSSLAQPVXXP

SEQ ID NO: 23868 - protein, 35 aa, Artificial Sequence
  Non-cyclic GFR-binding peptide
  MOD_RES (34), (35): Xaa is C or S
  MOD_RES (12), (13), (14), (15), (16): Xaa is A or G
  MOD_RES (17), (18), (19), (20): Xaa is A or G or is absent
ARVVMNPYVKLXXXXXXXXXFFLVSLSSLQTPAXX

SEQ ID NO: 23869 - protein, 36 aa, Artificial Sequence
  Non-cyclic GFR-binding peptide
  MOD_RES (2), (35), (36): Xaa is C or S
  MOD_RES (13), (14), (15), (16), (17): Xaa is A or G
  MOD_RES (18), (19), (20), (21): Xaa is A or G or is absent
KXSRVIMPYVKLXXXXXXXXXFFLISLSSLAQPVXX

SEQ ID NO: 23870 - protein, 35 aa, Artificial Sequence
  Non-cyclic GFR-binding peptide
  MOD_RES (2), (4): Xaa is C or S
SXGXRDVVMGPYVKLIIQQKDNFFLMSLSSMKTPT

SEQ ID NO: 23871 - protein, 33 aa, Artificial Sequence
  Non-cyclic GFR-binding peptide
  MOD_RES (1), (1): Xaa is C or S
  MOD_RES (12), (13), (14), (15), (16): Xaa is A or G
  MOD_RES (17), (18), (19), (20): Xaa is A or G or is absent
XSKVIMPYVKLXXXXXXXXXFFLISLSSLDQSV

SEQ ID NO: 23872 - protein, 41 aa, Artificial Sequence
  Non-cyclic GFR-binding peptide
  MOD_RES (2), (4), (37), (38): Xaa is C or S
  MOD_RES (15), (16), (17), (18), (19): Xaa is A or G
  MOD_RES (20), (21), (22), (23): Xaa is A or G or is absent
LXGXEEVIMPYVKLXXXXXXXXXFFLMSLSSTKVPAXXTSP

SEQ ID NO: 23873 - protein, 34 aa, Artificial Sequence
  Non-cyclic GFR-binding peptide
  MOD_RES (11), (12), (13), (14), (15): Xaa is A or G
  MOD_RES (16), (17), (18), (19): Xaa is A or G or is absent
HEELRPYVKLXXXXXXXXXFFLVSLSSHHVRSPQ

SEQ ID NO: 23874 - protein, 40 aa, Artificial Sequence
  Non-cyclic GFR-binding peptide
  MOD_RES (2), (34), (35): Xaa is C or S
GXAKVVMNPYVKLIVNNSSDFFLVSLSSLKTPAXXAKPVA

SEQ ID NO: 23875 - protein, 38 aa, Artificial Sequence
  Non-cyclic GFR-binding peptide
  MOD_RES (34), (35): Xaa is C or S
  MOD_RES (12), (13), (14), (15), (16): Xaa is A or G
  MOD_RES (17), (18), (19), (20): Xaa is A or G or is absent
GEVVMEPYVKLXXXXXXXXXFFLMSLSSLETPVXXAKP

SEQ ID NO: 23876 - protein, 40 aa, Artificial Sequence
  Non-cyclic GFR-binding peptide
  MOD_RES (2), (35), (36): Xaa is C or S
  MOD_RES (13), (14), (15), (16), (17): Xaa is A or G
  MOD_RES (18), (19), (20), (21): Xaa is A or G or is absent
GXEEVIMPYVKLXXXXXXXXXFFLMSLSSTKVPAXXTSPV

SEQ ID NO: 23877 - protein, 37 aa, Artificial Sequence
  Non-cyclic GFR-binding peptide
  MOD_RES (2), (34), (35): Xaa is C or S
GXRDVVMGPYVKLIIQQKDNFFLMSLSSMKTPTXXPG

SEQ ID NO: 23878 - protein, 36 aa, Artificial Sequence
  Non-cyclic GFR-binding peptide
  MOD_RES (1), (34), (35): Xaa is C or S
  MOD_RES (12), (13), (14), (15), (16): Xaa is A or G
  MOD_RES (17), (18), (19), (20): Xaa is A or G or is absent
XSKVIMPYVKLXXXXXXXXXFFLISLSSLDQSVXXP

SEQ ID NO: 23879 - protein, 36 aa, Artificial Sequence
  Non-cyclic GFR-binding peptide
  MOD_RES (2), (4), (36): Xaa is C or S
RXGXGEVVMEPYVKLVVKDYEDFFLMSLSSLETPVX

SEQ ID NO: 23880 - protein, 37 aa, Artificial Sequence
  Non-cyclic GFR-binding peptide
  MOD_RES (33), (34): Xaa is C or S
  MOD_RES (11), (12), (13), (14), (15): Xaa is A or G
  MOD_RES (16), (17), (18), (19): Xaa is A or G or is absent
EVVMDPYVKLXXXXXXXXXFFLISLSSLRAPVXXSAP

SEQ ID NO: 23881 - protein, 37 aa, Artificial Sequence
  Non-cyclic GFR-binding peptide
  MOD_RES (1), (35), (36): Xaa is C or S
  MOD_RES (13), (14), (15), (16), (17): Xaa is A or G
  MOD_RES (18), (19), (20), (21): Xaa is A or G or is absent
XRDVVMGPYVKLXXXXXXXXXFFLMSLSSMKTPTXXP

SEQ ID NO: 23882 - protein, 42 aa, Artificial Sequence
  Non-cyclic GFR-binding peptide
  MOD_RES (2), (4), (38): Xaa is C or S
  MOD_RES (16), (17), (18), (19), (20): Xaa is A or G
  MOD_RES (21), (22), (23), (24): Xaa is A or G or is absent
HXGXSRVVMNPYVKLXXXXXXXXXFFLVSLSSLKTPAXTPKT

SEQ ID NO: 23883 - protein, 39 aa, Artificial Sequence
  Non-cyclic GFR-binding peptide
  MOD_RES (1), (33), (34): Xaa is C or S
XAEVVMDPYVKLVVNNAADFFLISLSSLRAPVXXSAPAA

SEQ ID NO: 23884 - protein, 37 aa, Artificial Sequence
  Non-cyclic GFR-binding peptide
  MOD_RES (1), (33), (34): Xaa is C or S
XGEVVMEPYVKLVVKDYEDFFLMSLSSLETPVXXAKP

SEQ ID NO: 23885 - protein, 40 aa, Artificial Sequence
  Non-cyclic GFR-binding peptide
  MOD_RES (2), (36), (37): Xaa is C or S
  MOD_RES (14), (15), (16), (17), (18): Xaa is A or G
  MOD_RES (19), (20), (21), (22): Xaa is A or G or is absent
GXAEVVMDPYVKLXXXXXXXXXFFLISLSSLRAPVXXSAP

SEQ ID NO: 23886 - protein, 39 aa, Artificial Sequence
  Non-cyclic GFR-binding peptide
  MOD_RES (1), (34), (35): Xaa is C or S
  MOD_RES (12), (13), (14), (15), (16): Xaa is A or G
  MOD_RES (17), (18), (19), (20): Xaa is A or G or is absent
XSRVIMPYVKLXXXXXXXXXFFLISLSSLAQPVXXPAAS

SEQ ID NO: 23887 - protein, 39 aa, Artificial Sequence
  Non-cyclic GFR-binding peptide
  MOD_RES (2), (36), (37): Xaa is C or S
  MOD_RES (14), (15), (16), (17), (18): Xaa is A or G
  MOD_RES (19), (20), (21), (22): Xaa is A or G or is absent
GXGEVVMEPYVKLXXXXXXXXXFFLMSLSSLETPVXXAK

SEQ ID NO: 23888 - protein, 38 aa, Artificial Sequence
  Non-cyclic GFR-binding peptide
  MOD_RES (2), (4): Xaa is C or S
  MOD_RES (17), (18), (19), (20), (21): Xaa is A or G
  MOD_RES (22), (23), (24), (25): Xaa is A or G or is absent
RXGXEAVSMGEPYVKLXXXXXXXXXFFLVSLSSLKTPV

SEQ ID NO: 23889 - protein, 37 aa, Artificial Sequence
  Non-cyclic GFR-binding peptide
  MOD_RES (1), (3), (35), (36): Xaa is C or S
XGXSRVVMNPYVKLIVNSSDDFFLVSLSSLKTPAXXP

SEQ ID NO: 23890 - protein, 39 aa, Artificial Sequence
  Non-cyclic GFR-binding peptide
  MOD_RES (34), (35): Xaa is C or S
  MOD_RES (12), (13), (14), (15), (16): Xaa is A or G
  MOD_RES (17), (18), (19), (20): Xaa is A or G or is absent
AEVVMDPYVKLXXXXXXXXXFFLISLSSLRAPVXXSAPA

SEQ ID NO: 23891 - protein, 37 aa, Artificial Sequence
  Non-cyclic GFR-binding peptide
  MOD_RES (34), (34): Xaa is C or S
KNHQLFPYVKLHQGQHPKIRFFLMSLSSEETPVXELG

SEQ ID NO: 23892 - protein, 39 aa, Artificial Sequence
  Non-cyclic GFR-binding peptide
  MOD_RES (2), (34), (35): Xaa is C or S
GXGEVVMEPYVKLVVKDYEDFFLMSLSSLETPVXXAKPI

SEQ ID NO: 23893 - protein, 32 aa, Artificial Sequence
  Non-cyclic GFR-binding peptide
  MOD_RES (11), (12), (13), (14), (15): Xaa is A or G
  MOD_RES (16), (17), (18), (19): Xaa is A or G or is absent
HEELRPYVKLXXXXXXXXXFFLVSLSSHHVRS

SEQ ID NO: 23894 - protein, 35 aa, Artificial Sequence
  Non-cyclic GFR-binding peptide
  MOD_RES (1), (35): Xaa is C or S
  MOD_RES (13), (14), (15), (16), (17): Xaa is A or G
  MOD_RES (18), (19), (20), (21): Xaa is A or G or is absent
XRDVVMGPYVKLXXXXXXXXXFFLMSLSSMKTPTX

SEQ ID NO: 23895 - protein, 38 aa, Artificial Sequence
  Non-cyclic GFR-binding peptide
  MOD_RES (1), (3), (34), (35): Xaa is C or S
XKXSKVIMPYVKLIKPTKGIFFLISLSSLDQSVXXPSA

SEQ ID NO: 23896 - protein, 35 aa, Artificial Sequence
  Non-cyclic GFR-binding peptide
  MOD_RES (33), (34): Xaa is C or S
  MOD_RES (11), (12), (13), (14), (15): Xaa is A or G
  MOD_RES (16), (17), (18), (19): Xaa is A or G or is absent
RVVMNPYVKLXXXXXXXXXFFLVSLSSLQTPAXXP

SEQ ID NO: 23897 - protein, 39 aa, Artificial Sequence
  Non-cyclic GFR-binding peptide
  MOD_RES (1), (35), (36): Xaa is C or S
  MOD_RES (13), (14), (15), (16), (17): Xaa is A or G
  MOD_RES (18), (19), (20), (21): Xaa is A or G or is absent
XESVAMGPYVKLXXXXXXXXXFFLISLSSLKTPVXXAKS

SEQ ID NO: 23898 - protein, 39 aa, Artificial Sequence
  Non-cyclic GFR-binding peptide
  MOD_RES (2), (4), (38), (39): Xaa is C or S
  MOD_RES (16), (17), (18), (19), (20): Xaa is A or G
  MOD_RES (21), (22), (23), (24): Xaa is A or G or is absent
HXGXSRVVMNPYVKLXXXXXXXXXFFLVSLSSLKTPAXX

SEQ ID NO: 23899 - protein, 37 aa, Artificial Sequence
  Non-cyclic GFR-binding peptide
  MOD_RES (31), (32): Xaa is C or S
RVVMNPYVKLIVNSSDDFFLVSLSSLKTPAXXPKPVH

SEQ ID NO: 23900 - protein, 38 aa, Artificial Sequence
  Non-cyclic GFR-binding peptide
  MOD_RES (35), (35): Xaa is C or S
  MOD_RES (11), (12), (13), (14), (15): Xaa is A or G
  MOD_RES (16), (17), (18), (19): Xaa is A or G or is absent
HEELRPYVKLXXXXXXXXXFFLVSLSSHHVRSPQXKVS

SEQ ID NO: 23901 - protein, 37 aa, Artificial Sequence
  Non-cyclic GFR-binding peptide
  MOD_RES (1), (3), (35), (36): Xaa is C or S
XGXRDVVMGPYVKLIIQQKDNFFLMSLSSMKTPTXXP

SEQ ID NO: 23902 - protein, 37 aa, Artificial Sequence
  Non-cyclic GFR-binding peptide
  MOD_RES (1), (33), (34): Xaa is C or S
XAKVVMNPYVKLIVNNSSDFFLVSLSSLKTPAXXAKP

SEQ ID NO: 23903 - protein, 33 aa, Artificial Sequence
  Non-cyclic GFR-binding peptide
  MOD_RES (1), (3): Xaa is C or S
XKXSKVIMPYVKLIKPTKGIFFLISLSSLDQSV

SEQ ID NO: 23904 - protein, 35 aa, Artificial Sequence
  Non-cyclic GFR-binding peptide
  MOD_RES (2), (2): Xaa is C or S
EXKNHQLFPYVKLHQGQHPKIRFFLMSLSSEETPV

SEQ ID NO: 23905 - protein, 35 aa, Artificial Sequence
  Non-cyclic GFR-binding peptide
  MOD_RES (2), (33), (34): Xaa is C or S
KXSKVIMPYVKLIKPTKGIFFLISLSSLDQSVXXP

SEQ ID NO: 23906 - protein, 36 aa, Artificial Sequence
  Non-cyclic GFR-binding peptide
  MOD_RES (34), (34): Xaa is C or S
  MOD_RES (12), (13), (14), (15), (16): Xaa is A or G
  MOD_RES (17), (18), (19), (20): Xaa is A or G or is absent
SRVVMNPYVKLXXXXXXXXXFFLVSLSSLKTPAXTP

SEQ ID NO: 23907 - protein, 33 aa, Artificial Sequence
  Non-cyclic GFR-binding peptide
  MOD_RES (2), (2): Xaa is C or S
GXSEVVMDPYVKLVVNNASDFFLISLSSLRTPV

SEQ ID NO: 23908 - protein, 36 aa, Artificial Sequence
  Non-cyclic GFR-binding peptide
  MOD_RES (31), (32): Xaa is C or S
EEVIMPYVKLLLVRGNDFFLMSLSSTKVPAXXTSPV

SEQ ID NO: 23909 - protein, 41 aa, Artificial Sequence
  Non-cyclic GFR-binding peptide
  MOD_RES (2), (4), (36), (37): Xaa is C or S
SXGXRDVVMGPYVKLIIQQKDNFFLMSLSSMKTPTXXPGAS

SEQ ID NO: 23910 - protein, 37 aa, Artificial Sequence
  Non-cyclic GFR-binding peptide
  MOD_RES (2), (2): Xaa is C or S
AXELHEELRPYVKLLKPKKRVYEFFLVSLSSHHVRSP

SEQ ID NO: 23911 - protein, 37 aa, Artificial Sequence
  Non-cyclic GFR-binding peptide
  MOD_RES (33), (34): Xaa is C or S
  MOD_RES (11), (12), (13), (14), (15): Xaa is A or G
  MOD_RES (16), (17), (18), (19): Xaa is A or G or is absent
SKVVMPYVKLXXXXXXXXXFFLISLSSLDQPVXXPSA

SEQ ID NO: 23912 - protein, 35 aa, Artificial Sequence
  Non-cyclic GFR-binding peptide
  MOD_RES (2), (34), (35): Xaa is C or S
GXSRVVMNPYVKLIVNSSDDFFLVSLSSLKTPAXX

SEQ ID NO: 23913 - protein, 38 aa, Artificial Sequence
  Non-cyclic GFR-binding peptide
  MOD_RES (1), (34), (35): Xaa is C or S
  MOD_RES (12), (13), (14), (15), (16): Xaa is A or G
  MOD_RES (17), (18), (19), (20): Xaa is A or G or is absent
XEEVIMPYVKLXXXXXXXXXFFLMSLSSTKVPAXXTSP

SEQ ID NO: 23914 - protein, 39 aa, Artificial Sequence
  Non-cyclic GFR-binding peptide
  MOD_RES (33), (34): Xaa is C or S
  MOD_RES (11), (12), (13), (14), (15): Xaa is A or G
  MOD_RES (16), (17), (18), (19): Xaa is A or G or is absent
EVVMDPYVKLXXXXXXXXXFFLISLSSLRAPVXXSAPAA

SEQ ID NO: 23915 - protein, 38 aa, Artificial Sequence
  Non-cyclic GFR-binding peptide
  MOD_RES (1), (3), (35), (36): Xaa is C or S
XGXSEVVMDPYVKLVVNNASDFFLISLSSLRTPVXXTP

SEQ ID NO: 23916 - protein, 36 aa, Artificial Sequence
  Non-cyclic GFR-binding peptide
  MOD_RES (31), (32): Xaa is C or S
KVVMNPYVKLIVNNSSDFFLVSLSSLKTPAXXAKPV

SEQ ID NO: 23917 - protein, 33 aa, Artificial Sequence
  Non-cyclic GFR-binding peptide
  MOD_RES (32), (33): Xaa is C or S
GEVVMEPYVKLVVKDYEDFFLMSLSSLETPVXX

SEQ ID NO: 23918 - protein, 39 aa, Artificial Sequence
  Non-cyclic GFR-binding peptide
  MOD_RES (1), (34), (35): Xaa is C or S
XEAVSMGEPYVKLTPVGMDDFFLVSLSSLKTPVXXAKGV

SEQ ID NO: 23919 - protein, 43 aa, Artificial Sequence
  Non-cyclic GFR-binding peptide
  MOD_RES (1), (3), (40): Xaa is C or S
XAXELHEELRPYVKLLKPKKRVYEFFLVSLSSHHVRSPQXKVS

SEQ ID NO: 23920 - protein, 37 aa, Artificial Sequence
  Non-cyclic GFR-binding peptide
  MOD_RES (1), (32), (33): Xaa is C or S
XEEVIMPYVKLLLVRGNDFFLMSLSSTKVPAXXTSPV

SEQ ID NO: 23921 - protein, 40 aa, Artificial Sequence
  Non-cyclic GFR-binding peptide
  MOD_RES (1), (35), (36): Xaa is C or S
  MOD_RES (13), (14), (15), (16), (17): Xaa is A or G
  MOD_RES (18), (19), (20), (21): Xaa is A or G or is absent
XRDVVMGPYVKLXXXXXXXXXFFLMSLSSMKTPTXXPGAS

SEQ ID NO: 23922 - protein, 36 aa, Artificial Sequence
  Non-cyclic GFR-binding peptide
  MOD_RES (34), (35): Xaa is C or S
  MOD_RES (12), (13), (14), (15), (16): Xaa is A or G
  MOD_RES (17), (18), (19), (20): Xaa is A or G or is absent
RDVVMGPYVKLXXXXXXXXXFFLMSLSSMKTPTXXP

SEQ ID NO: 23923 - protein, 34 aa, Artificial Sequence
  Non-cyclic GFR-binding peptide
  MOD_RES (33), (34): Xaa is C or S
  MOD_RES (11), (12), (13), (14), (15): Xaa is A or G
  MOD_RES (16), (17), (18), (19): Xaa is A or G or is absent
EEVIMPYVKLXXXXXXXXXFFLMSLSSTKVPAXX

SEQ ID NO: 23924 - protein, 36 aa, Artificial Sequence
  Non-cyclic GFR-binding peptide
  MOD_RES (32), (33): Xaa is C or S
AEVVMDPYVKLVVNNAADFFLISLSSLRAPVXXSAP

SEQ ID NO: 23925 - protein, 34 aa, Artificial Sequence
  Non-cyclic GFR-binding peptide
  MOD_RES (1), (3): Xaa is C or S
XGXAKVVMNPYVKLIVNNSSDFFLVSLSSLKTPA

SEQ ID NO: 23926 - protein, 43 aa, Artificial Sequence
  Non-cyclic GFR-binding peptide
  MOD_RES (2), (4), (37), (38): Xaa is C or S
  MOD_RES (15), (16), (17), (18), (19): Xaa is A or G
  MOD_RES (20), (21), (22), (23): Xaa is A or G or is absent
SXKXSRVIMPYVKLXXXXXXXXXFFLISLSSLAQPVXXPAASA

SEQ ID NO: 23927 - protein, 34 aa, Artificial Sequence
  Non-cyclic GFR-binding peptide
  MOD_RES (1), (3), (34): Xaa is C or S
XKXSKVVMPYVKLVKPTRGVFFLISLSSLDQPVX

SEQ ID NO: 23928 - protein, 37 aa, Artificial Sequence
  Non-cyclic GFR-binding peptide
  MOD_RES (34), (35): Xaa is C or S
  MOD_RES (12), (13), (14), (15), (16): Xaa is A or G
  MOD_RES (17), (18), (19), (20): Xaa is A or G or is absent
ARVVMNPYVKLXXXXXXXXXFFLVSLSSLQTPAXXPK

SEQ ID NO: 23929 - protein, 39 aa, Artificial Sequence
  Non-cyclic GFR-binding peptide
  MOD_RES (2), (4), (35), (36): Xaa is C or S
SXKXSKVVMPYVKLVKPTRGVFFLISLSSLDQPVXXPSA

SEQ ID NO: 23930 - protein, 40 aa, Artificial Sequence
  Non-cyclic GFR-binding peptide
  MOD_RES (1), (35): Xaa is C or S
XKNHQLFPYVKLHQGQHPKIRFFLMSLSSEETPVXELGED

SEQ ID NO: 23931 - protein, 36 aa, Artificial Sequence
  Non-cyclic GFR-binding peptide
  MOD_RES (2), (34), (35): Xaa is C or S
GXRDVVMGPYVKLIIQQKDNFFLMSLSSMKTPTXXP

SEQ ID NO: 23932 - protein, 41 aa, Artificial Sequence
  Non-cyclic GFR-binding peptide
  MOD_RES (1), (3), (36), (37): Xaa is C or S
XGXEAVSMGEPYVKLTPVGMDDFFLVSLSSLKTPVXXAKGV

SEQ ID NO: 23933 - protein, 34 aa, Artificial Sequence
  Non-cyclic GFR-binding peptide
  MOD_RES (1), (3), (34): Xaa is C or S
XKXSKVIMPYVKLIKPTKGIFFLISLSSLDQSVX

SEQ ID NO: 23934 - protein, 42 aa, Artificial Sequence
  Non-cyclic GFR-binding peptide
  MOD_RES (2), (36): Xaa is C or S
EXKNHQLFPYVKLHQGQHPKIRFFLMSLSSEETPVXELGEDN

SEQ ID NO: 23935 - protein, 38 aa, Artificial Sequence
  Non-cyclic GFR-binding peptide
  MOD_RES (2), (35), (36): Xaa is C or S
  MOD_RES (13), (14), (15), (16), (17): Xaa is A or G
  MOD_RES (18), (19), (20), (21): Xaa is A or G or is absent
KXSKVIMPYVKLXXXXXXXXXFFLISLSSLDQSVXXPS

SEQ ID NO: 23936 - protein, 36 aa, Artificial Sequence
  Non-cyclic GFR-binding peptide
  MOD_RES (33), (34): Xaa is C or S
  MOD_RES (11), (12), (13), (14), (15): Xaa is A or G
  MOD_RES (16), (17), (18), (19): Xaa is A or G or is absent
DVVMGPYVKLXXXXXXXXXFFLMSLSSMKTPTXXPG

SEQ ID NO: 23937 - protein, 41 aa, Artificial Sequence
  Non-cyclic GFR-binding peptide
  MOD_RES (1), (35), (36): Xaa is C or S
  MOD_RES (13), (14), (15), (16), (17): Xaa is A or G
  MOD_RES (18), (19), (20), (21): Xaa is A or G or is absent
XSRVVMNPYVKLXXXXXXXXXFFLVSLSSLKTPAXXPKPVH

SEQ ID NO: 23938 - protein, 41 aa, Artificial Sequence
  Non-cyclic GFR-binding peptide
  MOD_RES (1), (3), (37), (38): Xaa is C or S
  MOD_RES (15), (16), (17), (18), (19): Xaa is A or G
  MOD_RES (20), (21), (22), (23): Xaa is A or G or is absent
XGXESVAMGPYVKLXXXXXXXXXFFLISLSSLKTPVXXAKS

SEQ ID NO: 23939 - protein, 34 aa, Artificial Sequence
  Non-cyclic GFR-binding peptide
  MOD_RES (1), (3): Xaa is C or S
XGXSEVVMDPYVKLVVNNASDFFLISLSSLRTPV

SEQ ID NO: 23940 - protein, 38 aa, Artificial Sequence
  Non-cyclic GFR-binding peptide
  MOD_RES (2), (36), (37): Xaa is C or S
  MOD_RES (14), (15), (16), (17), (18): Xaa is A or G
  MOD_RES (19), (20), (21), (22): Xaa is A or G or is absent
GXSEVVMDPYVKLXXXXXXXXXFFLISLSSLRTPVXXT

SEQ ID NO: 23941 - protein, 39 aa, Artificial Sequence
  Non-cyclic GFR-binding peptide
  MOD_RES (1), (33), (34): Xaa is C or S
XESVAMGPYVKLYTVVGKDFFLISLSSLKTPVXXAKSAK

SEQ ID NO: 23942 - protein, 35 aa, Artificial Sequence
  Non-cyclic GFR-binding peptide
  MOD_RES (2), (34), (35): Xaa is C or S
GXESVAMGPYVKLYTVVGKDFFLISLSSLKTPVXX

SEQ ID NO: 23943 - protein, 41 aa, Artificial Sequence
  Non-cyclic GFR-binding peptide
  MOD_RES (1), (35), (36): Xaa is C or S
  MOD_RES (13), (14), (15), (16), (17): Xaa is A or G
  MOD_RES (18), (19), (20), (21): Xaa is A or G or is absent
XAKVVMNPYVKLXXXXXXXXXFFLVSLSSLKTPAXXAKPVA

SEQ ID NO: 23944 - protein, 39 aa, Artificial Sequence
  Non-cyclic GFR-binding peptide
  MOD_RES (1), (3), (37): Xaa is C or S
  MOD_RES (15), (16), (17), (18), (19): Xaa is A or G
  MOD_RES (20), (21), (22), (23): Xaa is A or G or is absent
XGXSRVVMNPYVKLXXXXXXXXXFFLVSLSSLKTPAXTP

SEQ ID NO: 23945 - protein, 35 aa, Artificial Sequence
  Non-cyclic GFR-binding peptide
  MOD_RES (2), (2): Xaa is C or S
  MOD_RES (14), (15), (16), (17), (18): Xaa is A or G
  MOD_RES (19), (20), (21), (22): Xaa is A or G or is absent
GXESVAMGPYVKLXXXXXXXXXFFLISLSSLKTPV

SEQ ID NO: 23946 - protein, 34 aa, Artificial Sequence
  Non-cyclic GFR-binding peptide
  MOD_RES (1), (1): Xaa is C or S
  MOD_RES (13), (14), (15), (16), (17): Xaa is A or G
  MOD_RES (18), (19), (20), (21): Xaa is A or G or is absent
XARVVMNPYVKLXXXXXXXXXFFLVSLSSLQTPA

SEQ ID NO: 23947 - protein, 34 aa, Artificial Sequence
  Non-cyclic GFR-binding peptide
  MOD_RES (13), (14), (15), (16), (17): Xaa is A or G
  MOD_RES (18), (19), (20), (21): Xaa is A or G or is absent
EAVSMGEPYVKLXXXXXXXXXFFLVSLSSLKTPV

SEQ ID NO: 23948 - protein, 40 aa, Artificial Sequence
  Non-cyclic GFR-binding peptide
  MOD_RES (1), (35), (36): Xaa is C or S
  MOD_RES (13), (14), (15), (16), (17): Xaa is A or G
  MOD_RES (18), (19), (20), (21): Xaa is A or G or is absent
XARVVMNPYVKLXXXXXXXXXFFLVSLSSLQTPAXXPKPV

SEQ ID NO: 23949 - protein, 40 aa, Artificial Sequence
  Non-cyclic GFR-binding peptide
  MOD_RES (2), (4), (35), (36): Xaa is C or S
LXGXEEVIMPYVKLLLVRGNDFFLMSLSSTKVPAXXTSPV

SEQ ID NO: 23950 - protein, 37 aa, Artificial Sequence
  Non-cyclic GFR-binding peptide
  MOD_RES (37), (37): Xaa is C or S
  MOD_RES (13), (14), (15), (16), (17): Xaa is A or G
  MOD_RES (18), (19), (20), (21): Xaa is A or G or is absent
ELHEELRPYVKLXXXXXXXXXFFLVSLSSHHVRSPQX

SEQ ID NO: 23951 - protein, 38 aa, Artificial Sequence
  Non-cyclic GFR-binding peptide
  MOD_RES (1), (34), (35): Xaa is C or S
  MOD_RES (12), (13), (14), (15), (16): Xaa is A or G
  MOD_RES (17), (18), (19), (20): Xaa is A or G or is absent
XSKVVMPYVKLXXXXXXXXXFFLISLSSLDQPVXXPSA

SEQ ID NO: 23952 - protein, 41 aa, Artificial Sequence
  Non-cyclic GFR-binding peptide
  MOD_RES (2), (35), (36): Xaa is C or S
  MOD_RES (13), (14), (15), (16), (17): Xaa is A or G
  MOD_RES (18), (19), (20), (21): Xaa is A or G or is absent
GXEEVIMPYVKLXXXXXXXXXFFLMSLSSTKVPAXXTSPVR

SEQ ID NO: 23953 - protein, 36 aa, Artificial Sequence
  Non-cyclic GFR-binding peptide
  MOD_RES (1), (3): Xaa is C or S
  MOD_RES (15), (16), (17), (18), (19): Xaa is A or G
  MOD_RES (20), (21), (22), (23): Xaa is A or G or is absent
XGXARVVMNPYVKLXXXXXXXXXFFLVSLSSLQTPA

SEQ ID NO: 23954 - protein, 42 aa, Artificial Sequence
  Non-cyclic GFR-binding peptide
  MOD_RES (2), (4), (38), (39): Xaa is C or S
  MOD_RES (16), (17), (18), (19), (20): Xaa is A or G
  MOD_RES (21), (22), (23), (24): Xaa is A or G or is absent
HXGXSRVVMNPYVKLXXXXXXXXXFFLVSLSSLKTPAXXPKP

SEQ ID NO: 23955 - protein, 40 aa, Artificial Sequence
  Non-cyclic GFR-binding peptide
  MOD_RES (2), (4), (35), (36): Xaa is C or S
SXKXSKVIMPYVKLIKPTKGIFFLISLSSLDQSVXXPSAS

SEQ ID NO: 23956 - protein, 38 aa, Artificial Sequence
  Non-cyclic GFR-binding peptide
  MOD_RES (2), (36): Xaa is C or S
  MOD_RES (14), (15), (16), (17), (18): Xaa is A or G
  MOD_RES (19), (20), (21), (22): Xaa is A or G or is absent
GXSRVVMNPYVKLXXXXXXXXXFFLVSLSSLKTPAXTP

SEQ ID NO: 23957 - protein, 33 aa, Artificial Sequence
  Non-cyclic GFR-binding peptide
  MOD_RES (2), (2): Xaa is C or S
GXRDVVMGPYVKLIIQQKDNFFLMSLSSMKTPT

SEQ ID NO: 23958 - protein, 36 aa, Artificial Sequence
  Non-cyclic GFR-binding peptide
  MOD_RES (1), (3), (34), (35): Xaa is C or S
XGXEEVIMPYVKLLLVRGNDFFLMSLSSTKVPAXXT

SEQ ID NO: 23959 - protein, 31 aa, Artificial Sequence
  Non-cyclic GFR-binding peptide
AKVVMNPYVKLIVNNSSDFFLVSLSSLKTPA

SEQ ID NO: 23960 - protein, 34 aa, Artificial Sequence
  Non-cyclic GFR-binding peptide
  MOD_RES (2), (33), (34): Xaa is C or S
KXSKVVMPYVKLVKPTRGVFFLISLSSLDQPVXX

SEQ ID NO: 23961 - protein, 32 aa, Artificial Sequence
  Non-cyclic GFR-binding peptide
  MOD_RES (31), (32): Xaa is C or S
EVVMDPYVKLVVNNASDFFLISLSSLRTPVXX

SEQ ID NO: 23962 - protein, 37 aa, Artificial Sequence
  Non-cyclic GFR-binding peptide
  MOD_RES (2), (35), (36): Xaa is C or S
GXEAVSMGEPYVKLTPVGMDDFFLVSLSSLKTPVXXA

SEQ ID NO: 23963 - protein, 35 aa, Artificial Sequence
  Non-cyclic GFR-binding peptide
  MOD_RES (13), (14), (15), (16), (17): Xaa is A or G
  MOD_RES (18), (19), (20), (21): Xaa is A or G or is absent
ELHEELRPYVKLXXXXXXXXXFFLVSLSSHHVRSP

SEQ ID NO: 23964 - protein, 42 aa, Artificial Sequence
  Non-cyclic GFR-binding peptide
  MOD_RES (1), (3), (37), (38): Xaa is C or S
  MOD_RES (15), (16), (17), (18), (19): Xaa is A or G
  MOD_RES (20), (21), (22), (23): Xaa is A or G or is absent
XGXSRVVMNPYVKLXXXXXXXXXFFLVSLSSLKTPAXXPKPV

SEQ ID NO: 23965 - protein, 38 aa, Artificial Sequence
  Non-cyclic GFR-binding peptide
  MOD_RES (2), (4), (38): Xaa is C or S
  MOD_RES (16), (17), (18), (19), (20): Xaa is A or G
  MOD_RES (21), (22), (23), (24): Xaa is A or G or is absent
RXGXSEVVMDPYVKLXXXXXXXXXFFLISLSSLRTPVX

SEQ ID NO: 23966 - protein, 40 aa, Artificial Sequence
  Non-cyclic GFR-binding peptide
  MOD_RES (1), (35): Xaa is C or S
  MOD_RES (13), (14), (15), (16), (17): Xaa is A or G
  MOD_RES (18), (19), (20), (21): Xaa is A or G or is absent
XSRVVMNPYVKLXXXXXXXXXFFLVSLSSLKTPAXTPKTV

SEQ ID NO: 23967 - protein, 31 aa, Artificial Sequence
  Non-cyclic GFR-binding peptide
  MOD_RES (31), (31): Xaa is C or S
EVVMDPYVKLVVNNASDFFLISLSSLRTPVX

SEQ ID NO: 23968 - protein, 38 aa, Artificial Sequence
  Non-cyclic GFR-binding peptide
  MOD_RES (1), (35), (36): Xaa is C or S
  MOD_RES (13), (14), (15), (16), (17): Xaa is A or G
  MOD_RES (18), (19), (20), (21): Xaa is A or G or is absent
XRDVVMGPYVKLXXXXXXXXXFFLMSLSSMKTPTXXPG

SEQ ID NO: 23969 - protein, 35 aa, Artificial Sequence
  Non-cyclic GFR-binding peptide
  MOD_RES (31), (32): Xaa is C or S
SKVVMPYVKLVKPTRGVFFLISLSSLDQPVXXPSA

SEQ ID NO: 23970 - protein, 41 aa, Artificial Sequence
  Non-cyclic GFR-binding peptide
  MOD_RES (2), (4), (35), (36): Xaa is C or S
LXGXEEVIMPYVKLLLVRGNDFFLMSLSSTKVPAXXTSPVR

SEQ ID NO: 23971 - protein, 34 aa, Artificial Sequence
  Non-cyclic GFR-binding peptide
  MOD_RES (34), (34): Xaa is C or S
KNHQLFPYVKLHQGQHPKIRFFLMSLSSEETPVX

SEQ ID NO: 23972 - protein, 36 aa, Artificial Sequence
  Non-cyclic GFR-binding peptide
  MOD_RES (2), (34), (35): Xaa is C or S
GXESVAMGPYVKLYTVVGKDFFLISLSSLKTPVXXA

SEQ ID NO: 23973 - protein, 39 aa, Artificial Sequence
  Non-cyclic GFR-binding peptide
  MOD_RES (1), (3), (35), (36): Xaa is C or S
XGXAEVVMDPYVKLVVNNAADFFLISLSSLRAPVXXSAP

SEQ ID NO: 23974 - protein, 41 aa, Artificial Sequence
  Non-cyclic GFR-binding peptide
  MOD_RES (2), (4), (38): Xaa is C or S
  MOD_RES (16), (17), (18), (19), (20): Xaa is A or G
  MOD_RES (21), (22), (23), (24): Xaa is A or G or is absent
RXEXKNHQLFPYVKLXXXXXXXXXFFLMSLSSEETPVXELG

SEQ ID NO: 23975 - protein, 37 aa, Artificial Sequence
  Non-cyclic GFR-binding peptide
  MOD_RES (1), (33), (34): Xaa is C or S
XSRVVMNPYVKLIVNSSDDFFLVSLSSLKTPAXXPKP

SEQ ID NO: 23976 - protein, 39 aa, Artificial Sequence
  Non-cyclic GFR-binding peptide
  MOD_RES (2), (4), (38), (39): Xaa is C or S
  MOD_RES (16), (17), (18), (19), (20): Xaa is A or G
  MOD_RES (21), (22), (23), (24): Xaa is A or G or is absent
HXGXAKVVMNPYVKLXXXXXXXXXFFLVSLSSLKTPAXX

SEQ ID NO: 23977 - protein, 37 aa, Artificial Sequence
  Non-cyclic GFR-binding peptide
  MOD_RES (2), (4): Xaa is C or S
  MOD_RES (16), (17), (18), (19), (20): Xaa is A or G
  MOD_RES (21), (22), (23), (24): Xaa is A or G or is absent
HXGXARVVMNPYVKLXXXXXXXXXFFLVSLSSLQTPA

SEQ ID NO: 23978 - protein, 42 aa, Artificial Sequence
  Non-cyclic GFR-binding peptide
  MOD_RES (1), (3), (37): Xaa is C or S
  MOD_RES (15), (16), (17), (18), (19): Xaa is A or G
  MOD_RES (20), (21), (22), (23): Xaa is A or G or is absent
XEXKNHQLFPYVKLXXXXXXXXXFFLMSLSSEETPVXELGED

SEQ ID NO: 23979 - protein, 42 aa, Artificial Sequence
  Non-cyclic GFR-binding peptide
  MOD_RES (2), (4), (41): Xaa is C or S
  MOD_RES (17), (18), (19), (20), (21): Xaa is A or G
  MOD_RES (22), (23), (24), (25): Xaa is A or G or is absent
AXAXELHEELRPYVKLXXXXXXXXXFFLVSLSSHHVRSPQXK

SEQ ID NO: 23980 - protein, 39 aa, Artificial Sequence
  Non-cyclic GFR-binding peptide
  MOD_RES (2), (34), (35): Xaa is C or S
GXARVVMNPYVKLIVNSSDDFFLVSLSSLQTPAXXPKPV

SEQ ID NO: 23981 - protein, 38 aa, Artificial Sequence
  Non-cyclic GFR-binding peptide
  MOD_RES (1), (35), (36): Xaa is C or S
  MOD_RES (13), (14), (15), (16), (17): Xaa is A or G
  MOD_RES (18), (19), (20), (21): Xaa is A or G or is absent
XESVAMGPYVKLXXXXXXXXXFFLISLSSLKTPVXXAK

SEQ ID NO: 23982 - protein, 32 aa, Artificial Sequence
  Non-cyclic GFR-binding peptide
  MOD_RES (31), (31): Xaa is C or S
RVVMNPYVKLIVNSSDDFFLVSLSSLKTPAXT

SEQ ID NO: 23983 - protein, 32 aa, Artificial Sequence
  Non-cyclic GFR-binding peptide
  MOD_RES (32), (32): Xaa is C or S
SRVVMNPYVKLIVNSSDDFFLVSLSSLKTPAX

SEQ ID NO: 23984 - protein, 39 aa, Artificial Sequence
  Non-cyclic GFR-binding peptide
  MOD_RES (33), (33): Xaa is C or S
NHQLFPYVKLHQGQHPKIRFFLMSLSSEETPVXELGEDN

SEQ ID NO: 23985 - protein, 42 aa, Artificial Sequence
  Non-cyclic GFR-binding peptide
  MOD_RES (2), (39): Xaa is C or S
AXELHEELRPYVKLLKPKKRVYEFFLVSLSSHHVRSPQXKVS

SEQ ID NO: 23986 - protein, 38 aa, Artificial Sequence
  Non-cyclic GFR-binding peptide
  MOD_RES (2), (4), (36), (37): Xaa is C or S
HXGXARVVMNPYVKLIVNSSDDFFLVSLSSLQTPAXXP

SEQ ID NO: 23987 - protein, 38 aa, Artificial Sequence
  Non-cyclic GFR-binding peptide
  MOD_RES (1), (3), (35), (36): Xaa is C or S
XGXAEVVMDPYVKLVVNNAADFFLISLSSLRAPVXXSA

SEQ ID NO: 23988 - protein, 42 aa, Artificial Sequence
  Non-cyclic GFR-binding peptide
  MOD_RES (1), (38): Xaa is C or S
XELHEELRPYVKLLKPKKRVYEFFLVSLSSHHVRSPQXKVSS

SEQ ID NO: 23989 - protein, 36 aa, Artificial Sequence
  Non-cyclic GFR-binding peptide
  MOD_RES (33), (33): Xaa is C or S
  MOD_RES (11), (12), (13), (14), (15): Xaa is A or G
  MOD_RES (16), (17), (18), (19): Xaa is A or G or is absent
NHQLFPYVKLXXXXXXXXXFFLMSLSSEETPVXELG

SEQ ID NO: 23990 - protein, 40 aa, Artificial Sequence
  Non-cyclic GFR-binding peptide
  MOD_RES (2), (34), (35): Xaa is C or S
GXSRVVMNPYVKLIVNSSDDFFLVSLSSLKTPAXXPKPVY

SEQ ID NO: 23991 - protein, 37 aa, Artificial Sequence
  Non-cyclic GFR-binding peptide
  MOD_RES (1), (33), (34): Xaa is C or S
XAEVVMDPYVKLVVNNAADFFLISLSSLRAPVXXSAP

SEQ ID NO: 23992 - protein, 35 aa, Artificial Sequence
  Non-cyclic GFR-binding peptide
  MOD_RES (2), (4), (35): Xaa is C or S
LXGXEEVIMPYVKLLLVRGNDFFLMSLSSTKVPAX

SEQ ID NO: 23993 - protein, 39 aa, Artificial Sequence
  Non-cyclic GFR-binding peptide
  MOD_RES (2), (4), (37), (38): Xaa is C or S
  MOD_RES (15), (16), (17), (18), (19): Xaa is A or G
  MOD_RES (20), (21), (22), (23): Xaa is A or G or is absent
SXKXSRVIMPYVKLXXXXXXXXXFFLISLSSLAQPVXXP

SEQ ID NO: 23994 - protein, 36 aa, Artificial Sequence
  Non-cyclic GFR-binding peptide
  MOD_RES (34), (35): Xaa is C or S
  MOD_RES (12), (13), (14), (15), (16): Xaa is A or G
  MOD_RES (17), (18), (19), (20): Xaa is A or G or is absent
ESVAMGPYVKLXXXXXXXXXFFLISLSSLKTPVXXA

SEQ ID NO: 23995 - protein, 35 aa, Artificial Sequence
  Non-cyclic GFR-binding peptide
  MOD_RES (35), (35): Xaa is C or S
HEELRPYVKLLKPKKRVYEFFLVSLSSHHVRSPQX

SEQ ID NO: 23996 - protein, 40 aa, Artificial Sequence
  Non-cyclic GFR-binding peptide
  MOD_RES (1), (3), (37), (38): Xaa is C or S
  MOD_RES (15), (16), (17), (18), (19): Xaa is A or G
  MOD_RES (20), (21), (22), (23): Xaa is A or G or is absent
XGXAKVVMNPYVKLXXXXXXXXXFFLVSLSSLKTPAXXAK

SEQ ID NO: 23997 - protein, 32 aa, Artificial Sequence
  Non-cyclic GFR-binding peptide
  MOD_RES (31), (32): Xaa is C or S
RVVMNPYVKLIVNSSDDFFLVSLSSLKTPAXX

SEQ ID NO: 23998 - protein, 37 aa, Artificial Sequence
  Non-cyclic GFR-binding peptide
  MOD_RES (31), (32): Xaa is C or S
SKVVMPYVKLVKPTRGVFFLISLSSLDQPVXXPSASA

SEQ ID NO: 23999 - protein, 37 aa, Artificial Sequence
  Non-cyclic GFR-binding peptide
  MOD_RES (2), (4), (37): Xaa is C or S
  MOD_RES (15), (16), (17), (18), (19): Xaa is A or G
  MOD_RES (20), (21), (22), (23): Xaa is A or G or is absent
SXKXSRVIMPYVKLXXXXXXXXXFFLISLSSLAQPVX

SEQ ID NO: 24000 - protein, 38 aa, Artificial Sequence
  Non-cyclic GFR-binding peptide
  MOD_RES (32), (33): Xaa is C or S
AKVVMNPYVKLIVNNSSDFFLVSLSSLKTPAXXAKPVA

SEQ ID NO: 24001 - protein, 37 aa, Artificial Sequence
  Non-cyclic GFR-binding peptide
  MOD_RES (33), (34): Xaa is C or S
  MOD_RES (11), (12), (13), (14), (15): Xaa is A or G
  MOD_RES (16), (17), (18), (19): Xaa is A or G or is absent
SKVIMPYVKLXXXXXXXXXFFLISLSSLDQSVXXPSA

SEQ ID NO: 24002 - protein, 34 aa, Artificial Sequence
  Non-cyclic GFR-binding peptide
  MOD_RES (31), (32): Xaa is C or S
EVVMDPYVKLVVNNAADFFLISLSSLRAPVXXSA

SEQ ID NO: 24003 - protein, 37 aa, Artificial Sequence
  Non-cyclic GFR-binding peptide
  MOD_RES (2), (36), (37): Xaa is C or S
  MOD_RES (14), (15), (16), (17), (18): Xaa is A or G
  MOD_RES (19), (20), (21), (22): Xaa is A or G or is absent
GXESVAMGPYVKLXXXXXXXXXFFLISLSSLKTPVXX

SEQ ID NO: 24004 - protein, 35 aa, Artificial Sequence
  Non-cyclic GFR-binding peptide
  MOD_RES (33), (34): Xaa is C or S
  MOD_RES (11), (12), (13), (14), (15): Xaa is A or G
  MOD_RES (16), (17), (18), (19): Xaa is A or G or is absent
SKVIMPYVKLXXXXXXXXXFFLISLSSLDQSVXXP

SEQ ID NO: 24005 - protein, 39 aa, Artificial Sequence
  Non-cyclic GFR-binding peptide
  MOD_RES (1), (3), (35), (36): Xaa is C or S
XGXAKVVMNPYVKLIVNNSSDFFLVSLSSLKTPAXXAKP

SEQ ID NO: 24006 - protein, 34 aa, Artificial Sequence
  Non-cyclic GFR-binding peptide
  MOD_RES (32), (33): Xaa is C or S
AKVVMNPYVKLIVNNSSDFFLVSLSSLKTPAXXA

SEQ ID NO: 24007 - protein, 33 aa, Artificial Sequence
  Non-cyclic GFR-binding peptide
  MOD_RES (33), (33): Xaa is C or S
  MOD_RES (11), (12), (13), (14), (15): Xaa is A or G
  MOD_RES (16), (17), (18), (19): Xaa is A or G or is absent
EVVMDPYVKLXXXXXXXXXFFLISLSSLRTPVX

SEQ ID NO: 24008 - protein, 37 aa, Artificial Sequence
  Non-cyclic GFR-binding peptide
  MOD_RES (1), (3), (37): Xaa is C or S
XEXKNHQLFPYVKLHQGQHPKIRFFLMSLSSEETPVX

SEQ ID NO: 24009 - protein, 39 aa, Artificial Sequence
  Non-cyclic GFR-binding peptide
  MOD_RES (2), (4), (36), (37): Xaa is C or S
SXGXRDVVMGPYVKLIIQQKDNFFLMSLSSMKTPTXXPG

SEQ ID NO: 24010 - protein, 38 aa, Artificial Sequence
  Non-cyclic GFR-binding peptide
  MOD_RES (1), (3), (38): Xaa is C or S
  MOD_RES (16), (17), (18), (19), (20): Xaa is A or G
  MOD_RES (21), (22), (23), (24): Xaa is A or G or is absent
XGXEAVSMGEPYVKLXXXXXXXXXFFLVSLSSLKTPVX

SEQ ID NO: 24011 - protein, 37 aa, Artificial Sequence
  Non-cyclic GFR-binding peptide
  MOD_RES (31), (32): Xaa is C or S
EVVMDPYVKLVVNNASDFFLISLSSLRTPVXXTPPTS

SEQ ID NO: 24012 - protein, 39 aa, Artificial Sequence
  Non-cyclic GFR-binding peptide
  MOD_RES (33), (34): Xaa is C or S
  MOD_RES (11), (12), (13), (14), (15): Xaa is A or G
  MOD_RES (16), (17), (18), (19): Xaa is A or G or is absent
EEVIMPYVKLXXXXXXXXXFFLMSLSSTKVPAXXTSPVR

SEQ ID NO: 24013 - protein, 35 aa, Artificial Sequence
  Non-cyclic GFR-binding peptide
  MOD_RES (2), (33), (34): Xaa is C or S
KXSRVIMPYVKLVKPKRGVFFLISLSSLAQPVXXP

SEQ ID NO: 24014 - protein, 33 aa, Artificial Sequence
  Non-cyclic GFR-binding peptide
  MOD_RES (31), (31): Xaa is C or S
RVVMNPYVKLIVNSSDDFFLVSLSSLKTPAXTP

SEQ ID NO: 24015 - protein, 42 aa, Artificial Sequence
  Non-cyclic GFR-binding peptide
  MOD_RES (2), (36), (37): Xaa is C or S
  MOD_RES (14), (15), (16), (17), (18): Xaa is A or G
  MOD_RES (19), (20), (21), (22): Xaa is A or G or is absent
GXRDVVMGPYVKLXXXXXXXXXFFLMSLSSMKTPTXXPGASG

SEQ ID NO: 24016 - protein, 40 aa, Artificial Sequence
  Non-cyclic GFR-binding peptide
  MOD_RES (1), (3), (35), (36): Xaa is C or S
XGXARVVMNPYVKLIVNSSDDFFLVSLSSLQTPAXXPKPV

SEQ ID NO: 24017 - protein, 36 aa, Artificial Sequence
  Non-cyclic GFR-binding peptide
  MOD_RES (35), (36): Xaa is C or S
  MOD_RES (13), (14), (15), (16), (17): Xaa is A or G
  MOD_RES (18), (19), (20), (21): Xaa is A or G or is absent
EAVSMGEPYVKLXXXXXXXXXFFLVSLSSLKTPVXX

SEQ ID NO: 24018 - protein, 37 aa, Artificial Sequence
  Non-cyclic GFR-binding peptide
  MOD_RES (2), (4), (37): Xaa is C or S
RXGXEAVSMGEPYVKLTPVGMDDFFLVSLSSLKTPVX

SEQ ID NO: 24019 - protein, 39 aa, Artificial Sequence
  Non-cyclic GFR-binding peptide
  MOD_RES (2), (4), (36), (37): Xaa is C or S
HXGXARVVMNPYVKLIVNSSDDFFLVSLSSLQTPAXXPK

SEQ ID NO: 24020 - protein, 33 aa, Artificial Sequence
  Non-cyclic GFR-binding peptide
  MOD_RES (31), (32): Xaa is C or S
EVVMEPYVKLVVKDYEDFFLMSLSSLETPVXXA

SEQ ID NO: 24021 - protein, 39 aa, Artificial Sequence
  Non-cyclic GFR-binding peptide
  MOD_RES (34), (35): Xaa is C or S
  MOD_RES (12), (13), (14), (15), (16): Xaa is A or G
  MOD_RES (17), (18), (19), (20): Xaa is A or G or is absent
ARVVMNPYVKLXXXXXXXXXFFLVSLSSLQTPAXXPKPV

SEQ ID NO: 24022 - protein, 35 aa, Artificial Sequence
  Non-cyclic GFR-binding peptide
  MOD_RES (1), (33): Xaa is C or S
XSRVVMNPYVKLIVNSSDDFFLVSLSSLKTPAXTP

SEQ ID NO: 24023 - protein, 34 aa, Artificial Sequence
  Non-cyclic GFR-binding peptide
HEELRPYVKLLKPKKRVYEFFLVSLSSHHVRSPQ

SEQ ID NO: 24024 - protein, 33 aa, Artificial Sequence
  Non-cyclic GFR-binding peptide
  MOD_RES (12), (13), (14), (15), (16): Xaa is A or G
  MOD_RES (17), (18), (19), (20): Xaa is A or G or is absent
ARVVMNPYVKLXXXXXXXXXFFLVSLSSLQTPA

SEQ ID NO: 24025 - protein, 41 aa, Artificial Sequence
  Non-cyclic GFR-binding peptide
  MOD_RES (1), (36), (37): Xaa is C or S
  MOD_RES (14), (15), (16), (17), (18): Xaa is A or G
  MOD_RES (19), (20), (21), (22): Xaa is A or G or is absent
XEAVSMGEPYVKLXXXXXXXXXFFLVSLSSLKTPVXXAKGV

SEQ ID NO: 24026 - protein, 41 aa, Artificial Sequence
  Non-cyclic GFR-binding peptide
  MOD_RES (1), (3), (37), (38): Xaa is C or S
  MOD_RES (15), (16), (17), (18), (19): Xaa is A or G
  MOD_RES (20), (21), (22), (23): Xaa is A or G or is absent
XGXSEVVMDPYVKLXXXXXXXXXFFLISLSSLRTPVXXTPP

SEQ ID NO: 24027 - protein, 34 aa, Artificial Sequence
  Non-cyclic GFR-binding peptide
  MOD_RES (1), (33), (34): Xaa is C or S
XSEVVMDPYVKLVVNNASDFFLISLSSLRTPVXX

SEQ ID NO: 24028 - protein, 37 aa, Artificial Sequence
  Non-cyclic GFR-binding peptide
  MOD_RES (1), (3): Xaa is C or S
  MOD_RES (16), (17), (18), (19), (20): Xaa is A or G
  MOD_RES (21), (22), (23), (24): Xaa is A or G or is absent
XAXELHEELRPYVKLXXXXXXXXXFFLVSLSSHHVRS

SEQ ID NO: 24029 - protein, 35 aa, Artificial Sequence
  Non-cyclic GFR-binding peptide
  MOD_RES (2), (4): Xaa is C or S
HXGXAKVVMNPYVKLIVNNSSDFFLVSLSSLKTPA

SEQ ID NO: 24030 - protein, 33 aa, Artificial Sequence
  Non-cyclic GFR-binding peptide
  MOD_RES (12), (13), (14), (15), (16): Xaa is A or G
  MOD_RES (17), (18), (19), (20): Xaa is A or G or is absent
AEVVMDPYVKLXXXXXXXXXFFLISLSSLRAPV

SEQ ID NO: 24031 - protein, 40 aa, Artificial Sequence
  Non-cyclic GFR-binding peptide
  MOD_RES (1), (35), (36): Xaa is C or S
  MOD_RES (13), (14), (15), (16), (17): Xaa is A or G
  MOD_RES (18), (19), (20), (21): Xaa is A or G or is absent
XSEVVMDPYVKLXXXXXXXXXFFLISLSSLRTPVXXTPPT

SEQ ID NO: 24032 - protein, 34 aa, Artificial Sequence
  Non-cyclic GFR-binding peptide
  MOD_RES (1), (33), (34): Xaa is C or S
XAKVVMNPYVKLIVNNSSDFFLVSLSSLKTPAXX

SEQ ID NO: 24033 - protein, 33 aa, Artificial Sequence
  Non-cyclic GFR-binding peptide
  MOD_RES (1), (3): Xaa is C or S
XGXEEVIMPYVKLLLVRGNDFFLMSLSSTKVPA

SEQ ID NO: 24034 - protein, 33 aa, Artificial Sequence
  Non-cyclic GFR-binding peptide
  MOD_RES (31), (32): Xaa is C or S
RVVMNPYVKLIVNSSDDFFLVSLSSLKTPAXXP

SEQ ID NO: 24035 - protein, 42 aa, Artificial Sequence
  Non-cyclic GFR-binding peptide
  MOD_RES (1), (3), (37): Xaa is C or S
  MOD_RES (15), (16), (17), (18), (19): Xaa is A or G
  MOD_RES (20), (21), (22), (23): Xaa is A or G or is absent
XGXSRVVMNPYVKLXXXXXXXXXFFLVSLSSLKTPAXTPKTV

SEQ ID NO: 24036 - protein, 39 aa, Artificial Sequence
  Non-cyclic GFR-binding peptide
  MOD_RES (35), (35): Xaa is C or S
HEELRPYVKLLKPKKRVYEFFLVSLSSHHVRSPQXKVSS

SEQ ID NO: 24037 - protein, 33 aa, Artificial Sequence
  Non-cyclic GFR-binding peptide
  MOD_RES (31), (32): Xaa is C or S
EEVIMPYVKLLLVRGNDFFLMSLSSTKVPAXXT

SEQ ID NO: 24038 - protein, 37 aa, Artificial Sequence
  Non-cyclic GFR-binding peptide
  MOD_RES (33), (34): Xaa is C or S
EAVSMGEPYVKLTPVGMDDFFLVSLSSLKTPVXXAKG

SEQ ID NO: 24039 - protein, 33 aa, Artificial Sequence
  Non-cyclic GFR-binding peptide
  MOD_RES (32), (33): Xaa is C or S
ESVAMGPYVKLYTVVGKDFFLISLSSLKTPVXX

SEQ ID NO: 24040 - protein, 41 aa, Artificial Sequence
  Non-cyclic GFR-binding peptide
  MOD_RES (2), (36), (37): Xaa is C or S
  MOD_RES (14), (15), (16), (17), (18): Xaa is A or G
  MOD_RES (19), (20), (21), (22): Xaa is A or G or is absent
GXRDVVMGPYVKLXXXXXXXXXFFLMSLSSMKTPTXXPGAS

SEQ ID NO: 24041 - protein, 36 aa, Artificial Sequence
  Non-cyclic GFR-binding peptide
  MOD_RES (33), (34): Xaa is C or S
  MOD_RES (11), (12), (13), (14), (15): Xaa is A or G
  MOD_RES (16), (17), (18), (19): Xaa is A or G or is absent
SKVVMPYVKLXXXXXXXXXFFLISLSSLDQPVXXPS

SEQ ID NO: 24042 - protein, 37 aa, Artificial Sequence
  Non-cyclic GFR-binding peptide
  MOD_RES (1), (3), (34), (35): Xaa is C or S
XGXEEVIMPYVKLLLVRGNDFFLMSLSSTKVPAXXTS

SEQ ID NO: 24043 - protein, 35 aa, Artificial Sequence
  Non-cyclic GFR-binding peptide
  MOD_RES (1), (1): Xaa is C or S
  MOD_RES (14), (15), (16), (17), (18): Xaa is A or G
  MOD_RES (19), (20), (21), (22): Xaa is A or G or is absent
XEAVSMGEPYVKLXXXXXXXXXFFLVSLSSLKTPV

SEQ ID NO: 24044 - protein, 37 aa, Artificial Sequence
  Non-cyclic GFR-binding peptide
  MOD_RES (31), (32): Xaa is C or S
KVVMNPYVKLIVNNSSDFFLVSLSSLKTPAXXAKPVA

SEQ ID NO: 24045 - protein, 38 aa, Artificial Sequence
  Non-cyclic GFR-binding peptide
  MOD_RES (1), (34), (35): Xaa is C or S
  MOD_RES (12), (13), (14), (15), (16): Xaa is A or G
  MOD_RES (17), (18), (19), (20): Xaa is A or G or is absent
XSRVIMPYVKLXXXXXXXXXFFLISLSSLAQPVXXPAA

SEQ ID NO: 24046 - protein, 41 aa, Artificial Sequence
  Non-cyclic GFR-binding peptide
  MOD_RES (1), (35): Xaa is C or S
  MOD_RES (13), (14), (15), (16), (17): Xaa is A or G
  MOD_RES (18), (19), (20), (21): Xaa is A or G or is absent
XKNHQLFPYVKLXXXXXXXXXFFLMSLSSEETPVXELGEDN

SEQ ID NO: 24047 - protein, 38 aa, Artificial Sequence
  Non-cyclic GFR-binding peptide
  MOD_RES (2), (4), (36): Xaa is C or S
HXGXSRVVMNPYVKLIVNSSDDFFLVSLSSLKTPAXTP

SEQ ID NO: 24048 - protein, 37 aa, Artificial Sequence
  Non-cyclic GFR-binding peptide
  MOD_RES (2), (4), (35), (36): Xaa is C or S
SXKXSKVVMPYVKLVKPTRGVFFLISLSSLDQPVXXP

SEQ ID NO: 24049 - protein, 30 aa, Artificial Sequence
  Non-cyclic GFR-binding peptide
DVVMGPYVKLIIQQKDNFFLMSLSSMKTPT

SEQ ID NO: 24050 - protein, 37 aa, Artificial Sequence
  Non-cyclic GFR-binding peptide
  MOD_RES (31), (32): Xaa is C or S
EVVMEPYVKLVVKDYEDFFLMSLSSLETPVXXAKPIS

SEQ ID NO: 24051 - protein, 36 aa, Artificial Sequence
  Non-cyclic GFR-binding peptide
  MOD_RES (2), (4), (36): Xaa is C or S
RXGXAEVVMDPYVKLVVNNAADFFLISLSSLRAPVX

SEQ ID NO: 24052 - protein, 36 aa, Artificial Sequence
  Non-cyclic GFR-binding peptide
  MOD_RES (32), (33): Xaa is C or S
RDVVMGPYVKLIIQQKDNFFLMSLSSMKTPTXXPGA

SEQ ID NO: 24053 - protein, 39 aa, Artificial Sequence
  Non-cyclic GFR-binding peptide
  MOD_RES (2), (4), (37), (38): Xaa is C or S
  MOD_RES (15), (16), (17), (18), (19): Xaa is A or G
  MOD_RES (20), (21), (22), (23): Xaa is A or G or is absent
LXGXEEVIMPYVKLXXXXXXXXXFFLMSLSSTKVPAXXT

SEQ ID NO: 24054 - protein, 37 aa, Artificial Sequence
  Non-cyclic GFR-binding peptide
  MOD_RES (2), (37): Xaa is C or S
  MOD_RES (15), (16), (17), (18), (19): Xaa is A or G
  MOD_RES (20), (21), (22), (23): Xaa is A or G or is absent
GXEAVSMGEPYVKLXXXXXXXXXFFLVSLSSLKTPVX

SEQ ID NO: 24055 - protein, 32 aa, Artificial Sequence
  Non-cyclic GFR-binding peptide
  MOD_RES (32), (32): Xaa is C or S
ESVAMGPYVKLYTVVGKDFFLISLSSLKTPVX

SEQ ID NO: 24056 - protein, 38 aa, Artificial Sequence
  Non-cyclic GFR-binding peptide
  MOD_RES (2), (4), (35), (36): Xaa is C or S
SXKXSKVIMPYVKLIKPTKGIFFLISLSSLDQSVXXPS

SEQ ID NO: 24057 - protein, 36 aa, Artificial Sequence
  Non-cyclic GFR-binding peptide
  MOD_RES (2), (2): Xaa is C or S
  MOD_RES (15), (16), (17), (18), (19): Xaa is A or G
  MOD_RES (20), (21), (22), (23): Xaa is A or G or is absent
GXEAVSMGEPYVKLXXXXXXXXXFFLVSLSSLKTPV

SEQ ID NO: 24058 - protein, 43 aa, Artificial Sequence
  Non-cyclic GFR-binding peptide
  MOD_RES (2), (4), (38), (39): Xaa is C or S
  MOD_RES (16), (17), (18), (19), (20): Xaa is A or G
  MOD_RES (21), (22), (23), (24): Xaa is A or G or is absent
HXGXSRVVMNPYVKLXXXXXXXXXFFLVSLSSLKTPAXXPKPV

SEQ ID NO: 24059 - protein, 36 aa, Artificial Sequence
  Non-cyclic GFR-binding peptide
  MOD_RES (34), (35): Xaa is C or S
  MOD_RES (12), (13), (14), (15), (16): Xaa is A or G
  MOD_RES (17), (18), (19), (20): Xaa is A or G or is absent
SEVVMDPYVKLXXXXXXXXXFFLISLSSLRTPVXXT

SEQ ID NO: 24060 - protein, 35 aa, Artificial Sequence
  Non-cyclic GFR-binding peptide
  MOD_RES (1), (3): Xaa is C or S
  MOD_RES (14), (15), (16), (17), (18): Xaa is A or G
  MOD_RES (19), (20), (21), (22): Xaa is A or G or is absent
XGXEEVIMPYVKLXXXXXXXXXFFLMSLSSTKVPA

SEQ ID NO: 24061 - protein, 35 aa, Artificial Sequence
  Non-cyclic GFR-binding peptide
  MOD_RES (2), (2): Xaa is C or S
  MOD_RES (14), (15), (16), (17), (18): Xaa is A or G
  MOD_RES (19), (20), (21), (22): Xaa is A or G or is absent
GXARVVMNPYVKLXXXXXXXXXFFLVSLSSLQTPA

SEQ ID NO: 24062 - protein, 33 aa, Artificial Sequence
  Non-cyclic GFR-binding peptide
  MOD_RES (1), (1): Xaa is C or S
  MOD_RES (12), (13), (14), (15), (16): Xaa is A or G
  MOD_RES (17), (18), (19), (20): Xaa is A or G or is absent
XSRVIMPYVKLXXXXXXXXXFFLISLSSLAQPV

SEQ ID NO: 24063 - protein, 36 aa, Artificial Sequence
  Non-cyclic GFR-binding peptide
  MOD_RES (1), (3), (35), (36): Xaa is C or S
XGXSRVVMNPYVKLIVNSSDDFFLVSLSSLKTPAXX

SEQ ID NO: 24064 - protein, 44 aa, Artificial Sequence
  Non-cyclic GFR-binding peptide
  MOD_RES (1), (3), (40): Xaa is C or S
XAXELHEELRPYVKLLKPKKRVYEFFLVSLSSHHVRSPQXKVSS

SEQ ID NO: 24065 - protein, 38 aa, Artificial Sequence
  Non-cyclic GFR-binding peptide
  MOD_RES (2), (33), (34): Xaa is C or S
GXEEVIMPYVKLLLVRGNDFFLMSLSSTKVPAXXTSPV

SEQ ID NO: 24066 - protein, 34 aa, Artificial Sequence
  Non-cyclic GFR-binding peptide
  MOD_RES (1), (33), (34): Xaa is C or S
XSRVVMNPYVKLIVNSSDDFFLVSLSSLKTPAXX

SEQ ID NO: 24067 - protein, 41 aa, Artificial Sequence
  Non-cyclic GFR-binding peptide
  MOD_RES (2), (4), (38), (39): Xaa is C or S
  MOD_RES (16), (17), (18), (19), (20): Xaa is A or G
  MOD_RES (21), (22), (23), (24): Xaa is A or G or is absent
RXGXGEVVMEPYVKLXXXXXXXXXFFLMSLSSLETPVXXAK

SEQ ID NO: 24068 - protein, 39 aa, Artificial Sequence
  Non-cyclic GFR-binding peptide
  MOD_RES (1), (35): Xaa is C or S
XKNHQLFPYVKLHQGQHPKIRFFLMSLSSEETPVXELGE

SEQ ID NO: 24069 - protein, 31 aa, Artificial Sequence
  Non-cyclic GFR-binding peptide
  MOD_RES (31), (31): Xaa is C or S
EVVMEPYVKLVVKDYEDFFLMSLSSLETPVX

SEQ ID NO: 24070 - protein, 38 aa, Artificial Sequence
  Non-cyclic GFR-binding peptide
  MOD_RES (1), (35): Xaa is C or S
XKNHQLFPYVKLHQGQHPKIRFFLMSLSSEETPVXELG

SEQ ID NO: 24071 - protein, 34 aa, Artificial Sequence
  Non-cyclic GFR-binding peptide
  MOD_RES (2), (34): Xaa is C or S
GXESVAMGPYVKLYTVVGKDFFLISLSSLKTPVX

SEQ ID NO: 24072 - protein, 40 aa, Artificial Sequence
  Non-cyclic GFR-binding peptide
  MOD_RES (1), (3), (38), (39): Xaa is C or S
  MOD_RES (16), (17), (18), (19), (20): Xaa is A or G
  MOD_RES (21), (22), (23), (24): Xaa is A or G or is absent
XGXEAVSMGEPYVKLXXXXXXXXXFFLVSLSSLKTPVXXA

SEQ ID NO: 24073 - protein, 41 aa, Artificial Sequence
  Non-cyclic GFR-binding peptide
  MOD_RES (37), (37): Xaa is C or S
  MOD_RES (13), (14), (15), (16), (17): Xaa is A or G
  MOD_RES (18), (19), (20), (21): Xaa is A or G or is absent
ELHEELRPYVKLXXXXXXXXXFFLVSLSSHHVRSPQXKVSS

SEQ ID NO: 24074 - protein, 39 aa, Artificial Sequence
  Non-cyclic GFR-binding peptide
  MOD_RES (2), (36), (37): Xaa is C or S
  MOD_RES (14), (15), (16), (17), (18): Xaa is A or G
  MOD_RES (19), (20), (21), (22): Xaa is A or G or is absent
GXSEVVMDPYVKLXXXXXXXXXFFLISLSSLRTPVXXTP

SEQ ID NO: 24075 - protein, 34 aa, Artificial Sequence
  Non-cyclic GFR-binding peptide
  MOD_RES (33), (34): Xaa is C or S
  MOD_RES (11), (12), (13), (14), (15): Xaa is A or G
  MOD_RES (16), (17), (18), (19): Xaa is A or G or is absent
EVVMDPYVKLXXXXXXXXXFFLISLSSLRTPVXX

SEQ ID NO: 24076 - protein, 35 aa, Artificial Sequence
  Non-cyclic GFR-binding peptide
  MOD_RES (2), (4): Xaa is C or S
HXGXARVVMNPYVKLIVNSSDDFFLVSLSSLQTPA

SEQ ID NO: 24077 - protein, 35 aa, Artificial Sequence
  Non-cyclic GFR-binding peptide
  MOD_RES (34), (34): Xaa is C or S
  MOD_RES (12), (13), (14), (15), (16): Xaa is A or G
  MOD_RES (17), (18), (19), (20): Xaa is A or G or is absent
SRVVMNPYVKLXXXXXXXXXFFLVSLSSLKTPAXT

SEQ ID NO: 24078 - protein, 36 aa, Artificial Sequence
  Non-cyclic GFR-binding peptide
  MOD_RES (2), (4), (35), (36): Xaa is C or S
SXKXSKVIMPYVKLIKPTKGIFFLISLSSLDQSVXX

SEQ ID NO: 24079 - protein, 38 aa, Artificial Sequence
  Non-cyclic GFR-binding peptide
  MOD_RES (1), (33), (34): Xaa is C or S
XAEVVMDPYVKLVVNNAADFFLISLSSLRAPVXXSAPA

SEQ ID NO: 24080 - protein, 35 aa, Artificial Sequence
  Non-cyclic GFR-binding peptide
  MOD_RES (34), (34): Xaa is C or S
  MOD_RES (12), (13), (14), (15), (16): Xaa is A or G
  MOD_RES (17), (18), (19), (20): Xaa is A or G or is absent
KNHQLFPYVKLXXXXXXXXXFFLMSLSSEETPVXE

SEQ ID NO: 24081 - protein, 36 aa, Artificial Sequence
  Non-cyclic GFR-binding peptide
  MOD_RES (33), (34): Xaa is C or S
  MOD_RES (11), (12), (13), (14), (15): Xaa is A or G
  MOD_RES (16), (17), (18), (19): Xaa is A or G or is absent
RVVMNPYVKLXXXXXXXXXFFLVSLSSLKTPAXXPK

SEQ ID NO: 24082 - protein, 38 aa, Artificial Sequence
  Non-cyclic GFR-binding peptide
  MOD_RES (1), (35), (36): Xaa is C or S
  MOD_RES (13), (14), (15), (16), (17): Xaa is A or G
  MOD_RES (18), (19), (20), (21): Xaa is A or G or is absent
XARVVMNPYVKLXXXXXXXXXFFLVSLSSLQTPAXXPK

SEQ ID NO: 24083 - protein, 37 aa, Artificial Sequence
  Non-cyclic GFR-binding peptide
  MOD_RES (31), (32): Xaa is C or S
DVVMGPYVKLIIQQKDNFFLMSLSSMKTPTXXPGASG

SEQ ID NO: 24084 - protein, 34 aa, Artificial Sequence
  Non-cyclic GFR-binding peptide
  MOD_RES (33), (34): Xaa is C or S
  MOD_RES (11), (12), (13), (14), (15): Xaa is A or G
  MOD_RES (16), (17), (18), (19): Xaa is A or G or is absent
RVVMNPYVKLXXXXXXXXXFFLVSLSSLQTPAXX

SEQ ID NO: 24085 - protein, 35 aa, Artificial Sequence
  Non-cyclic GFR-binding peptide
  MOD_RES (1), (33), (34): Xaa is C or S
XSRVVMNPYVKLIVNSSDDFFLVSLSSLKTPAXXP

SEQ ID NO: 24086 - protein, 39 aa, Artificial Sequence
  Non-cyclic GFR-binding peptide
  MOD_RES (34), (35): Xaa is C or S
  MOD_RES (12), (13), (14), (15), (16): Xaa is A or G
  MOD_RES (17), (18), (19), (20): Xaa is A or G or is absent
SEVVMDPYVKLXXXXXXXXXFFLISLSSLRTPVXXTPPT

SEQ ID NO: 24087 - protein, 35 aa, Artificial Sequence
  Non-cyclic GFR-binding peptide
  MOD_RES (1), (32), (33): Xaa is C or S
XSKVVMPYVKLVKPTRGVFFLISLSSLDQPVXXPS

SEQ ID NO: 24088 - protein, 38 aa, Artificial Sequence
  Non-cyclic GFR-binding peptide
  MOD_RES (2), (4), (38): Xaa is C or S
  MOD_RES (16), (17), (18), (19), (20): Xaa is A or G
  MOD_RES (21), (22), (23), (24): Xaa is A or G or is absent
HXGXSRVVMNPYVKLXXXXXXXXXFFLVSLSSLKTPAX

SEQ ID NO: 24089 - protein, 37 aa, Artificial Sequence
  Non-cyclic GFR-binding peptide
  MOD_RES (32), (33): Xaa is C or S
RDVVMGPYVKLIIQQKDNFFLMSLSSMKTPTXXPGAS

SEQ ID NO: 24090 - protein, 43 aa, Artificial Sequence
  Non-cyclic GFR-binding peptide
  MOD_RES (2), (4), (37), (38): Xaa is C or S
  MOD_RES (15), (16), (17), (18), (19): Xaa is A or G
  MOD_RES (20), (21), (22), (23): Xaa is A or G or is absent
SXKXSKVVMPYVKLXXXXXXXXXFFLISLSSLDQPVXXPSASA

SEQ ID NO: 24091 - protein, 36 aa, Artificial Sequence
  Non-cyclic GFR-binding peptide
  MOD_RES (33), (34): Xaa is C or S
  MOD_RES (11), (12), (13), (14), (15): Xaa is A or G
  MOD_RES (16), (17), (18), (19): Xaa is A or G or is absent
SKVIMPYVKLXXXXXXXXXFFLISLSSLDQSVXXPS

SEQ ID NO: 24092 - protein, 35 aa, Artificial Sequence
  Non-cyclic GFR-binding peptide
  MOD_RES (33), (34): Xaa is C or S
  MOD_RES (11), (12), (13), (14), (15): Xaa is A or G
  MOD_RES (16), (17), (18), (19): Xaa is A or G or is absent
SKVVMPYVKLXXXXXXXXXFFLISLSSLDQPVXXP

SEQ ID NO: 24093 - protein, 35 aa, Artificial Sequence
  Non-cyclic GFR-binding peptide
  MOD_RES (32), (32): Xaa is C or S
SRVVMNPYVKLIVNSSDDFFLVSLSSLKTPAXTPK

SEQ ID NO: 24094 - protein, 36 aa, Artificial Sequence
  Non-cyclic GFR-binding peptide
  MOD_RES (1), (3), (35), (36): Xaa is C or S
XGXARVVMNPYVKLIVNSSDDFFLVSLSSLQTPAXX

SEQ ID NO: 24095 - protein, 35 aa, Artificial Sequence
  Non-cyclic GFR-binding peptide
  MOD_RES (1), (35): Xaa is C or S
  MOD_RES (13), (14), (15), (16), (17): Xaa is A or G
  MOD_RES (18), (19), (20), (21): Xaa is A or G or is absent
XSEVVMDPYVKLXXXXXXXXXFFLISLSSLRTPVX

SEQ ID NO: 24096 - protein, 37 aa, Artificial Sequence
  Non-cyclic GFR-binding peptide
  MOD_RES (2), (4): Xaa is C or S
  MOD_RES (16), (17), (18), (19), (20): Xaa is A or G
  MOD_RES (21), (22), (23), (24): Xaa is A or G or is absent
RXGXGEVVMEPYVKLXXXXXXXXXFFLMSLSSLETPV

SEQ ID NO: 24097 - protein, 37 aa, Artificial Sequence
  Non-cyclic GFR-binding peptide
  MOD_RES (1), (3), (35), (36): Xaa is C or S
XGXGEVVMEPYVKLVVKDYEDFFLMSLSSLETPVXXA

SEQ ID NO: 24098 - protein, 38 aa, Artificial Sequence
  Non-cyclic GFR-binding peptide
  MOD_RES (1), (33), (34): Xaa is C or S
XGEVVMEPYVKLVVKDYEDFFLMSLSSLETPVXXAKPI

SEQ ID NO: 24099 - protein, 34 aa, Artificial Sequence
  Non-cyclic GFR-binding peptide
  MOD_RES (2), (34): Xaa is C or S
GXGEVVMEPYVKLVVKDYEDFFLMSLSSLETPVX

SEQ ID NO: 24100 - protein, 36 aa, Artificial Sequence
  Non-cyclic GFR-binding peptide
  MOD_RES (2), (4), (35), (36): Xaa is C or S
SXKXSRVIMPYVKLVKPKRGVFFLISLSSLAQPVXX

SEQ ID NO: 24101 - protein, 35 aa, Artificial Sequence
  Non-cyclic GFR-binding peptide
  MOD_RES (1), (3), (35): Xaa is C or S
XGXESVAMGPYVKLYTVVGKDFFLISLSSLKTPVX

SEQ ID NO: 24102 - protein, 37 aa, Artificial Sequence
  Non-cyclic GFR-binding peptide
  MOD_RES (1), (3), (35), (36): Xaa is C or S
XGXESVAMGPYVKLYTVVGKDFFLISLSSLKTPVXXA

SEQ ID NO: 24103 - protein, 43 aa, Artificial Sequence
  Non-cyclic GFR-binding peptide
  MOD_RES (1), (3), (40): Xaa is C or S
  MOD_RES (16), (17), (18), (19), (20): Xaa is A or G
  MOD_RES (21), (22), (23), (24): Xaa is A or G or is absent
XAXELHEELRPYVKLXXXXXXXXXFFLVSLSSHHVRSPQXKVS

SEQ ID NO: 24104 - protein, 36 aa, Artificial Sequence
  Non-cyclic GFR-binding peptide
  MOD_RES (2), (33), (34): Xaa is C or S
KXSRVIMPYVKLVKPKRGVFFLISLSSLAQPVXXPA

SEQ ID NO: 24105 - protein, 35 aa, Artificial Sequence
  Non-cyclic GFR-binding peptide
  MOD_RES (1), (3), (35): Xaa is C or S
XGXGEVVMEPYVKLVVKDYEDFFLMSLSSLETPVX

SEQ ID NO: 24106 - protein, 32 aa, Artificial Sequence
  Non-cyclic GFR-binding peptide
  MOD_RES (11), (12), (13), (14), (15): Xaa is A or G
  MOD_RES (16), (17), (18), (19): Xaa is A or G or is absent
KVVMNPYVKLXXXXXXXXXFFLVSLSSLKTPA

SEQ ID NO: 24107 - protein, 35 aa, Artificial Sequence
  Non-cyclic GFR-binding peptide
  MOD_RES (31), (32): Xaa is C or S
EVVMEPYVKLVVKDYEDFFLMSLSSLETPVXXAKP

SEQ ID NO: 24108 - protein, 35 aa, Artificial Sequence
  Non-cyclic GFR-binding peptide
  MOD_RES (31), (32): Xaa is C or S
RVVMNPYVKLIVNSSDDFFLVSLSSLQTPAXXPKP

SEQ ID NO: 24109 - protein, 40 aa, Artificial Sequence
  Non-cyclic GFR-binding peptide
  MOD_RES (1), (3), (37), (38): Xaa is C or S
  MOD_RES (15), (16), (17), (18), (19): Xaa is A or G
  MOD_RES (20), (21), (22), (23): Xaa is A or G or is absent
XGXESVAMGPYVKLXXXXXXXXXFFLISLSSLKTPVXXAK

SEQ ID NO: 24110 - protein, 36 aa, Artificial Sequence
  Non-cyclic GFR-binding peptide
  MOD_RES (32), (33): Xaa is C or S
SEVVMDPYVKLVVNNASDFFLISLSSLRTPVXXTPP

SEQ ID NO: 24111 - protein, 44 aa, Artificial Sequence
  Non-cyclic GFR-binding peptide
  MOD_RES (2), (4), (38): Xaa is C or S
  MOD_RES (16), (17), (18), (19), (20): Xaa is A or G
  MOD_RES (21), (22), (23), (24): Xaa is A or G or is absent
RXEXKNHQLFPYVKLXXXXXXXXXFFLMSLSSEETPVXELGEDN

SEQ ID NO: 24112 - protein, 37 aa, Artificial Sequence
  Non-cyclic GFR-binding peptide
  MOD_RES (2), (4), (36), (37): Xaa is C or S
HXGXSRVVMNPYVKLIVNSSDDFFLVSLSSLKTPAXX

SEQ ID NO: 24113 - protein, 32 aa, Artificial Sequence
  Non-cyclic GFR-binding peptide
  MOD_RES (11), (12), (13), (14), (15): Xaa is A or G
  MOD_RES (16), (17), (18), (19): Xaa is A or G or is absent
EEVIMPYVKLXXXXXXXXXFFLMSLSSTKVPA

SEQ ID NO: 24114 - protein, 40 aa, Artificial Sequence
  Non-cyclic GFR-binding peptide
  MOD_RES (34), (35): Xaa is C or S
  MOD_RES (12), (13), (14), (15), (16): Xaa is A or G
  MOD_RES (17), (18), (19), (20): Xaa is A or G or is absent
ARVVMNPYVKLXXXXXXXXXFFLVSLSSLQTPAXXPKPVT

SEQ ID NO: 24115 - protein, 39 aa, Artificial Sequence
  Non-cyclic GFR-binding peptide
  MOD_RES (1), (35), (36): Xaa is C or S
  MOD_RES (13), (14), (15), (16), (17): Xaa is A or G
  MOD_RES (18), (19), (20), (21): Xaa is A or G or is absent
XSRVVMNPYVKLXXXXXXXXXFFLVSLSSLKTPAXXPKP

SEQ ID NO: 24116 - protein, 34 aa, Artificial Sequence
  Non-cyclic GFR-binding peptide
  MOD_RES (1), (34): Xaa is C or S
  MOD_RES (12), (13), (14), (15), (16): Xaa is A or G
  MOD_RES (17), (18), (19), (20): Xaa is A or G or is absent
XSKVIMPYVKLXXXXXXXXXFFLISLSSLDQSVX

SEQ ID NO: 24117 - protein, 40 aa, Artificial Sequence
  Non-cyclic GFR-binding peptide
  MOD_RES (2), (35), (36): Xaa is C or S
  MOD_RES (13), (14), (15), (16), (17): Xaa is A or G
  MOD_RES (18), (19), (20), (21): Xaa is A or G or is absent
KXSRVIMPYVKLXXXXXXXXXFFLISLSSLAQPVXXPAAS

SEQ ID NO: 24118 - protein, 36 aa, Artificial Sequence
  Non-cyclic GFR-binding peptide
  MOD_RES (1), (3): Xaa is C or S
  MOD_RES (15), (16), (17), (18), (19): Xaa is A or G
  MOD_RES (20), (21), (22), (23): Xaa is A or G or is absent
XGXSRVVMNPYVKLXXXXXXXXXFFLVSLSSLKTPA

SEQ ID NO: 24119 - protein, 34 aa, Artificial Sequence
  Non-cyclic GFR-binding peptide
  MOD_RES (33), (33): Xaa is C or S
  MOD_RES (11), (12), (13), (14), (15): Xaa is A or G
  MOD_RES (16), (17), (18), (19): Xaa is A or G or is absent
NHQLFPYVKLXXXXXXXXXFFLMSLSSEETPVXE

SEQ ID NO: 24120 - protein, 41 aa, Artificial Sequence
  Non-cyclic GFR-binding peptide
  MOD_RES (2), (4), (38), (39): Xaa is C or S
  MOD_RES (16), (17), (18), (19), (20): Xaa is A or G
  MOD_RES (21), (22), (23), (24): Xaa is A or G or is absent
HXGXARVVMNPYVKLXXXXXXXXXFFLVSLSSLQTPAXXPK

SEQ ID NO: 24121 - protein, 39 aa, Artificial Sequence
  Non-cyclic GFR-binding peptide
  MOD_RES (2), (36), (37): Xaa is C or S
  MOD_RES (14), (15), (16), (17), (18): Xaa is A or G
  MOD_RES (19), (20), (21), (22): Xaa is A or G or is absent
GXRDVVMGPYVKLXXXXXXXXXFFLMSLSSMKTPTXXPG

SEQ ID NO: 24122 - protein, 40 aa, Artificial Sequence
  Non-cyclic GFR-binding peptide
  MOD_RES (2), (35), (36): Xaa is C or S
  MOD_RES (13), (14), (15), (16), (17): Xaa is A or G
  MOD_RES (18), (19), (20), (21): Xaa is A or G or is absent
KXSKVIMPYVKLXXXXXXXXXFFLISLSSLDQSVXXPSAS

SEQ ID NO: 24123 - protein, 34 aa, Artificial Sequence
  Non-cyclic GFR-binding peptide
  MOD_RES (2), (2): Xaa is C or S
  MOD_RES (13), (14), (15), (16), (17): Xaa is A or G
  MOD_RES (18), (19), (20), (21): Xaa is A or G or is absent
KXSRVIMPYVKLXXXXXXXXXFFLISLSSLAQPV

SEQ ID NO: 24124 - protein, 37 aa, Artificial Sequence
  Non-cyclic GFR-binding peptide
  MOD_RES (1), (32), (33): Xaa is C or S
XSRVIMPYVKLVKPKRGVFFLISLSSLAQPVXXPAAS

SEQ ID NO: 24125 - protein, 32 aa, Artificial Sequence
  Non-cyclic GFR-binding peptide
  MOD_RES (11), (12), (13), (14), (15): Xaa is A or G
  MOD_RES (16), (17), (18), (19): Xaa is A or G or is absent
RVVMNPYVKLXXXXXXXXXFFLVSLSSLKTPA

SEQ ID NO: 24126 - protein, 33 aa, Artificial Sequence
  Non-cyclic GFR-binding peptide
  MOD_RES (33), (33): Xaa is C or S
  MOD_RES (11), (12), (13), (14), (15): Xaa is A or G
  MOD_RES (16), (17), (18), (19): Xaa is A or G or is absent
KVVMNPYVKLXXXXXXXXXFFLVSLSSLKTPAX

SEQ ID NO: 24127 - protein, 37 aa, Artificial Sequence
  Non-cyclic GFR-binding peptide
  MOD_RES (2), (4), (36), (37): Xaa is C or S
RXGXSEVVMDPYVKLVVNNASDFFLISLSSLRTPVXX

SEQ ID NO: 24128 - protein, 33 aa, Artificial Sequence
  Non-cyclic GFR-binding peptide
  MOD_RES (33), (33): Xaa is C or S
  MOD_RES (11), (12), (13), (14), (15): Xaa is A or G
  MOD_RES (16), (17), (18), (19): Xaa is A or G or is absent
RVVMNPYVKLXXXXXXXXXFFLVSLSSLKTPAX

SEQ ID NO: 24129 - protein, 36 aa, Artificial Sequence
  Non-cyclic GFR-binding peptide
  MOD_RES (2), (33), (34): Xaa is C or S
GXEEVIMPYVKLLLVRGNDFFLMSLSSTKVPAXXTS

SEQ ID NO: 24130 - protein, 35 aa, Artificial Sequence
  Non-cyclic GFR-binding peptide
  MOD_RES (31), (32): Xaa is C or S
RVVMNPYVKLIVNSSDDFFLVSLSSLKTPAXXPKP

SEQ ID NO: 24131 - protein, 41 aa, Artificial Sequence
  Non-cyclic GFR-binding peptide
  MOD_RES (2), (4), (36), (37): Xaa is C or S
HXGXARVVMNPYVKLIVNSSDDFFLVSLSSLQTPAXXPKPV

SEQ ID NO: 24132 - protein, 35 aa, Artificial Sequence
  Non-cyclic GFR-binding peptide
  MOD_RES (1), (3): Xaa is C or S
  MOD_RES (14), (15), (16), (17), (18): Xaa is A or G
  MOD_RES (19), (20), (21), (22): Xaa is A or G or is absent
XKXSRVIMPYVKLXXXXXXXXXFFLISLSSLAQPV

SEQ ID NO: 24133 - protein, 39 aa, Artificial Sequence
  Non-cyclic GFR-binding peptide
  MOD_RES (2), (36), (37): Xaa is C or S
  MOD_RES (14), (15), (16), (17), (18): Xaa is A or G
  MOD_RES (19), (20), (21), (22): Xaa is A or G or is absent
GXAKVVMNPYVKLXXXXXXXXXFFLVSLSSLKTPAXXAK

SEQ ID NO: 24134 - protein, 37 aa, Artificial Sequence
  Non-cyclic GFR-binding peptide
  MOD_RES (35), (35): Xaa is C or S
  MOD_RES (11), (12), (13), (14), (15): Xaa is A or G
  MOD_RES (16), (17), (18), (19): Xaa is A or G or is absent
HEELRPYVKLXXXXXXXXXFFLVSLSSHHVRSPQXKV

SEQ ID NO: 24135 - protein, 33 aa, Artificial Sequence
  Non-cyclic GFR-binding peptide
HEELRPYVKLLKPKKRVYEFFLVSLSSHHVRSP

SEQ ID NO: 24136 - protein, 38 aa, Artificial Sequence
  Non-cyclic GFR-binding peptide
  MOD_RES (33), (34): Xaa is C or S
EAVSMGEPYVKLTPVGMDDFFLVSLSSLKTPVXXAKGV

SEQ ID NO: 24137 - protein, 38 aa, Artificial Sequence
  Non-cyclic GFR-binding peptide
  MOD_RES (1), (32), (33): Xaa is C or S
XSRVIMPYVKLVKPKRGVFFLISLSSLAQPVXXPAASA

SEQ ID NO: 24138 - protein, 38 aa, Artificial Sequence
  Non-cyclic GFR-binding peptide
  MOD_RES (1), (3), (37), (38): Xaa is C or S
  MOD_RES (15), (16), (17), (18), (19): Xaa is A or G
  MOD_RES (20), (21), (22), (23): Xaa is A or G or is absent
XGXSEVVMDPYVKLXXXXXXXXXFFLISLSSLRTPVXX

SEQ ID NO: 24139 - protein, 40 aa, Artificial Sequence
  Non-cyclic GFR-binding peptide
  MOD_RES (2), (36), (37): Xaa is C or S
  MOD_RES (14), (15), (16), (17), (18): Xaa is A or G
  MOD_RES (19), (20), (21), (22): Xaa is A or G or is absent
GXSEVVMDPYVKLXXXXXXXXXFFLISLSSLRTPVXXTPP

SEQ ID NO: 24140 - protein, 38 aa, Artificial Sequence
  Non-cyclic GFR-binding peptide
  MOD_RES (2), (35), (36): Xaa is C or S
  MOD_RES (13), (14), (15), (16), (17): Xaa is A or G
  MOD_RES (18), (19), (20), (21): Xaa is A or G or is absent
KXSKVVMPYVKLXXXXXXXXXFFLISLSSLDQPVXXPS

SEQ ID NO: 24141 - protein, 37 aa, Artificial Sequence
  Non-cyclic GFR-binding peptide
  MOD_RES (1), (3), (34), (35): Xaa is C or S
XKXSKVIMPYVKLIKPTKGIFFLISLSSLDQSVXXPS

SEQ ID NO: 24142 - protein, 39 aa, Artificial Sequence
  Non-cyclic GFR-binding peptide
  MOD_RES (1), (34), (35): Xaa is C or S
  MOD_RES (12), (13), (14), (15), (16): Xaa is A or G
  MOD_RES (17), (18), (19), (20): Xaa is A or G or is absent
XSKVIMPYVKLXXXXXXXXXFFLISLSSLDQSVXXPSAS

SEQ ID NO: 24143 - protein, 44 aa, Artificial Sequence
  Non-cyclic GFR-binding peptide
  MOD_RES (2), (4), (38): Xaa is C or S
  MOD_RES (16), (17), (18), (19), (20): Xaa is A or G
  MOD_RES (21), (22), (23), (24): Xaa is A or G or is absent
HXGXSRVVMNPYVKLXXXXXXXXXFFLVSLSSLKTPAXTPKTVH

SEQ ID NO: 24144 - protein, 39 aa, Artificial Sequence
  Non-cyclic GFR-binding peptide
  MOD_RES (2), (4), (36), (37): Xaa is C or S
RXGXSEVVMDPYVKLVVNNASDFFLISLSSLRTPVXXTP

SEQ ID NO: 24145 - protein, 36 aa, Artificial Sequence
  Non-cyclic GFR-binding peptide
  MOD_RES (1), (1): Xaa is C or S
  MOD_RES (14), (15), (16), (17), (18): Xaa is A or G
  MOD_RES (19), (20), (21), (22): Xaa is A or G or is absent
XELHEELRPYVKLXXXXXXXXXFFLVSLSSHHVRSP

SEQ ID NO: 24146 - protein, 39 aa, Artificial Sequence
  Non-cyclic GFR-binding peptide
  MOD_RES (2), (33), (34): Xaa is C or S
KXSRVIMPYVKLVKPKRGVFFLISLSSLAQPVXXPAASA

SEQ ID NO: 24147 - protein, 40 aa, Artificial Sequence
  Non-cyclic GFR-binding peptide
  MOD_RES (2), (34), (35): Xaa is C or S
GXARVVMNPYVKLIVNSSDDFFLVSLSSLQTPAXXPKPVT

SEQ ID NO: 24148 - protein, 37 aa, Artificial Sequence
  Non-cyclic GFR-binding peptide
  MOD_RES (1), (3), (37): Xaa is C or S
  MOD_RES (15), (16), (17), (18), (19): Xaa is A or G
  MOD_RES (20), (21), (22), (23): Xaa is A or G or is absent
XEXKNHQLFPYVKLXXXXXXXXXFFLMSLSSEETPVX

SEQ ID NO: 24149 - protein, 39 aa, Artificial Sequence
  Non-cyclic GFR-binding peptide
  MOD_RES (33), (33): Xaa is C or S
  MOD_RES (11), (12), (13), (14), (15): Xaa is A or G
  MOD_RES (16), (17), (18), (19): Xaa is A or G or is absent
RVVMNPYVKLXXXXXXXXXFFLVSLSSLKTPAXTPKTVH

SEQ ID NO: 24150 - protein, 38 aa, Artificial Sequence
  Non-cyclic GFR-binding peptide
  MOD_RES (1), (3), (37): Xaa is C or S
  MOD_RES (15), (16), (17), (18), (19): Xaa is A or G
  MOD_RES (20), (21), (22), (23): Xaa is A or G or is absent
XEXKNHQLFPYVKLXXXXXXXXXFFLMSLSSEETPVXE

SEQ ID NO: 24151 - protein, 35 aa, Artificial Sequence
  Non-cyclic GFR-binding peptide
  MOD_RES (1), (3), (35): Xaa is C or S
XGXAEVVMDPYVKLVVNNAADFFLISLSSLRAPVX

SEQ ID NO: 24152 - protein, 32 aa, Artificial Sequence
  Non-cyclic GFR-binding peptide
EAVSMGEPYVKLTPVGMDDFFLVSLSSLKTPV

SEQ ID NO: 24153 - protein, 37 aa, Artificial Sequence
  Non-cyclic GFR-binding peptide
  MOD_RES (33), (33): Xaa is C or S
NHQLFPYVKLHQGQHPKIRFFLMSLSSEETPVXELGE

SEQ ID NO: 24154 - protein, 41 aa, Artificial Sequence
  Non-cyclic GFR-binding peptide
  MOD_RES (1), (3), (35): Xaa is C or S
XGXSRVVMNPYVKLIVNSSDDFFLVSLSSLKTPAXTPKTVH

SEQ ID NO: 24155 - protein, 41 aa, Artificial Sequence
  Non-cyclic GFR-binding peptide
  MOD_RES (1), (3), (35), (36): Xaa is C or S
XGXSRVVMNPYVKLIVNSSDDFFLVSLSSLKTPAXXPKPVH

SEQ ID NO: 24156 - protein, 33 aa, Artificial Sequence
  Non-cyclic GFR-binding peptide
  MOD_RES (33), (33): Xaa is C or S
  MOD_RES (11), (12), (13), (14), (15): Xaa is A or G
  MOD_RES (16), (17), (18), (19): Xaa is A or G or is absent
EEVIMPYVKLXXXXXXXXXFFLMSLSSTKVPAX

SEQ ID NO: 24157 - protein, 36 aa, Artificial Sequence
  Non-cyclic GFR-binding peptide
  MOD_RES (2), (34), (35): Xaa is C or S
GXARVVMNPYVKLIVNSSDDFFLVSLSSLQTPAXXP

SEQ ID NO: 24158 - protein, 33 aa, Artificial Sequence
  Non-cyclic GFR-binding peptide
  MOD_RES (12), (13), (14), (15), (16): Xaa is A or G
  MOD_RES (17), (18), (19), (20): Xaa is A or G or is absent
LHEELRPYVKLXXXXXXXXXFFLVSLSSHHVRS

SEQ ID NO: 24159 - protein, 42 aa, Artificial Sequence
  Non-cyclic GFR-binding peptide
  MOD_RES (2), (4), (38), (39): Xaa is C or S
  MOD_RES (16), (17), (18), (19), (20): Xaa is A or G
  MOD_RES (21), (22), (23), (24): Xaa is A or G or is absent
HXGXAKVVMNPYVKLXXXXXXXXXFFLVSLSSLKTPAXXAKP

SEQ ID NO: 24160 - protein, 39 aa, Artificial Sequence
  Non-cyclic GFR-binding peptide
  MOD_RES (1), (3), (37), (38): Xaa is C or S
  MOD_RES (15), (16), (17), (18), (19): Xaa is A or G
  MOD_RES (20), (21), (22), (23): Xaa is A or G or is absent
XGXGEVVMEPYVKLXXXXXXXXXFFLMSLSSLETPVXXA

SEQ ID NO: 24161 - protein, 34 aa, Artificial Sequence
  Non-cyclic GFR-binding peptide
  MOD_RES (31), (32): Xaa is C or S
KVVMNPYVKLIVNNSSDFFLVSLSSLKTPAXXAK

SEQ ID NO: 24162 - protein, 42 aa, Artificial Sequence
  Non-cyclic GFR-binding peptide
  MOD_RES (2), (36), (37): Xaa is C or S
  MOD_RES (14), (15), (16), (17), (18): Xaa is A or G
  MOD_RES (19), (20), (21), (22): Xaa is A or G or is absent
GXESVAMGPYVKLXXXXXXXXXFFLISLSSLKTPVXXAKSAK

SEQ ID NO: 24163 - protein, 37 aa, Artificial Sequence
  Non-cyclic GFR-binding peptide
  MOD_RES (35), (36): Xaa is C or S
  MOD_RES (13), (14), (15), (16), (17): Xaa is A or G
  MOD_RES (18), (19), (20), (21): Xaa is A or G or is absent
EAVSMGEPYVKLXXXXXXXXXFFLVSLSSLKTPVXXA

SEQ ID NO: 24164 - protein, 43 aa, Artificial Sequence
  Non-cyclic GFR-binding peptide
  MOD_RES (2), (4), (37), (38): Xaa is C or S
  MOD_RES (15), (16), (17), (18), (19): Xaa is A or G
  MOD_RES (20), (21), (22), (23): Xaa is A or G or is absent
SXKXSKVIMPYVKLXXXXXXXXXFFLISLSSLDQSVXXPSASA

SEQ ID NO: 24165 - protein, 36 aa, Artificial Sequence
  Non-cyclic GFR-binding peptide
  MOD_RES (2), (34), (35): Xaa is C or S
GXAEVVMDPYVKLVVNNAADFFLISLSSLRAPVXXS

SEQ ID NO: 24166 - protein, 41 aa, Artificial Sequence
  Non-cyclic GFR-binding peptide
  MOD_RES (1), (3), (37): Xaa is C or S
XEXKNHQLFPYVKLHQGQHPKIRFFLMSLSSEETPVXELGE

SEQ ID NO: 24167 - protein, 37 aa, Artificial Sequence
  Non-cyclic GFR-binding peptide
  MOD_RES (1), (35), (36): Xaa is C or S
  MOD_RES (13), (14), (15), (16), (17): Xaa is A or G
  MOD_RES (18), (19), (20), (21): Xaa is A or G or is absent
XESVAMGPYVKLXXXXXXXXXFFLISLSSLKTPVXXA

SEQ ID NO: 24168 - protein, 38 aa, Artificial Sequence
  Non-cyclic GFR-binding peptide
  MOD_RES (2), (35), (36): Xaa is C or S
  MOD_RES (13), (14), (15), (16), (17): Xaa is A or G
  MOD_RES (18), (19), (20), (21): Xaa is A or G or is absent
GXEEVIMPYVKLXXXXXXXXXFFLMSLSSTKVPAXXTS

SEQ ID NO: 24169 - protein, 43 aa, Artificial Sequence
  Non-cyclic GFR-binding peptide
  MOD_RES (2), (4), (38), (39): Xaa is C or S
  MOD_RES (16), (17), (18), (19), (20): Xaa is A or G
  MOD_RES (21), (22), (23), (24): Xaa is A or G or is absent
RXGXESVAMGPYVKLXXXXXXXXXFFLISLSSLKTPVXXAKSA

SEQ ID NO: 24170 - protein, 37 aa, Artificial Sequence
  Non-cyclic GFR-binding peptide
  MOD_RES (1), (3), (37): Xaa is C or S
  MOD_RES (15), (16), (17), (18), (19): Xaa is A or G
  MOD_RES (20), (21), (22), (23): Xaa is A or G or is absent
XGXESVAMGPYVKLXXXXXXXXXFFLISLSSLKTPVX

SEQ ID NO: 24171 - protein, 33 aa, Artificial Sequence
  Non-cyclic GFR-binding peptide
  MOD_RES (1), (32), (33): Xaa is C or S
XSKVVMPYVKLVKPTRGVFFLISLSSLDQPVXX

SEQ ID NO: 24172 - protein, 42 aa, Artificial Sequence
  Non-cyclic GFR-binding peptide
  MOD_RES (2), (4), (36), (37): Xaa is C or S
HXGXAKVVMNPYVKLIVNNSSDFFLVSLSSLKTPAXXAKPVA

SEQ ID NO: 24173 - protein, 40 aa, Artificial Sequence
  Non-cyclic GFR-binding peptide
  MOD_RES (2), (34): Xaa is C or S
GXSRVVMNPYVKLIVNSSDDFFLVSLSSLKTPAXTPKTVH

SEQ ID NO: 24174 - protein, 39 aa, Artificial Sequence
  Non-cyclic GFR-binding peptide
  MOD_RES (33), (34): Xaa is C or S
  MOD_RES (11), (12), (13), (14), (15): Xaa is A or G
  MOD_RES (16), (17), (18), (19): Xaa is A or G or is absent
SRVIMPYVKLXXXXXXXXXFFLISLSSLAQPVXXPAASA

SEQ ID NO: 24175 - protein, 36 aa, Artificial Sequence
  Non-cyclic GFR-binding peptide
  MOD_RES (1), (3), (35), (36): Xaa is C or S
XGXSEVVMDPYVKLVVNNASDFFLISLSSLRTPVXX

SEQ ID NO: 24176 - protein, 38 aa, Artificial Sequence
  Non-cyclic GFR-binding peptide
  MOD_RES (1), (33), (34): Xaa is C or S
XESVAMGPYVKLYTVVGKDFFLISLSSLKTPVXXAKSA

SEQ ID NO: 24177 - protein, 40 aa, Artificial Sequence
  Non-cyclic GFR-binding peptide
  MOD_RES (37), (37): Xaa is C or S
  MOD_RES (13), (14), (15), (16), (17): Xaa is A or G
  MOD_RES (18), (19), (20), (21): Xaa is A or G or is absent
ELHEELRPYVKLXXXXXXXXXFFLVSLSSHHVRSPQXKVS

SEQ ID NO: 24178 - protein, 40 aa, Artificial Sequence
  Non-cyclic GFR-binding peptide
  MOD_RES (2), (34), (35): Xaa is C or S
GXSEVVMDPYVKLVVNNASDFFLISLSSLRTPVXXTPPTS

SEQ ID NO: 24179 - protein, 37 aa, Artificial Sequence
  Non-cyclic GFR-binding peptide
  MOD_RES (2), (4): Xaa is C or S
  MOD_RES (16), (17), (18), (19), (20): Xaa is A or G
  MOD_RES (21), (22), (23), (24): Xaa is A or G or is absent
RXEXKNHQLFPYVKLXXXXXXXXXFFLMSLSSEETPV

SEQ ID NO: 24180 - protein, 41 aa, Artificial Sequence
  Non-cyclic GFR-binding peptide
  MOD_RES (1), (3), (40): Xaa is C or S
XAXELHEELRPYVKLLKPKKRVYEFFLVSLSSHHVRSPQXK

SEQ ID NO: 24181 - protein, 40 aa, Artificial Sequence
  Non-cyclic GFR-binding peptide
  MOD_RES (2), (34), (35): Xaa is C or S
GXGEVVMEPYVKLVVKDYEDFFLMSLSSLETPVXXAKPIS

SEQ ID NO: 24182 - protein, 37 aa, Artificial Sequence
  Non-cyclic GFR-binding peptide
  MOD_RES (33), (34): Xaa is C or S
  MOD_RES (11), (12), (13), (14), (15): Xaa is A or G
  MOD_RES (16), (17), (18), (19): Xaa is A or G or is absent
EEVIMPYVKLXXXXXXXXXFFLMSLSSTKVPAXXTSP

SEQ ID NO: 24183 - protein, 32 aa, Artificial Sequence
  Non-cyclic GFR-binding peptide
  MOD_RES (11), (12), (13), (14), (15): Xaa is A or G
  MOD_RES (16), (17), (18), (19): Xaa is A or G or is absent
DVVMGPYVKLXXXXXXXXXFFLMSLSSMKTPT

SEQ ID NO: 24184 - protein, 41 aa, Artificial Sequence
  Non-cyclic GFR-binding peptide
  MOD_RES (37), (37): Xaa is C or S
ELHEELRPYVKLLKPKKRVYEFFLVSLSSHHVRSPQXKVSS

SEQ ID NO: 24185 - protein, 43 aa, Artificial Sequence
  Non-cyclic GFR-binding peptide
  MOD_RES (1), (3), (37), (38): Xaa is C or S
  MOD_RES (15), (16), (17), (18), (19): Xaa is A or G
  MOD_RES (20), (21), (22), (23): Xaa is A or G or is absent
XGXSRVVMNPYVKLXXXXXXXXXFFLVSLSSLKTPAXXPKPVH

SEQ ID NO: 24186 - protein, 43 aa, Artificial Sequence
  Non-cyclic GFR-binding peptide
  MOD_RES (1), (3), (37), (38): Xaa is C or S
  MOD_RES (15), (16), (17), (18), (19): Xaa is A or G
  MOD_RES (20), (21), (22), (23): Xaa is A or G or is absent
XGXESVAMGPYVKLXXXXXXXXXFFLISLSSLKTPVXXAKSAK

SEQ ID NO: 24187 - protein, 44 aa, Artificial Sequence
  Non-cyclic GFR-binding peptide
  MOD_RES (2), (4), (41): Xaa is C or S
AXAXELHEELRPYVKLLKPKKRVYEFFLVSLSSHHVRSPQXKVS

SEQ ID NO: 24188 - protein, 37 aa, Artificial Sequence
  Non-cyclic GFR-binding peptide
  MOD_RES (1), (3), (37): Xaa is C or S
  MOD_RES (15), (16), (17), (18), (19): Xaa is A or G
  MOD_RES (20), (21), (22), (23): Xaa is A or G or is absent
XGXAEVVMDPYVKLXXXXXXXXXFFLISLSSLRAPVX

SEQ ID NO: 24189 - protein, 42 aa, Artificial Sequence
  Non-cyclic GFR-binding peptide
  MOD_RES (2), (4), (36), (37): Xaa is C or S
HXGXARVVMNPYVKLIVNSSDDFFLVSLSSLQTPAXXPKPVT

SEQ ID NO: 24190 - protein, 40 aa, Artificial Sequence
  Non-cyclic GFR-binding peptide
  MOD_RES (1), (3), (37): Xaa is C or S
  MOD_RES (15), (16), (17), (18), (19): Xaa is A or G
  MOD_RES (20), (21), (22), (23): Xaa is A or G or is absent
XGXSRVVMNPYVKLXXXXXXXXXFFLVSLSSLKTPAXTPK

SEQ ID NO: 24191 - protein, 40 aa, Artificial Sequence
  Non-cyclic GFR-binding peptide
  MOD_RES (2), (34), (35): Xaa is C or S
GXSRVVMNPYVKLIVNSSDDFFLVSLSSLKTPAXXPKPVH

SEQ ID NO: 24192 - protein, 40 aa, Artificial Sequence
  Non-cyclic GFR-binding peptide
  MOD_RES (2), (4), (35), (36): Xaa is C or S
SXKXSRVIMPYVKLVKPKRGVFFLISLSSLAQPVXXPAAS

SEQ ID NO: 24193 - protein, 37 aa, Artificial Sequence
  Non-cyclic GFR-binding peptide
  MOD_RES (2), (4), (36), (37): Xaa is C or S
RXGXESVAMGPYVKLYTVVGKDFFLISLSSLKTPVXX

SEQ ID NO: 24194 - protein, 37 aa, Artificial Sequence
  Non-cyclic GFR-binding peptide
  MOD_RES (36), (36): Xaa is C or S
LHEELRPYVKLLKPKKRVYEFFLVSLSSHHVRSPQXK

SEQ ID NO: 24195 - protein, 43 aa, Artificial Sequence
  Non-cyclic GFR-binding peptide
  MOD_RES (2), (4), (41): Xaa is C or S
  MOD_RES (17), (18), (19), (20), (21): Xaa is A or G
  MOD_RES (22), (23), (24), (25): Xaa is A or G or is absent
AXAXELHEELRPYVKLXXXXXXXXXFFLVSLSSHHVRSPQXKV

SEQ ID NO: 24196 - protein, 38 aa, Artificial Sequence
  Non-cyclic GFR-binding peptide
  MOD_RES (2), (4), (38): Xaa is C or S
  MOD_RES (16), (17), (18), (19), (20): Xaa is A or G
  MOD_RES (21), (22), (23), (24): Xaa is A or G or is absent
RXGXAEVVMDPYVKLXXXXXXXXXFFLISLSSLRAPVX

SEQ ID NO: 24197 - protein, 40 aa, Artificial Sequence
  Non-cyclic GFR-binding peptide
  MOD_RES (1), (34), (35): Xaa is C or S
  MOD_RES (12), (13), (14), (15), (16): Xaa is A or G
  MOD_RES (17), (18), (19), (20): Xaa is A or G or is absent
XSKVVMPYVKLXXXXXXXXXFFLISLSSLDQPVXXPSASA

SEQ ID NO: 24198 - protein, 37 aa, Artificial Sequence
  Non-cyclic GFR-binding peptide
  MOD_RES (1), (35), (36): Xaa is C or S
  MOD_RES (13), (14), (15), (16), (17): Xaa is A or G
  MOD_RES (18), (19), (20), (21): Xaa is A or G or is absent
XAKVVMNPYVKLXXXXXXXXXFFLVSLSSLKTPAXXA

SEQ ID NO: 24199 - protein, 34 aa, Artificial Sequence
  Non-cyclic GFR-binding peptide
  MOD_RES (32), (33): Xaa is C or S
AEVVMDPYVKLVVNNAADFFLISLSSLRAPVXXS

SEQ ID NO: 24200 - protein, 41 aa, Artificial Sequence
  Non-cyclic GFR-binding peptide
  MOD_RES (2), (4), (38), (39): Xaa is C or S
  MOD_RES (16), (17), (18), (19), (20): Xaa is A or G
  MOD_RES (21), (22), (23), (24): Xaa is A or G or is absent
SXGXRDVVMGPYVKLXXXXXXXXXFFLMSLSSMKTPTXXPG

SEQ ID NO: 24201 - protein, 37 aa, Artificial Sequence
  Non-cyclic GFR-binding peptide
  MOD_RES (1), (3), (35), (36): Xaa is C or S
XGXAKVVMNPYVKLIVNNSSDFFLVSLSSLKTPAXXA

SEQ ID NO: 24202 - protein, 35 aa, Artificial Sequence
  Non-cyclic GFR-binding peptide
ELHEELRPYVKLLKPKKRVYEFFLVSLSSHHVRSP

SEQ ID NO: 24203 - protein, 42 aa, Artificial Sequence
  Non-cyclic GFR-binding peptide
  MOD_RES (2), (4), (36), (37): Xaa is C or S
RXGXESVAMGPYVKLYTVVGKDFFLISLSSLKTPVXXAKSAK

SEQ ID NO: 24204 - protein, 38 aa, Artificial Sequence
  Non-cyclic GFR-binding peptide
  MOD_RES (2), (36), (37): Xaa is C or S
  MOD_RES (14), (15), (16), (17), (18): Xaa is A or G
  MOD_RES (19), (20), (21), (22): Xaa is A or G or is absent
GXESVAMGPYVKLXXXXXXXXXFFLISLSSLKTPVXXA

SEQ ID NO: 24205 - protein, 37 aa, Artificial Sequence
  Non-cyclic GFR-binding peptide
  MOD_RES (34), (34): Xaa is C or S
  MOD_RES (12), (13), (14), (15), (16): Xaa is A or G
  MOD_RES (17), (18), (19), (20): Xaa is A or G or is absent
SRVVMNPYVKLXXXXXXXXXFFLVSLSSLKTPAXTPK

SEQ ID NO: 24206 - protein, 39 aa, Artificial Sequence
  Non-cyclic GFR-binding peptide
  MOD_RES (1), (3), (37), (38): Xaa is C or S
  MOD_RES (15), (16), (17), (18), (19): Xaa is A or G
  MOD_RES (20), (21), (22), (23): Xaa is A or G or is absent
XGXSEVVMDPYVKLXXXXXXXXXFFLISLSSLRTPVXXT

SEQ ID NO: 24207 - protein, 37 aa, Artificial Sequence
  Non-cyclic GFR-binding peptide
  MOD_RES (1), (3), (37): Xaa is C or S
  MOD_RES (15), (16), (17), (18), (19): Xaa is A or G
  MOD_RES (20), (21), (22), (23): Xaa is A or G or is absent
XGXAKVVMNPYVKLXXXXXXXXXFFLVSLSSLKTPAX

SEQ ID NO: 24208 - protein, 37 aa, Artificial Sequence
  Non-cyclic GFR-binding peptide
  MOD_RES (32), (33): Xaa is C or S
SRVVMNPYVKLIVNSSDDFFLVSLSSLKTPAXXPKPV

SEQ ID NO: 24209 - protein, 39 aa, Artificial Sequence
  Non-cyclic GFR-binding peptide
  MOD_RES (1), (35): Xaa is C or S
  MOD_RES (13), (14), (15), (16), (17): Xaa is A or G
  MOD_RES (18), (19), (20), (21): Xaa is A or G or is absent
XKNHQLFPYVKLXXXXXXXXXFFLMSLSSEETPVXELGE

SEQ ID NO: 24210 - protein, 34 aa, Artificial Sequence
  Non-cyclic GFR-binding peptide
  MOD_RES (33), (34): Xaa is C or S
  MOD_RES (11), (12), (13), (14), (15): Xaa is A or G
  MOD_RES (16), (17), (18), (19): Xaa is A or G or is absent
EVVMEPYVKLXXXXXXXXXFFLMSLSSLETPVXX

SEQ ID NO: 24211 - protein, 39 aa, Artificial Sequence
  Non-cyclic GFR-binding peptide
  MOD_RES (2), (35), (36): Xaa is C or S
GXEAVSMGEPYVKLTPVGMDDFFLVSLSSLKTPVXXAKG

SEQ ID NO: 24212 - protein, 40 aa, Artificial Sequence
  Non-cyclic GFR-binding peptide
  MOD_RES (34), (34): Xaa is C or S
  MOD_RES (12), (13), (14), (15), (16): Xaa is A or G
  MOD_RES (17), (18), (19), (20): Xaa is A or G or is absent
KNHQLFPYVKLXXXXXXXXXFFLMSLSSEETPVXELGEDN

SEQ ID NO: 24213 - protein, 42 aa, Artificial Sequence
  Non-cyclic GFR-binding peptide
  MOD_RES (2), (39): Xaa is C or S
  MOD_RES (15), (16), (17), (18), (19): Xaa is A or G
  MOD_RES (20), (21), (22), (23): Xaa is A or G or is absent
AXELHEELRPYVKLXXXXXXXXXFFLVSLSSHHVRSPQXKVS

SEQ ID NO: 24214 - protein, 37 aa, Artificial Sequence
  Non-cyclic GFR-binding peptide
  MOD_RES (1), (3), (36), (37): Xaa is C or S
XGXEAVSMGEPYVKLTPVGMDDFFLVSLSSLKTPVXX

SEQ ID NO: 24215 - protein, 39 aa, Artificial Sequence
  Non-cyclic GFR-binding peptide
  MOD_RES (1), (36), (37): Xaa is C or S
  MOD_RES (14), (15), (16), (17), (18): Xaa is A or G
  MOD_RES (19), (20), (21), (22): Xaa is A or G or is absent
XEAVSMGEPYVKLXXXXXXXXXFFLVSLSSLKTPVXXAK

SEQ ID NO: 24216 - protein, 39 aa, Artificial Sequence
  Non-cyclic GFR-binding peptide
  MOD_RES (1), (3), (37), (38): Xaa is C or S
  MOD_RES (15), (16), (17), (18), (19): Xaa is A or G
  MOD_RES (20), (21), (22), (23): Xaa is A or G or is absent
XGXAEVVMDPYVKLXXXXXXXXXFFLISLSSLRAPVXXS

SEQ ID NO: 24217 - protein, 32 aa, Artificial Sequence
  Non-cyclic GFR-binding peptide
  MOD_RES (31), (32): Xaa is C or S
KVVMNPYVKLIVNNSSDFFLVSLSSLKTPAXX

SEQ ID NO: 24218 - protein, 34 aa, Artificial Sequence
  Non-cyclic GFR-binding peptide
  MOD_RES (33), (34): Xaa is C or S
  MOD_RES (11), (12), (13), (14), (15): Xaa is A or G
  MOD_RES (16), (17), (18), (19): Xaa is A or G or is absent
SKVVMPYVKLXXXXXXXXXFFLISLSSLDQPVXX

SEQ ID NO: 24219 - protein, 36 aa, Artificial Sequence
  Non-cyclic GFR-binding peptide
  MOD_RES (31), (32): Xaa is C or S
RVVMNPYVKLIVNSSDDFFLVSLSSLKTPAXXPKPV

SEQ ID NO: 24220 - protein, 35 aa, Artificial Sequence
  Non-cyclic GFR-binding peptide
  MOD_RES (2), (2): Xaa is C or S
  MOD_RES (14), (15), (16), (17), (18): Xaa is A or G
  MOD_RES (19), (20), (21), (22): Xaa is A or G or is absent
EXKNHQLFPYVKLXXXXXXXXXFFLMSLSSEETPV

SEQ ID NO: 24221 - protein, 39 aa, Artificial Sequence
  Non-cyclic GFR-binding peptide
  MOD_RES (2), (35), (36): Xaa is C or S
  MOD_RES (13), (14), (15), (16), (17): Xaa is A or G
  MOD_RES (18), (19), (20), (21): Xaa is A or G or is absent
KXSRVIMPYVKLXXXXXXXXXFFLISLSSLAQPVXXPAA

SEQ ID NO: 24222 - protein, 38 aa, Artificial Sequence
  Non-cyclic GFR-binding peptide
  MOD_RES (32), (33): Xaa is C or S
SEVVMDPYVKLVVNNASDFFLISLSSLRTPVXXTPPTS

SEQ ID NO: 24223 - protein, 35 aa, Artificial Sequence
  Non-cyclic GFR-binding peptide
  MOD_RES (33), (33): Xaa is C or S
  MOD_RES (11), (12), (13), (14), (15): Xaa is A or G
  MOD_RES (16), (17), (18), (19): Xaa is A or G or is absent
NHQLFPYVKLXXXXXXXXXFFLMSLSSEETPVXEL

SEQ ID NO: 24224 - protein, 39 aa, Artificial Sequence
  Non-cyclic GFR-binding peptide
  MOD_RES (33), (34): Xaa is C or S
  MOD_RES (11), (12), (13), (14), (15): Xaa is A or G
  MOD_RES (16), (17), (18), (19): Xaa is A or G or is absent
EVVMDPYVKLXXXXXXXXXFFLISLSSLRTPVXXTPPTS

SEQ ID NO: 24225 - protein, 43 aa, Artificial Sequence
  Non-cyclic GFR-binding peptide
  MOD_RES (2), (39): Xaa is C or S
  MOD_RES (15), (16), (17), (18), (19): Xaa is A or G
  MOD_RES (20), (21), (22), (23): Xaa is A or G or is absent
AXELHEELRPYVKLXXXXXXXXXFFLVSLSSHHVRSPQXKVSS

SEQ ID NO: 24226 - protein, 40 aa, Artificial Sequence
  Non-cyclic GFR-binding peptide
  MOD_RES (2), (4), (36), (37): Xaa is C or S
RXGXAEVVMDPYVKLVVNNAADFFLISLSSLRAPVXXSAP

SEQ ID NO: 24227 - protein, 44 aa, Artificial Sequence
  Non-cyclic GFR-binding peptide
  MOD_RES (2), (4), (38), (39): Xaa is C or S
  MOD_RES (16), (17), (18), (19), (20): Xaa is A or G
  MOD_RES (21), (22), (23), (24): Xaa is A or G or is absent
RXGXAEVVMDPYVKLXXXXXXXXXFFLISLSSLRAPVXXSAPAA

SEQ ID NO: 24228 - protein, 35 aa, Artificial Sequence
  Non-cyclic GFR-binding peptide
  MOD_RES (1), (33), (34): Xaa is C or S
XAEVVMDPYVKLVVNNAADFFLISLSSLRAPVXXS

SEQ ID NO: 24229 - protein, 37 aa, Artificial Sequence
  Non-cyclic GFR-binding peptide
  MOD_RES (1), (35): Xaa is C or S
  MOD_RES (13), (14), (15), (16), (17): Xaa is A or G
  MOD_RES (18), (19), (20), (21): Xaa is A or G or is absent
XSRVVMNPYVKLXXXXXXXXXFFLVSLSSLKTPAXTP

SEQ ID NO: 24230 - protein, 38 aa, Artificial Sequence
  Non-cyclic GFR-binding peptide
  MOD_RES (33), (33): Xaa is C or S
NHQLFPYVKLHQGQHPKIRFFLMSLSSEETPVXELGED

SEQ ID NO: 24231 - protein, 43 aa, Artificial Sequence
  Non-cyclic GFR-binding peptide
  MOD_RES (2), (4), (38), (39): Xaa is C or S
  MOD_RES (16), (17), (18), (19), (20): Xaa is A or G
  MOD_RES (21), (22), (23), (24): Xaa is A or G or is absent
HXGXAKVVMNPYVKLXXXXXXXXXFFLVSLSSLKTPAXXAKPV

SEQ ID NO: 24232 - protein, 40 aa, Artificial Sequence
  Non-cyclic GFR-binding peptide
  MOD_RES (1), (3), (35), (36): Xaa is C or S
XGXSRVVMNPYVKLIVNSSDDFFLVSLSSLKTPAXXPKPV

SEQ ID NO: 24233 - protein, 36 aa, Artificial Sequence
  Non-cyclic GFR-binding peptide
  MOD_RES (31), (32): Xaa is C or S
DVVMGPYVKLIIQQKDNFFLMSLSSMKTPTXXPGAS

SEQ ID NO: 24234 - protein, 31 aa, Artificial Sequence
  Non-cyclic GFR-binding peptide
  MOD_RES (31), (31): Xaa is C or S
RVVMNPYVKLIVNSSDDFFLVSLSSLQTPAX

SEQ ID NO: 24235 - protein, 37 aa, Artificial Sequence
  Non-cyclic GFR-binding peptide
  MOD_RES (2), (34), (35): Xaa is C or S
GXGEVVMEPYVKLVVKDYEDFFLMSLSSLETPVXXAK

SEQ ID NO: 24236 - protein, 39 aa, Artificial Sequence
  Non-cyclic GFR-binding peptide
  MOD_RES (1), (3), (35), (36): Xaa is C or S
XGXARVVMNPYVKLIVNSSDDFFLVSLSSLQTPAXXPKP

SEQ ID NO: 24237 - protein, 35 aa, Artificial Sequence
  Non-cyclic GFR-binding peptide
  MOD_RES (32), (33): Xaa is C or S
SRVVMNPYVKLIVNSSDDFFLVSLSSLKTPAXXPK

SEQ ID NO: 24238 - protein, 42 aa, Artificial Sequence
  Non-cyclic GFR-binding peptide
  MOD_RES (1), (3), (36), (37): Xaa is C or S
XGXEAVSMGEPYVKLTPVGMDDFFLVSLSSLKTPVXXAKGVK

SEQ ID NO: 24239 - protein, 33 aa, Artificial Sequence
  Non-cyclic GFR-binding peptide
  MOD_RES (33), (33): Xaa is C or S
  MOD_RES (11), (12), (13), (14), (15): Xaa is A or G
  MOD_RES (16), (17), (18), (19): Xaa is A or G or is absent
DVVMGPYVKLXXXXXXXXXFFLMSLSSMKTPTX

SEQ ID NO: 24240 - protein, 35 aa, Artificial Sequence
  Non-cyclic GFR-binding peptide
  MOD_RES (2), (34), (35): Xaa is C or S
GXSEVVMDPYVKLVVNNASDFFLISLSSLRTPVXX

SEQ ID NO: 24241 - protein, 36 aa, Artificial Sequence
  Non-cyclic GFR-binding peptide
  MOD_RES (34), (35): Xaa is C or S
  MOD_RES (12), (13), (14), (15), (16): Xaa is A or G
  MOD_RES (17), (18), (19), (20): Xaa is A or G or is absent
ARVVMNPYVKLXXXXXXXXXFFLVSLSSLQTPAXXP

SEQ ID NO: 24242 - protein, 38 aa, Artificial Sequence
  Non-cyclic GFR-binding peptide
  MOD_RES (32), (33): Xaa is C or S
ARVVMNPYVKLIVNSSDDFFLVSLSSLQTPAXXPKPVT

SEQ ID NO: 24243 - protein, 36 aa, Artificial Sequence
  Non-cyclic GFR-binding peptide
  MOD_RES (33), (34): Xaa is C or S
  MOD_RES (11), (12), (13), (14), (15): Xaa is A or G
  MOD_RES (16), (17), (18), (19): Xaa is A or G or is absent
EVVMDPYVKLXXXXXXXXXFFLISLSSLRAPVXXSA

SEQ ID NO: 24244 - protein, 33 aa, Artificial Sequence
  Non-cyclic GFR-binding peptide
  MOD_RES (31), (32): Xaa is C or S
RVVMNPYVKLIVNSSDDFFLVSLSSLQTPAXXP

SEQ ID NO: 24245 - protein, 39 aa, Artificial Sequence
  Non-cyclic GFR-binding peptide
  MOD_RES (2), (4), (38), (39): Xaa is C or S
  MOD_RES (16), (17), (18), (19), (20): Xaa is A or G
  MOD_RES (21), (22), (23), (24): Xaa is A or G or is absent
RXGXESVAMGPYVKLXXXXXXXXXFFLISLSSLKTPVXX

SEQ ID NO: 24246 - protein, 36 aa, Artificial Sequence
  Non-cyclic GFR-binding peptide
  MOD_RES (2), (4), (36): Xaa is C or S
HXGXARVVMNPYVKLIVNSSDDFFLVSLSSLQTPAX

SEQ ID NO: 24247 - protein, 34 aa, Artificial Sequence
  Non-cyclic GFR-binding peptide
  MOD_RES (34), (34): Xaa is C or S
  MOD_RES (12), (13), (14), (15), (16): Xaa is A or G
  MOD_RES (17), (18), (19), (20): Xaa is A or G or is absent
AEVVMDPYVKLXXXXXXXXXFFLISLSSLRAPVX

SEQ ID NO: 24248 - protein, 39 aa, Artificial Sequence
  Non-cyclic GFR-binding peptide
  MOD_RES (1), (33), (34): Xaa is C or S
XRDVVMGPYVKLIIQQKDNFFLMSLSSMKTPTXXPGASG

SEQ ID NO: 24249 - protein, 37 aa, Artificial Sequence
  Non-cyclic GFR-binding peptide
  MOD_RES (2), (34), (35): Xaa is C or S
GXAKVVMNPYVKLIVNNSSDFFLVSLSSLKTPAXXAK

SEQ ID NO: 24250 - protein, 40 aa, Artificial Sequence
  Non-cyclic GFR-binding peptide
  MOD_RES (2), (4), (38), (39): Xaa is C or S
  MOD_RES (16), (17), (18), (19), (20): Xaa is A or G
  MOD_RES (21), (22), (23), (24): Xaa is A or G or is absent
HXGXAKVVMNPYVKLXXXXXXXXXFFLVSLSSLKTPAXXA

SEQ ID NO: 24251 - protein, 36 aa, Artificial Sequence
  Non-cyclic GFR-binding peptide
  MOD_RES (2), (4), (36): Xaa is C or S
HXGXAKVVMNPYVKLIVNNSSDFFLVSLSSLKTPAX

SEQ ID NO: 24252 - protein, 39 aa, Artificial Sequence
  Non-cyclic GFR-binding peptide
  MOD_RES (2), (36): Xaa is C or S
  MOD_RES (14), (15), (16), (17), (18): Xaa is A or G
  MOD_RES (19), (20), (21), (22): Xaa is A or G or is absent
GXSRVVMNPYVKLXXXXXXXXXFFLVSLSSLKTPAXTPK

SEQ ID NO: 24253 - protein, 34 aa, Artificial Sequence
  Non-cyclic GFR-binding peptide
  MOD_RES (34), (34): Xaa is C or S
  MOD_RES (12), (13), (14), (15), (16): Xaa is A or G
  MOD_RES (17), (18), (19), (20): Xaa is A or G or is absent
GEVVMEPYVKLXXXXXXXXXFFLMSLSSLETPVX

SEQ ID NO: 24254 - protein, 38 aa, Artificial Sequence
  Non-cyclic GFR-binding peptide
  MOD_RES (34), (35): Xaa is C or S
  MOD_RES (12), (13), (14), (15), (16): Xaa is A or G
  MOD_RES (17), (18), (19), (20): Xaa is A or G or is absent
SEVVMDPYVKLXXXXXXXXXFFLISLSSLRTPVXXTPP

SEQ ID NO: 24255 - protein, 41 aa, Artificial Sequence
  Non-cyclic GFR-binding peptide
  MOD_RES (2), (4), (38): Xaa is C or S
RXEXKNHQLFPYVKLHQGQHPKIRFFLMSLSSEETPVXELG

SEQ ID NO: 24256 - protein, 38 aa, Artificial Sequence
  Non-cyclic GFR-binding peptide
  MOD_RES (1), (3), (35), (36): Xaa is C or S
XGXARVVMNPYVKLIVNSSDDFFLVSLSSLQTPAXXPK

SEQ ID NO: 24257 - protein, 37 aa, Artificial Sequence
  Non-cyclic GFR-binding peptide
  MOD_RES (32), (33): Xaa is C or S
GEVVMEPYVKLVVKDYEDFFLMSLSSLETPVXXAKPI

SEQ ID NO: 24258 - protein, 41 aa, Artificial Sequence
  Non-cyclic GFR-binding peptide
  MOD_RES (1), (3), (35), (36): Xaa is C or S
XGXARVVMNPYVKLIVNSSDDFFLVSLSSLQTPAXXPKPVT

SEQ ID NO: 24259 - protein, 34 aa, Artificial Sequence
  Non-cyclic GFR-binding peptide
  MOD_RES (33), (34): Xaa is C or S
  MOD_RES (11), (12), (13), (14), (15): Xaa is A or G
  MOD_RES (16), (17), (18), (19): Xaa is A or G or is absent
SRVIMPYVKLXXXXXXXXXFFLISLSSLAQPVXX

SEQ ID NO: 24260 - protein, 44 aa, Artificial Sequence
  Non-cyclic GFR-binding peptide
  MOD_RES (2), (4), (38): Xaa is C or S
RXEXKNHQLFPYVKLHQGQHPKIRFFLMSLSSEETPVXELGEDN

SEQ ID NO: 24261 - protein, 35 aa, Artificial Sequence
  Non-cyclic GFR-binding peptide
  MOD_RES (1), (34), (35): Xaa is C or S
  MOD_RES (12), (13), (14), (15), (16): Xaa is A or G
  MOD_RES (17), (18), (19), (20): Xaa is A or G or is absent
XSKVVMPYVKLXXXXXXXXXFFLISLSSLDQPVXX

SEQ ID NO: 24262 - protein, 39 aa, Artificial Sequence
  Non-cyclic GFR-binding peptide
  MOD_RES (2), (35), (36): Xaa is C or S
  MOD_RES (13), (14), (15), (16), (17): Xaa is A or G
  MOD_RES (18), (19), (20), (21): Xaa is A or G or is absent
KXSKVVMPYVKLXXXXXXXXXFFLISLSSLDQPVXXPSA

SEQ ID NO: 24263 - protein, 42 aa, Artificial Sequence
  Non-cyclic GFR-binding peptide
  MOD_RES (2), (4), (38), (39): Xaa is C or S
  MOD_RES (16), (17), (18), (19), (20): Xaa is A or G
  MOD_RES (21), (22), (23), (24): Xaa is A or G or is absent
RXGXAEVVMDPYVKLXXXXXXXXXFFLISLSSLRAPVXXSAP

SEQ ID NO: 24264 - protein, 35 aa, Artificial Sequence
  Non-cyclic GFR-binding peptide
  MOD_RES (34), (35): Xaa is C or S
  MOD_RES (12), (13), (14), (15), (16): Xaa is A or G
  MOD_RES (17), (18), (19), (20): Xaa is A or G or is absent
GEVVMEPYVKLXXXXXXXXXFFLMSLSSLETPVXX

SEQ ID NO: 24265 - protein, 35 aa, Artificial Sequence
  Non-cyclic GFR-binding peptide
  MOD_RES (2), (34), (35): Xaa is C or S
GXRDVVMGPYVKLIIQQKDNFFLMSLSSMKTPTXX

SEQ ID NO: 24266 - protein, 37 aa, Artificial Sequence
  Non-cyclic GFR-binding peptide
  MOD_RES (2), (33), (34): Xaa is C or S
KXSKVIMPYVKLIKPTKGIFFLISLSSLDQSVXXPSA

SEQ ID NO: 24267 - protein, 40 aa, Artificial Sequence
  Non-cyclic GFR-binding peptide
  MOD_RES (1), (34), (35): Xaa is C or S
  MOD_RES (12), (13), (14), (15), (16): Xaa is A or G
  MOD_RES (17), (18), (19), (20): Xaa is A or G or is absent
XSRVIMPYVKLXXXXXXXXXFFLISLSSLAQPVXXPAASA

SEQ ID NO: 24268 - protein, 33 aa, Artificial Sequence
  Non-cyclic GFR-binding peptide
  MOD_RES (33), (33): Xaa is C or S
EAVSMGEPYVKLTPVGMDDFFLVSLSSLKTPVX

SEQ ID NO: 24269 - protein, 35 aa, Artificial Sequence
  Non-cyclic GFR-binding peptide
  MOD_RES (33), (34): Xaa is C or S
  MOD_RES (11), (12), (13), (14), (15): Xaa is A or G
  MOD_RES (16), (17), (18), (19): Xaa is A or G or is absent
EVVMEPYVKLXXXXXXXXXFFLMSLSSLETPVXXA

SEQ ID NO: 24270 - protein, 39 aa, Artificial Sequence
  Non-cyclic GFR-binding peptide
  MOD_RES (2), (39): Xaa is C or S
AXELHEELRPYVKLLKPKKRVYEFFLVSLSSHHVRSPQX

SEQ ID NO: 24271 - protein, 35 aa, Artificial Sequence
  Non-cyclic GFR-binding peptide
  MOD_RES (32), (33): Xaa is C or S
ARVVMNPYVKLIVNSSDDFFLVSLSSLQTPAXXPK

SEQ ID NO: 24272 - protein, 38 aa, Artificial Sequence
  Non-cyclic GFR-binding peptide
  MOD_RES (33), (33): Xaa is C or S
  MOD_RES (11), (12), (13), (14), (15): Xaa is A or G
  MOD_RES (16), (17), (18), (19): Xaa is A or G or is absent
RVVMNPYVKLXXXXXXXXXFFLVSLSSLKTPAXTPKTV

SEQ ID NO: 24273 - protein, 35 aa, Artificial Sequence
  Non-cyclic GFR-binding peptide
  MOD_RES (1), (33), (34): Xaa is C or S
XSEVVMDPYVKLVVNNASDFFLISLSSLRTPVXXT

SEQ ID NO: 24274 - protein, 40 aa, Artificial Sequence
  Non-cyclic GFR-binding peptide
  MOD_RES (1), (3), (37), (38): Xaa is C or S
  MOD_RES (15), (16), (17), (18), (19): Xaa is A or G
  MOD_RES (20), (21), (22), (23): Xaa is A or G or is absent
XGXAEVVMDPYVKLXXXXXXXXXFFLISLSSLRAPVXXSA

SEQ ID NO: 24275 - protein, 32 aa, Artificial Sequence
  Non-cyclic GFR-binding peptide
  MOD_RES (1), (32): Xaa is C or S
XEEVIMPYVKLLLVRGNDFFLMSLSSTKVPAX

SEQ ID NO: 24276 - protein, 37 aa, Artificial Sequence
  Non-cyclic GFR-binding peptide
  MOD_RES (2), (4): Xaa is C or S
RXEXKNHQLFPYVKLHQGQHPKIRFFLMSLSSEETPV

SEQ ID NO: 24277 - protein, 31 aa, Artificial Sequence
  Non-cyclic GFR-binding peptide
  MOD_RES (1), (1): Xaa is C or S
XEEVIMPYVKLLLVRGNDFFLMSLSSTKVPA

SEQ ID NO: 24278 - protein, 40 aa, Artificial Sequence
  Non-cyclic GFR-binding peptide
  MOD_RES (1), (35), (36): Xaa is C or S
  MOD_RES (13), (14), (15), (16), (17): Xaa is A or G
  MOD_RES (18), (19), (20), (21): Xaa is A or G or is absent
XESVAMGPYVKLXXXXXXXXXFFLISLSSLKTPVXXAKSA

SEQ ID NO: 24279 - protein, 33 aa, Artificial Sequence
  Non-cyclic GFR-binding peptide
  MOD_RES (1), (32), (33): Xaa is C or S
XSKVIMPYVKLIKPTKGIFFLISLSSLDQSVXX

SEQ ID NO: 24280 - protein, 37 aa, Artificial Sequence
  Non-cyclic GFR-binding peptide
  MOD_RES (2), (4), (35), (36): Xaa is C or S
SXKXSRVIMPYVKLVKPKRGVFFLISLSSLAQPVXXP

SEQ ID NO: 24281 - protein, 36 aa, Artificial Sequence
  Non-cyclic GFR-binding peptide
  MOD_RES (1), (3), (36): Xaa is C or S
  MOD_RES (14), (15), (16), (17), (18): Xaa is A or G
  MOD_RES (19), (20), (21), (22): Xaa is A or G or is absent
XKXSRVIMPYVKLXXXXXXXXXFFLISLSSLAQPVX

SEQ ID NO: 24282 - protein, 35 aa, Artificial Sequence
  Non-cyclic GFR-binding peptide
  MOD_RES (32), (33): Xaa is C or S
AEVVMDPYVKLVVNNAADFFLISLSSLRAPVXXSA

SEQ ID NO: 24283 - protein, 38 aa, Artificial Sequence
  Non-cyclic GFR-binding peptide
  MOD_RES (32), (33): Xaa is C or S
SRVVMNPYVKLIVNSSDDFFLVSLSSLKTPAXXPKPVH

SEQ ID NO: 24284 - protein, 41 aa, Artificial Sequence
  Non-cyclic GFR-binding peptide
  MOD_RES (1), (3), (37), (38): Xaa is C or S
  MOD_RES (15), (16), (17), (18), (19): Xaa is A or G
  MOD_RES (20), (21), (22), (23): Xaa is A or G or is absent
XGXARVVMNPYVKLXXXXXXXXXFFLVSLSSLQTPAXXPKP

SEQ ID NO: 24285 - protein, 42 aa, Artificial Sequence
  Non-cyclic GFR-binding peptide
  MOD_RES (2), (4), (36), (37): Xaa is C or S
HXGXSRVVMNPYVKLIVNSSDDFFLVSLSSLKTPAXXPKPVY

SEQ ID NO: 24286 - protein, 35 aa, Artificial Sequence
  Non-cyclic GFR-binding peptide
  MOD_RES (33), (33): Xaa is C or S
NHQLFPYVKLHQGQHPKIRFFLMSLSSEETPVXEL

SEQ ID NO: 24287 - protein, 40 aa, Artificial Sequence
  Non-cyclic GFR-binding peptide
  MOD_RES (2), (4), (36), (37): Xaa is C or S
HXGXSRVVMNPYVKLIVNSSDDFFLVSLSSLKTPAXXPKP

SEQ ID NO: 24288 - protein, 39 aa, Artificial Sequence
  Non-cyclic GFR-binding peptide
  MOD_RES (2), (4): Xaa is C or S
  MOD_RES (17), (18), (19), (20), (21): Xaa is A or G
  MOD_RES (22), (23), (24), (25): Xaa is A or G or is absent
AXAXELHEELRPYVKLXXXXXXXXXFFLVSLSSHHVRSP

SEQ ID NO: 24289 - protein, 39 aa, Artificial Sequence
  Non-cyclic GFR-binding peptide
  MOD_RES (1), (34), (35): Xaa is C or S
  MOD_RES (12), (13), (14), (15), (16): Xaa is A or G
  MOD_RES (17), (18), (19), (20): Xaa is A or G or is absent
XEEVIMPYVKLXXXXXXXXXFFLMSLSSTKVPAXXTSPV

SEQ ID NO: 24290 - protein, 40 aa, Artificial Sequence
  Non-cyclic GFR-binding peptide
  MOD_RES (2), (4), (37), (38): Xaa is C or S
  MOD_RES (15), (16), (17), (18), (19): Xaa is A or G
  MOD_RES (20), (21), (22), (23): Xaa is A or G or is absent
SXKXSRVIMPYVKLXXXXXXXXXFFLISLSSLAQPVXXPA

SEQ ID NO: 24291 - protein, 34 aa, Artificial Sequence
  Non-cyclic GFR-binding peptide
  MOD_RES (1), (32), (33): Xaa is C or S
XSRVIMPYVKLVKPKRGVFFLISLSSLAQPVXXP

SEQ ID NO: 24292 - protein, 38 aa, Artificial Sequence
  Non-cyclic GFR-binding peptide
  MOD_RES (2), (4), (37), (38): Xaa is C or S
  MOD_RES (15), (16), (17), (18), (19): Xaa is A or G
  MOD_RES (20), (21), (22), (23): Xaa is A or G or is absent
SXKXSRVIMPYVKLXXXXXXXXXFFLISLSSLAQPVXX

SEQ ID NO: 24293 - protein, 35 aa, Artificial Sequence
  Non-cyclic GFR-binding peptide
  MOD_RES (32), (33): Xaa is C or S
ESVAMGPYVKLYTVVGKDFFLISLSSLKTPVXXAK

SEQ ID NO: 24294 - protein, 39 aa, Artificial Sequence
  Non-cyclic GFR-binding peptide
  MOD_RES (33), (33): Xaa is C or S
  MOD_RES (11), (12), (13), (14), (15): Xaa is A or G
  MOD_RES (16), (17), (18), (19): Xaa is A or G or is absent
NHQLFPYVKLXXXXXXXXXFFLMSLSSEETPVXELGEDN

SEQ ID NO: 24295 - protein, 38 aa, Artificial Sequence
  Non-cyclic GFR-binding peptide
  MOD_RES (1), (3), (36), (37): Xaa is C or S
  MOD_RES (14), (15), (16), (17), (18): Xaa is A or G
  MOD_RES (19), (20), (21), (22): Xaa is A or G or is absent
XKXSRVIMPYVKLXXXXXXXXXFFLISLSSLAQPVXXP

SEQ ID NO: 24296 - protein, 40 aa, Artificial Sequence
  Non-cyclic GFR-binding peptide
  MOD_RES (1), (3), (37): Xaa is C or S
XEXKNHQLFPYVKLHQGQHPKIRFFLMSLSSEETPVXELG

SEQ ID NO: 24297 - protein, 40 aa, Artificial Sequence
  Non-cyclic GFR-binding peptide
  MOD_RES (4), (5), (38), (40): Xaa is C or S
GKAXXVPTKLSSLSVLFFDDMGVPTLKVYPEGMSVAEXGX

SEQ ID NO: 24298 - protein, 33 aa, Artificial Sequence
  Non-cyclic GFR-binding peptide
  MOD_RES (14), (15), (16), (17), (18): Xaa is A or G
  MOD_RES (19), (20), (21), (22): Xaa is A or G or is absent
VPTELSSLSMLFFXXXXXXXXXLKVYPEMVVEG

SEQ ID NO: 24299 - protein, 38 aa, Artificial Sequence
  Non-cyclic GFR-binding peptide
  MOD_RES (3), (4), (35), (37): Xaa is C or S
SPXXVPQDLSSLSILFFVGRTPKVLKVYPMVVKSXKXS

SEQ ID NO: 24300 - protein, 41 aa, Artificial Sequence
  Non-cyclic GFR-binding peptide
  MOD_RES (6), (7), (39), (41): Xaa is C or S
YVPKPXXAPTKLSSLSVLFFDDSSNVILKVYPNMVVRSXGX

SEQ ID NO: 24301 - protein, 43 aa, Artificial Sequence
  Non-cyclic GFR-binding peptide
  MOD_RES (5), (6), (40), (42): Xaa is C or S
  MOD_RES (20), (21), (22), (23), (24): Xaa is A or G
  MOD_RES (25), (26), (27), (28): Xaa is A or G or is absent
APASXXVPARLSSLSILFFXXXXXXXXXLKVYPDMVVEAXGXR

SEQ ID NO: 24302 - protein, 32 aa, Artificial Sequence
  Non-cyclic GFR-binding peptide
  MOD_RES (32), (32): Xaa is C or S
APTKLSSLSVLFFDSSNNVILKVYPNMVVKAX

SEQ ID NO: 24303 - protein, 37 aa, Artificial Sequence
  Non-cyclic GFR-binding peptide
  MOD_RES (3), (4), (35), (37): Xaa is C or S
SPXXVPQDLSSLSILFFVGRTPKVLKVYPMVVKSXKX

SEQ ID NO: 24304 - protein, 31 aa, Artificial Sequence
  Non-cyclic GFR-binding peptide
  MOD_RES (1), (1): Xaa is C or S
XAPTKLSSLSVLFFDSSNNVILKVYPNMVVK

SEQ ID NO: 24305 - protein, 35 aa, Artificial Sequence
  Non-cyclic GFR-binding peptide
  MOD_RES (34), (34): Xaa is C or S
  MOD_RES (14), (15), (16), (17), (18): Xaa is A or G
  MOD_RES (19), (20), (21), (22): Xaa is A or G or is absent
TPTKMSSLSMLFFXXXXXXXXXLKVYPGMVVDRXG

SEQ ID NO: 24306 - protein, 40 aa, Artificial Sequence
  Non-cyclic GFR-binding peptide
  MOD_RES (6), (40): Xaa is C or S
  MOD_RES (20), (21), (22), (23), (24): Xaa is A or G
  MOD_RES (25), (26), (27), (28): Xaa is A or G or is absent
DEGLEXVPTEESSLSMLFFXXXXXXXXXLKVYPFLQHNKX

SEQ ID NO: 24307 - protein, 34 aa, Artificial Sequence
  Non-cyclic GFR-binding peptide
  MOD_RES (1), (2): Xaa is C or S
  MOD_RES (16), (17), (18), (19), (20): Xaa is A or G
  MOD_RES (21), (22), (23), (24): Xaa is A or G or is absent
XXVSQDLSSLSILFFXXXXXXXXXLKVYPMIVKS

SEQ ID NO: 24308 - protein, 32 aa, Artificial Sequence
  Non-cyclic GFR-binding peptide
  MOD_RES (32), (32): Xaa is C or S
VPTELSSLSMLFFDEYDKVVLKVYPEMVVEGX

SEQ ID NO: 24309 - protein, 34 aa, Artificial Sequence
  Non-cyclic GFR-binding peptide
  MOD_RES (1), (2), (34): Xaa is C or S
XXVPARLSSLSILFFDAANNVVLKVYPDMVVEAX

SEQ ID NO: 24310 - protein, 40 aa, Artificial Sequence
  Non-cyclic GFR-binding peptide
  MOD_RES (5), (39): Xaa is C or S
  MOD_RES (19), (20), (21), (22), (23): Xaa is A or G
  MOD_RES (24), (25), (26), (27): Xaa is A or G or is absent
TKPTXAPTKLSSLSVLFFXXXXXXXXXLKVYPNMVVRSXG

SEQ ID NO: 24311 - protein, 33 aa, Artificial Sequence
  Non-cyclic GFR-binding peptide
  MOD_RES (1), (32): Xaa is C or S
XVSQDLSSLSILFFIGKTPKILKVYPMIVKSXK

SEQ ID NO: 24312 - protein, 34 aa, Artificial Sequence
  Non-cyclic GFR-binding peptide
  MOD_RES (34), (34): Xaa is C or S
  MOD_RES (14), (15), (16), (17), (18): Xaa is A or G
  MOD_RES (19), (20), (21), (22): Xaa is A or G or is absent
VPTELSSLSMLFFXXXXXXXXXLKVYPEMVVEGX

SEQ ID NO: 24313 - protein, 41 aa, Artificial Sequence
  Non-cyclic GFR-binding peptide
  MOD_RES (4), (5), (38), (40): Xaa is C or S
GKAXXVPTKLSSLSVLFFDDMGVPTLKVYPEGMSVAEXGXR

SEQ ID NO: 24314 - protein, 36 aa, Artificial Sequence
  Non-cyclic GFR-binding peptide
  MOD_RES (2), (3), (36): Xaa is C or S
AXXVPTKLSSLSVLFFDDMGVPTLKVYPEGMSVAEX

SEQ ID NO: 24315 - protein, 40 aa, Artificial Sequence
  Non-cyclic GFR-binding peptide
  MOD_RES (37), (39): Xaa is C or S
QPSRVHHSSLSVLFFEYVRKKPKLLKVYPRLEEHLEXAXA

SEQ ID NO: 24316 - protein, 41 aa, Artificial Sequence
  Non-cyclic GFR-binding peptide
  MOD_RES (5), (6), (39), (41): Xaa is C or S
  MOD_RES (20), (21), (22), (23), (24): Xaa is A or G
  MOD_RES (25), (26), (27), (28): Xaa is A or G or is absent
SAAPXXVPQALSSLSILFFXXXXXXXXXLKVYPMIVRSXKX

SEQ ID NO: 24317 - protein, 36 aa, Artificial Sequence
  Non-cyclic GFR-binding peptide
  MOD_RES (1), (35): Xaa is C or S
XVPTEESSLSMLFFRIKPHQGQHLKVYPFLQHNKXE

SEQ ID NO: 24318 - protein, 38 aa, Artificial Sequence
  Non-cyclic GFR-binding peptide
  MOD_RES (6), (38): Xaa is C or S
VTKPTXAPTKLSSLSVLFFDDSSNVILKVYPNMVVRSX

SEQ ID NO: 24319 - protein, 36 aa, Artificial Sequence
  Non-cyclic GFR-binding peptide
  MOD_RES (4), (5): Xaa is C or S
PKPXXAPTQLSSLSVLFFDDSSNVILKVYPNMVVRA

SEQ ID NO: 24320 - protein, 39 aa, Artificial Sequence
  Non-cyclic GFR-binding peptide
  MOD_RES (2), (3), (37), (39): Xaa is C or S
  MOD_RES (17), (18), (19), (20), (21): Xaa is A or G
  MOD_RES (22), (23), (24), (25): Xaa is A or G or is absent
AXXAPTKLSSLSVLFFXXXXXXXXXLKVYPNMVVKAXGX

SEQ ID NO: 24321 - protein, 35 aa, Artificial Sequence
  Non-cyclic GFR-binding peptide
  MOD_RES (1), (2): Xaa is C or S
  MOD_RES (16), (17), (18), (19), (20): Xaa is A or G
  MOD_RES (21), (22), (23), (24): Xaa is A or G or is absent
XXVPARLSSLSILFFXXXXXXXXXLKVYPDMVVEA

SEQ ID NO: 24322 - protein, 39 aa, Artificial Sequence
  Non-cyclic GFR-binding peptide
  MOD_RES (1), (2), (36), (38): Xaa is C or S
  MOD_RES (16), (17), (18), (19), (20): Xaa is A or G
  MOD_RES (21), (22), (23), (24): Xaa is A or G or is absent
XXAPTQLSSLSVLFFXXXXXXXXXLKVYPNMVVRAXGXH

SEQ ID NO: 24323 - protein, 34 aa, Artificial Sequence
  Non-cyclic GFR-binding peptide
  MOD_RES (33), (33): Xaa is C or S
  MOD_RES (14), (15), (16), (17), (18): Xaa is A or G
  MOD_RES (19), (20), (21), (22): Xaa is A or G or is absent
VPQDLSSLSILFFXXXXXXXXXLKVYPMVVKSXK

SEQ ID NO: 24324 - protein, 41 aa, Artificial Sequence
  Non-cyclic GFR-binding peptide
  MOD_RES (5), (6), (38), (40): Xaa is C or S
VPKAXXAPTKLSSLSVLFFDSSNNVILKVYPNMVVKAXGXH

SEQ ID NO: 24325 - protein, 39 aa, Artificial Sequence
  Non-cyclic GFR-binding peptide
  MOD_RES (2), (3), (37), (39): Xaa is C or S
  MOD_RES (17), (18), (19), (20), (21): Xaa is A or G
  MOD_RES (22), (23), (24), (25): Xaa is A or G or is absent
PXXTPTKMSSLSMLFFXXXXXXXXXLKVYPGMVVDRXGX

SEQ ID NO: 24326 - protein, 40 aa, Artificial Sequence
  Non-cyclic GFR-binding peptide
  MOD_RES (6), (7): Xaa is C or S
  MOD_RES (21), (22), (23), (24), (25): Xaa is A or G
  MOD_RES (26), (27), (28), (29): Xaa is A or G or is absent
STPPTXXVPTRLSSLSILFFXXXXXXXXXLKVYPDMVVES

SEQ ID NO: 24327 - protein, 39 aa, Artificial Sequence
  Non-cyclic GFR-binding peptide
  MOD_RES (5), (6), (37), (39): Xaa is C or S
VPSTXXAPVKTSSLSMLFFDNGRVLLLKVYPMIVEEXGX

SEQ ID NO: 24328 - protein, 33 aa, Artificial Sequence
  Non-cyclic GFR-binding peptide
  MOD_RES (1), (33): Xaa is C or S
XVPTRLSSLSILFFDSANNVVLKVYPDMVVESX

SEQ ID NO: 24329 - protein, 33 aa, Artificial Sequence
  Non-cyclic GFR-binding peptide
  MOD_RES (2), (3): Xaa is C or S
SXXVPARLSSLSILFFDAANNVVLKVYPDMVVE

SEQ ID NO: 24330 - protein, 40 aa, Artificial Sequence
  Non-cyclic GFR-binding peptide
  MOD_RES (4), (5), (37), (39): Xaa is C or S
PKPXXAPTQLSSLSVLFFDDSSNVILKVYPNMVVRAXGXH

SEQ ID NO: 24331 - protein, 44 aa, Artificial Sequence
  Non-cyclic GFR-binding peptide
  MOD_RES (6), (7), (41), (43): Xaa is C or S
  MOD_RES (21), (22), (23), (24), (25): Xaa is A or G
  MOD_RES (26), (27), (28), (29): Xaa is A or G or is absent
KASKAXXVPTKLSSLSILFFXXXXXXXXXLKVYPGMAVSEXGXR

SEQ ID NO: 24332 - protein, 40 aa, Artificial Sequence
  Non-cyclic GFR-binding peptide
  MOD_RES (6), (7), (38), (40): Xaa is C or S
RVPSTXXAPVKTSSLSMLFFDNGRVLLLKVYPMIVEEXGX

SEQ ID NO: 24333 - protein, 36 aa, Artificial Sequence
  Non-cyclic GFR-binding peptide
  MOD_RES (5), (6): Xaa is C or S
ASKAXXVPTKLSSLSILFFDKGVVTYLKVYPGMAVS

SEQ ID NO: 24334 - protein, 34 aa, Artificial Sequence
  Non-cyclic GFR-binding peptide
  MOD_RES (2), (3): Xaa is C or S
PXXTPTKMSSLSMLFFNDKQQIILKVYPGMVVDR

SEQ ID NO: 24335 - protein, 37 aa, Artificial Sequence
  Non-cyclic GFR-binding peptide
  MOD_RES (1), (35), (37): Xaa is C or S
  MOD_RES (15), (16), (17), (18), (19): Xaa is A or G
  MOD_RES (20), (21), (22), (23): Xaa is A or G or is absent
XAPTQLSSLSVLFFXXXXXXXXXLKVYPNMVVRAXGX

SEQ ID NO: 24336 - protein, 36 aa, Artificial Sequence
  Non-cyclic GFR-binding peptide
  MOD_RES (1), (1): Xaa is C or S
  MOD_RES (17), (18), (19), (20), (21): Xaa is A or G
  MOD_RES (22), (23), (24), (25): Xaa is A or G or is absent
XQPSRVHHSSLSVLFFXXXXXXXXXLKVYPRLEEHL

SEQ ID NO: 24337 - protein, 38 aa, Artificial Sequence
  Non-cyclic GFR-binding peptide
  MOD_RES (1), (35), (37): Xaa is C or S
  MOD_RES (15), (16), (17), (18), (19): Xaa is A or G
  MOD_RES (20), (21), (22), (23): Xaa is A or G or is absent
XAPTKLSSLSVLFFXXXXXXXXXLKVYPNMVVKAXGXH

SEQ ID NO: 24338 - protein, 38 aa, Artificial Sequence
  Non-cyclic GFR-binding peptide
  MOD_RES (36), (38): Xaa is C or S
  MOD_RES (15), (16), (17), (18), (19): Xaa is A or G
  MOD_RES (20), (21), (22), (23): Xaa is A or G or is absent
PSRVHHSSLSVLFFXXXXXXXXXLKVYPRLEEHLEXAX

SEQ ID NO: 24339 - protein, 34 aa, Artificial Sequence
  Non-cyclic GFR-binding peptide
  MOD_RES (1), (33): Xaa is C or S
XVPARLSSLSILFFDAANNVVLKVYPDMVVEAXG

SEQ ID NO: 24340 - protein, 39 aa, Artificial Sequence
  Non-cyclic GFR-binding peptide
  MOD_RES (4), (5), (39): Xaa is C or S
  MOD_RES (19), (20), (21), (22), (23): Xaa is A or G
  MOD_RES (24), (25), (26), (27): Xaa is A or G or is absent
AGPXXTPTKMSSLSMLFFXXXXXXXXXLKVYPGMVVDRX

SEQ ID NO: 24341 - protein, 34 aa, Artificial Sequence
  Non-cyclic GFR-binding peptide
  MOD_RES (4), (4): Xaa is C or S
KPTXAPTKLSSLSVLFFDDSSNVILKVYPNMVVR

SEQ ID NO: 24342 - protein, 45 aa, Artificial Sequence
  Non-cyclic GFR-binding peptide
  MOD_RES (5), (42), (44): Xaa is C or S
  MOD_RES (21), (22), (23), (24), (25): Xaa is A or G
  MOD_RES (26), (27), (28), (29): Xaa is A or G or is absent
SSVKXQPSRVHHSSLSVLFFXXXXXXXXXLKVYPRLEEHLEXAXA

SEQ ID NO: 24343 - protein, 33 aa, Artificial Sequence
  Non-cyclic GFR-binding peptide
  MOD_RES (1), (2): Xaa is C or S
XXVPARLSSLSILFFDAANNVVLKVYPDMVVEA

SEQ ID NO: 24344 - protein, 34 aa, Artificial Sequence
  Non-cyclic GFR-binding peptide
  MOD_RES (3), (3): Xaa is C or S
PTXAPTKLSSLSVLFFDDSSNVILKVYPNMVVRS

SEQ ID NO: 24345 - protein, 34 aa, Artificial Sequence
  Non-cyclic GFR-binding peptide
  MOD_RES (32), (34): Xaa is C or S
VPTKLSSLSILFFDKGVVTYLKVYPGMAVSEXGX

SEQ ID NO: 24346 - protein, 33 aa, Artificial Sequence
  Non-cyclic GFR-binding peptide
  MOD_RES (32), (32): Xaa is C or S
APTQLSSLSVLFFDDSSNVILKVYPNMVVRAXG

SEQ ID NO: 24347 - protein, 41 aa, Artificial Sequence
  Non-cyclic GFR-binding peptide
  MOD_RES (5), (6), (40): Xaa is C or S
  MOD_RES (20), (21), (22), (23), (24): Xaa is A or G
  MOD_RES (25), (26), (27), (28): Xaa is A or G or is absent
VPKPXXAPTQLSSLSVLFFXXXXXXXXXLKVYPNMVVRAXG

SEQ ID NO: 24348 - protein, 36 aa, Artificial Sequence
  Non-cyclic GFR-binding peptide
  MOD_RES (1), (35): Xaa is C or S
  MOD_RES (15), (16), (17), (18), (19): Xaa is A or G
  MOD_RES (20), (21), (22), (23): Xaa is A or G or is absent
XAPTKLSSLSVLFFXXXXXXXXXLKVYPNMVVRSXG

SEQ ID NO: 24349 - protein, 32 aa, Artificial Sequence
  Non-cyclic GFR-binding peptide
  MOD_RES (1), (1): Xaa is C or S
XTPTKMSSLSMLFFNDKQQIILKVYPGMVVDR

SEQ ID NO: 24350 - protein, 38 aa, Artificial Sequence
  Non-cyclic GFR-binding peptide
  MOD_RES (6), (7): Xaa is C or S
KASKAXXVPTKLSSLSILFFDKGVVTYLKVYPGMAVSE

SEQ ID NO: 24351 - protein, 39 aa, Artificial Sequence
  Non-cyclic GFR-binding peptide
  MOD_RES (5), (6), (37), (39): Xaa is C or S
SASPXXVPQDLSSLSILFFVGRTPKVLKVYPMVVKSXKX

SEQ ID NO: 24352 - protein, 37 aa, Artificial Sequence
  Non-cyclic GFR-binding peptide
  MOD_RES (2), (2): Xaa is C or S
  MOD_RES (18), (19), (20), (21), (22): Xaa is A or G
  MOD_RES (23), (24), (25), (26): Xaa is A or G or is absent
KXQPSRVHHSSLSVLFFXXXXXXXXXLKVYPRLEEHL

SEQ ID NO: 24353 - protein, 38 aa, Artificial Sequence
  Non-cyclic GFR-binding peptide
  MOD_RES (6), (6): Xaa is C or S
  MOD_RES (20), (21), (22), (23), (24): Xaa is A or G
  MOD_RES (25), (26), (27), (28): Xaa is A or G or is absent
DEGLEXVPTEESSLSMLFFXXXXXXXXXLKVYPFLQHN

SEQ ID NO: 24354 - protein, 39 aa, Artificial Sequence
  Non-cyclic GFR-binding peptide
  MOD_RES (6), (7), (39): Xaa is C or S
TVPKPXXAPTQLSSLSVLFFDDSSNVILKVYPNMVVRAX

SEQ ID NO: 24355 - protein, 39 aa, Artificial Sequence
  Non-cyclic GFR-binding peptide
  MOD_RES (5), (6): Xaa is C or S
  MOD_RES (20), (21), (22), (23), (24): Xaa is A or G
  MOD_RES (25), (26), (27), (28): Xaa is A or G or is absent
VPKAXXAPTKLSSLSVLFFXXXXXXXXXLKVYPNMVVKA

SEQ ID NO: 24356 - protein, 36 aa, Artificial Sequence
  Non-cyclic GFR-binding peptide
  MOD_RES (3), (3): Xaa is C or S
  MOD_RES (17), (18), (19), (20), (21): Xaa is A or G
  MOD_RES (22), (23), (24), (25): Xaa is A or G or is absent
LEXVPTEESSLSMLFFXXXXXXXXXLKVYPFLQHNK

SEQ ID NO: 24357 - protein, 34 aa, Artificial Sequence
  Non-cyclic GFR-binding peptide
  MOD_RES (3), (4): Xaa is C or S
APXXVPQALSSLSILFFVGRKPKVLKVYPMIVRS

SEQ ID NO: 24358 - protein, 38 aa, Artificial Sequence
  Non-cyclic GFR-binding peptide
  MOD_RES (1), (2), (36), (38): Xaa is C or S
  MOD_RES (16), (17), (18), (19), (20): Xaa is A or G
  MOD_RES (21), (22), (23), (24): Xaa is A or G or is absent
XXVPTELSSLSMLFFXXXXXXXXXLKVYPEMVVEGXGX

SEQ ID NO: 24359 - protein, 40 aa, Artificial Sequence
  Non-cyclic GFR-binding peptide
  MOD_RES (6), (7): Xaa is C or S
  MOD_RES (21), (22), (23), (24), (25): Xaa is A or G
  MOD_RES (26), (27), (28), (29): Xaa is A or G or is absent
YVPKPXXAPTKLSSLSVLFFXXXXXXXXXLKVYPNMVVRS

SEQ ID NO: 24360 - protein, 43 aa, Artificial Sequence
  Non-cyclic GFR-binding peptide
  MOD_RES (6), (7), (40), (42): Xaa is C or S
KVGKAXXVPTKLSSLSVLFFDDMGVPTLKVYPEGMSVAEXGXR

SEQ ID NO: 24361 - protein, 39 aa, Artificial Sequence
  Non-cyclic GFR-binding peptide
  MOD_RES (4), (5), (37), (39): Xaa is C or S
SKAXXVPTKLSSLSILFFDKGVVTYLKVYPGMAVSEXGX

SEQ ID NO: 24362 - protein, 39 aa, Artificial Sequence
  Non-cyclic GFR-binding peptide
  MOD_RES (6), (7): Xaa is C or S
  MOD_RES (21), (22), (23), (24), (25): Xaa is A or G
  MOD_RES (26), (27), (28), (29): Xaa is A or G or is absent
YVPKPXXAPTKLSSLSVLFFXXXXXXXXXLKVYPNMVVR

SEQ ID NO: 24363 - protein, 35 aa, Artificial Sequence
  Non-cyclic GFR-binding peptide
  MOD_RES (4), (5): Xaa is C or S
PASXXVPARLSSLSILFFDAANNVVLKVYPDMVVE

SEQ ID NO: 24364 - protein, 35 aa, Artificial Sequence
  Non-cyclic GFR-binding peptide
  MOD_RES (4), (5): Xaa is C or S
PPTXXVPTRLSSLSILFFDSANNVVLKVYPDMVVE

SEQ ID NO: 24365 - protein, 41 aa, Artificial Sequence
  Non-cyclic GFR-binding peptide
  MOD_RES (4), (5), (39), (41): Xaa is C or S
  MOD_RES (19), (20), (21), (22), (23): Xaa is A or G
  MOD_RES (24), (25), (26), (27): Xaa is A or G or is absent
PASXXVPARLSSLSILFFXXXXXXXXXLKVYPDMVVEAXGX

SEQ ID NO: 24366 - protein, 37 aa, Artificial Sequence
  Non-cyclic GFR-binding peptide
  MOD_RES (1), (2), (35), (37): Xaa is C or S
  MOD_RES (16), (17), (18), (19), (20): Xaa is A or G
  MOD_RES (21), (22), (23), (24): Xaa is A or G or is absent
XXVSQDLSSLSILFFXXXXXXXXXLKVYPMIVKSXKX

SEQ ID NO: 24367 - protein, 37 aa, Artificial Sequence
  Non-cyclic GFR-binding peptide
  MOD_RES (2), (3), (34), (36): Xaa is C or S
TXXAPVKTSSLSMLFFDNGRVLLLKVYPMIVEEXGXL

SEQ ID NO: 24368 - protein, 40 aa, Artificial Sequence
  Non-cyclic GFR-binding peptide
  MOD_RES (5), (6), (37), (39): Xaa is C or S
SASPXXVPQDLSSLSILFFVGRTPKVLKVYPMVVKSXKXS

SEQ ID NO: 24369 - protein, 33 aa, Artificial Sequence
  Non-cyclic GFR-binding peptide
  MOD_RES (1), (1): Xaa is C or S
  MOD_RES (15), (16), (17), (18), (19): Xaa is A or G
  MOD_RES (20), (21), (22), (23): Xaa is A or G or is absent
XVPQDLSSLSILFFXXXXXXXXXLKVYPMVVKS

SEQ ID NO: 24370 - protein, 38 aa, Artificial Sequence
  Non-cyclic GFR-binding peptide
  MOD_RES (3), (4), (38): Xaa is C or S
  MOD_RES (18), (19), (20), (21), (22): Xaa is A or G
  MOD_RES (23), (24), (25), (26): Xaa is A or G or is absent
KPXXAPTKLSSLSVLFFXXXXXXXXXLKVYPNMVVRSX

SEQ ID NO: 24371 - protein, 39 aa, Artificial Sequence
  Non-cyclic GFR-binding peptide
  MOD_RES (1), (38): Xaa is C or S
  MOD_RES (17), (18), (19), (20), (21): Xaa is A or G
  MOD_RES (22), (23), (24), (25): Xaa is A or G or is absent
XQPSRVHHSSLSVLFFXXXXXXXXXLKVYPRLEEHLEXA

SEQ ID NO: 24372 - protein, 39 aa, Artificial Sequence
  Non-cyclic GFR-binding peptide
  MOD_RES (6), (7): Xaa is C or S
  MOD_RES (21), (22), (23), (24), (25): Xaa is A or G
  MOD_RES (26), (27), (28), (29): Xaa is A or G or is absent
SIPKAXXVPTELSSLSMLFFXXXXXXXXXLKVYPEMVVE

SEQ ID NO: 24373 - protein, 42 aa, Artificial Sequence
  Non-cyclic GFR-binding peptide
  MOD_RES (4), (5), (40), (42): Xaa is C or S
  MOD_RES (19), (20), (21), (22), (23): Xaa is A or G
  MOD_RES (24), (25), (26), (27): Xaa is A or G or is absent
GKAXXVPTKLSSLSVLFFXXXXXXXXXLKVYPEGMSVAEXGX

SEQ ID NO: 24374 - protein, 38 aa, Artificial Sequence
  Non-cyclic GFR-binding peptide
  MOD_RES (1), (2), (36), (38): Xaa is C or S
  MOD_RES (16), (17), (18), (19), (20): Xaa is A or G
  MOD_RES (21), (22), (23), (24): Xaa is A or G or is absent
XXAPTKLSSLSVLFFXXXXXXXXXLKVYPNMVVRSXGX

SEQ ID NO: 24375 - protein, 33 aa, Artificial Sequence
  Non-cyclic GFR-binding peptide
  MOD_RES (32), (32): Xaa is C or S
APTKLSSLSVLFFDSSNNVILKVYPNMVVKAXG

SEQ ID NO: 24376 - protein, 34 aa, Artificial Sequence
  Non-cyclic GFR-binding peptide
  MOD_RES (3), (4): Xaa is C or S
KAXXVPTELSSLSMLFFDEYDKVVLKVYPEMVVE

SEQ ID NO: 24377 - protein, 35 aa, Artificial Sequence
  Non-cyclic GFR-binding peptide
  MOD_RES (1), (2), (35): Xaa is C or S
  MOD_RES (16), (17), (18), (19), (20): Xaa is A or G
  MOD_RES (21), (22), (23), (24): Xaa is A or G or is absent
XXVPQALSSLSILFFXXXXXXXXXLKVYPMIVRSX

SEQ ID NO: 24378 - protein, 40 aa, Artificial Sequence
  Non-cyclic GFR-binding peptide
  MOD_RES (4), (5), (39): Xaa is C or S
  MOD_RES (19), (20), (21), (22), (23): Xaa is A or G
  MOD_RES (24), (25), (26), (27): Xaa is A or G or is absent
PKPXXAPTKLSSLSVLFFXXXXXXXXXLKVYPNMVVRSXG

SEQ ID NO: 24379 - protein, 40 aa, Artificial Sequence
  Non-cyclic GFR-binding peptide
  MOD_RES (6), (7): Xaa is C or S
  MOD_RES (21), (22), (23), (24), (25): Xaa is A or G
  MOD_RES (26), (27), (28), (29): Xaa is A or G or is absent
GSAGPXXTPTKMSSLSMLFFXXXXXXXXXLKVYPGMVVDR

SEQ ID NO: 24380 - protein, 35 aa, Artificial Sequence
  Non-cyclic GFR-binding peptide
  MOD_RES (33), (35): Xaa is C or S
  MOD_RES (14), (15), (16), (17), (18): Xaa is A or G
  MOD_RES (19), (20), (21), (22): Xaa is A or G or is absent
VPQDLSSLSILFFXXXXXXXXXLKVYPMVVKSXKX

SEQ ID NO: 24381 - protein, 43 aa, Artificial Sequence
  Non-cyclic GFR-binding peptide
  MOD_RES (6), (7), (41), (43): Xaa is C or S
  MOD_RES (21), (22), (23), (24), (25): Xaa is A or G
  MOD_RES (26), (27), (28), (29): Xaa is A or G or is absent
TVPKPXXAPTQLSSLSVLFFXXXXXXXXXLKVYPNMVVRAXGX

SEQ ID NO: 24382 - protein, 40 aa, Artificial Sequence
  Non-cyclic GFR-binding peptide
  MOD_RES (3), (4), (37), (39): Xaa is C or S
KAXXVPTKLSSLSVLFFDDMGVPTLKVYPEGMSVAEXGXR

SEQ ID NO: 24383 - protein, 36 aa, Artificial Sequence
  Non-cyclic GFR-binding peptide
  MOD_RES (34), (36): Xaa is C or S
  MOD_RES (14), (15), (16), (17), (18): Xaa is A or G
  MOD_RES (19), (20), (21), (22): Xaa is A or G or is absent
VPTRLSSLSILFFXXXXXXXXXLKVYPDMVVESXGX

SEQ ID NO: 24384 - protein, 42 aa, Artificial Sequence
  Non-cyclic GFR-binding peptide
  MOD_RES (5), (6), (40), (42): Xaa is C or S
  MOD_RES (20), (21), (22), (23), (24): Xaa is A or G
  MOD_RES (25), (26), (27), (28): Xaa is A or G or is absent
VPKAXXAPTKLSSLSVLFFXXXXXXXXXLKVYPNMVVKAXGX

SEQ ID NO: 24385 - protein, 43 aa, Artificial Sequence
  Non-cyclic GFR-binding peptide
  MOD_RES (7), (41), (43): Xaa is C or S
  MOD_RES (21), (22), (23), (24), (25): Xaa is A or G
  MOD_RES (26), (27), (28), (29): Xaa is A or G or is absent
HVTKPTXAPTKLSSLSVLFFXXXXXXXXXLKVYPNMVVRSXGX

SEQ ID NO: 24386 - protein, 36 aa, Artificial Sequence
  Non-cyclic GFR-binding peptide
  MOD_RES (4), (5), (36): Xaa is C or S
ASPXXVSQDLSSLSILFFIGKTPKILKVYPMIVKSX

SEQ ID NO: 24387 - protein, 36 aa, Artificial Sequence
  Non-cyclic GFR-binding peptide
  MOD_RES (1), (34), (36): Xaa is C or S
  MOD_RES (15), (16), (17), (18), (19): Xaa is A or G
  MOD_RES (20), (21), (22), (23): Xaa is A or G or is absent
XVPQDLSSLSILFFXXXXXXXXXLKVYPMVVKSXKX

SEQ ID NO: 24388 - protein, 37 aa, Artificial Sequence
  Non-cyclic GFR-binding peptide
  MOD_RES (4), (5): Xaa is C or S
  MOD_RES (19), (20), (21), (22), (23): Xaa is A or G
  MOD_RES (24), (25), (26), (27): Xaa is A or G or is absent
SKAXXVPTKLSSLSILFFXXXXXXXXXLKVYPGMAVS

SEQ ID NO: 24389 - protein, 41 aa, Artificial Sequence
  Non-cyclic GFR-binding peptide
  MOD_RES (5), (6), (38), (40): Xaa is C or S
TPPTXXVPTRLSSLSILFFDSANNVVLKVYPDMVVESXGXR

SEQ ID NO: 24390 - protein, 37 aa, Artificial Sequence
  Non-cyclic GFR-binding peptide
  MOD_RES (1), (2), (36): Xaa is C or S
  MOD_RES (16), (17), (18), (19), (20): Xaa is A or G
  MOD_RES (21), (22), (23), (24): Xaa is A or G or is absent
XXTPTKMSSLSMLFFXXXXXXXXXLKVYPGMVVDRXG

SEQ ID NO: 24391 - protein, 41 aa, Artificial Sequence
  Non-cyclic GFR-binding peptide
  MOD_RES (4), (41): Xaa is C or S
  MOD_RES (20), (21), (22), (23), (24): Xaa is A or G
  MOD_RES (25), (26), (27), (28): Xaa is A or G or is absent
SVKXQPSRVHHSSLSVLFFXXXXXXXXXLKVYPRLEEHLEX

SEQ ID NO: 24392 - protein, 34 aa, Artificial Sequence
  Non-cyclic GFR-binding peptide
  MOD_RES (31), (33): Xaa is C or S
VPQDLSSLSILFFVGRTPKVLKVYPMVVKSXKXS

SEQ ID NO: 24393 - protein, 34 aa, Artificial Sequence
  Non-cyclic GFR-binding peptide
  MOD_RES (1), (33): Xaa is C or S
XAPTKLSSLSVLFFDSSNNVILKVYPNMVVKAXG

SEQ ID NO: 24394 - protein, 34 aa, Artificial Sequence
  Non-cyclic GFR-binding peptide
  MOD_RES (2), (3), (34): Xaa is C or S
TXXAPVKTSSLSMLFFDNGRVLLLKVYPMIVEEX

SEQ ID NO: 24395 - protein, 37 aa, Artificial Sequence
  Non-cyclic GFR-binding peptide
  MOD_RES (6), (7): Xaa is C or S
ASASPXXVSQDLSSLSILFFIGKTPKILKVYPMIVKS

SEQ ID NO: 24396 - protein, 38 aa, Artificial Sequence
  Non-cyclic GFR-binding peptide
  MOD_RES (5), (6), (38): Xaa is C or S
VPKPXXAPTKLSSLSVLFFDDSSNVILKVYPNMVVRSX

SEQ ID NO: 24397 - protein, 37 aa, Artificial Sequence
  Non-cyclic GFR-binding peptide
  MOD_RES (1), (2), (36): Xaa is C or S
  MOD_RES (16), (17), (18), (19), (20): Xaa is A or G
  MOD_RES (21), (22), (23), (24): Xaa is A or G or is absent
XXVPTRLSSLSILFFXXXXXXXXXLKVYPDMVVESXG

SEQ ID NO: 24398 - protein, 38 aa, Artificial Sequence
  Non-cyclic GFR-binding peptide
  MOD_RES (3), (3): Xaa is C or S
VKXQPSRVHHSSLSVLFFEYVRKKPKLLKVYPRLEEHL

SEQ ID NO: 24399 - protein, 38 aa, Artificial Sequence
  Non-cyclic GFR-binding peptide
  MOD_RES (2), (2): Xaa is C or S
KXQPSRVHHSSLSVLFFEYVRKKPKLLKVYPRLEEHLE

SEQ ID NO: 24400 - protein, 34 aa, Artificial Sequence
  Non-cyclic GFR-binding peptide
  MOD_RES (34), (34): Xaa is C or S
  MOD_RES (14), (15), (16), (17), (18): Xaa is A or G
  MOD_RES (19), (20), (21), (22): Xaa is A or G or is absent
APTKLSSLSVLFFXXXXXXXXXLKVYPNMVVKAX

SEQ ID NO: 24401 - protein, 41 aa, Artificial Sequence
  Non-cyclic GFR-binding peptide
  MOD_RES (6), (7): Xaa is C or S
  MOD_RES (21), (22), (23), (24), (25): Xaa is A or G
  MOD_RES (26), (27), (28), (29): Xaa is A or G or is absent
KVGKAXXVPTKLSSLSVLFFXXXXXXXXXLKVYPEGMSVAE

SEQ ID NO: 24402 - protein, 36 aa, Artificial Sequence
  Non-cyclic GFR-binding peptide
  MOD_RES (1), (2), (34), (36): Xaa is C or S
XXVPTKLSSLSILFFDKGVVTYLKVYPGMAVSEXGX

SEQ ID NO: 24403 - protein, 36 aa, Artificial Sequence
  Non-cyclic GFR-binding peptide
  MOD_RES (2), (2): Xaa is C or S
  MOD_RES (18), (19), (20), (21), (22): Xaa is A or G
  MOD_RES (23), (24), (25), (26): Xaa is A or G or is absent
KXQPSRVHHSSLSVLFFXXXXXXXXXLKVYPRLEEH

SEQ ID NO: 24404 - protein, 40 aa, Artificial Sequence
  Non-cyclic GFR-binding peptide
  MOD_RES (5), (6), (38), (40): Xaa is C or S
TPPTXXVPTRLSSLSILFFDSANNVVLKVYPDMVVESXGX

SEQ ID NO: 24405 - protein, 34 aa, Artificial Sequence
  Non-cyclic GFR-binding peptide
  MOD_RES (1), (33): Xaa is C or S
XAPTQLSSLSVLFFDDSSNVILKVYPNMVVRAXG

SEQ ID NO: 24406 - protein, 40 aa, Artificial Sequence
  Non-cyclic GFR-binding peptide
  MOD_RES (1), (38), (40): Xaa is C or S
  MOD_RES (17), (18), (19), (20), (21): Xaa is A or G
  MOD_RES (22), (23), (24), (25): Xaa is A or G or is absent
XQPSRVHHSSLSVLFFXXXXXXXXXLKVYPRLEEHLEXAX

SEQ ID NO: 24407 - protein, 37 aa, Artificial Sequence
  Non-cyclic GFR-binding peptide
  MOD_RES (34), (36): Xaa is C or S
  MOD_RES (14), (15), (16), (17), (18): Xaa is A or G
  MOD_RES (19), (20), (21), (22): Xaa is A or G or is absent
TPTKMSSLSMLFFXXXXXXXXXLKVYPGMVVDRXGXS

SEQ ID NO: 24408 - protein, 40 aa, Artificial Sequence
  Non-cyclic GFR-binding peptide
  MOD_RES (4), (5), (38), (40): Xaa is C or S
  MOD_RES (19), (20), (21), (22), (23): Xaa is A or G
  MOD_RES (24), (25), (26), (27): Xaa is A or G or is absent
ASPXXVPQDLSSLSILFFXXXXXXXXXLKVYPMVVKSXKX

SEQ ID NO: 24409 - protein, 32 aa, Artificial Sequence
  Non-cyclic GFR-binding peptide
  MOD_RES (1), (1): Xaa is C or S
XAPTKLSSLSVLFFDSSNNVILKVYPNMVVKA

SEQ ID NO: 24410 - protein, 36 aa, Artificial Sequence
  Non-cyclic GFR-binding peptide
  MOD_RES (1), (35): Xaa is C or S
  MOD_RES (15), (16), (17), (18), (19): Xaa is A or G
  MOD_RES (20), (21), (22), (23): Xaa is A or G or is absent
XVPTKLSSLSILFFXXXXXXXXXLKVYPGMAVSEXG

SEQ ID NO: 24411 - protein, 39 aa, Artificial Sequence
  Non-cyclic GFR-binding peptide
  MOD_RES (4), (5), (38): Xaa is C or S
  MOD_RES (19), (20), (21), (22), (23): Xaa is A or G
  MOD_RES (24), (25), (26), (27): Xaa is A or G or is absent
ASPXXVSQDLSSLSILFFXXXXXXXXXLKVYPMIVKSXK

SEQ ID NO: 24412 - protein, 35 aa, Artificial Sequence
  Non-cyclic GFR-binding peptide
  MOD_RES (1), (33), (35): Xaa is C or S
XAPTQLSSLSVLFFDDSSNVILKVYPNMVVRAXGX

SEQ ID NO: 24413 - protein, 42 aa, Artificial Sequence
  Non-cyclic GFR-binding peptide
  MOD_RES (6), (7), (39), (41): Xaa is C or S
AAPASXXVPARLSSLSILFFDAANNVVLKVYPDMVVEAXGXR

SEQ ID NO: 24414 - protein, 35 aa, Artificial Sequence
  Non-cyclic GFR-binding peptide
  MOD_RES (3), (4), (35): Xaa is C or S
SPXXVSQDLSSLSILFFIGKTPKILKVYPMIVKSX

SEQ ID NO: 24415 - protein, 40 aa, Artificial Sequence
  Non-cyclic GFR-binding peptide
  MOD_RES (5), (6), (38), (40): Xaa is C or S
APASXXVPARLSSLSILFFDAANNVVLKVYPDMVVEAXGX

SEQ ID NO: 24416 - protein, 37 aa, Artificial Sequence
  Non-cyclic GFR-binding peptide
  MOD_RES (4), (5): Xaa is C or S
  MOD_RES (19), (20), (21), (22), (23): Xaa is A or G
  MOD_RES (24), (25), (26), (27): Xaa is A or G or is absent
PKAXXVPTELSSLSMLFFXXXXXXXXXLKVYPEMVVE

SEQ ID NO: 24417 - protein, 33 aa, Artificial Sequence
  Non-cyclic GFR-binding peptide
  MOD_RES (1), (1): Xaa is C or S
XVPTEESSLSMLFFRIKPHQGQHLKVYPFLQHN

SEQ ID NO: 24418 - protein, 34 aa, Artificial Sequence
  Non-cyclic GFR-binding peptide
SRVHHSSLSVLFFEYVRKKPKLLKVYPRLEEHLE

SEQ ID NO: 24419 - protein, 36 aa, Artificial Sequence
  Non-cyclic GFR-binding peptide
  MOD_RES (33), (35): Xaa is C or S
  MOD_RES (14), (15), (16), (17), (18): Xaa is A or G
  MOD_RES (19), (20), (21), (22): Xaa is A or G or is absent
APVKTSSLSMLFFXXXXXXXXXLKVYPMIVEEXGXL

SEQ ID NO: 24420 - protein, 39 aa, Artificial Sequence
  Non-cyclic GFR-binding peptide
  MOD_RES (1), (36), (38): Xaa is C or S
  MOD_RES (15), (16), (17), (18), (19): Xaa is A or G
  MOD_RES (20), (21), (22), (23): Xaa is A or G or is absent
XVPTKLSSLSVLFFXXXXXXXXXLKVYPEGMSVAEXGXR

SEQ ID NO: 24421 - protein, 37 aa, Artificial Sequence
  Non-cyclic GFR-binding peptide
  MOD_RES (4), (5), (37): Xaa is C or S
SKAXXVPTKLSSLSILFFDKGVVTYLKVYPGMAVSEX

SEQ ID NO: 24422 - protein, 40 aa, Artificial Sequence
  Non-cyclic GFR-binding peptide
  MOD_RES (4), (4): Xaa is C or S
SVKXQPSRVHHSSLSVLFFEYVRKKPKLLKVYPRLEEHLE

SEQ ID NO: 24423 - protein, 31 aa, Artificial Sequence
  Non-cyclic GFR-binding peptide
  MOD_RES (31), (31): Xaa is C or S
VPQDLSSLSILFFVGRTPKVLKVYPMVVKSX

SEQ ID NO: 24424 - protein, 39 aa, Artificial Sequence
  Non-cyclic GFR-binding peptide
  MOD_RES (3), (4), (37), (39): Xaa is C or S
  MOD_RES (18), (19), (20), (21), (22): Xaa is A or G
  MOD_RES (23), (24), (25), (26): Xaa is A or G or is absent
SPXXVSQDLSSLSILFFXXXXXXXXXLKVYPMIVKSXKX

SEQ ID NO: 24425 - protein, 39 aa, Artificial Sequence
  Non-cyclic GFR-binding peptide
  MOD_RES (5), (6): Xaa is C or S
  MOD_RES (20), (21), (22), (23), (24): Xaa is A or G
  MOD_RES (25), (26), (27), (28): Xaa is A or G or is absent
SAGPXXTPTKMSSLSMLFFXXXXXXXXXLKVYPGMVVDR

SEQ ID NO: 24426 - protein, 41 aa, Artificial Sequence
  Non-cyclic GFR-binding peptide
  MOD_RES (4), (5), (39), (41): Xaa is C or S
  MOD_RES (19), (20), (21), (22), (23): Xaa is A or G
  MOD_RES (24), (25), (26), (27): Xaa is A or G or is absent
PKPXXAPTKLSSLSVLFFXXXXXXXXXLKVYPNMVVRSXGX

SEQ ID NO: 24427 - protein, 32 aa, Artificial Sequence
  Non-cyclic GFR-binding peptide
SRVHHSSLSVLFFEYVRKKPKLLKVYPRLEEH

SEQ ID NO: 24428 - protein, 38 aa, Artificial Sequence
  Non-cyclic GFR-binding peptide
  MOD_RES (1), (35), (37): Xaa is C or S
  MOD_RES (15), (16), (17), (18), (19): Xaa is A or G
  MOD_RES (20), (21), (22), (23): Xaa is A or G or is absent
XVPTKLSSLSILFFXXXXXXXXXLKVYPGMAVSEXGXR

SEQ ID NO: 24429 - protein, 38 aa, Artificial Sequence
  Non-cyclic GFR-binding peptide
  MOD_RES (2), (3), (38): Xaa is C or S
  MOD_RES (17), (18), (19), (20), (21): Xaa is A or G
  MOD_RES (22), (23), (24), (25): Xaa is A or G or is absent
AXXVPTKLSSLSVLFFXXXXXXXXXLKVYPEGMSVAEX

SEQ ID NO: 24430 - protein, 38 aa, Artificial Sequence
  Non-cyclic GFR-binding peptide
  MOD_RES (5), (6): Xaa is C or S
  MOD_RES (20), (21), (22), (23), (24): Xaa is A or G
  MOD_RES (25), (26), (27), (28): Xaa is A or G or is absent
SAAPXXVPQALSSLSILFFXXXXXXXXXLKVYPMIVRS

SEQ ID NO: 24431 - protein, 41 aa, Artificial Sequence
  Non-cyclic GFR-binding peptide
  MOD_RES (6), (7), (39), (41): Xaa is C or S
KASKAXXVPTKLSSLSILFFDKGVVTYLKVYPGMAVSEXGX

SEQ ID NO: 24432 - protein, 39 aa, Artificial Sequence
  Non-cyclic GFR-binding peptide
  MOD_RES (4), (5), (36), (38): Xaa is C or S
AAPXXVPQALSSLSILFFVGRKPKVLKVYPMIVRSXKXS

SEQ ID NO: 24433 - protein, 39 aa, Artificial Sequence
  Non-cyclic GFR-binding peptide
  MOD_RES (5), (6), (38): Xaa is C or S
VPKPXXAPTKLSSLSVLFFDDSSNVILKVYPNMVVRSXG

SEQ ID NO: 24434 - protein, 41 aa, Artificial Sequence
  Non-cyclic GFR-binding peptide
  MOD_RES (5), (39), (41): Xaa is C or S
  MOD_RES (19), (20), (21), (22), (23): Xaa is A or G
  MOD_RES (24), (25), (26), (27): Xaa is A or G or is absent
TKPTXAPTKLSSLSVLFFXXXXXXXXXLKVYPNMVVRSXGX

SEQ ID NO: 24435 - protein, 42 aa, Artificial Sequence
  Non-cyclic GFR-binding peptide
  MOD_RES (4), (5), (39), (41): Xaa is C or S
  MOD_RES (19), (20), (21), (22), (23): Xaa is A or G
  MOD_RES (24), (25), (26), (27): Xaa is A or G or is absent
PKAXXVPTELSSLSMLFFXXXXXXXXXLKVYPEMVVEGXGXR

SEQ ID NO: 24436 - protein, 41 aa, Artificial Sequence
  Non-cyclic GFR-binding peptide
  MOD_RES (3), (4), (38), (40): Xaa is C or S
  MOD_RES (18), (19), (20), (21), (22): Xaa is A or G
  MOD_RES (23), (24), (25), (26): Xaa is A or G or is absent
ASXXVPARLSSLSILFFXXXXXXXXXLKVYPDMVVEAXGXR

SEQ ID NO: 24437 - protein, 38 aa, Artificial Sequence
  Non-cyclic GFR-binding peptide
  MOD_RES (2), (36), (38): Xaa is C or S
  MOD_RES (16), (17), (18), (19), (20): Xaa is A or G
  MOD_RES (21), (22), (23), (24): Xaa is A or G or is absent
TXAPTKLSSLSVLFFXXXXXXXXXLKVYPNMVVRSXGX

SEQ ID NO: 24438 - protein, 39 aa, Artificial Sequence
  Non-cyclic GFR-binding peptide
  MOD_RES (4), (5), (39): Xaa is C or S
  MOD_RES (19), (20), (21), (22), (23): Xaa is A or G
  MOD_RES (24), (25), (26), (27): Xaa is A or G or is absent
PPTXXVPTRLSSLSILFFXXXXXXXXXLKVYPDMVVESX

SEQ ID NO: 24439 - protein, 34 aa, Artificial Sequence
  Non-cyclic GFR-binding peptide
  MOD_RES (3), (4): Xaa is C or S
GPXXTPTKMSSLSMLFFNDKQQIILKVYPGMVVD

SEQ ID NO: 24440 - protein, 41 aa, Artificial Sequence
  Non-cyclic GFR-binding peptide
  MOD_RES (5), (6), (38), (40): Xaa is C or S
IPKAXXVPTELSSLSMLFFDEYDKVVLKVYPEMVVEGXGXR

SEQ ID NO: 24441 - protein, 37 aa, Artificial Sequence
  Non-cyclic GFR-binding peptide
  MOD_RES (1), (35), (37): Xaa is C or S
  MOD_RES (15), (16), (17), (18), (19): Xaa is A or G
  MOD_RES (20), (21), (22), (23): Xaa is A or G or is absent
XTPTKMSSLSMLFFXXXXXXXXXLKVYPGMVVDRXGX

SEQ ID NO: 24442 - protein, 35 aa, Artificial Sequence
  Non-cyclic GFR-binding peptide
  MOD_RES (2), (2): Xaa is C or S
EXVPTEESSLSMLFFRIKPHQGQHLKVYPFLQHNK

SEQ ID NO: 24443 - protein, 38 aa, Artificial Sequence
  Non-cyclic GFR-binding peptide
  MOD_RES (4), (5), (36), (38): Xaa is C or S
PSTXXAPVKTSSLSMLFFDNGRVLLLKVYPMIVEEXGX

SEQ ID NO: 24444 - protein, 38 aa, Artificial Sequence
  Non-cyclic GFR-binding peptide
  MOD_RES (6), (7), (38): Xaa is C or S
RVPSTXXAPVKTSSLSMLFFDNGRVLLLKVYPMIVEEX

SEQ ID NO: 24445 - protein, 32 aa, Artificial Sequence
  Non-cyclic GFR-binding peptide
  MOD_RES (14), (15), (16), (17), (18): Xaa is A or G
  MOD_RES (19), (20), (21), (22): Xaa is A or G or is absent
VPTKLSSLSILFFXXXXXXXXXLKVYPGMAVS

SEQ ID NO: 24446 - protein, 41 aa, Artificial Sequence
  Non-cyclic GFR-binding peptide
  MOD_RES (4), (5), (38), (40): Xaa is C or S
  MOD_RES (19), (20), (21), (22), (23): Xaa is A or G
  MOD_RES (24), (25), (26), (27): Xaa is A or G or is absent
AAPXXVPQALSSLSILFFXXXXXXXXXLKVYPMIVRSXKXS

SEQ ID NO: 24447 - protein, 39 aa, Artificial Sequence
  Non-cyclic GFR-binding peptide
  MOD_RES (1), (2), (36), (38): Xaa is C or S
  MOD_RES (16), (17), (18), (19), (20): Xaa is A or G
  MOD_RES (21), (22), (23), (24): Xaa is A or G or is absent
XXVPTELSSLSMLFFXXXXXXXXXLKVYPEMVVEGXGXR

SEQ ID NO: 24448 - protein, 36 aa, Artificial Sequence
  Non-cyclic GFR-binding peptide
  MOD_RES (1), (2), (33), (35): Xaa is C or S
XXVPQDLSSLSILFFVGRTPKVLKVYPMVVKSXKXS

SEQ ID NO: 24449 - protein, 40 aa, Artificial Sequence
  Non-cyclic GFR-binding peptide
  MOD_RES (4), (5), (39): Xaa is C or S
  MOD_RES (19), (20), (21), (22), (23): Xaa is A or G
  MOD_RES (24), (25), (26), (27): Xaa is A or G or is absent
PKAXXVPTELSSLSMLFFXXXXXXXXXLKVYPEMVVEGXG

SEQ ID NO: 24450 - protein, 37 aa, Artificial Sequence
  Non-cyclic GFR-binding peptide
  MOD_RES (2), (3), (35), (37): Xaa is C or S
TXXVPTRLSSLSILFFDSANNVVLKVYPDMVVESXGX

SEQ ID NO: 24451 - protein, 35 aa, Artificial Sequence
  Non-cyclic GFR-binding peptide
  MOD_RES (1), (34): Xaa is C or S
  MOD_RES (15), (16), (17), (18), (19): Xaa is A or G
  MOD_RES (20), (21), (22), (23): Xaa is A or G or is absent
XVSQDLSSLSILFFXXXXXXXXXLKVYPMIVKSXK

SEQ ID NO: 24452 - protein, 31 aa, Artificial Sequence
  Non-cyclic GFR-binding peptide
  MOD_RES (1), (1): Xaa is C or S
XVPARLSSLSILFFDAANNVVLKVYPDMVVE

SEQ ID NO: 24453 - protein, 41 aa, Artificial Sequence
  Non-cyclic GFR-binding peptide
  MOD_RES (6), (7), (38), (40): Xaa is C or S
ASASPXXVPQDLSSLSILFFVGRTPKVLKVYPMVVKSXKXS

SEQ ID NO: 24454 - protein, 35 aa, Artificial Sequence
  Non-cyclic GFR-binding peptide
  MOD_RES (33), (35): Xaa is C or S
  MOD_RES (14), (15), (16), (17), (18): Xaa is A or G
  MOD_RES (19), (20), (21), (22): Xaa is A or G or is absent
VSQDLSSLSILFFXXXXXXXXXLKVYPMIVKSXKX

SEQ ID NO: 24455 - protein, 33 aa, Artificial Sequence
  Non-cyclic GFR-binding peptide
  MOD_RES (1), (1): Xaa is C or S
  MOD_RES (15), (16), (17), (18), (19): Xaa is A or G
  MOD_RES (20), (21), (22), (23): Xaa is A or G or is absent
XVSQDLSSLSILFFXXXXXXXXXLKVYPMIVKS

SEQ ID NO: 24456 - protein, 36 aa, Artificial Sequence
  Non-cyclic GFR-binding peptide
  MOD_RES (3), (4), (36): Xaa is C or S
KAXXVPTELSSLSMLFFDEYDKVVLKVYPEMVVEGX

SEQ ID NO: 24457 - protein, 36 aa, Artificial Sequence
  Non-cyclic GFR-binding peptide
  MOD_RES (5), (6): Xaa is C or S
SAAPXXVPQALSSLSILFFVGRKPKVLKVYPMIVRS

SEQ ID NO: 24458 - protein, 35 aa, Artificial Sequence
  Non-cyclic GFR-binding peptide
  MOD_RES (1), (2), (35): Xaa is C or S
XXVPTKLSSLSVLFFDDMGVPTLKVYPEGMSVAEX

SEQ ID NO: 24459 - protein, 35 aa, Artificial Sequence
  Non-cyclic GFR-binding peptide
  MOD_RES (34), (34): Xaa is C or S
  MOD_RES (14), (15), (16), (17), (18): Xaa is A or G
  MOD_RES (19), (20), (21), (22): Xaa is A or G or is absent
VPTRLSSLSILFFXXXXXXXXXLKVYPDMVVESXG

SEQ ID NO: 24460 - protein, 42 aa, Artificial Sequence
  Non-cyclic GFR-binding peptide
  MOD_RES (3), (4), (39), (41): Xaa is C or S
  MOD_RES (18), (19), (20), (21), (22): Xaa is A or G
  MOD_RES (23), (24), (25), (26): Xaa is A or G or is absent
KAXXVPTKLSSLSVLFFXXXXXXXXXLKVYPEGMSVAEXGXR

SEQ ID NO: 24461 - protein, 38 aa, Artificial Sequence
  Non-cyclic GFR-binding peptide
  MOD_RES (2), (3), (35), (37): Xaa is C or S
AXXVPTKLSSLSILFFDKGVVTYLKVYPGMAVSEXGXR

SEQ ID NO: 24462 - protein, 41 aa, Artificial Sequence
  Non-cyclic GFR-binding peptide
  MOD_RES (5), (6), (39), (41): Xaa is C or S
  MOD_RES (20), (21), (22), (23), (24): Xaa is A or G
  MOD_RES (25), (26), (27), (28): Xaa is A or G or is absent
SASPXXVSQDLSSLSILFFXXXXXXXXXLKVYPMIVKSXKX

SEQ ID NO: 24463 - protein, 44 aa, Artificial Sequence
  Non-cyclic GFR-binding peptide
  MOD_RES (6), (7), (42), (44): Xaa is C or S
  MOD_RES (21), (22), (23), (24), (25): Xaa is A or G
  MOD_RES (26), (27), (28), (29): Xaa is A or G or is absent
KVGKAXXVPTKLSSLSVLFFXXXXXXXXXLKVYPEGMSVAEXGX

SEQ ID NO: 24464 - protein, 43 aa, Artificial Sequence
  Non-cyclic GFR-binding peptide
  MOD_RES (5), (42): Xaa is C or S
SSVKXQPSRVHHSSLSVLFFEYVRKKPKLLKVYPRLEEHLEXA

SEQ ID NO: 24465 - protein, 34 aa, Artificial Sequence
  Non-cyclic GFR-binding peptide
  MOD_RES (1), (2), (34): Xaa is C or S
XXTPTKMSSLSMLFFNDKQQIILKVYPGMVVDRX

SEQ ID NO: 24466 - protein, 36 aa, Artificial Sequence
  Non-cyclic GFR-binding peptide
  MOD_RES (3), (4), (36): Xaa is C or S
KPXXAPTKLSSLSVLFFDDSSNVILKVYPNMVVRSX

SEQ ID NO: 24467 - protein, 36 aa, Artificial Sequence
  Non-cyclic GFR-binding peptide
  MOD_RES (2), (3), (36): Xaa is C or S
  MOD_RES (17), (18), (19), (20), (21): Xaa is A or G
  MOD_RES (22), (23), (24), (25): Xaa is A or G or is absent
TXXAPVKTSSLSMLFFXXXXXXXXXLKVYPMIVEEX

SEQ ID NO: 24468 - protein, 38 aa, Artificial Sequence
  Non-cyclic GFR-binding peptide
  MOD_RES (3), (4), (36), (38): Xaa is C or S
KPXXAPTKLSSLSVLFFDDSSNVILKVYPNMVVRSXGX

SEQ ID NO: 24469 - protein, 45 aa, Artificial Sequence
  Non-cyclic GFR-binding peptide
  MOD_RES (6), (7), (42), (44): Xaa is C or S
  MOD_RES (21), (22), (23), (24), (25): Xaa is A or G
  MOD_RES (26), (27), (28), (29): Xaa is A or G or is absent
KVGKAXXVPTKLSSLSVLFFXXXXXXXXXLKVYPEGMSVAEXGXR

SEQ ID NO: 24470 - protein, 42 aa, Artificial Sequence
  Non-cyclic GFR-binding peptide
  MOD_RES (6), (7), (41): Xaa is C or S
  MOD_RES (21), (22), (23), (24), (25): Xaa is A or G
  MOD_RES (26), (27), (28), (29): Xaa is A or G or is absent
AVPKAXXAPTKLSSLSVLFFXXXXXXXXXLKVYPNMVVKAXG

SEQ ID NO: 24471 - protein, 44 aa, Artificial Sequence
  Non-cyclic GFR-binding peptide
  MOD_RES (5), (6), (41), (43): Xaa is C or S
  MOD_RES (20), (21), (22), (23), (24): Xaa is A or G
  MOD_RES (25), (26), (27), (28): Xaa is A or G or is absent
VGKAXXVPTKLSSLSVLFFXXXXXXXXXLKVYPEGMSVAEXGXR

SEQ ID NO: 24472 - protein, 38 aa, Artificial Sequence
  Non-cyclic GFR-binding peptide
  MOD_RES (35), (37): Xaa is C or S
  MOD_RES (14), (15), (16), (17), (18): Xaa is A or G
  MOD_RES (19), (20), (21), (22): Xaa is A or G or is absent
SRVHHSSLSVLFFXXXXXXXXXLKVYPRLEEHLEXAXA

SEQ ID NO: 24473 - protein, 35 aa, Artificial Sequence
  Non-cyclic GFR-binding peptide
  MOD_RES (1), (2), (33), (35): Xaa is C or S
XXVPQALSSLSILFFVGRKPKVLKVYPMIVRSXKX

SEQ ID NO: 24474 - protein, 39 aa, Artificial Sequence
  Non-cyclic GFR-binding peptide
  MOD_RES (37), (39): Xaa is C or S
QPSRVHHSSLSVLFFEYVRKKPKLLKVYPRLEEHLEXAX

SEQ ID NO: 24475 - protein, 42 aa, Artificial Sequence
  Non-cyclic GFR-binding peptide
  MOD_RES (5), (6), (41): Xaa is C or S
  MOD_RES (20), (21), (22), (23), (24): Xaa is A or G
  MOD_RES (25), (26), (27), (28): Xaa is A or G or is absent
VGKAXXVPTKLSSLSVLFFXXXXXXXXXLKVYPEGMSVAEXG

SEQ ID NO: 24476 - protein, 37 aa, Artificial Sequence
  Non-cyclic GFR-binding peptide
  MOD_RES (3), (35), (37): Xaa is C or S
PTXAPTKLSSLSVLFFDDSSNVILKVYPNMVVRSXGX

SEQ ID NO: 24477 - protein, 35 aa, Artificial Sequence
  Non-cyclic GFR-binding peptide
  MOD_RES (1), (2): Xaa is C or S
  MOD_RES (16), (17), (18), (19), (20): Xaa is A or G
  MOD_RES (21), (22), (23), (24): Xaa is A or G or is absent
XXVPTRLSSLSILFFXXXXXXXXXLKVYPDMVVES

SEQ ID NO: 24478 - protein, 44 aa, Artificial Sequence
  Non-cyclic GFR-binding peptide
  MOD_RES (6), (7), (41), (43): Xaa is C or S
  MOD_RES (21), (22), (23), (24), (25): Xaa is A or G
  MOD_RES (26), (27), (28), (29): Xaa is A or G or is absent
GSAGPXXTPTKMSSLSMLFFXXXXXXXXXLKVYPGMVVDRXGXS

SEQ ID NO: 24479 - protein, 37 aa, Artificial Sequence
  Non-cyclic GFR-binding peptide
  MOD_RES (4), (36): Xaa is C or S
KPTXAPTKLSSLSVLFFDDSSNVILKVYPNMVVRSXG

SEQ ID NO: 24480 - protein, 42 aa, Artificial Sequence
  Non-cyclic GFR-binding peptide
  MOD_RES (7), (41): Xaa is C or S
  MOD_RES (21), (22), (23), (24), (25): Xaa is A or G
  MOD_RES (26), (27), (28), (29): Xaa is A or G or is absent
HVTKPTXAPTKLSSLSVLFFXXXXXXXXXLKVYPNMVVRSXG

SEQ ID NO: 24481 - protein, 42 aa, Artificial Sequence
  Non-cyclic GFR-binding peptide
  MOD_RES (5), (6), (40), (42): Xaa is C or S
  MOD_RES (20), (21), (22), (23), (24): Xaa is A or G
  MOD_RES (25), (26), (27), (28): Xaa is A or G or is absent
VPKPXXAPTQLSSLSVLFFXXXXXXXXXLKVYPNMVVRAXGX

SEQ ID NO: 24482 - protein, 38 aa, Artificial Sequence
  Non-cyclic GFR-binding peptide
  MOD_RES (4), (5), (36), (38): Xaa is C or S
AAPXXVPQALSSLSILFFVGRKPKVLKVYPMIVRSXKX

SEQ ID NO: 24483 - protein, 37 aa, Artificial Sequence
  Non-cyclic GFR-binding peptide
  MOD_RES (37), (37): Xaa is C or S
QPSRVHHSSLSVLFFEYVRKKPKLLKVYPRLEEHLEX

SEQ ID NO: 24484 - protein, 39 aa, Artificial Sequence
  Non-cyclic GFR-binding peptide
  MOD_RES (6), (6): Xaa is C or S
  MOD_RES (20), (21), (22), (23), (24): Xaa is A or G
  MOD_RES (25), (26), (27), (28): Xaa is A or G or is absent
DEGLEXVPTEESSLSMLFFXXXXXXXXXLKVYPFLQHNK

SEQ ID NO: 24485 - protein, 35 aa, Artificial Sequence
  Non-cyclic GFR-binding peptide
  MOD_RES (1), (32), (34): Xaa is C or S
XVSQDLSSLSILFFIGKTPKILKVYPMIVKSXKXS

SEQ ID NO: 24486 - protein, 36 aa, Artificial Sequence
  Non-cyclic GFR-binding peptide
  MOD_RES (3), (4): Xaa is C or S
  MOD_RES (18), (19), (20), (21), (22): Xaa is A or G
  MOD_RES (23), (24), (25), (26): Xaa is A or G or is absent
PTXXVPTRLSSLSILFFXXXXXXXXXLKVYPDMVVE

SEQ ID NO: 24487 - protein, 38 aa, Artificial Sequence
  Non-cyclic GFR-binding peptide
  MOD_RES (5), (6): Xaa is C or S
  MOD_RES (20), (21), (22), (23), (24): Xaa is A or G
  MOD_RES (25), (26), (27), (28): Xaa is A or G or is absent
VPKPXXAPTKLSSLSVLFFXXXXXXXXXLKVYPNMVVR

SEQ ID NO: 24488 - protein, 40 aa, Artificial Sequence
  Non-cyclic GFR-binding peptide
  MOD_RES (3), (4), (37), (39): Xaa is C or S
  MOD_RES (18), (19), (20), (21), (22): Xaa is A or G
  MOD_RES (23), (24), (25), (26): Xaa is A or G or is absent
SPXXVPQDLSSLSILFFXXXXXXXXXLKVYPMVVKSXKXS

SEQ ID NO: 24489 - protein, 39 aa, Artificial Sequence
  Non-cyclic GFR-binding peptide
  MOD_RES (2), (39): Xaa is C or S
  MOD_RES (18), (19), (20), (21), (22): Xaa is A or G
  MOD_RES (23), (24), (25), (26): Xaa is A or G or is absent
KXQPSRVHHSSLSVLFFXXXXXXXXXLKVYPRLEEHLEX

SEQ ID NO: 24490 - protein, 43 aa, Artificial Sequence
  Non-cyclic GFR-binding peptide
  MOD_RES (5), (6), (40), (42): Xaa is C or S
  MOD_RES (20), (21), (22), (23), (24): Xaa is A or G
  MOD_RES (25), (26), (27), (28): Xaa is A or G or is absent
VPKPXXAPTQLSSLSVLFFXXXXXXXXXLKVYPNMVVRAXGXH

SEQ ID NO: 24491 - protein, 43 aa, Artificial Sequence
  Non-cyclic GFR-binding peptide
  MOD_RES (6), (7), (41), (43): Xaa is C or S
  MOD_RES (21), (22), (23), (24), (25): Xaa is A or G
  MOD_RES (26), (27), (28), (29): Xaa is A or G or is absent
AAPASXXVPARLSSLSILFFXXXXXXXXXLKVYPDMVVEAXGX

SEQ ID NO: 24492 - protein, 33 aa, Artificial Sequence
  Non-cyclic GFR-binding peptide
  MOD_RES (2), (3): Xaa is C or S
AXXAPTKLSSLSVLFFDSSNNVILKVYPNMVVK

SEQ ID NO: 24493 - protein, 35 aa, Artificial Sequence
  Non-cyclic GFR-binding peptide
  MOD_RES (34), (34): Xaa is C or S
  MOD_RES (14), (15), (16), (17), (18): Xaa is A or G
  MOD_RES (19), (20), (21), (22): Xaa is A or G or is absent
APTKLSSLSVLFFXXXXXXXXXLKVYPNMVVKAXG

SEQ ID NO: 24494 - protein, 35 aa, Artificial Sequence
  Non-cyclic GFR-binding peptide
  MOD_RES (1), (35): Xaa is C or S
  MOD_RES (15), (16), (17), (18), (19): Xaa is A or G
  MOD_RES (20), (21), (22), (23): Xaa is A or G or is absent
XVPTEESSLSMLFFXXXXXXXXXLKVYPFLQHNKX

SEQ ID NO: 24495 - protein, 36 aa, Artificial Sequence
  Non-cyclic GFR-binding peptide
  MOD_RES (34), (36): Xaa is C or S
VPTEESSLSMLFFRIKPHQGQHLKVYPFLQHNKXEX

SEQ ID NO: 24496 - protein, 38 aa, Artificial Sequence
  Non-cyclic GFR-binding peptide
  MOD_RES (5), (6): Xaa is C or S
  MOD_RES (20), (21), (22), (23), (24): Xaa is A or G
  MOD_RES (25), (26), (27), (28): Xaa is A or G or is absent
VPSTXXAPVKTSSLSMLFFXXXXXXXXXLKVYPMIVEE

SEQ ID NO: 24497 - protein, 38 aa, Artificial Sequence
  Non-cyclic GFR-binding peptide
  MOD_RES (4), (5), (37): Xaa is C or S
PKAXXVPTELSSLSMLFFDEYDKVVLKVYPEMVVEGXG

SEQ ID NO: 24498 - protein, 34 aa, Artificial Sequence
  Non-cyclic GFR-binding peptide
  MOD_RES (2), (3): Xaa is C or S
TXXVPTRLSSLSILFFDSANNVVLKVYPDMVVES

SEQ ID NO: 24499 - protein, 33 aa, Artificial Sequence
  Non-cyclic GFR-binding peptide
  MOD_RES (14), (15), (16), (17), (18): Xaa is A or G
  MOD_RES (19), (20), (21), (22): Xaa is A or G or is absent
TPTKMSSLSMLFFXXXXXXXXXLKVYPGMVVDR

SEQ ID NO: 24500 - protein, 38 aa, Artificial Sequence
  Non-cyclic GFR-binding peptide
  MOD_RES (6), (7), (38): Xaa is C or S
ASASPXXVSQDLSSLSILFFIGKTPKILKVYPMIVKSX

SEQ ID NO: 24501 - protein, 34 aa, Artificial Sequence
  Non-cyclic GFR-binding peptide
  MOD_RES (32), (34): Xaa is C or S
VPARLSSLSILFFDAANNVVLKVYPDMVVEAXGX

SEQ ID NO: 24502 - protein, 43 aa, Artificial Sequence
  Non-cyclic GFR-binding peptide
  MOD_RES (6), (7), (41), (43): Xaa is C or S
  MOD_RES (21), (22), (23), (24), (25): Xaa is A or G
  MOD_RES (26), (27), (28), (29): Xaa is A or G or is absent
STPPTXXVPTRLSSLSILFFXXXXXXXXXLKVYPDMVVESXGX

SEQ ID NO: 24503 - protein, 36 aa, Artificial Sequence
  Non-cyclic GFR-binding peptide
  MOD_RES (2), (3): Xaa is C or S
  MOD_RES (17), (18), (19), (20), (21): Xaa is A or G
  MOD_RES (22), (23), (24), (25): Xaa is A or G or is absent
AXXVPTELSSLSMLFFXXXXXXXXXLKVYPEMVVEG

SEQ ID NO: 24504 - protein, 38 aa, Artificial Sequence
  Non-cyclic GFR-binding peptide
  MOD_RES (1), (2), (35), (37): Xaa is C or S
  MOD_RES (16), (17), (18), (19), (20): Xaa is A or G
  MOD_RES (21), (22), (23), (24): Xaa is A or G or is absent
XXAPVKTSSLSMLFFXXXXXXXXXLKVYPMIVEEXGXL

SEQ ID NO: 24505 - protein, 41 aa, Artificial Sequence
  Non-cyclic GFR-binding peptide
  MOD_RES (5), (6), (38), (40): Xaa is C or S
ASKAXXVPTKLSSLSILFFDKGVVTYLKVYPGMAVSEXGXR

SEQ ID NO: 24506 - protein, 40 aa, Artificial Sequence
  Non-cyclic GFR-binding peptide
  MOD_RES (4), (5), (38), (40): Xaa is C or S
  MOD_RES (19), (20), (21), (22), (23): Xaa is A or G
  MOD_RES (24), (25), (26), (27): Xaa is A or G or is absent
AAPXXVPQALSSLSILFFXXXXXXXXXLKVYPMIVRSXKX

SEQ ID NO: 24507 - protein, 36 aa, Artificial Sequence
  Non-cyclic GFR-binding peptide
  MOD_RES (2), (3), (35): Xaa is C or S
TXXVPTRLSSLSILFFDSANNVVLKVYPDMVVESXG

SEQ ID NO: 24508 - protein, 36 aa, Artificial Sequence
  Non-cyclic GFR-binding peptide
  MOD_RES (1), (33), (35): Xaa is C or S
XVPTRLSSLSILFFDSANNVVLKVYPDMVVESXGXR

SEQ ID NO: 24509 - protein, 37 aa, Artificial Sequence
  Non-cyclic GFR-binding peptide
  MOD_RES (4), (5), (37): Xaa is C or S
PPTXXVPTRLSSLSILFFDSANNVVLKVYPDMVVESX

SEQ ID NO: 24510 - protein, 34 aa, Artificial Sequence
  Non-cyclic GFR-binding peptide
  MOD_RES (33), (33): Xaa is C or S
VPTKLSSLSVLFFDDMGVPTLKVYPEGMSVAEXG

SEQ ID NO: 24511 - protein, 33 aa, Artificial Sequence
  Non-cyclic GFR-binding peptide
  MOD_RES (31), (33): Xaa is C or S
VPQDLSSLSILFFVGRTPKVLKVYPMVVKSXKX

SEQ ID NO: 24512 - protein, 41 aa, Artificial Sequence
  Non-cyclic GFR-binding peptide
  MOD_RES (5), (6), (40): Xaa is C or S
  MOD_RES (20), (21), (22), (23), (24): Xaa is A or G
  MOD_RES (25), (26), (27), (28): Xaa is A or G or is absent
APASXXVPARLSSLSILFFXXXXXXXXXLKVYPDMVVEAXG

SEQ ID NO: 24513 - protein, 38 aa, Artificial Sequence
  Non-cyclic GFR-binding peptide
  MOD_RES (1), (2), (36), (38): Xaa is C or S
  MOD_RES (16), (17), (18), (19), (20): Xaa is A or G
  MOD_RES (21), (22), (23), (24): Xaa is A or G or is absent
XXVPARLSSLSILFFXXXXXXXXXLKVYPDMVVEAXGX

SEQ ID NO: 24514 - protein, 35 aa, Artificial Sequence
  Non-cyclic GFR-binding peptide
  MOD_RES (35), (35): Xaa is C or S
  MOD_RES (14), (15), (16), (17), (18): Xaa is A or G
  MOD_RES (19), (20), (21), (22): Xaa is A or G or is absent
SRVHHSSLSVLFFXXXXXXXXXLKVYPRLEEHLEX

SEQ ID NO: 24515 - protein, 34 aa, Artificial Sequence
  Non-cyclic GFR-binding peptide
  MOD_RES (3), (4): Xaa is C or S
SPXXVPQDLSSLSILFFVGRTPKVLKVYPMVVKS

SEQ ID NO: 24516 - protein, 38 aa, Artificial Sequence
  Non-cyclic GFR-binding peptide
  MOD_RES (36), (38): Xaa is C or S
PSRVHHSSLSVLFFEYVRKKPKLLKVYPRLEEHLEXAX

SEQ ID NO: 24517 - protein, 42 aa, Artificial Sequence
  Non-cyclic GFR-binding peptide
  MOD_RES (6), (40), (42): Xaa is C or S
DEGLEXVPTEESSLSMLFFRIKPHQGQHLKVYPFLQHNKXEX

SEQ ID NO: 24518 - protein, 33 aa, Artificial Sequence
  Non-cyclic GFR-binding peptide
  MOD_RES (1), (2), (33): Xaa is C or S
XXVPQALSSLSILFFVGRKPKVLKVYPMIVRSX

SEQ ID NO: 24519 - protein, 36 aa, Artificial Sequence
  Non-cyclic GFR-binding peptide
  MOD_RES (36), (36): Xaa is C or S
PSRVHHSSLSVLFFEYVRKKPKLLKVYPRLEEHLEX

SEQ ID NO: 24520 - protein, 38 aa, Artificial Sequence
  Non-cyclic GFR-binding peptide
  MOD_RES (4), (5), (37): Xaa is C or S
PASXXVPARLSSLSILFFDAANNVVLKVYPDMVVEAXG

SEQ ID NO: 24521 - protein, 38 aa, Artificial Sequence
  Non-cyclic GFR-binding peptide
  MOD_RES (2), (3), (36), (38): Xaa is C or S
AXXVPTKLSSLSVLFFDDMGVPTLKVYPEGMSVAEXGX

SEQ ID NO: 24522 - protein, 38 aa, Artificial Sequence
  Non-cyclic GFR-binding peptide
  MOD_RES (1), (35), (37): Xaa is C or S
  MOD_RES (15), (16), (17), (18), (19): Xaa is A or G
  MOD_RES (20), (21), (22), (23): Xaa is A or G or is absent
XTPTKMSSLSMLFFXXXXXXXXXLKVYPGMVVDRXGXS

SEQ ID NO: 24523 - protein, 43 aa, Artificial Sequence
  Non-cyclic GFR-binding peptide
  MOD_RES (6), (40), (42): Xaa is C or S
  MOD_RES (20), (21), (22), (23), (24): Xaa is A or G
  MOD_RES (25), (26), (27), (28): Xaa is A or G or is absent
DEGLEXVPTEESSLSMLFFXXXXXXXXXLKVYPFLQHNKXEXR

SEQ ID NO: 24524 - protein, 36 aa, Artificial Sequence
  Non-cyclic GFR-binding peptide
  MOD_RES (5), (6): Xaa is C or S
SASPXXVSQDLSSLSILFFIGKTPKILKVYPMIVKS

SEQ ID NO: 24525 - protein, 37 aa, Artificial Sequence
  Non-cyclic GFR-binding peptide
  MOD_RES (36), (36): Xaa is C or S
  MOD_RES (15), (16), (17), (18), (19): Xaa is A or G
  MOD_RES (20), (21), (22), (23): Xaa is A or G or is absent
PSRVHHSSLSVLFFXXXXXXXXXLKVYPRLEEHLEXA

SEQ ID NO: 24526 - protein, 42 aa, Artificial Sequence
  Non-cyclic GFR-binding peptide
  MOD_RES (6), (7), (40), (42): Xaa is C or S
  MOD_RES (21), (22), (23), (24), (25): Xaa is A or G
  MOD_RES (26), (27), (28), (29): Xaa is A or G or is absent
ASAAPXXVPQALSSLSILFFXXXXXXXXXLKVYPMIVRSXKX

SEQ ID NO: 24527 - protein, 33 aa, Artificial Sequence
  Non-cyclic GFR-binding peptide
  MOD_RES (1), (33): Xaa is C or S
XAPTKLSSLSVLFFDDSSNVILKVYPNMVVRSX

SEQ ID NO: 24528 - protein, 33 aa, Artificial Sequence
  Non-cyclic GFR-binding peptide
  MOD_RES (1), (33): Xaa is C or S
XVPTKLSSLSILFFDKGVVTYLKVYPGMAVSEX

SEQ ID NO: 24529 - protein, 34 aa, Artificial Sequence
  Non-cyclic GFR-binding peptide
  MOD_RES (3), (4): Xaa is C or S
SPXXVSQDLSSLSILFFIGKTPKILKVYPMIVKS

SEQ ID NO: 24530 - protein, 36 aa, Artificial Sequence
  Non-cyclic GFR-binding peptide
  MOD_RES (5), (6): Xaa is C or S
SASPXXVPQDLSSLSILFFVGRTPKVLKVYPMVVKS

SEQ ID NO: 24531 - protein, 37 aa, Artificial Sequence
  Non-cyclic GFR-binding peptide
  MOD_RES (6), (7): Xaa is C or S
ASAAPXXVPQALSSLSILFFVGRKPKVLKVYPMIVRS

SEQ ID NO: 24532 - protein, 41 aa, Artificial Sequence
  Non-cyclic GFR-binding peptide
  MOD_RES (4), (5), (38), (40): Xaa is C or S
  MOD_RES (19), (20), (21), (22), (23): Xaa is A or G
  MOD_RES (24), (25), (26), (27): Xaa is A or G or is absent
ASPXXVPQDLSSLSILFFXXXXXXXXXLKVYPMVVKSXKXS

SEQ ID NO: 24533 - protein, 35 aa, Artificial Sequence
  Non-cyclic GFR-binding peptide
  MOD_RES (2), (3), (35): Xaa is C or S
AXXVPTELSSLSMLFFDEYDKVVLKVYPEMVVEGX

SEQ ID NO: 24534 - protein, 34 aa, Artificial Sequence
  Non-cyclic GFR-binding peptide
  MOD_RES (1), (2): Xaa is C or S
  MOD_RES (16), (17), (18), (19), (20): Xaa is A or G
  MOD_RES (21), (22), (23), (24): Xaa is A or G or is absent
XXAPTKLSSLSVLFFXXXXXXXXXLKVYPNMVVR

SEQ ID NO: 24535 - protein, 32 aa, Artificial Sequence
  Non-cyclic GFR-binding peptide
  MOD_RES (1), (1): Xaa is C or S
XVPTELSSLSMLFFDEYDKVVLKVYPEMVVEG

SEQ ID NO: 24536 - protein, 42 aa, Artificial Sequence
  Non-cyclic GFR-binding peptide
  MOD_RES (5), (6), (40), (42): Xaa is C or S
  MOD_RES (20), (21), (22), (23), (24): Xaa is A or G
  MOD_RES (25), (26), (27), (28): Xaa is A or G or is absent
SAGPXXTPTKMSSLSMLFFXXXXXXXXXLKVYPGMVVDRXGX

SEQ ID NO: 24537 - protein, 34 aa, Artificial Sequence
  Non-cyclic GFR-binding peptide
  MOD_RES (1), (2): Xaa is C or S
  MOD_RES (16), (17), (18), (19), (20): Xaa is A or G
  MOD_RES (21), (22), (23), (24): Xaa is A or G or is absent
XXAPTKLSSLSVLFFXXXXXXXXXLKVYPNMVVK

SEQ ID NO: 24538 - protein, 31 aa, Artificial Sequence
  Non-cyclic GFR-binding peptide
  MOD_RES (1), (1): Xaa is C or S
XAPTKLSSLSVLFFDDSSNVILKVYPNMVVR

SEQ ID NO: 24539 - protein, 38 aa, Artificial Sequence
  Non-cyclic GFR-binding peptide
  MOD_RES (2), (3), (37): Xaa is C or S
  MOD_RES (17), (18), (19), (20), (21): Xaa is A or G
  MOD_RES (22), (23), (24), (25): Xaa is A or G or is absent
PXXTPTKMSSLSMLFFXXXXXXXXXLKVYPGMVVDRXG

SEQ ID NO: 24540 - protein, 40 aa, Artificial Sequence
  Non-cyclic GFR-binding peptide
  MOD_RES (3), (37), (39): Xaa is C or S
  MOD_RES (17), (18), (19), (20), (21): Xaa is A or G
  MOD_RES (22), (23), (24), (25): Xaa is A or G or is absent
PTXAPTKLSSLSVLFFXXXXXXXXXLKVYPNMVVRSXGXH

SEQ ID NO: 24541 - protein, 38 aa, Artificial Sequence
  Non-cyclic GFR-binding peptide
  MOD_RES (2), (3), (35), (37): Xaa is C or S
TXXVPTRLSSLSILFFDSANNVVLKVYPDMVVESXGXR

SEQ ID NO: 24542 - protein, 42 aa, Artificial Sequence
  Non-cyclic GFR-binding peptide
  MOD_RES (5), (39), (41): Xaa is C or S
EGLEXVPTEESSLSMLFFRIKPHQGQHLKVYPFLQHNKXEXR

SEQ ID NO: 24543 - protein, 40 aa, Artificial Sequence
  Non-cyclic GFR-binding peptide
  MOD_RES (4), (5), (38), (40): Xaa is C or S
  MOD_RES (19), (20), (21), (22), (23): Xaa is A or G
  MOD_RES (24), (25), (26), (27): Xaa is A or G or is absent
ASPXXVSQDLSSLSILFFXXXXXXXXXLKVYPMIVKSXKX

SEQ ID NO: 24544 - protein, 37 aa, Artificial Sequence
  Non-cyclic GFR-binding peptide
  MOD_RES (3), (37): Xaa is C or S
LEXVPTEESSLSMLFFRIKPHQGQHLKVYPFLQHNKX

SEQ ID NO: 24545 - protein, 44 aa, Artificial Sequence
  Non-cyclic GFR-binding peptide
  MOD_RES (4), (41), (43): Xaa is C or S
  MOD_RES (20), (21), (22), (23), (24): Xaa is A or G
  MOD_RES (25), (26), (27), (28): Xaa is A or G or is absent
SVKXQPSRVHHSSLSVLFFXXXXXXXXXLKVYPRLEEHLEXAXA

SEQ ID NO: 24546 - protein, 39 aa, Artificial Sequence
  Non-cyclic GFR-binding peptide
  MOD_RES (3), (4), (38): Xaa is C or S
  MOD_RES (18), (19), (20), (21), (22): Xaa is A or G
  MOD_RES (23), (24), (25), (26): Xaa is A or G or is absent
KPXXAPTQLSSLSVLFFXXXXXXXXXLKVYPNMVVRAXG

SEQ ID NO: 24547 - protein, 31 aa, Artificial Sequence
  Non-cyclic GFR-binding peptide
VPTKLSSLSILFFDKGVVTYLKVYPGMAVSE

SEQ ID NO: 24548 - protein, 34 aa, Artificial Sequence
  Non-cyclic GFR-binding peptide
  MOD_RES (15), (16), (17), (18), (19): Xaa is A or G
  MOD_RES (20), (21), (22), (23): Xaa is A or G or is absent
PSRVHHSSLSVLFFXXXXXXXXXLKVYPRLEEHL

SEQ ID NO: 24549 - protein, 30 aa, Artificial Sequence
  Non-cyclic GFR-binding peptide
APVKTSSLSMLFFDNGRVLLLKVYPMIVEE

SEQ ID NO: 24550 - protein, 36 aa, Artificial Sequence
  Non-cyclic GFR-binding peptide
  MOD_RES (3), (4): Xaa is C or S
  MOD_RES (18), (19), (20), (21), (22): Xaa is A or G
  MOD_RES (23), (24), (25), (26): Xaa is A or G or is absent
KAXXVPTKLSSLSILFFXXXXXXXXXLKVYPGMAVS

SEQ ID NO: 24551 - protein, 32 aa, Artificial Sequence
  Non-cyclic GFR-binding peptide
  MOD_RES (1), (32): Xaa is C or S
XVPQDLSSLSILFFVGRTPKVLKVYPMVVKSX

SEQ ID NO: 24552 - protein, 42 aa, Artificial Sequence
  Non-cyclic GFR-binding peptide
  MOD_RES (5), (6), (39), (41): Xaa is C or S
  MOD_RES (20), (21), (22), (23), (24): Xaa is A or G
  MOD_RES (25), (26), (27), (28): Xaa is A or G or is absent
VPSTXXAPVKTSSLSMLFFXXXXXXXXXLKVYPMIVEEXGXL

SEQ ID NO: 24553 - protein, 35 aa, Artificial Sequence
  Non-cyclic GFR-binding peptide
  MOD_RES (34), (34): Xaa is C or S
  MOD_RES (14), (15), (16), (17), (18): Xaa is A or G
  MOD_RES (19), (20), (21), (22): Xaa is A or G or is absent
VPTELSSLSMLFFXXXXXXXXXLKVYPEMVVEGXG

SEQ ID NO: 24554 - protein, 40 aa, Artificial Sequence
  Non-cyclic GFR-binding peptide
  MOD_RES (5), (6), (38), (40): Xaa is C or S
ASKAXXVPTKLSSLSILFFDKGVVTYLKVYPGMAVSEXGX

SEQ ID NO: 24555 - protein, 36 aa, Artificial Sequence
  Non-cyclic GFR-binding peptide
  MOD_RES (1), (2), (36): Xaa is C or S
  MOD_RES (16), (17), (18), (19), (20): Xaa is A or G
  MOD_RES (21), (22), (23), (24): Xaa is A or G or is absent
XXVPARLSSLSILFFXXXXXXXXXLKVYPDMVVEAX

SEQ ID NO: 24556 - protein, 36 aa, Artificial Sequence
  Non-cyclic GFR-binding peptide
  MOD_RES (1), (2), (34), (36): Xaa is C or S
XXVPARLSSLSILFFDAANNVVLKVYPDMVVEAXGX

SEQ ID NO: 24557 - protein, 40 aa, Artificial Sequence
  Non-cyclic GFR-binding peptide
  MOD_RES (5), (6), (38), (40): Xaa is C or S
IPKAXXVPTELSSLSMLFFDEYDKVVLKVYPEMVVEGXGX

SEQ ID NO: 24558 - protein, 38 aa, Artificial Sequence
  Non-cyclic GFR-binding peptide
  MOD_RES (5), (5): Xaa is C or S
EGLEXVPTEESSLSMLFFRIKPHQGQHLKVYPFLQHNK

SEQ ID NO: 24559 - protein, 33 aa, Artificial Sequence
  Non-cyclic GFR-binding peptide
  MOD_RES (1), (2): Xaa is C or S
XXAPTKLSSLSVLFFDDSSNVILKVYPNMVVRS

SEQ ID NO: 24560 - protein, 42 aa, Artificial Sequence
  Non-cyclic GFR-binding peptide
  MOD_RES (4), (5), (39), (41): Xaa is C or S
  MOD_RES (19), (20), (21), (22), (23): Xaa is A or G
  MOD_RES (24), (25), (26), (27): Xaa is A or G or is absent
PKPXXAPTQLSSLSVLFFXXXXXXXXXLKVYPNMVVRAXGXH

SEQ ID NO: 24561 - protein, 37 aa, Artificial Sequence
  Non-cyclic GFR-binding peptide
  MOD_RES (34), (36): Xaa is C or S
  MOD_RES (14), (15), (16), (17), (18): Xaa is A or G
  MOD_RES (19), (20), (21), (22): Xaa is A or G or is absent
VPTKLSSLSILFFXXXXXXXXXLKVYPGMAVSEXGXR

SEQ ID NO: 24562 - protein, 39 aa, Artificial Sequence
  Non-cyclic GFR-binding peptide
  MOD_RES (5), (6), (38): Xaa is C or S
TPPTXXVPTRLSSLSILFFDSANNVVLKVYPDMVVESXG

SEQ ID NO: 24563 - protein, 42 aa, Artificial Sequence
  Non-cyclic GFR-binding peptide
  MOD_RES (6), (7), (40), (42): Xaa is C or S
  MOD_RES (21), (22), (23), (24), (25): Xaa is A or G
  MOD_RES (26), (27), (28), (29): Xaa is A or G or is absent
ASASPXXVSQDLSSLSILFFXXXXXXXXXLKVYPMIVKSXKX

SEQ ID NO: 24564 - protein, 38 aa, Artificial Sequence
  Non-cyclic GFR-binding peptide
  MOD_RES (2), (3), (37): Xaa is C or S
  MOD_RES (17), (18), (19), (20), (21): Xaa is A or G
  MOD_RES (22), (23), (24), (25): Xaa is A or G or is absent
PXXAPTKLSSLSVLFFXXXXXXXXXLKVYPNMVVRSXG

SEQ ID NO: 24565 - protein, 39 aa, Artificial Sequence
  Non-cyclic GFR-binding peptide
  MOD_RES (1), (2), (36), (38): Xaa is C or S
  MOD_RES (16), (17), (18), (19), (20): Xaa is A or G
  MOD_RES (21), (22), (23), (24): Xaa is A or G or is absent
XXTPTKMSSLSMLFFXXXXXXXXXLKVYPGMVVDRXGXS

SEQ ID NO: 24566 - protein, 37 aa, Artificial Sequence
  Non-cyclic GFR-binding peptide
  MOD_RES (1), (2), (36): Xaa is C or S
  MOD_RES (16), (17), (18), (19), (20): Xaa is A or G
  MOD_RES (21), (22), (23), (24): Xaa is A or G or is absent
XXVPARLSSLSILFFXXXXXXXXXLKVYPDMVVEAXG

SEQ ID NO: 24567 - protein, 41 aa, Artificial Sequence
  Non-cyclic GFR-binding peptide
  MOD_RES (4), (38), (40): Xaa is C or S
  MOD_RES (18), (19), (20), (21), (22): Xaa is A or G
  MOD_RES (23), (24), (25), (26): Xaa is A or G or is absent
KPTXAPTKLSSLSVLFFXXXXXXXXXLKVYPNMVVRSXGXH

SEQ ID NO: 24568 - protein, 35 aa, Artificial Sequence
  Non-cyclic GFR-binding peptide
  MOD_RES (1), (2), (35): Xaa is C or S
  MOD_RES (16), (17), (18), (19), (20): Xaa is A or G
  MOD_RES (21), (22), (23), (24): Xaa is A or G or is absent
XXAPVKTSSLSMLFFXXXXXXXXXLKVYPMIVEEX

SEQ ID NO: 24569 - protein, 37 aa, Artificial Sequence
  Non-cyclic GFR-binding peptide
  MOD_RES (3), (4): Xaa is C or S
  MOD_RES (18), (19), (20), (21), (22): Xaa is A or G
  MOD_RES (23), (24), (25), (26): Xaa is A or G or is absent
KAXXVPTELSSLSMLFFXXXXXXXXXLKVYPEMVVEG

SEQ ID NO: 24570 - protein, 35 aa, Artificial Sequence
  Non-cyclic GFR-binding peptide
  MOD_RES (4), (5): Xaa is C or S
PSTXXAPVKTSSLSMLFFDNGRVLLLKVYPMIVEE

SEQ ID NO: 24571 - protein, 41 aa, Artificial Sequence
  Non-cyclic GFR-binding peptide
  MOD_RES (7), (41): Xaa is C or S
  MOD_RES (21), (22), (23), (24), (25): Xaa is A or G
  MOD_RES (26), (27), (28), (29): Xaa is A or G or is absent
HVTKPTXAPTKLSSLSVLFFXXXXXXXXXLKVYPNMVVRSX

SEQ ID NO: 24572 - protein, 41 aa, Artificial Sequence
  Non-cyclic GFR-binding peptide
  MOD_RES (6), (7), (41): Xaa is C or S
  MOD_RES (21), (22), (23), (24), (25): Xaa is A or G
  MOD_RES (26), (27), (28), (29): Xaa is A or G or is absent
GSAGPXXTPTKMSSLSMLFFXXXXXXXXXLKVYPGMVVDRX

SEQ ID NO: 24573 - protein, 35 aa, Artificial Sequence
  Non-cyclic GFR-binding peptide
  MOD_RES (2), (3), (34): Xaa is C or S
TXXAPVKTSSLSMLFFDNGRVLLLKVYPMIVEEXG

SEQ ID NO: 24574 - protein, 38 aa, Artificial Sequence
  Non-cyclic GFR-binding peptide
  MOD_RES (4), (5), (37): Xaa is C or S
AGPXXTPTKMSSLSMLFFNDKQQIILKVYPGMVVDRXG

SEQ ID NO: 24575 - protein, 36 aa, Artificial Sequence
  Non-cyclic GFR-binding peptide
  MOD_RES (34), (36): Xaa is C or S
  MOD_RES (14), (15), (16), (17), (18): Xaa is A or G
  MOD_RES (19), (20), (21), (22): Xaa is A or G or is absent
VPTKLSSLSILFFXXXXXXXXXLKVYPGMAVSEXGX

SEQ ID NO: 24576 - protein, 41 aa, Artificial Sequence
  Non-cyclic GFR-binding peptide
  MOD_RES (6), (40): Xaa is C or S
DEGLEXVPTEESSLSMLFFRIKPHQGQHLKVYPFLQHNKXE

SEQ ID NO: 24577 - protein, 37 aa, Artificial Sequence
  Non-cyclic GFR-binding peptide
  MOD_RES (4), (4): Xaa is C or S
  MOD_RES (18), (19), (20), (21), (22): Xaa is A or G
  MOD_RES (23), (24), (25), (26): Xaa is A or G or is absent
GLEXVPTEESSLSMLFFXXXXXXXXXLKVYPFLQHNK

SEQ ID NO: 24578 - protein, 37 aa, Artificial Sequence
  Non-cyclic GFR-binding peptide
  MOD_RES (3), (4), (36): Xaa is C or S
PTXXVPTRLSSLSILFFDSANNVVLKVYPDMVVESXG

SEQ ID NO: 24579 - protein, 39 aa, Artificial Sequence
  Non-cyclic GFR-binding peptide
  MOD_RES (5), (6), (37), (39): Xaa is C or S
SAAPXXVPQALSSLSILFFVGRKPKVLKVYPMIVRSXKX

SEQ ID NO: 24580 - protein, 36 aa, Artificial Sequence
  Non-cyclic GFR-binding peptide
  MOD_RES (4), (5), (36): Xaa is C or S
PSTXXAPVKTSSLSMLFFDNGRVLLLKVYPMIVEEX

SEQ ID NO: 24581 - protein, 37 aa, Artificial Sequence
  Non-cyclic GFR-binding peptide
  MOD_RES (3), (4), (37): Xaa is C or S
  MOD_RES (18), (19), (20), (21), (22): Xaa is A or G
  MOD_RES (23), (24), (25), (26): Xaa is A or G or is absent
SPXXVSQDLSSLSILFFXXXXXXXXXLKVYPMIVKSX

SEQ ID NO: 24582 - protein, 41 aa, Artificial Sequence
  Non-cyclic GFR-binding peptide
  MOD_RES (5), (6), (39), (41): Xaa is C or S
  MOD_RES (20), (21), (22), (23), (24): Xaa is A or G
  MOD_RES (25), (26), (27), (28): Xaa is A or G or is absent
SASPXXVPQDLSSLSILFFXXXXXXXXXLKVYPMVVKSXKX

SEQ ID NO: 24583 - protein, 36 aa, Artificial Sequence
  Non-cyclic GFR-binding peptide
  MOD_RES (3), (4), (35): Xaa is C or S
SPXXVPQDLSSLSILFFVGRTPKVLKVYPMVVKSXK

SEQ ID NO: 24584 - protein, 39 aa, Artificial Sequence
  Non-cyclic GFR-binding peptide
  MOD_RES (2), (3), (36), (38): Xaa is C or S
AXXVPTKLSSLSVLFFDDMGVPTLKVYPEGMSVAEXGXR

SEQ ID NO: 24585 - protein, 35 aa, Artificial Sequence
  Non-cyclic GFR-binding peptide
  MOD_RES (4), (5): Xaa is C or S
SKAXXVPTKLSSLSILFFDKGVVTYLKVYPGMAVS

SEQ ID NO: 24586 - protein, 38 aa, Artificial Sequence
  Non-cyclic GFR-binding peptide
  MOD_RES (5), (6), (37): Xaa is C or S
SAAPXXVPQALSSLSILFFVGRKPKVLKVYPMIVRSXK

SEQ ID NO: 24587 - protein, 34 aa, Artificial Sequence
  Non-cyclic GFR-binding peptide
  MOD_RES (3), (4): Xaa is C or S
KAXXVPTKLSSLSILFFDKGVVTYLKVYPGMAVS

SEQ ID NO: 24588 - protein, 36 aa, Artificial Sequence
  Non-cyclic GFR-binding peptide
  MOD_RES (1), (2), (35): Xaa is C or S
XXVPTKLSSLSVLFFDDMGVPTLKVYPEGMSVAEXG

SEQ ID NO: 24589 - protein, 36 aa, Artificial Sequence
  Non-cyclic GFR-binding peptide
  MOD_RES (4), (5), (36): Xaa is C or S
AAPXXVPQALSSLSILFFVGRKPKVLKVYPMIVRSX

SEQ ID NO: 24590 - protein, 38 aa, Artificial Sequence
  Non-cyclic GFR-binding peptide
  MOD_RES (4), (5): Xaa is C or S
  MOD_RES (19), (20), (21), (22), (23): Xaa is A or G
  MOD_RES (24), (25), (26), (27): Xaa is A or G or is absent
SKAXXVPTKLSSLSILFFXXXXXXXXXLKVYPGMAVSE

SEQ ID NO: 24591 - protein, 35 aa, Artificial Sequence
  Non-cyclic GFR-binding peptide
  MOD_RES (1), (35): Xaa is C or S
  MOD_RES (15), (16), (17), (18), (19): Xaa is A or G
  MOD_RES (20), (21), (22), (23): Xaa is A or G or is absent
XVPARLSSLSILFFXXXXXXXXXLKVYPDMVVEAX

SEQ ID NO: 24592 - protein, 41 aa, Artificial Sequence
  Non-cyclic GFR-binding peptide
  MOD_RES (6), (7), (40): Xaa is C or S
  MOD_RES (21), (22), (23), (24), (25): Xaa is A or G
  MOD_RES (26), (27), (28), (29): Xaa is A or G or is absent
ASAAPXXVPQALSSLSILFFXXXXXXXXXLKVYPMIVRSXK

SEQ ID NO: 24593 - protein, 35 aa, Artificial Sequence
  Non-cyclic GFR-binding peptide
  MOD_RES (1), (34): Xaa is C or S
XVPTKLSSLSVLFFDDMGVPTLKVYPEGMSVAEXG

SEQ ID NO: 24594 - protein, 38 aa, Artificial Sequence
  Non-cyclic GFR-binding peptide
  MOD_RES (2), (3), (35), (37): Xaa is C or S
AXXAPTKLSSLSVLFFDSSNNVILKVYPNMVVKAXGXH

SEQ ID NO: 24595 - protein, 34 aa, Artificial Sequence
  Non-cyclic GFR-binding peptide
  MOD_RES (34), (34): Xaa is C or S
  MOD_RES (14), (15), (16), (17), (18): Xaa is A or G
  MOD_RES (19), (20), (21), (22): Xaa is A or G or is absent
TPTKMSSLSMLFFXXXXXXXXXLKVYPGMVVDRX

SEQ ID NO: 24596 - protein, 33 aa, Artificial Sequence
  Non-cyclic GFR-binding peptide
VPTEESSLSMLFFRIKPHQGQHLKVYPFLQHNK

SEQ ID NO: 24597 - protein, 41 aa, Artificial Sequence
  Non-cyclic GFR-binding peptide
  MOD_RES (7), (41): Xaa is C or S
NDEGLEXVPTEESSLSMLFFRIKPHQGQHLKVYPFLQHNKX

SEQ ID NO: 24598 - protein, 37 aa, Artificial Sequence
  Non-cyclic GFR-binding peptide
  MOD_RES (3), (4), (37): Xaa is C or S
  MOD_RES (18), (19), (20), (21), (22): Xaa is A or G
  MOD_RES (23), (24), (25), (26): Xaa is A or G or is absent
APXXVPQALSSLSILFFXXXXXXXXXLKVYPMIVRSX

SEQ ID NO: 24599 - protein, 39 aa, Artificial Sequence
  Non-cyclic GFR-binding peptide
  MOD_RES (6), (7), (38): Xaa is C or S
ASASPXXVPQDLSSLSILFFVGRTPKVLKVYPMVVKSXK

SEQ ID NO: 24600 - protein, 36 aa, Artificial Sequence
  Non-cyclic GFR-binding peptide
  MOD_RES (2), (36): Xaa is C or S
  MOD_RES (16), (17), (18), (19), (20): Xaa is A or G
  MOD_RES (21), (22), (23), (24): Xaa is A or G or is absent
TXAPTKLSSLSVLFFXXXXXXXXXLKVYPNMVVRSX

SEQ ID NO: 24601 - protein, 36 aa, Artificial Sequence
  Non-cyclic GFR-binding peptide
  MOD_RES (4), (5): Xaa is C or S
PKAXXVPTELSSLSMLFFDEYDKVVLKVYPEMVVEG

SEQ ID NO: 24602 - protein, 37 aa, Artificial Sequence
  Non-cyclic GFR-binding peptide
  MOD_RES (6), (7): Xaa is C or S
TVPKPXXAPTQLSSLSVLFFDDSSNVILKVYPNMVVR

SEQ ID NO: 24603 - protein, 30 aa, Artificial Sequence
  Non-cyclic GFR-binding peptide
APTQLSSLSVLFFDDSSNVILKVYPNMVVR

SEQ ID NO: 24604 - protein, 32 aa, Artificial Sequence
  Non-cyclic GFR-binding peptide
  MOD_RES (1), (2): Xaa is C or S
XXVPQDLSSLSILFFVGRTPKVLKVYPMVVKS

SEQ ID NO: 24605 - protein, 36 aa, Artificial Sequence
  Non-cyclic GFR-binding peptide
  MOD_RES (6), (6): Xaa is C or S
VTKPTXAPTKLSSLSVLFFDDSSNVILKVYPNMVVR

SEQ ID NO: 24606 - protein, 33 aa, Artificial Sequence
  Non-cyclic GFR-binding peptide
  MOD_RES (32), (32): Xaa is C or S
VPTELSSLSMLFFDEYDKVVLKVYPEMVVEGXG

SEQ ID NO: 24607 - protein, 39 aa, Artificial Sequence
  Non-cyclic GFR-binding peptide
  MOD_RES (3), (4), (38): Xaa is C or S
  MOD_RES (18), (19), (20), (21), (22): Xaa is A or G
  MOD_RES (23), (24), (25), (26): Xaa is A or G or is absent
ASXXVPARLSSLSILFFXXXXXXXXXLKVYPDMVVEAXG

SEQ ID NO: 24608 - protein, 36 aa, Artificial Sequence
  Non-cyclic GFR-binding peptide
  MOD_RES (1), (2), (35): Xaa is C or S
  MOD_RES (16), (17), (18), (19), (20): Xaa is A or G
  MOD_RES (21), (22), (23), (24): Xaa is A or G or is absent
XXVSQDLSSLSILFFXXXXXXXXXLKVYPMIVKSXK

SEQ ID NO: 24609 - protein, 39 aa, Artificial Sequence
  Non-cyclic GFR-binding peptide
  MOD_RES (3), (4), (37), (39): Xaa is C or S
  MOD_RES (18), (19), (20), (21), (22): Xaa is A or G
  MOD_RES (23), (24), (25), (26): Xaa is A or G or is absent
APXXVPQALSSLSILFFXXXXXXXXXLKVYPMIVRSXKX

SEQ ID NO: 24610 - protein, 39 aa, Artificial Sequence
  Non-cyclic GFR-binding peptide
  MOD_RES (6), (7), (39): Xaa is C or S
STPPTXXVPTRLSSLSILFFDSANNVVLKVYPDMVVESX

SEQ ID NO: 24611 - protein, 38 aa, Artificial Sequence
  Non-cyclic GFR-binding peptide
  MOD_RES (4), (5), (37): Xaa is C or S
PKAXXAPTKLSSLSVLFFDSSNNVILKVYPNMVVKAXG

SEQ ID NO: 24612 - protein, 35 aa, Artificial Sequence
  Non-cyclic GFR-binding peptide
  MOD_RES (2), (3), (35): Xaa is C or S
PXXAPTQLSSLSVLFFDDSSNVILKVYPNMVVRAX

SEQ ID NO: 24613 - protein, 34 aa, Artificial Sequence
  Non-cyclic GFR-binding peptide
  MOD_RES (1), (2): Xaa is C or S
  MOD_RES (16), (17), (18), (19), (20): Xaa is A or G
  MOD_RES (21), (22), (23), (24): Xaa is A or G or is absent
XXVPARLSSLSILFFXXXXXXXXXLKVYPDMVVE

SEQ ID NO: 24614 - protein, 38 aa, Artificial Sequence
  Non-cyclic GFR-binding peptide
  MOD_RES (6), (7): Xaa is C or S
AAPASXXVPARLSSLSILFFDAANNVVLKVYPDMVVEA

SEQ ID NO: 24615 - protein, 32 aa, Artificial Sequence
  Non-cyclic GFR-binding peptide
  MOD_RES (1), (1): Xaa is C or S
XAPTQLSSLSVLFFDDSSNVILKVYPNMVVRA

SEQ ID NO: 24616 - protein, 37 aa, Artificial Sequence
  Non-cyclic GFR-binding peptide
  MOD_RES (2), (3), (34), (36): Xaa is C or S
PXXVSQDLSSLSILFFIGKTPKILKVYPMIVKSXKXS

SEQ ID NO: 24617 - protein, 43 aa, Artificial Sequence
  Non-cyclic GFR-binding peptide
  MOD_RES (3), (40), (42): Xaa is C or S
VKXQPSRVHHSSLSVLFFEYVRKKPKLLKVYPRLEEHLEXAXA

SEQ ID NO: 24618 - protein, 39 aa, Artificial Sequence
  Non-cyclic GFR-binding peptide
  MOD_RES (6), (7): Xaa is C or S
  MOD_RES (21), (22), (23), (24), (25): Xaa is A or G
  MOD_RES (26), (27), (28), (29): Xaa is A or G or is absent
KASKAXXVPTKLSSLSILFFXXXXXXXXXLKVYPGMAVS

SEQ ID NO: 24619 - protein, 37 aa, Artificial Sequence
  Non-cyclic GFR-binding peptide
  MOD_RES (1), (34), (36): Xaa is C or S
  MOD_RES (15), (16), (17), (18), (19): Xaa is A or G
  MOD_RES (20), (21), (22), (23): Xaa is A or G or is absent
XVSQDLSSLSILFFXXXXXXXXXLKVYPMIVKSXKXS

SEQ ID NO: 24620 - protein, 36 aa, Artificial Sequence
  Non-cyclic GFR-binding peptide
  MOD_RES (1), (2), (36): Xaa is C or S
  MOD_RES (16), (17), (18), (19), (20): Xaa is A or G
  MOD_RES (21), (22), (23), (24): Xaa is A or G or is absent
XXVPTRLSSLSILFFXXXXXXXXXLKVYPDMVVESX

SEQ ID NO: 24621 - protein, 40 aa, Artificial Sequence
  Non-cyclic GFR-binding peptide
  MOD_RES (2), (3), (37), (39): Xaa is C or S
  MOD_RES (17), (18), (19), (20), (21): Xaa is A or G
  MOD_RES (22), (23), (24), (25): Xaa is A or G or is absent
PXXAPTKLSSLSVLFFXXXXXXXXXLKVYPNMVVRSXGXH

SEQ ID NO: 24622 - protein, 38 aa, Artificial Sequence
  Non-cyclic GFR-binding peptide
  MOD_RES (5), (6): Xaa is C or S
  MOD_RES (20), (21), (22), (23), (24): Xaa is A or G
  MOD_RES (25), (26), (27), (28): Xaa is A or G or is absent
VPKPXXAPTQLSSLSVLFFXXXXXXXXXLKVYPNMVVR

SEQ ID NO: 24623 - protein, 33 aa, Artificial Sequence
  Non-cyclic GFR-binding peptide
  MOD_RES (1), (32): Xaa is C or S
XVPQDLSSLSILFFVGRTPKVLKVYPMVVKSXK

SEQ ID NO: 24624 - protein, 38 aa, Artificial Sequence
  Non-cyclic GFR-binding peptide
  MOD_RES (1), (35), (37): Xaa is C or S
  MOD_RES (15), (16), (17), (18), (19): Xaa is A or G
  MOD_RES (20), (21), (22), (23): Xaa is A or G or is absent
XVPTELSSLSMLFFXXXXXXXXXLKVYPEMVVEGXGXR

SEQ ID NO: 24625 - protein, 42 aa, Artificial Sequence
  Non-cyclic GFR-binding peptide
  MOD_RES (6), (7), (41): Xaa is C or S
  MOD_RES (21), (22), (23), (24), (25): Xaa is A or G
  MOD_RES (26), (27), (28), (29): Xaa is A or G or is absent
HVPKPXXAPTKLSSLSVLFFXXXXXXXXXLKVYPNMVVRSXG

SEQ ID NO: 24626 - protein, 44 aa, Artificial Sequence
  Non-cyclic GFR-binding peptide
  MOD_RES (6), (7), (41), (43): Xaa is C or S
  MOD_RES (21), (22), (23), (24), (25): Xaa is A or G
  MOD_RES (26), (27), (28), (29): Xaa is A or G or is absent
HVPKPXXAPTKLSSLSVLFFXXXXXXXXXLKVYPNMVVRSXGXH

SEQ ID NO: 24627 - protein, 41 aa, Artificial Sequence
  Non-cyclic GFR-binding peptide
  MOD_RES (6), (7), (41): Xaa is C or S
  MOD_RES (21), (22), (23), (24), (25): Xaa is A or G
  MOD_RES (26), (27), (28), (29): Xaa is A or G or is absent
SIPKAXXVPTELSSLSMLFFXXXXXXXXXLKVYPEMVVEGX

SEQ ID NO: 24628 - protein, 41 aa, Artificial Sequence
  Non-cyclic GFR-binding peptide
  MOD_RES (6), (7), (41): Xaa is C or S
  MOD_RES (21), (22), (23), (24), (25): Xaa is A or G
  MOD_RES (26), (27), (28), (29): Xaa is A or G or is absent
TVPKPXXAPTQLSSLSVLFFXXXXXXXXXLKVYPNMVVRAX

SEQ ID NO: 24629 - protein, 31 aa, Artificial Sequence
  Non-cyclic GFR-binding peptide
  MOD_RES (1), (1): Xaa is C or S
XVPQDLSSLSILFFVGRTPKVLKVYPMVVKS

SEQ ID NO: 24630 - protein, 40 aa, Artificial Sequence
  Non-cyclic GFR-binding peptide
  MOD_RES (5), (6), (39): Xaa is C or S
  MOD_RES (20), (21), (22), (23), (24): Xaa is A or G
  MOD_RES (25), (26), (27), (28): Xaa is A or G or is absent
SASPXXVPQDLSSLSILFFXXXXXXXXXLKVYPMVVKSXK

SEQ ID NO: 24631 - protein, 41 aa, Artificial Sequence
  Non-cyclic GFR-binding peptide
  MOD_RES (6), (7), (39), (41): Xaa is C or S
SIPKAXXVPTELSSLSMLFFDEYDKVVLKVYPEMVVEGXGX

SEQ ID NO: 24632 - protein, 39 aa, Artificial Sequence
  Non-cyclic GFR-binding peptide
  MOD_RES (3), (4), (36), (38): Xaa is C or S
KAXXVPTELSSLSMLFFDEYDKVVLKVYPEMVVEGXGXR

SEQ ID NO: 24633 - protein, 40 aa, Artificial Sequence
  Non-cyclic GFR-binding peptide
  MOD_RES (5), (39): Xaa is C or S
EGLEXVPTEESSLSMLFFRIKPHQGQHLKVYPFLQHNKXE

SEQ ID NO: 24634 - protein, 40 aa, Artificial Sequence
  Non-cyclic GFR-binding peptide
  MOD_RES (6), (7): Xaa is C or S
  MOD_RES (21), (22), (23), (24), (25): Xaa is A or G
  MOD_RES (26), (27), (28), (29): Xaa is A or G or is absent
AVPKAXXAPTKLSSLSVLFFXXXXXXXXXLKVYPNMVVKA

SEQ ID NO: 24635 - protein, 39 aa, Artificial Sequence
  Non-cyclic GFR-binding peptide
  MOD_RES (2), (3), (37), (39): Xaa is C or S
  MOD_RES (17), (18), (19), (20), (21): Xaa is A or G
  MOD_RES (22), (23), (24), (25): Xaa is A or G or is absent
PXXAPTQLSSLSVLFFXXXXXXXXXLKVYPNMVVRAXGX

SEQ ID NO: 24636 - protein, 37 aa, Artificial Sequence
  Non-cyclic GFR-binding peptide
  MOD_RES (5), (6): Xaa is C or S
APASXXVPARLSSLSILFFDAANNVVLKVYPDMVVEA

SEQ ID NO: 24637 - protein, 38 aa, Artificial Sequence
  Non-cyclic GFR-binding peptide
  MOD_RES (1), (2), (36), (38): Xaa is C or S
  MOD_RES (16), (17), (18), (19), (20): Xaa is A or G
  MOD_RES (21), (22), (23), (24): Xaa is A or G or is absent
XXVPTKLSSLSILFFXXXXXXXXXLKVYPGMAVSEXGX

SEQ ID NO: 24638 - protein, 36 aa, Artificial Sequence
  Non-cyclic GFR-binding peptide
  MOD_RES (3), (4), (36): Xaa is C or S
KAXXAPTKLSSLSVLFFDSSNNVILKVYPNMVVKAX

SEQ ID NO: 24639 - protein, 40 aa, Artificial Sequence
  Non-cyclic GFR-binding peptide
  MOD_RES (1), (38), (40): Xaa is C or S
XQPSRVHHSSLSVLFFEYVRKKPKLLKVYPRLEEHLEXAX

SEQ ID NO: 24640 - protein, 40 aa, Artificial Sequence
  Non-cyclic GFR-binding peptide
  MOD_RES (4), (5), (38), (40): Xaa is C or S
  MOD_RES (19), (20), (21), (22), (23): Xaa is A or G
  MOD_RES (24), (25), (26), (27): Xaa is A or G or is absent
PSTXXAPVKTSSLSMLFFXXXXXXXXXLKVYPMIVEEXGX

SEQ ID NO: 24641 - protein, 35 aa, Artificial Sequence
  Non-cyclic GFR-binding peptide
  MOD_RES (1), (35): Xaa is C or S
  MOD_RES (15), (16), (17), (18), (19): Xaa is A or G
  MOD_RES (20), (21), (22), (23): Xaa is A or G or is absent
XVPTELSSLSMLFFXXXXXXXXXLKVYPEMVVEGX

SEQ ID NO: 24642 - protein, 37 aa, Artificial Sequence
  Non-cyclic GFR-binding peptide
  MOD_RES (2), (3), (36): Xaa is C or S
  MOD_RES (17), (18), (19), (20), (21): Xaa is A or G
  MOD_RES (22), (23), (24), (25): Xaa is A or G or is absent
PXXVPQALSSLSILFFXXXXXXXXXLKVYPMIVRSXK

SEQ ID NO: 24643 - protein, 36 aa, Artificial Sequence
  Non-cyclic GFR-binding peptide
  MOD_RES (2), (3): Xaa is C or S
  MOD_RES (17), (18), (19), (20), (21): Xaa is A or G
  MOD_RES (22), (23), (24), (25): Xaa is A or G or is absent
AXXAPTKLSSLSVLFFXXXXXXXXXLKVYPNMVVKA

SEQ ID NO: 24644 - protein, 39 aa, Artificial Sequence
  Non-cyclic GFR-binding peptide
  MOD_RES (4), (5), (37), (39): Xaa is C or S
PPTXXVPTRLSSLSILFFDSANNVVLKVYPDMVVESXGX

SEQ ID NO: 24645 - protein, 41 aa, Artificial Sequence
  Non-cyclic GFR-binding peptide
  MOD_RES (5), (6), (38), (40): Xaa is C or S
APASXXVPARLSSLSILFFDAANNVVLKVYPDMVVEAXGXR

SEQ ID NO: 24646 - protein, 43 aa, Artificial Sequence
  Non-cyclic GFR-binding peptide
  MOD_RES (6), (40), (42): Xaa is C or S
DEGLEXVPTEESSLSMLFFRIKPHQGQHLKVYPFLQHNKXEXR

SEQ ID NO: 24647 - protein, 35 aa, Artificial Sequence
  Non-cyclic GFR-binding peptide
  MOD_RES (2), (34): Xaa is C or S
TXAPTKLSSLSVLFFDDSSNVILKVYPNMVVRSXG

SEQ ID NO: 24648 - protein, 37 aa, Artificial Sequence
  Non-cyclic GFR-binding peptide
  MOD_RES (4), (5): Xaa is C or S
  MOD_RES (19), (20), (21), (22), (23): Xaa is A or G
  MOD_RES (24), (25), (26), (27): Xaa is A or G or is absent
AGPXXTPTKMSSLSMLFFXXXXXXXXXLKVYPGMVVD

SEQ ID NO: 24649 - protein, 41 aa, Artificial Sequence
  Non-cyclic GFR-binding peptide
  MOD_RES (6), (40): Xaa is C or S
  MOD_RES (20), (21), (22), (23), (24): Xaa is A or G
  MOD_RES (25), (26), (27), (28): Xaa is A or G or is absent
VTKPTXAPTKLSSLSVLFFXXXXXXXXXLKVYPNMVVRSXG

SEQ ID NO: 24650 - protein, 36 aa, Artificial Sequence
  Non-cyclic GFR-binding peptide
  MOD_RES (1), (33), (35): Xaa is C or S
XAPTKLSSLSVLFFDDSSNVILKVYPNMVVRSXGXH

SEQ ID NO: 24651 - protein, 38 aa, Artificial Sequence
  Non-cyclic GFR-binding peptide
  MOD_RES (2), (3), (35), (37): Xaa is C or S
PXXAPTKLSSLSVLFFDDSSNVILKVYPNMVVRSXGXH

SEQ ID NO: 24652 - protein, 41 aa, Artificial Sequence
  Non-cyclic GFR-binding peptide
  MOD_RES (5), (39), (41): Xaa is C or S
  MOD_RES (19), (20), (21), (22), (23): Xaa is A or G
  MOD_RES (24), (25), (26), (27): Xaa is A or G or is absent
EGLEXVPTEESSLSMLFFXXXXXXXXXLKVYPFLQHNKXEX

SEQ ID NO: 24653 - protein, 34 aa, Artificial Sequence
  Non-cyclic GFR-binding peptide
  MOD_RES (32), (34): Xaa is C or S
APTKLSSLSVLFFDDSSNVILKVYPNMVVRSXGX

SEQ ID NO: 24654 - protein, 37 aa, Artificial Sequence
  Non-cyclic GFR-binding peptide
  MOD_RES (1), (2), (34), (36): Xaa is C or S
XXVPARLSSLSILFFDAANNVVLKVYPDMVVEAXGXR

SEQ ID NO: 24655 - protein, 37 aa, Artificial Sequence
  Non-cyclic GFR-binding peptide
  MOD_RES (3), (4), (36): Xaa is C or S
KAXXVPTKLSSLSILFFDKGVVTYLKVYPGMAVSEXG

SEQ ID NO: 24656 - protein, 36 aa, Artificial Sequence
  Non-cyclic GFR-binding peptide
  MOD_RES (34), (36): Xaa is C or S
  MOD_RES (14), (15), (16), (17), (18): Xaa is A or G
  MOD_RES (19), (20), (21), (22): Xaa is A or G or is absent
VPTELSSLSMLFFXXXXXXXXXLKVYPEMVVEGXGX

SEQ ID NO: 24657 - protein, 37 aa, Artificial Sequence
  Non-cyclic GFR-binding peptide
  MOD_RES (1), (2), (35), (37): Xaa is C or S
  MOD_RES (16), (17), (18), (19), (20): Xaa is A or G
  MOD_RES (21), (22), (23), (24): Xaa is A or G or is absent
XXVPQDLSSLSILFFXXXXXXXXXLKVYPMVVKSXKX

SEQ ID NO: 24658 - protein, 34 aa, Artificial Sequence
  Non-cyclic GFR-binding peptide
  MOD_RES (2), (2): Xaa is C or S
  MOD_RES (16), (17), (18), (19), (20): Xaa is A or G
  MOD_RES (21), (22), (23), (24): Xaa is A or G or is absent
TXAPTKLSSLSVLFFXXXXXXXXXLKVYPNMVVR

SEQ ID NO: 24659 - protein, 39 aa, Artificial Sequence
  Non-cyclic GFR-binding peptide
  MOD_RES (6), (7), (38): Xaa is C or S
RVPSTXXAPVKTSSLSMLFFDNGRVLLLKVYPMIVEEXG

SEQ ID NO: 24660 - protein, 38 aa, Artificial Sequence
  Non-cyclic GFR-binding peptide
  MOD_RES (5), (6), (38): Xaa is C or S
VPKAXXAPTKLSSLSVLFFDSSNNVILKVYPNMVVKAX

SEQ ID NO: 24661 - protein, 39 aa, Artificial Sequence
  Non-cyclic GFR-binding peptide
  MOD_RES (3), (4), (37), (39): Xaa is C or S
  MOD_RES (18), (19), (20), (21), (22): Xaa is A or G
  MOD_RES (23), (24), (25), (26): Xaa is A or G or is absent
STXXAPVKTSSLSMLFFXXXXXXXXXLKVYPMIVEEXGX

SEQ ID NO: 24662 - protein, 39 aa, Artificial Sequence
  Non-cyclic GFR-binding peptide
  MOD_RES (4), (4): Xaa is C or S
  MOD_RES (20), (21), (22), (23), (24): Xaa is A or G
  MOD_RES (25), (26), (27), (28): Xaa is A or G or is absent
SVKXQPSRVHHSSLSVLFFXXXXXXXXXLKVYPRLEEHL

SEQ ID NO: 24663 - protein, 41 aa, Artificial Sequence
  Non-cyclic GFR-binding peptide
  MOD_RES (6), (7), (40): Xaa is C or S
KVGKAXXVPTKLSSLSVLFFDDMGVPTLKVYPEGMSVAEXG

SEQ ID NO: 24664 - protein, 37 aa, Artificial Sequence
  Non-cyclic GFR-binding peptide
  MOD_RES (34), (36): Xaa is C or S
  MOD_RES (14), (15), (16), (17), (18): Xaa is A or G
  MOD_RES (19), (20), (21), (22): Xaa is A or G or is absent
APTKLSSLSVLFFXXXXXXXXXLKVYPNMVVKAXGXH

SEQ ID NO: 24665 - protein, 34 aa, Artificial Sequence
  Non-cyclic GFR-binding peptide
  MOD_RES (31), (33): Xaa is C or S
VSQDLSSLSILFFIGKTPKILKVYPMIVKSXKXS

SEQ ID NO: 24666 - protein, 43 aa, Artificial Sequence
  Non-cyclic GFR-binding peptide
  MOD_RES (5), (6), (41), (43): Xaa is C or S
  MOD_RES (20), (21), (22), (23), (24): Xaa is A or G
  MOD_RES (25), (26), (27), (28): Xaa is A or G or is absent
VGKAXXVPTKLSSLSVLFFXXXXXXXXXLKVYPEGMSVAEXGX

SEQ ID NO: 24667 - protein, 41 aa, Artificial Sequence
  Non-cyclic GFR-binding peptide
  MOD_RES (1), (38), (40): Xaa is C or S
  MOD_RES (17), (18), (19), (20), (21): Xaa is A or G
  MOD_RES (22), (23), (24), (25): Xaa is A or G or is absent
XQPSRVHHSSLSVLFFXXXXXXXXXLKVYPRLEEHLEXAXA

SEQ ID NO: 24668 - protein, 42 aa, Artificial Sequence
  Non-cyclic GFR-binding peptide
  MOD_RES (5), (6), (40), (42): Xaa is C or S
  MOD_RES (20), (21), (22), (23), (24): Xaa is A or G
  MOD_RES (25), (26), (27), (28): Xaa is A or G or is absent
TPPTXXVPTRLSSLSILFFXXXXXXXXXLKVYPDMVVESXGX

SEQ ID NO: 24669 - protein, 41 aa, Artificial Sequence
  Non-cyclic GFR-binding peptide
  MOD_RES (3), (40): Xaa is C or S
VKXQPSRVHHSSLSVLFFEYVRKKPKLLKVYPRLEEHLEXA

SEQ ID NO: 24670 - protein, 32 aa, Artificial Sequence
  Non-cyclic GFR-binding peptide
  MOD_RES (1), (1): Xaa is C or S
XVPTRLSSLSILFFDSANNVVLKVYPDMVVES

SEQ ID NO: 24671 - protein, 34 aa, Artificial Sequence
  Non-cyclic GFR-binding peptide
  MOD_RES (32), (34): Xaa is C or S
TPTKMSSLSMLFFNDKQQIILKVYPGMVVDRXGX

SEQ ID NO: 24672 - protein, 39 aa, Artificial Sequence
  Non-cyclic GFR-binding peptide
  MOD_RES (3), (4), (38): Xaa is C or S
  MOD_RES (18), (19), (20), (21), (22): Xaa is A or G
  MOD_RES (23), (24), (25), (26): Xaa is A or G or is absent
KAXXVPTKLSSLSILFFXXXXXXXXXLKVYPGMAVSEXG

SEQ ID NO: 24673 - protein, 40 aa, Artificial Sequence
  Non-cyclic GFR-binding peptide
  MOD_RES (2), (3), (37), (39): Xaa is C or S
  MOD_RES (17), (18), (19), (20), (21): Xaa is A or G
  MOD_RES (22), (23), (24), (25): Xaa is A or G or is absent
SXXVPARLSSLSILFFXXXXXXXXXLKVYPDMVVEAXGXR

SEQ ID NO: 24674 - protein, 36 aa, Artificial Sequence
  Non-cyclic GFR-binding peptide
  MOD_RES (1), (35): Xaa is C or S
  MOD_RES (15), (16), (17), (18), (19): Xaa is A or G
  MOD_RES (20), (21), (22), (23): Xaa is A or G or is absent
XAPTKLSSLSVLFFXXXXXXXXXLKVYPNMVVKAXG

SEQ ID NO: 24675 - protein, 37 aa, Artificial Sequence
  Non-cyclic GFR-binding peptide
  MOD_RES (4), (5), (36): Xaa is C or S
ASPXXVPQDLSSLSILFFVGRTPKVLKVYPMVVKSXK

SEQ ID NO: 24676 - protein, 42 aa, Artificial Sequence
  Non-cyclic GFR-binding peptide
  MOD_RES (4), (5), (39), (41): Xaa is C or S
  MOD_RES (19), (20), (21), (22), (23): Xaa is A or G
  MOD_RES (24), (25), (26), (27): Xaa is A or G or is absent
SKAXXVPTKLSSLSILFFXXXXXXXXXLKVYPGMAVSEXGXR

SEQ ID NO: 24677 - protein, 41 aa, Artificial Sequence
  Non-cyclic GFR-binding peptide
  MOD_RES (5), (6), (40): Xaa is C or S
  MOD_RES (20), (21), (22), (23), (24): Xaa is A or G
  MOD_RES (25), (26), (27), (28): Xaa is A or G or is absent
VPKAXXAPTKLSSLSVLFFXXXXXXXXXLKVYPNMVVKAXG

SEQ ID NO: 24678 - protein, 34 aa, Artificial Sequence
  Non-cyclic GFR-binding peptide
  MOD_RES (2), (3), (34): Xaa is C or S
PXXVPQDLSSLSILFFVGRTPKVLKVYPMVVKSX

SEQ ID NO: 24679 - protein, 36 aa, Artificial Sequence
  Non-cyclic GFR-binding peptide
  MOD_RES (4), (5): Xaa is C or S
PKAXXAPTKLSSLSVLFFDSSNNVILKVYPNMVVKA

SEQ ID NO: 24680 - protein, 37 aa, Artificial Sequence
  Non-cyclic GFR-binding peptide
  MOD_RES (3), (4), (37): Xaa is C or S
  MOD_RES (18), (19), (20), (21), (22): Xaa is A or G
  MOD_RES (23), (24), (25), (26): Xaa is A or G or is absent
SPXXVPQDLSSLSILFFXXXXXXXXXLKVYPMVVKSX

SEQ ID NO: 24681 - protein, 32 aa, Artificial Sequence
  Non-cyclic GFR-binding peptide
  MOD_RES (31), (31): Xaa is C or S
VPQALSSLSILFFVGRKPKVLKVYPMIVRSXK

SEQ ID NO: 24682 - protein, 42 aa, Artificial Sequence
  Non-cyclic GFR-binding peptide
  MOD_RES (4), (5), (39), (41): Xaa is C or S
  MOD_RES (19), (20), (21), (22), (23): Xaa is A or G
  MOD_RES (24), (25), (26), (27): Xaa is A or G or is absent
AGPXXTPTKMSSLSMLFFXXXXXXXXXLKVYPGMVVDRXGXS

SEQ ID NO: 24683 - protein, 38 aa, Artificial Sequence
  Non-cyclic GFR-binding peptide
  MOD_RES (3), (4), (36), (38): Xaa is C or S
KAXXAPTKLSSLSVLFFDSSNNVILKVYPNMVVKAXGX

SEQ ID NO: 24684 - protein, 38 aa, Artificial Sequence
  Non-cyclic GFR-binding peptide
  MOD_RES (2), (36), (38): Xaa is C or S
EXVPTEESSLSMLFFRIKPHQGQHLKVYPFLQHNKXEX

SEQ ID NO: 24685 - protein, 40 aa, Artificial Sequence
  Non-cyclic GFR-binding peptide
  MOD_RES (4), (38), (40): Xaa is C or S
  MOD_RES (18), (19), (20), (21), (22): Xaa is A or G
  MOD_RES (23), (24), (25), (26): Xaa is A or G or is absent
GLEXVPTEESSLSMLFFXXXXXXXXXLKVYPFLQHNKXEX

SEQ ID NO: 24686 - protein, 37 aa, Artificial Sequence
  Non-cyclic GFR-binding peptide
  MOD_RES (2), (3), (37): Xaa is C or S
  MOD_RES (17), (18), (19), (20), (21): Xaa is A or G
  MOD_RES (22), (23), (24), (25): Xaa is A or G or is absent
SXXVPARLSSLSILFFXXXXXXXXXLKVYPDMVVEAX

SEQ ID NO: 24687 - protein, 34 aa, Artificial Sequence
  Non-cyclic GFR-binding peptide
  MOD_RES (14), (15), (16), (17), (18): Xaa is A or G
  MOD_RES (19), (20), (21), (22): Xaa is A or G or is absent
SRVHHSSLSVLFFXXXXXXXXXLKVYPRLEEHLE

SEQ ID NO: 24688 - protein, 40 aa, Artificial Sequence
  Non-cyclic GFR-binding peptide
  MOD_RES (4), (5), (37), (39): Xaa is C or S
PKAXXVPTELSSLSMLFFDEYDKVVLKVYPEMVVEGXGXR

SEQ ID NO: 24689 - protein, 40 aa, Artificial Sequence
  Non-cyclic GFR-binding peptide
  MOD_RES (3), (4), (39): Xaa is C or S
  MOD_RES (18), (19), (20), (21), (22): Xaa is A or G
  MOD_RES (23), (24), (25), (26): Xaa is A or G or is absent
KAXXVPTKLSSLSVLFFXXXXXXXXXLKVYPEGMSVAEXG

SEQ ID NO: 24690 - protein, 38 aa, Artificial Sequence
  Non-cyclic GFR-binding peptide
  MOD_RES (3), (4), (38): Xaa is C or S
  MOD_RES (18), (19), (20), (21), (22): Xaa is A or G
  MOD_RES (23), (24), (25), (26): Xaa is A or G or is absent
ASXXVPARLSSLSILFFXXXXXXXXXLKVYPDMVVEAX

SEQ ID NO: 24691 - protein, 38 aa, Artificial Sequence
  Non-cyclic GFR-binding peptide
  MOD_RES (5), (6): Xaa is C or S
  MOD_RES (20), (21), (22), (23), (24): Xaa is A or G
  MOD_RES (25), (26), (27), (28): Xaa is A or G or is absent
APASXXVPARLSSLSILFFXXXXXXXXXLKVYPDMVVE

SEQ ID NO: 24692 - protein, 44 aa, Artificial Sequence
  Non-cyclic GFR-binding peptide
  MOD_RES (5), (42), (44): Xaa is C or S
  MOD_RES (21), (22), (23), (24), (25): Xaa is A or G
  MOD_RES (26), (27), (28), (29): Xaa is A or G or is absent
SSVKXQPSRVHHSSLSVLFFXXXXXXXXXLKVYPRLEEHLEXAX

SEQ ID NO: 24693 - protein, 38 aa, Artificial Sequence
  Non-cyclic GFR-binding peptide
  MOD_RES (4), (5), (36), (38): Xaa is C or S
ASPXXVPQDLSSLSILFFVGRTPKVLKVYPMVVKSXKX

SEQ ID NO: 24694 - protein, 33 aa, Artificial Sequence
  Non-cyclic GFR-binding peptide
  MOD_RES (14), (15), (16), (17), (18): Xaa is A or G
  MOD_RES (19), (20), (21), (22): Xaa is A or G or is absent
VPTRLSSLSILFFXXXXXXXXXLKVYPDMVVES

SEQ ID NO: 24695 - protein, 37 aa, Artificial Sequence
  Non-cyclic GFR-binding peptide
  MOD_RES (5), (6): Xaa is C or S
ASKAXXVPTKLSSLSILFFDKGVVTYLKVYPGMAVSE

SEQ ID NO: 24696 - protein, 34 aa, Artificial Sequence
  Non-cyclic GFR-binding peptide
  MOD_RES (31), (33): Xaa is C or S
VPQALSSLSILFFVGRKPKVLKVYPMIVRSXKXS

SEQ ID NO: 24697 - protein, 38 aa, Artificial Sequence
  Non-cyclic GFR-binding peptide
  MOD_RES (1), (35), (37): Xaa is C or S
XVPTEESSLSMLFFRIKPHQGQHLKVYPFLQHNKXEXR

SEQ ID NO: 24698 - protein, 39 aa, Artificial Sequence
  Non-cyclic GFR-binding peptide
  MOD_RES (6), (7): Xaa is C or S
  MOD_RES (21), (22), (23), (24), (25): Xaa is A or G
  MOD_RES (26), (27), (28), (29): Xaa is A or G or is absent
ASASPXXVSQDLSSLSILFFXXXXXXXXXLKVYPMIVKS

SEQ ID NO: 24699 - protein, 38 aa, Artificial Sequence
  Non-cyclic GFR-binding peptide
  MOD_RES (4), (5): Xaa is C or S
  MOD_RES (19), (20), (21), (22), (23): Xaa is A or G
  MOD_RES (24), (25), (26), (27): Xaa is A or G or is absent
PKAXXAPTKLSSLSVLFFXXXXXXXXXLKVYPNMVVKA

SEQ ID NO: 24700 - protein, 36 aa, Artificial Sequence
  Non-cyclic GFR-binding peptide
  MOD_RES (4), (36): Xaa is C or S
KPTXAPTKLSSLSVLFFDDSSNVILKVYPNMVVRSX

SEQ ID NO: 24701 - protein, 35 aa, Artificial Sequence
  Non-cyclic GFR-binding peptide
  MOD_RES (1), (35): Xaa is C or S
  MOD_RES (15), (16), (17), (18), (19): Xaa is A or G
  MOD_RES (20), (21), (22), (23): Xaa is A or G or is absent
XVPTKLSSLSILFFXXXXXXXXXLKVYPGMAVSEX

SEQ ID NO: 24702 - protein, 37 aa, Artificial Sequence
  Non-cyclic GFR-binding peptide
  MOD_RES (3), (3): Xaa is C or S
VKXQPSRVHHSSLSVLFFEYVRKKPKLLKVYPRLEEH

SEQ ID NO: 24703 - protein, 40 aa, Artificial Sequence
  Non-cyclic GFR-binding peptide
  MOD_RES (5), (5): Xaa is C or S
  MOD_RES (21), (22), (23), (24), (25): Xaa is A or G
  MOD_RES (26), (27), (28), (29): Xaa is A or G or is absent
SSVKXQPSRVHHSSLSVLFFXXXXXXXXXLKVYPRLEEHL

SEQ ID NO: 24704 - protein, 31 aa, Artificial Sequence
  Non-cyclic GFR-binding peptide
  MOD_RES (1), (1): Xaa is C or S
XTPTKMSSLSMLFFNDKQQIILKVYPGMVVD

SEQ ID NO: 24705 - protein, 37 aa, Artificial Sequence
  Non-cyclic GFR-binding peptide
  MOD_RES (3), (4), (36): Xaa is C or S
KPXXAPTKLSSLSVLFFDDSSNVILKVYPNMVVRSXG

SEQ ID NO: 24706 - protein, 37 aa, Artificial Sequence
  Non-cyclic GFR-binding peptide
  MOD_RES (4), (5): Xaa is C or S
  MOD_RES (19), (20), (21), (22), (23): Xaa is A or G
  MOD_RES (24), (25), (26), (27): Xaa is A or G or is absent
PKPXXAPTQLSSLSVLFFXXXXXXXXXLKVYPNMVVR

SEQ ID NO: 24707 - protein, 38 aa, Artificial Sequence
  Non-cyclic GFR-binding peptide
  MOD_RES (5), (6): Xaa is C or S
  MOD_RES (20), (21), (22), (23), (24): Xaa is A or G
  MOD_RES (25), (26), (27), (28): Xaa is A or G or is absent
SASPXXVPQDLSSLSILFFXXXXXXXXXLKVYPMVVKS

SEQ ID NO: 24708 - protein, 40 aa, Artificial Sequence
  Non-cyclic GFR-binding peptide
  MOD_RES (4), (5), (39): Xaa is C or S
  MOD_RES (19), (20), (21), (22), (23): Xaa is A or G
  MOD_RES (24), (25), (26), (27): Xaa is A or G or is absent
SKAXXVPTKLSSLSILFFXXXXXXXXXLKVYPGMAVSEXG

SEQ ID NO: 24709 - protein, 38 aa, Artificial Sequence
  Non-cyclic GFR-binding peptide
  MOD_RES (1), (2), (35), (37): Xaa is C or S
XXVPTKLSSLSVLFFDDMGVPTLKVYPEGMSVAEXGXR

SEQ ID NO: 24710 - protein, 38 aa, Artificial Sequence
  Non-cyclic GFR-binding peptide
  MOD_RES (4), (5): Xaa is C or S
  MOD_RES (19), (20), (21), (22), (23): Xaa is A or G
  MOD_RES (24), (25), (26), (27): Xaa is A or G or is absent
PASXXVPARLSSLSILFFXXXXXXXXXLKVYPDMVVEA

SEQ ID NO: 24711 - protein, 33 aa, Artificial Sequence
  Non-cyclic GFR-binding peptide
  MOD_RES (2), (3): Xaa is C or S
PXXVSQDLSSLSILFFIGKTPKILKVYPMIVKS

SEQ ID NO: 24712 - protein, 33 aa, Artificial Sequence
  Non-cyclic GFR-binding peptide
  MOD_RES (15), (16), (17), (18), (19): Xaa is A or G
  MOD_RES (20), (21), (22), (23): Xaa is A or G or is absent
PSRVHHSSLSVLFFXXXXXXXXXLKVYPRLEEH

SEQ ID NO: 24713 - protein, 39 aa, Artificial Sequence
  Non-cyclic GFR-binding peptide
  MOD_RES (5), (6), (39): Xaa is C or S
  MOD_RES (20), (21), (22), (23), (24): Xaa is A or G
  MOD_RES (25), (26), (27), (28): Xaa is A or G or is absent
SASPXXVPQDLSSLSILFFXXXXXXXXXLKVYPMVVKSX

SEQ ID NO: 24714 - protein, 43 aa, Artificial Sequence
  Non-cyclic GFR-binding peptide
  MOD_RES (5), (6), (40), (42): Xaa is C or S
  MOD_RES (20), (21), (22), (23), (24): Xaa is A or G
  MOD_RES (25), (26), (27), (28): Xaa is A or G or is absent
SAGPXXTPTKMSSLSMLFFXXXXXXXXXLKVYPGMVVDRXGXS

SEQ ID NO: 24715 - protein, 42 aa, Artificial Sequence
  Non-cyclic GFR-binding peptide
  MOD_RES (6), (7), (39), (41): Xaa is C or S
GSAGPXXTPTKMSSLSMLFFNDKQQIILKVYPGMVVDRXGXS

SEQ ID NO: 24716 - protein, 36 aa, Artificial Sequence
  Non-cyclic GFR-binding peptide
  MOD_RES (1), (35): Xaa is C or S
  MOD_RES (15), (16), (17), (18), (19): Xaa is A or G
  MOD_RES (20), (21), (22), (23): Xaa is A or G or is absent
XVPTEESSLSMLFFXXXXXXXXXLKVYPFLQHNKXE

SEQ ID NO: 24717 - protein, 40 aa, Artificial Sequence
  Non-cyclic GFR-binding peptide
  MOD_RES (2), (3), (37), (39): Xaa is C or S
  MOD_RES (17), (18), (19), (20), (21): Xaa is A or G
  MOD_RES (22), (23), (24), (25): Xaa is A or G or is absent
AXXVPTELSSLSMLFFXXXXXXXXXLKVYPEMVVEGXGXR

SEQ ID NO: 24718 - protein, 37 aa, Artificial Sequence
  Non-cyclic GFR-binding peptide
  MOD_RES (2), (3), (35), (37): Xaa is C or S
PXXAPTQLSSLSVLFFDDSSNVILKVYPNMVVRAXGX

SEQ ID NO: 24719 - protein, 35 aa, Artificial Sequence
  Non-cyclic GFR-binding peptide
  MOD_RES (1), (35): Xaa is C or S
  MOD_RES (15), (16), (17), (18), (19): Xaa is A or G
  MOD_RES (20), (21), (22), (23): Xaa is A or G or is absent
XAPTKLSSLSVLFFXXXXXXXXXLKVYPNMVVKAX

SEQ ID NO: 24720 - protein, 37 aa, Artificial Sequence
  Non-cyclic GFR-binding peptide
  MOD_RES (6), (7): Xaa is C or S
AAPASXXVPARLSSLSILFFDAANNVVLKVYPDMVVE

SEQ ID NO: 24721 - protein, 36 aa, Artificial Sequence
  Non-cyclic GFR-binding peptide
  MOD_RES (1), (2), (36): Xaa is C or S
  MOD_RES (16), (17), (18), (19), (20): Xaa is A or G
  MOD_RES (21), (22), (23), (24): Xaa is A or G or is absent
XXVPTKLSSLSILFFXXXXXXXXXLKVYPGMAVSEX

SEQ ID NO: 24722 - protein, 38 aa, Artificial Sequence
  Non-cyclic GFR-binding peptide
  MOD_RES (2), (3), (35), (37): Xaa is C or S
AXXVPTELSSLSMLFFDEYDKVVLKVYPEMVVEGXGXR

SEQ ID NO: 24723 - protein, 37 aa, Artificial Sequence
  Non-cyclic GFR-binding peptide
  MOD_RES (1), (35), (37): Xaa is C or S
  MOD_RES (15), (16), (17), (18), (19): Xaa is A or G
  MOD_RES (20), (21), (22), (23): Xaa is A or G or is absent
XVPTRLSSLSILFFXXXXXXXXXLKVYPDMVVESXGX

SEQ ID NO: 24724 - protein, 41 aa, Artificial Sequence
  Non-cyclic GFR-binding peptide
  MOD_RES (6), (7), (41): Xaa is C or S
  MOD_RES (21), (22), (23), (24), (25): Xaa is A or G
  MOD_RES (26), (27), (28), (29): Xaa is A or G or is absent
KASKAXXVPTKLSSLSILFFXXXXXXXXXLKVYPGMAVSEX

SEQ ID NO: 24725 - protein, 43 aa, Artificial Sequence
  Non-cyclic GFR-binding peptide
  MOD_RES (6), (40), (42): Xaa is C or S
  MOD_RES (20), (21), (22), (23), (24): Xaa is A or G
  MOD_RES (25), (26), (27), (28): Xaa is A or G or is absent
VTKPTXAPTKLSSLSVLFFXXXXXXXXXLKVYPNMVVRSXGXH

SEQ ID NO: 24726 - protein, 40 aa, Artificial Sequence
  Non-cyclic GFR-binding peptide
  MOD_RES (3), (4), (38), (40): Xaa is C or S
  MOD_RES (18), (19), (20), (21), (22): Xaa is A or G
  MOD_RES (23), (24), (25), (26): Xaa is A or G or is absent
KPXXAPTQLSSLSVLFFXXXXXXXXXLKVYPNMVVRAXGX

SEQ ID NO: 24727 - protein, 34 aa, Artificial Sequence
  Non-cyclic GFR-binding peptide
  MOD_RES (1), (2): Xaa is C or S
  MOD_RES (16), (17), (18), (19), (20): Xaa is A or G
  MOD_RES (21), (22), (23), (24): Xaa is A or G or is absent
XXVPTKLSSLSILFFXXXXXXXXXLKVYPGMAVS

SEQ ID NO: 24728 - protein, 41 aa, Artificial Sequence
  Non-cyclic GFR-binding peptide
  MOD_RES (6), (7), (41): Xaa is C or S
  MOD_RES (21), (22), (23), (24), (25): Xaa is A or G
  MOD_RES (26), (27), (28), (29): Xaa is A or G or is absent
STPPTXXVPTRLSSLSILFFXXXXXXXXXLKVYPDMVVESX

SEQ ID NO: 24729 - protein, 32 aa, Artificial Sequence
  Non-cyclic GFR-binding peptide
  MOD_RES (1), (32): Xaa is C or S
XVSQDLSSLSILFFIGKTPKILKVYPMIVKSX

SEQ ID NO: 24730 - protein, 36 aa, Artificial Sequence
  Non-cyclic GFR-binding peptide
  MOD_RES (1), (35): Xaa is C or S
  MOD_RES (15), (16), (17), (18), (19): Xaa is A or G
  MOD_RES (20), (21), (22), (23): Xaa is A or G or is absent
XVPTRLSSLSILFFXXXXXXXXXLKVYPDMVVESXG

SEQ ID NO: 24731 - protein, 37 aa, Artificial Sequence
  Non-cyclic GFR-binding peptide
  MOD_RES (2), (3), (37): Xaa is C or S
  MOD_RES (17), (18), (19), (20), (21): Xaa is A or G
  MOD_RES (22), (23), (24), (25): Xaa is A or G or is absent
PXXAPTQLSSLSVLFFXXXXXXXXXLKVYPNMVVRAX

SEQ ID NO: 24732 - protein, 37 aa, Artificial Sequence
  Non-cyclic GFR-binding peptide
  MOD_RES (35), (37): Xaa is C or S
  MOD_RES (14), (15), (16), (17), (18): Xaa is A or G
  MOD_RES (19), (20), (21), (22): Xaa is A or G or is absent
VPTKLSSLSVLFFXXXXXXXXXLKVYPEGMSVAEXGX

SEQ ID NO: 24733 - protein, 38 aa, Artificial Sequence
  Non-cyclic GFR-binding peptide
  MOD_RES (5), (6): Xaa is C or S
  MOD_RES (20), (21), (22), (23), (24): Xaa is A or G
  MOD_RES (25), (26), (27), (28): Xaa is A or G or is absent
SAGPXXTPTKMSSLSMLFFXXXXXXXXXLKVYPGMVVD

SEQ ID NO: 24734 - protein, 32 aa, Artificial Sequence
  Non-cyclic GFR-binding peptide
  MOD_RES (1), (2): Xaa is C or S
XXVPARLSSLSILFFDAANNVVLKVYPDMVVE

SEQ ID NO: 24735 - protein, 37 aa, Artificial Sequence
  Non-cyclic GFR-binding peptide
  MOD_RES (4), (5), (36): Xaa is C or S
AAPXXVPQALSSLSILFFVGRKPKVLKVYPMIVRSXK

SEQ ID NO: 24736 - protein, 41 aa, Artificial Sequence
  Non-cyclic GFR-binding peptide
  MOD_RES (4), (5), (39), (41): Xaa is C or S
  MOD_RES (19), (20), (21), (22), (23): Xaa is A or G
  MOD_RES (24), (25), (26), (27): Xaa is A or G or is absent
PKAXXVPTELSSLSMLFFXXXXXXXXXLKVYPEMVVEGXGX

SEQ ID NO: 24737 - protein, 35 aa, Artificial Sequence
  Non-cyclic GFR-binding peptide
  MOD_RES (32), (34): Xaa is C or S
APTKLSSLSVLFFDDSSNVILKVYPNMVVRSXGXH

SEQ ID NO: 24738 - protein, 32 aa, Artificial Sequence
  Non-cyclic GFR-binding peptide
  MOD_RES (32), (32): Xaa is C or S
VPARLSSLSILFFDAANNVVLKVYPDMVVEAX

SEQ ID NO: 24739 - protein, 36 aa, Artificial Sequence
  Non-cyclic GFR-binding peptide
  MOD_RES (1), (2), (36): Xaa is C or S
  MOD_RES (16), (17), (18), (19), (20): Xaa is A or G
  MOD_RES (21), (22), (23), (24): Xaa is A or G or is absent
XXVPTELSSLSMLFFXXXXXXXXXLKVYPEMVVEGX

SEQ ID NO: 24740 - protein, 31 aa, Artificial Sequence
  Non-cyclic GFR-binding peptide
APTQLSSLSVLFFDDSSNVILKVYPNMVVRA

SEQ ID NO: 24741 - protein, 33 aa, Artificial Sequence
  Non-cyclic GFR-binding peptide
  MOD_RES (2), (3): Xaa is C or S
PXXVPQALSSLSILFFVGRKPKVLKVYPMIVRS

SEQ ID NO: 24742 - protein, 39 aa, Artificial Sequence
  Non-cyclic GFR-binding peptide
  MOD_RES (5), (6): Xaa is C or S
  MOD_RES (20), (21), (22), (23), (24): Xaa is A or G
  MOD_RES (25), (26), (27), (28): Xaa is A or G or is absent
IPKAXXVPTELSSLSMLFFXXXXXXXXXLKVYPEMVVEG

SEQ ID NO: 24743 - protein, 37 aa, Artificial Sequence
  Non-cyclic GFR-binding peptide
  MOD_RES (1), (2), (35), (37): Xaa is C or S
  MOD_RES (16), (17), (18), (19), (20): Xaa is A or G
  MOD_RES (21), (22), (23), (24): Xaa is A or G or is absent
XXVPQALSSLSILFFXXXXXXXXXLKVYPMIVRSXKX

SEQ ID NO: 24744 - protein, 37 aa, Artificial Sequence
  Non-cyclic GFR-binding peptide
  MOD_RES (2), (36): Xaa is C or S
  MOD_RES (16), (17), (18), (19), (20): Xaa is A or G
  MOD_RES (21), (22), (23), (24): Xaa is A or G or is absent
EXVPTEESSLSMLFFXXXXXXXXXLKVYPFLQHNKXE

SEQ ID NO: 24745 - protein, 41 aa, Artificial Sequence
  Non-cyclic GFR-binding peptide
  MOD_RES (2), (39), (41): Xaa is C or S
  MOD_RES (18), (19), (20), (21), (22): Xaa is A or G
  MOD_RES (23), (24), (25), (26): Xaa is A or G or is absent
KXQPSRVHHSSLSVLFFXXXXXXXXXLKVYPRLEEHLEXAX

SEQ ID NO: 24746 - protein, 37 aa, Artificial Sequence
  Non-cyclic GFR-binding peptide
  MOD_RES (2), (36): Xaa is C or S
  MOD_RES (16), (17), (18), (19), (20): Xaa is A or G
  MOD_RES (21), (22), (23), (24): Xaa is A or G or is absent
TXAPTKLSSLSVLFFXXXXXXXXXLKVYPNMVVRSXG

SEQ ID NO: 24747 - protein, 36 aa, Artificial Sequence
  Non-cyclic GFR-binding peptide
  MOD_RES (3), (4), (35): Xaa is C or S
SPXXVSQDLSSLSILFFIGKTPKILKVYPMIVKSXK

SEQ ID NO: 24748 - protein, 35 aa, Artificial Sequence
  Non-cyclic GFR-binding peptide
  MOD_RES (16), (17), (18), (19), (20): Xaa is A or G
  MOD_RES (21), (22), (23), (24): Xaa is A or G or is absent
QPSRVHHSSLSVLFFXXXXXXXXXLKVYPRLEEHL

SEQ ID NO: 24749 - protein, 40 aa, Artificial Sequence
  Non-cyclic GFR-binding peptide
  MOD_RES (2), (3), (37), (39): Xaa is C or S
  MOD_RES (17), (18), (19), (20), (21): Xaa is A or G
  MOD_RES (22), (23), (24), (25): Xaa is A or G or is absent
PXXAPTQLSSLSVLFFXXXXXXXXXLKVYPNMVVRAXGXH

SEQ ID NO: 24750 - protein, 33 aa, Artificial Sequence
  Non-cyclic GFR-binding peptide
  MOD_RES (1), (32): Xaa is C or S
XAPVKTSSLSMLFFDNGRVLLLKVYPMIVEEXG

SEQ ID NO: 24751 - protein, 36 aa, Artificial Sequence
  Non-cyclic GFR-binding peptide
  MOD_RES (2), (3), (34), (36): Xaa is C or S
PXXVSQDLSSLSILFFIGKTPKILKVYPMIVKSXKX

SEQ ID NO: 24752 - protein, 39 aa, Artificial Sequence
  Non-cyclic GFR-binding peptide
  MOD_RES (6), (7), (39): Xaa is C or S
AVPKAXXAPTKLSSLSVLFFDSSNNVILKVYPNMVVKAX

SEQ ID NO: 24753 - protein, 33 aa, Artificial Sequence
  Non-cyclic GFR-binding peptide
  MOD_RES (1), (33): Xaa is C or S
XAPTQLSSLSVLFFDDSSNVILKVYPNMVVRAX

SEQ ID NO: 24754 - protein, 35 aa, Artificial Sequence
  Non-cyclic GFR-binding peptide
  MOD_RES (32), (34): Xaa is C or S
VPARLSSLSILFFDAANNVVLKVYPDMVVEAXGXR

SEQ ID NO: 24755 - protein, 34 aa, Artificial Sequence
  Non-cyclic GFR-binding peptide
  MOD_RES (1), (34): Xaa is C or S
  MOD_RES (15), (16), (17), (18), (19): Xaa is A or G
  MOD_RES (20), (21), (22), (23): Xaa is A or G or is absent
XVPQALSSLSILFFXXXXXXXXXLKVYPMIVRSX

SEQ ID NO: 24756 - protein, 39 aa, Artificial Sequence
  Non-cyclic GFR-binding peptide
  MOD_RES (2), (3), (36), (38): Xaa is C or S
  MOD_RES (17), (18), (19), (20), (21): Xaa is A or G
  MOD_RES (22), (23), (24), (25): Xaa is A or G or is absent
PXXVSQDLSSLSILFFXXXXXXXXXLKVYPMIVKSXKXS

SEQ ID NO: 24757 - protein, 39 aa, Artificial Sequence
  Non-cyclic GFR-binding peptide
  MOD_RES (4), (5), (36), (38): Xaa is C or S
PSTXXAPVKTSSLSMLFFDNGRVLLLKVYPMIVEEXGXL

SEQ ID NO: 24758 - protein, 35 aa, Artificial Sequence
  Non-cyclic GFR-binding peptide
  MOD_RES (3), (4): Xaa is C or S
PTXXVPTRLSSLSILFFDSANNVVLKVYPDMVVES

SEQ ID NO: 24759 - protein, 36 aa, Artificial Sequence
  Non-cyclic GFR-binding peptide
  MOD_RES (2), (3), (34), (36): Xaa is C or S
PXXVPQALSSLSILFFVGRKPKVLKVYPMIVRSXKX

SEQ ID NO: 24760 - protein, 38 aa, Artificial Sequence
  Non-cyclic GFR-binding peptide
  MOD_RES (4), (5), (37): Xaa is C or S
PPTXXVPTRLSSLSILFFDSANNVVLKVYPDMVVESXG

SEQ ID NO: 24761 - protein, 42 aa, Artificial Sequence
  Non-cyclic GFR-binding peptide
  MOD_RES (5), (39), (41): Xaa is C or S
  MOD_RES (19), (20), (21), (22), (23): Xaa is A or G
  MOD_RES (24), (25), (26), (27): Xaa is A or G or is absent
EGLEXVPTEESSLSMLFFXXXXXXXXXLKVYPFLQHNKXEXR

SEQ ID NO: 24762 - protein, 42 aa, Artificial Sequence
  Non-cyclic GFR-binding peptide
  MOD_RES (5), (6), (39), (41): Xaa is C or S
  MOD_RES (20), (21), (22), (23), (24): Xaa is A or G
  MOD_RES (25), (26), (27), (28): Xaa is A or G or is absent
SASPXXVSQDLSSLSILFFXXXXXXXXXLKVYPMIVKSXKXS

SEQ ID NO: 24763 - protein, 37 aa, Artificial Sequence
  Non-cyclic GFR-binding peptide
  MOD_RES (3), (4), (36): Xaa is C or S
ASXXVPARLSSLSILFFDAANNVVLKVYPDMVVEAXG

SEQ ID NO: 24764 - protein, 37 aa, Artificial Sequence
  Non-cyclic GFR-binding peptide
  MOD_RES (5), (6), (37): Xaa is C or S
SASPXXVPQDLSSLSILFFVGRTPKVLKVYPMVVKSX

SEQ ID NO: 24765 - protein, 34 aa, Artificial Sequence
  Non-cyclic GFR-binding peptide
  MOD_RES (2), (3): Xaa is C or S
PXXAPTQLSSLSVLFFDDSSNVILKVYPNMVVRA

SEQ ID NO: 24766 - protein, 36 aa, Artificial Sequence
  Non-cyclic GFR-binding peptide
  MOD_RES (3), (35): Xaa is C or S
PTXAPTKLSSLSVLFFDDSSNVILKVYPNMVVRSXG

SEQ ID NO: 24767 - protein, 38 aa, Artificial Sequence
  Non-cyclic GFR-binding peptide
  MOD_RES (3), (4), (38): Xaa is C or S
  MOD_RES (18), (19), (20), (21), (22): Xaa is A or G
  MOD_RES (23), (24), (25), (26): Xaa is A or G or is absent
PTXXVPTRLSSLSILFFXXXXXXXXXLKVYPDMVVESX

SEQ ID NO: 24768 - protein, 39 aa, Artificial Sequence
  Non-cyclic GFR-binding peptide
  MOD_RES (4), (5), (37), (39): Xaa is C or S
AGPXXTPTKMSSLSMLFFNDKQQIILKVYPGMVVDRXGX

SEQ ID NO: 24769 - protein, 40 aa, Artificial Sequence
  Non-cyclic GFR-binding peptide
  MOD_RES (2), (39): Xaa is C or S
KXQPSRVHHSSLSVLFFEYVRKKPKLLKVYPRLEEHLEXA

SEQ ID NO: 24770 - protein, 38 aa, Artificial Sequence
  Non-cyclic GFR-binding peptide
  MOD_RES (5), (5): Xaa is C or S
  MOD_RES (19), (20), (21), (22), (23): Xaa is A or G
  MOD_RES (24), (25), (26), (27): Xaa is A or G or is absent
TKPTXAPTKLSSLSVLFFXXXXXXXXXLKVYPNMVVRS

SEQ ID NO: 24771 - protein, 38 aa, Artificial Sequence
  Non-cyclic GFR-binding peptide
  MOD_RES (3), (4), (38): Xaa is C or S
  MOD_RES (18), (19), (20), (21), (22): Xaa is A or G
  MOD_RES (23), (24), (25), (26): Xaa is A or G or is absent
KAXXAPTKLSSLSVLFFXXXXXXXXXLKVYPNMVVKAX

SEQ ID NO: 24772 - protein, 38 aa, Artificial Sequence
  Non-cyclic GFR-binding peptide
  MOD_RES (2), (3), (36), (38): Xaa is C or S
  MOD_RES (17), (18), (19), (20), (21): Xaa is A or G
  MOD_RES (22), (23), (24), (25): Xaa is A or G or is absent
TXXAPVKTSSLSMLFFXXXXXXXXXLKVYPMIVEEXGX

SEQ ID NO: 24773 - protein, 41 aa, Artificial Sequence
  Non-cyclic GFR-binding peptide
  MOD_RES (3), (4), (38), (40): Xaa is C or S
  MOD_RES (18), (19), (20), (21), (22): Xaa is A or G
  MOD_RES (23), (24), (25), (26): Xaa is A or G or is absent
KPXXAPTKLSSLSVLFFXXXXXXXXXLKVYPNMVVRSXGXH

SEQ ID NO: 24774 - protein, 31 aa, Artificial Sequence
  Non-cyclic GFR-binding peptide
VPTELSSLSMLFFDEYDKVVLKVYPEMVVEG

SEQ ID NO: 24775 - protein, 45 aa, Artificial Sequence
  Non-cyclic GFR-binding peptide
  MOD_RES (5), (42), (44): Xaa is C or S
SSVKXQPSRVHHSSLSVLFFEYVRKKPKLLKVYPRLEEHLEXAXA

SEQ ID NO: 24776 - protein, 40 aa, Artificial Sequence
  Non-cyclic GFR-binding peptide
  MOD_RES (5), (6), (40): Xaa is C or S
  MOD_RES (20), (21), (22), (23), (24): Xaa is A or G
  MOD_RES (25), (26), (27), (28): Xaa is A or G or is absent
VPKPXXAPTKLSSLSVLFFXXXXXXXXXLKVYPNMVVRSX

SEQ ID NO: 24777 - protein, 37 aa, Artificial Sequence
  Non-cyclic GFR-binding peptide
  MOD_RES (1), (2), (36): Xaa is C or S
  MOD_RES (16), (17), (18), (19), (20): Xaa is A or G
  MOD_RES (21), (22), (23), (24): Xaa is A or G or is absent
XXAPTKLSSLSVLFFXXXXXXXXXLKVYPNMVVRSXG

SEQ ID NO: 24778 - protein, 35 aa, Artificial Sequence
  Non-cyclic GFR-binding peptide
  MOD_RES (2), (3): Xaa is C or S
  MOD_RES (17), (18), (19), (20), (21): Xaa is A or G
  MOD_RES (22), (23), (24), (25): Xaa is A or G or is absent
TXXAPVKTSSLSMLFFXXXXXXXXXLKVYPMIVEE

SEQ ID NO: 24779 - protein, 39 aa, Artificial Sequence
  Non-cyclic GFR-binding peptide
  MOD_RES (4), (5), (39): Xaa is C or S
  MOD_RES (19), (20), (21), (22), (23): Xaa is A or G
  MOD_RES (24), (25), (26), (27): Xaa is A or G or is absent
PKPXXAPTQLSSLSVLFFXXXXXXXXXLKVYPNMVVRAX

SEQ ID NO: 24780 - protein, 40 aa, Artificial Sequence
  Non-cyclic GFR-binding peptide
  MOD_RES (3), (4), (37), (39): Xaa is C or S
  MOD_RES (18), (19), (20), (21), (22): Xaa is A or G
  MOD_RES (23), (24), (25), (26): Xaa is A or G or is absent
STXXAPVKTSSLSMLFFXXXXXXXXXLKVYPMIVEEXGXL

SEQ ID NO: 24781 - protein, 39 aa, Artificial Sequence
  Non-cyclic GFR-binding peptide
  MOD_RES (6), (7), (38): Xaa is C or S
ASASPXXVSQDLSSLSILFFIGKTPKILKVYPMIVKSXK

SEQ ID NO: 24782 - protein, 36 aa, Artificial Sequence
  Non-cyclic GFR-binding peptide
  MOD_RES (3), (3): Xaa is C or S
LEXVPTEESSLSMLFFRIKPHQGQHLKVYPFLQHNK

SEQ ID NO: 24783 - protein, 34 aa, Artificial Sequence
  Non-cyclic GFR-binding peptide
  MOD_RES (34), (34): Xaa is C or S
VPTEESSLSMLFFRIKPHQGQHLKVYPFLQHNKX

SEQ ID NO: 24784 - protein, 39 aa, Artificial Sequence
  Non-cyclic GFR-binding peptide
  MOD_RES (5), (6), (38): Xaa is C or S
SAGPXXTPTKMSSLSMLFFNDKQQIILKVYPGMVVDRXG

SEQ ID NO: 24785 - protein, 37 aa, Artificial Sequence
  Non-cyclic GFR-binding peptide
  MOD_RES (1), (2), (36): Xaa is C or S
  MOD_RES (16), (17), (18), (19), (20): Xaa is A or G
  MOD_RES (21), (22), (23), (24): Xaa is A or G or is absent
XXVPTELSSLSMLFFXXXXXXXXXLKVYPEMVVEGXG

SEQ ID NO: 24786 - protein, 42 aa, Artificial Sequence
  Non-cyclic GFR-binding peptide
  MOD_RES (6), (7), (39), (41): Xaa is C or S
KIPKAXXVPTELSSLSMLFFDENEKVVLKVYPDMVVEGXGXR

SEQ ID NO: 24787 - protein, 33 aa, Artificial Sequence
  Non-cyclic GFR-binding peptide
  MOD_RES (1), (33): Xaa is C or S
XVPARLSSLSILFFDAANNVVLKVYPDMVVEAX

SEQ ID NO: 24788 - protein, 32 aa, Artificial Sequence
  Non-cyclic GFR-binding peptide
  MOD_RES (1), (2): Xaa is C or S
XXVPQALSSLSILFFVGRKPKVLKVYPMIVRS

SEQ ID NO: 24789 - protein, 37 aa, Artificial Sequence
  Non-cyclic GFR-binding peptide
  MOD_RES (6), (7): Xaa is C or S
KASKAXXVPTKLSSLSILFFDKGVVTYLKVYPGMAVS

SEQ ID NO: 24790 - protein, 38 aa, Artificial Sequence
  Non-cyclic GFR-binding peptide
  MOD_RES (5), (37): Xaa is C or S
TKPTXAPTKLSSLSVLFFDDSSNVILKVYPNMVVRSXG

SEQ ID NO: 24791 - protein, 40 aa, Artificial Sequence
  Non-cyclic GFR-binding peptide
  MOD_RES (4), (5), (37), (39): Xaa is C or S
PKAXXAPTKLSSLSVLFFDSSNNVILKVYPNMVVKAXGXH

SEQ ID NO: 24792 - protein, 36 aa, Artificial Sequence
  Non-cyclic GFR-binding peptide
  MOD_RES (1), (2), (34), (36): Xaa is C or S
XXTPTKMSSLSMLFFNDKQQIILKVYPGMVVDRXGX

SEQ ID NO: 24793 - protein, 36 aa, Artificial Sequence
  Non-cyclic GFR-binding peptide
  MOD_RES (1), (2), (36): Xaa is C or S
  MOD_RES (16), (17), (18), (19), (20): Xaa is A or G
  MOD_RES (21), (22), (23), (24): Xaa is A or G or is absent
XXTPTKMSSLSMLFFXXXXXXXXXLKVYPGMVVDRX

SEQ ID NO: 24794 - protein, 40 aa, Artificial Sequence
  Non-cyclic GFR-binding peptide
  MOD_RES (2), (39): Xaa is C or S
  MOD_RES (18), (19), (20), (21), (22): Xaa is A or G
  MOD_RES (23), (24), (25), (26): Xaa is A or G or is absent
KXQPSRVHHSSLSVLFFXXXXXXXXXLKVYPRLEEHLEXA

SEQ ID NO: 24795 - protein, 36 aa, Artificial Sequence
  Non-cyclic GFR-binding peptide
  MOD_RES (2), (3), (36): Xaa is C or S
  MOD_RES (17), (18), (19), (20), (21): Xaa is A or G
  MOD_RES (22), (23), (24), (25): Xaa is A or G or is absent
PXXVPQALSSLSILFFXXXXXXXXXLKVYPMIVRSX

SEQ ID NO: 24796 - protein, 32 aa, Artificial Sequence
  Non-cyclic GFR-binding peptide
  MOD_RES (14), (15), (16), (17), (18): Xaa is A or G
  MOD_RES (19), (20), (21), (22): Xaa is A or G or is absent
VSQDLSSLSILFFXXXXXXXXXLKVYPMIVKS

SEQ ID NO: 24797 - protein, 36 aa, Artificial Sequence
  Non-cyclic GFR-binding peptide
  MOD_RES (4), (4): Xaa is C or S
  MOD_RES (18), (19), (20), (21), (22): Xaa is A or G
  MOD_RES (23), (24), (25), (26): Xaa is A or G or is absent
KPTXAPTKLSSLSVLFFXXXXXXXXXLKVYPNMVVR

SEQ ID NO: 24798 - protein, 39 aa, Artificial Sequence
  Non-cyclic GFR-binding peptide
  MOD_RES (5), (6), (38): Xaa is C or S
ASKAXXVPTKLSSLSILFFDKGVVTYLKVYPGMAVSEXG

SEQ ID NO: 24799 - protein, 38 aa, Artificial Sequence
  Non-cyclic GFR-binding peptide
  MOD_RES (4), (4): Xaa is C or S
SVKXQPSRVHHSSLSVLFFEYVRKKPKLLKVYPRLEEH

SEQ ID NO: 24800 - protein, 39 aa, Artificial Sequence
  Non-cyclic GFR-binding peptide
  MOD_RES (6), (7): Xaa is C or S
  MOD_RES (21), (22), (23), (24), (25): Xaa is A or G
  MOD_RES (26), (27), (28), (29): Xaa is A or G or is absent
TVPKPXXAPTQLSSLSVLFFXXXXXXXXXLKVYPNMVVR

SEQ ID NO: 24801 - protein, 39 aa, Artificial Sequence
  Non-cyclic GFR-binding peptide
  MOD_RES (4), (5), (39): Xaa is C or S
  MOD_RES (19), (20), (21), (22), (23): Xaa is A or G
  MOD_RES (24), (25), (26), (27): Xaa is A or G or is absent
PASXXVPARLSSLSILFFXXXXXXXXXLKVYPDMVVEAX

SEQ ID NO: 24802 - protein, 31 aa, Artificial Sequence
  Non-cyclic GFR-binding peptide
APTKLSSLSVLFFDDSSNVILKVYPNMVVRS

SEQ ID NO: 24803 - protein, 35 aa, Artificial Sequence
  Non-cyclic GFR-binding peptide
  MOD_RES (33), (35): Xaa is C or S
VPTKLSSLSVLFFDDMGVPTLKVYPEGMSVAEXGX

SEQ ID NO: 24804 - protein, 41 aa, Artificial Sequence
  Non-cyclic GFR-binding peptide
  MOD_RES (3), (4), (38), (40): Xaa is C or S
  MOD_RES (18), (19), (20), (21), (22): Xaa is A or G
  MOD_RES (23), (24), (25), (26): Xaa is A or G or is absent
PTXXVPTRLSSLSILFFXXXXXXXXXLKVYPDMVVESXGXR

SEQ ID NO: 24805 - protein, 35 aa, Artificial Sequence
  Non-cyclic GFR-binding peptide
  MOD_RES (1), (33), (35): Xaa is C or S
XAPTKLSSLSVLFFDSSNNVILKVYPNMVVKAXGX

SEQ ID NO: 24806 - protein, 41 aa, Artificial Sequence
  Non-cyclic GFR-binding peptide
  MOD_RES (6), (7), (38), (40): Xaa is C or S
ASASPXXVSQDLSSLSILFFIGKTPKILKVYPMIVKSXKXS

SEQ ID NO: 24807 - protein, 39 aa, Artificial Sequence
  Non-cyclic GFR-binding peptide
  MOD_RES (2), (3), (36), (38): Xaa is C or S
  MOD_RES (17), (18), (19), (20), (21): Xaa is A or G
  MOD_RES (22), (23), (24), (25): Xaa is A or G or is absent
PXXVPQDLSSLSILFFXXXXXXXXXLKVYPMVVKSXKXS

SEQ ID NO: 24808 - protein, 34 aa, Artificial Sequence
  Non-cyclic GFR-binding peptide
  MOD_RES (1), (1): Xaa is C or S
  MOD_RES (15), (16), (17), (18), (19): Xaa is A or G
  MOD_RES (20), (21), (22), (23): Xaa is A or G or is absent
XVPTRLSSLSILFFXXXXXXXXXLKVYPDMVVES

SEQ ID NO: 24809 - protein, 31 aa, Artificial Sequence
  Non-cyclic GFR-binding peptide
  MOD_RES (31), (31): Xaa is C or S
VPQALSSLSILFFVGRKPKVLKVYPMIVRSX

SEQ ID NO: 24810 - protein, 38 aa, Artificial Sequence
  Non-cyclic GFR-binding peptide
  MOD_RES (6), (7): Xaa is C or S
SIPKAXXVPTELSSLSMLFFDEYDKVVLKVYPEMVVEG

SEQ ID NO: 24811 - protein, 38 aa, Artificial Sequence
  Non-cyclic GFR-binding peptide
  MOD_RES (1), (35), (37): Xaa is C or S
  MOD_RES (15), (16), (17), (18), (19): Xaa is A or G
  MOD_RES (20), (21), (22), (23): Xaa is A or G or is absent
XVPTEESSLSMLFFXXXXXXXXXLKVYPFLQHNKXEXR

SEQ ID NO: 24812 - protein, 36 aa, Artificial Sequence
  Non-cyclic GFR-binding peptide
  MOD_RES (2), (3): Xaa is C or S
  MOD_RES (17), (18), (19), (20), (21): Xaa is A or G
  MOD_RES (22), (23), (24), (25): Xaa is A or G or is absent
PXXAPTKLSSLSVLFFXXXXXXXXXLKVYPNMVVRS

SEQ ID NO: 24813 - protein, 33 aa, Artificial Sequence
  Non-cyclic GFR-binding peptide
  MOD_RES (1), (33): Xaa is C or S
XTPTKMSSLSMLFFNDKQQIILKVYPGMVVDRX

SEQ ID NO: 24814 - protein, 33 aa, Artificial Sequence
  Non-cyclic GFR-binding peptide
  MOD_RES (1), (1): Xaa is C or S
  MOD_RES (15), (16), (17), (18), (19): Xaa is A or G
  MOD_RES (20), (21), (22), (23): Xaa is A or G or is absent
XVPTKLSSLSILFFXXXXXXXXXLKVYPGMAVS

SEQ ID NO: 24815 - protein, 35 aa, Artificial Sequence
  Non-cyclic GFR-binding peptide
  MOD_RES (34), (34): Xaa is C or S
  MOD_RES (14), (15), (16), (17), (18): Xaa is A or G
  MOD_RES (19), (20), (21), (22): Xaa is A or G or is absent
APTKLSSLSVLFFXXXXXXXXXLKVYPNMVVRSXG

SEQ ID NO: 24816 - protein, 33 aa, Artificial Sequence
  Non-cyclic GFR-binding peptide
  MOD_RES (2), (3): Xaa is C or S
TXXVPTRLSSLSILFFDSANNVVLKVYPDMVVE

SEQ ID NO: 24817 - protein, 37 aa, Artificial Sequence
  Non-cyclic GFR-binding peptide
  MOD_RES (3), (4), (37): Xaa is C or S
KAXXVPTKLSSLSVLFFDDMGVPTLKVYPEGMSVAEX

SEQ ID NO: 24818 - protein, 37 aa, Artificial Sequence
  Non-cyclic GFR-binding peptide
  MOD_RES (2), (3), (36): Xaa is C or S
  MOD_RES (17), (18), (19), (20), (21): Xaa is A or G
  MOD_RES (22), (23), (24), (25): Xaa is A or G or is absent
PXXVSQDLSSLSILFFXXXXXXXXXLKVYPMIVKSXK

SEQ ID NO: 24819 - protein, 32 aa, Artificial Sequence
  Non-cyclic GFR-binding peptide
  MOD_RES (1), (32): Xaa is C or S
XVPQALSSLSILFFVGRKPKVLKVYPMIVRSX

SEQ ID NO: 24820 - protein, 36 aa, Artificial Sequence
  Non-cyclic GFR-binding peptide
  MOD_RES (34), (36): Xaa is C or S
  MOD_RES (14), (15), (16), (17), (18): Xaa is A or G
  MOD_RES (19), (20), (21), (22): Xaa is A or G or is absent
VPARLSSLSILFFXXXXXXXXXLKVYPDMVVEAXGX

SEQ ID NO: 24821 - protein, 34 aa, Artificial Sequence
  Non-cyclic GFR-binding peptide
  MOD_RES (1), (2): Xaa is C or S
XXVPTKLSSLSVLFFDDMGVPTLKVYPEGMSVAE

SEQ ID NO: 24822 - protein, 39 aa, Artificial Sequence
  Non-cyclic GFR-binding peptide
  MOD_RES (5), (5): Xaa is C or S
  MOD_RES (21), (22), (23), (24), (25): Xaa is A or G
  MOD_RES (26), (27), (28), (29): Xaa is A or G or is absent
SSVKXQPSRVHHSSLSVLFFXXXXXXXXXLKVYPRLEEH

SEQ ID NO: 24823 - protein, 37 aa, Artificial Sequence
  Non-cyclic GFR-binding peptide
  MOD_RES (1), (2), (37): Xaa is C or S
  MOD_RES (16), (17), (18), (19), (20): Xaa is A or G
  MOD_RES (21), (22), (23), (24): Xaa is A or G or is absent
XXVPTKLSSLSVLFFXXXXXXXXXLKVYPEGMSVAEX

SEQ ID NO: 24824 - protein, 38 aa, Artificial Sequence
  Non-cyclic GFR-binding peptide
  MOD_RES (5), (6): Xaa is C or S
  MOD_RES (20), (21), (22), (23), (24): Xaa is A or G
  MOD_RES (25), (26), (27), (28): Xaa is A or G or is absent
SASPXXVSQDLSSLSILFFXXXXXXXXXLKVYPMIVKS

SEQ ID NO: 24825 - protein, 32 aa, Artificial Sequence
  Non-cyclic GFR-binding peptide
VPTEESSLSMLFFRIKPHQGQHLKVYPFLQHN

SEQ ID NO: 24826 - protein, 37 aa, Artificial Sequence
  Non-cyclic GFR-binding peptide
  MOD_RES (1), (34), (36): Xaa is C or S
  MOD_RES (15), (16), (17), (18), (19): Xaa is A or G
  MOD_RES (20), (21), (22), (23): Xaa is A or G or is absent
XVPQDLSSLSILFFXXXXXXXXXLKVYPMVVKSXKXS

SEQ ID NO: 24827 - protein, 34 aa, Artificial Sequence
  Non-cyclic GFR-binding peptide
  MOD_RES (2), (3): Xaa is C or S
PXXAPTKLSSLSVLFFDDSSNVILKVYPNMVVRS

SEQ ID NO: 24828 - protein, 37 aa, Artificial Sequence
  Non-cyclic GFR-binding peptide
  MOD_RES (6), (6): Xaa is C or S
VTKPTXAPTKLSSLSVLFFDDSSNVILKVYPNMVVRS

SEQ ID NO: 24829 - protein, 35 aa, Artificial Sequence
  Non-cyclic GFR-binding peptide
  MOD_RES (3), (4), (35): Xaa is C or S
APXXVPQALSSLSILFFVGRKPKVLKVYPMIVRSX

SEQ ID NO: 24830 - protein, 36 aa, Artificial Sequence
  Non-cyclic GFR-binding peptide
  MOD_RES (1), (2), (36): Xaa is C or S
  MOD_RES (16), (17), (18), (19), (20): Xaa is A or G
  MOD_RES (21), (22), (23), (24): Xaa is A or G or is absent
XXAPTKLSSLSVLFFXXXXXXXXXLKVYPNMVVRSX

SEQ ID NO: 24831 - protein, 40 aa, Artificial Sequence
  Non-cyclic GFR-binding peptide
  MOD_RES (3), (4), (38), (40): Xaa is C or S
  MOD_RES (18), (19), (20), (21), (22): Xaa is A or G
  MOD_RES (23), (24), (25), (26): Xaa is A or G or is absent
KAXXVPTELSSLSMLFFXXXXXXXXXLKVYPEMVVEGXGX

SEQ ID NO: 24832 - protein, 34 aa, Artificial Sequence
  Non-cyclic GFR-binding peptide
  MOD_RES (34), (34): Xaa is C or S
  MOD_RES (14), (15), (16), (17), (18): Xaa is A or G
  MOD_RES (19), (20), (21), (22): Xaa is A or G or is absent
VPTEESSLSMLFFXXXXXXXXXLKVYPFLQHNKX

SEQ ID NO: 24833 - protein, 38 aa, Artificial Sequence
  Non-cyclic GFR-binding peptide
  MOD_RES (1), (2), (37): Xaa is C or S
  MOD_RES (16), (17), (18), (19), (20): Xaa is A or G
  MOD_RES (21), (22), (23), (24): Xaa is A or G or is absent
XXVPTKLSSLSVLFFXXXXXXXXXLKVYPEGMSVAEXG

SEQ ID NO: 24834 - protein, 35 aa, Artificial Sequence
  Non-cyclic GFR-binding peptide
  MOD_RES (2), (3): Xaa is C or S
  MOD_RES (17), (18), (19), (20), (21): Xaa is A or G
  MOD_RES (22), (23), (24), (25): Xaa is A or G or is absent
PXXTPTKMSSLSMLFFXXXXXXXXXLKVYPGMVVD

SEQ ID NO: 24835 - protein, 41 aa, Artificial Sequence
  Non-cyclic GFR-binding peptide
  MOD_RES (6), (38), (40): Xaa is C or S
VTKPTXAPTKLSSLSVLFFDDSSNVILKVYPNMVVRSXGXH

SEQ ID NO: 24836 - protein, 32 aa, Artificial Sequence
  Non-cyclic GFR-binding peptide
  MOD_RES (1), (2): Xaa is C or S
XXVSQDLSSLSILFFIGKTPKILKVYPMIVKS

SEQ ID NO: 24837 - protein, 36 aa, Artificial Sequence
  Non-cyclic GFR-binding peptide
  MOD_RES (1), (2), (35): Xaa is C or S
  MOD_RES (16), (17), (18), (19), (20): Xaa is A or G
  MOD_RES (21), (22), (23), (24): Xaa is A or G or is absent
XXVPQDLSSLSILFFXXXXXXXXXLKVYPMVVKSXK

SEQ ID NO: 24838 - protein, 35 aa, Artificial Sequence
  Non-cyclic GFR-binding peptide
  MOD_RES (2), (3): Xaa is C or S
  MOD_RES (17), (18), (19), (20), (21): Xaa is A or G
  MOD_RES (22), (23), (24), (25): Xaa is A or G or is absent
AXXVPTKLSSLSILFFXXXXXXXXXLKVYPGMAVS

SEQ ID NO: 24839 - protein, 35 aa, Artificial Sequence
  Non-cyclic GFR-binding peptide
  MOD_RES (1), (2): Xaa is C or S
  MOD_RES (16), (17), (18), (19), (20): Xaa is A or G
  MOD_RES (21), (22), (23), (24): Xaa is A or G or is absent
XXAPTKLSSLSVLFFXXXXXXXXXLKVYPNMVVKA

SEQ ID NO: 24840 - protein, 33 aa, Artificial Sequence
  Non-cyclic GFR-binding peptide
  MOD_RES (1), (1): Xaa is C or S
  MOD_RES (15), (16), (17), (18), (19): Xaa is A or G
  MOD_RES (20), (21), (22), (23): Xaa is A or G or is absent
XVPARLSSLSILFFXXXXXXXXXLKVYPDMVVE

SEQ ID NO: 24841 - protein, 40 aa, Artificial Sequence
  Non-cyclic GFR-binding peptide
  MOD_RES (3), (40): Xaa is C or S
  MOD_RES (19), (20), (21), (22), (23): Xaa is A or G
  MOD_RES (24), (25), (26), (27): Xaa is A or G or is absent
VKXQPSRVHHSSLSVLFFXXXXXXXXXLKVYPRLEEHLEX

SEQ ID NO: 24842 - protein, 38 aa, Artificial Sequence
  Non-cyclic GFR-binding peptide
  MOD_RES (5), (6): Xaa is C or S
  MOD_RES (20), (21), (22), (23), (24): Xaa is A or G
  MOD_RES (25), (26), (27), (28): Xaa is A or G or is absent
TPPTXXVPTRLSSLSILFFXXXXXXXXXLKVYPDMVVE

SEQ ID NO: 24843 - protein, 33 aa, Artificial Sequence
  Non-cyclic GFR-binding peptide
  MOD_RES (1), (1): Xaa is C or S
  MOD_RES (15), (16), (17), (18), (19): Xaa is A or G
  MOD_RES (20), (21), (22), (23): Xaa is A or G or is absent
XVPQALSSLSILFFXXXXXXXXXLKVYPMIVRS

SEQ ID NO: 24844 - protein, 40 aa, Artificial Sequence
  Non-cyclic GFR-binding peptide
  MOD_RES (3), (37), (39): Xaa is C or S
  MOD_RES (17), (18), (19), (20), (21): Xaa is A or G
  MOD_RES (22), (23), (24), (25): Xaa is A or G or is absent
LEXVPTEESSLSMLFFXXXXXXXXXLKVYPFLQHNKXEXR

SEQ ID NO: 24845 - protein, 39 aa, Artificial Sequence
  Non-cyclic GFR-binding peptide
  MOD_RES (2), (39): Xaa is C or S
KXQPSRVHHSSLSVLFFEYVRKKPKLLKVYPRLEEHLEX

SEQ ID NO: 24846 - protein, 39 aa, Artificial Sequence
  Non-cyclic GFR-binding peptide
  MOD_RES (6), (7), (39): Xaa is C or S
HVPKPXXAPTKLSSLSVLFFDDSSNVILKVYPNMVVRSX

SEQ ID NO: 24847 - protein, 34 aa, Artificial Sequence
  Non-cyclic GFR-binding peptide
  MOD_RES (1), (2), (33): Xaa is C or S
XXVPQALSSLSILFFVGRKPKVLKVYPMIVRSXK

SEQ ID NO: 24848 - protein, 41 aa, Artificial Sequence
  Non-cyclic GFR-binding peptide
  MOD_RES (5), (6), (40): Xaa is C or S
  MOD_RES (20), (21), (22), (23), (24): Xaa is A or G
  MOD_RES (25), (26), (27), (28): Xaa is A or G or is absent
VPKPXXAPTKLSSLSVLFFXXXXXXXXXLKVYPNMVVRSXG

SEQ ID NO: 24849 - protein, 43 aa, Artificial Sequence
  Non-cyclic GFR-binding peptide
  MOD_RES (5), (6), (40), (42): Xaa is C or S
  MOD_RES (20), (21), (22), (23), (24): Xaa is A or G
  MOD_RES (25), (26), (27), (28): Xaa is A or G or is absent
TPPTXXVPTRLSSLSILFFXXXXXXXXXLKVYPDMVVESXGXR

SEQ ID NO: 24850 - protein, 36 aa, Artificial Sequence
  Non-cyclic GFR-binding peptide
  MOD_RES (3), (4): Xaa is C or S
  MOD_RES (18), (19), (20), (21), (22): Xaa is A or G
  MOD_RES (23), (24), (25), (26): Xaa is A or G or is absent
KAXXVPTELSSLSMLFFXXXXXXXXXLKVYPEMVVE

SEQ ID NO: 24851 - protein, 31 aa, Artificial Sequence
  Non-cyclic GFR-binding peptide
  MOD_RES (1), (1): Xaa is C or S
XVSQDLSSLSILFFIGKTPKILKVYPMIVKS

SEQ ID NO: 24852 - protein, 36 aa, Artificial Sequence
  Non-cyclic GFR-binding peptide
  MOD_RES (34), (36): Xaa is C or S
  MOD_RES (14), (15), (16), (17), (18): Xaa is A or G
  MOD_RES (19), (20), (21), (22): Xaa is A or G or is absent
VPTEESSLSMLFFXXXXXXXXXLKVYPFLQHNKXEX

SEQ ID NO: 24853 - protein, 42 aa, Artificial Sequence
  Non-cyclic GFR-binding peptide
  MOD_RES (5), (6), (40), (42): Xaa is C or S
  MOD_RES (20), (21), (22), (23), (24): Xaa is A or G
  MOD_RES (25), (26), (27), (28): Xaa is A or G or is absent
IPKAXXVPTELSSLSMLFFXXXXXXXXXLKVYPEMVVEGXGX

SEQ ID NO: 24854 - protein, 35 aa, Artificial Sequence
  Non-cyclic GFR-binding peptide
  MOD_RES (1), (2), (33), (35): Xaa is C or S
XXVPQDLSSLSILFFVGRTPKVLKVYPMVVKSXKX

SEQ ID NO: 24855 - protein, 39 aa, Artificial Sequence
  Non-cyclic GFR-binding peptide
  MOD_RES (6), (6): Xaa is C or S
  MOD_RES (20), (21), (22), (23), (24): Xaa is A or G
  MOD_RES (25), (26), (27), (28): Xaa is A or G or is absent
VTKPTXAPTKLSSLSVLFFXXXXXXXXXLKVYPNMVVRS

SEQ ID NO: 24856 - protein, 36 aa, Artificial Sequence
  Non-cyclic GFR-binding peptide
  MOD_RES (1), (33), (35): Xaa is C or S
XVPTKLSSLSILFFDKGVVTYLKVYPGMAVSEXGXR

SEQ ID NO: 24857 - protein, 33 aa, Artificial Sequence
  Non-cyclic GFR-binding peptide
  MOD_RES (1), (2): Xaa is C or S
XXVPTRLSSLSILFFDSANNVVLKVYPDMVVES

SEQ ID NO: 24858 - protein, 42 aa, Artificial Sequence
  Non-cyclic GFR-binding peptide
  MOD_RES (6), (7), (40), (42): Xaa is C or S
  MOD_RES (21), (22), (23), (24), (25): Xaa is A or G
  MOD_RES (26), (27), (28), (29): Xaa is A or G or is absent
RVPSTXXAPVKTSSLSMLFFXXXXXXXXXLKVYPMIVEEXGX

SEQ ID NO: 24859 - protein, 38 aa, Artificial Sequence
  Non-cyclic GFR-binding peptide
  MOD_RES (3), (4), (38): Xaa is C or S
  MOD_RES (18), (19), (20), (21), (22): Xaa is A or G
  MOD_RES (23), (24), (25), (26): Xaa is A or G or is absent
KAXXVPTELSSLSMLFFXXXXXXXXXLKVYPEMVVEGX

SEQ ID NO: 24860 - protein, 37 aa, Artificial Sequence
  Non-cyclic GFR-binding peptide
  MOD_RES (37), (37): Xaa is C or S
  MOD_RES (16), (17), (18), (19), (20): Xaa is A or G
  MOD_RES (21), (22), (23), (24): Xaa is A or G or is absent
QPSRVHHSSLSVLFFXXXXXXXXXLKVYPRLEEHLEX

SEQ ID NO: 24861 - protein, 40 aa, Artificial Sequence
  Non-cyclic GFR-binding peptide
  MOD_RES (37), (39): Xaa is C or S
  MOD_RES (16), (17), (18), (19), (20): Xaa is A or G
  MOD_RES (21), (22), (23), (24): Xaa is A or G or is absent
QPSRVHHSSLSVLFFXXXXXXXXXLKVYPRLEEHLEXAXA

SEQ ID NO: 24862 - protein, 37 aa, Artificial Sequence
  Non-cyclic GFR-binding peptide
  MOD_RES (3), (4): Xaa is C or S
  MOD_RES (18), (19), (20), (21), (22): Xaa is A or G
  MOD_RES (23), (24), (25), (26): Xaa is A or G or is absent
GPXXTPTKMSSLSMLFFXXXXXXXXXLKVYPGMVVDR

SEQ ID NO: 24863 - protein, 38 aa, Artificial Sequence
  Non-cyclic GFR-binding peptide
  MOD_RES (3), (4), (35), (37): Xaa is C or S
STXXAPVKTSSLSMLFFDNGRVLLLKVYPMIVEEXGXL

SEQ ID NO: 24864 - protein, 35 aa, Artificial Sequence
  Non-cyclic GFR-binding peptide
  MOD_RES (1), (33), (35): Xaa is C or S
XVPTRLSSLSILFFDSANNVVLKVYPDMVVESXGX

SEQ ID NO: 24865 - protein, 35 aa, Artificial Sequence
  Non-cyclic GFR-binding peptide
  MOD_RES (1), (1): Xaa is C or S
  MOD_RES (17), (18), (19), (20), (21): Xaa is A or G
  MOD_RES (22), (23), (24), (25): Xaa is A or G or is absent
XQPSRVHHSSLSVLFFXXXXXXXXXLKVYPRLEEH

SEQ ID NO: 24866 - protein, 38 aa, Artificial Sequence
  Non-cyclic GFR-binding peptide
  MOD_RES (2), (3), (37): Xaa is C or S
  MOD_RES (17), (18), (19), (20), (21): Xaa is A or G
  MOD_RES (22), (23), (24), (25): Xaa is A or G or is absent
AXXVPTELSSLSMLFFXXXXXXXXXLKVYPEMVVEGXG

SEQ ID NO: 24867 - protein, 37 aa, Artificial Sequence
  Non-cyclic GFR-binding peptide
  MOD_RES (5), (5): Xaa is C or S
  MOD_RES (19), (20), (21), (22), (23): Xaa is A or G
  MOD_RES (24), (25), (26), (27): Xaa is A or G or is absent
TKPTXAPTKLSSLSVLFFXXXXXXXXXLKVYPNMVVR

SEQ ID NO: 24868 - protein, 36 aa, Artificial Sequence
  Non-cyclic GFR-binding peptide
  MOD_RES (33), (35): Xaa is C or S
  MOD_RES (14), (15), (16), (17), (18): Xaa is A or G
  MOD_RES (19), (20), (21), (22): Xaa is A or G or is absent
VPQDLSSLSILFFXXXXXXXXXLKVYPMVVKSXKXS

SEQ ID NO: 24869 - protein, 38 aa, Artificial Sequence
  Non-cyclic GFR-binding peptide
  MOD_RES (4), (5), (37): Xaa is C or S
PKPXXAPTKLSSLSVLFFDDSSNVILKVYPNMVVRSXG

SEQ ID NO: 24870 - protein, 39 aa, Artificial Sequence
  Non-cyclic GFR-binding peptide
  MOD_RES (3), (4), (37), (39): Xaa is C or S
  MOD_RES (18), (19), (20), (21), (22): Xaa is A or G
  MOD_RES (23), (24), (25), (26): Xaa is A or G or is absent
SPXXVPQDLSSLSILFFXXXXXXXXXLKVYPMVVKSXKX

SEQ ID NO: 24871 - protein, 36 aa, Artificial Sequence
  Non-cyclic GFR-binding peptide
  MOD_RES (34), (36): Xaa is C or S
  MOD_RES (14), (15), (16), (17), (18): Xaa is A or G
  MOD_RES (19), (20), (21), (22): Xaa is A or G or is absent
TPTKMSSLSMLFFXXXXXXXXXLKVYPGMVVDRXGX

SEQ ID NO: 24872 - protein, 37 aa, Artificial Sequence
  Non-cyclic GFR-binding peptide
  MOD_RES (3), (4): Xaa is C or S
  MOD_RES (18), (19), (20), (21), (22): Xaa is A or G
  MOD_RES (23), (24), (25), (26): Xaa is A or G or is absent
KPXXAPTKLSSLSVLFFXXXXXXXXXLKVYPNMVVRS

SEQ ID NO: 24873 - protein, 42 aa, Artificial Sequence
  Non-cyclic GFR-binding peptide
  MOD_RES (6), (7), (41): Xaa is C or S
  MOD_RES (21), (22), (23), (24), (25): Xaa is A or G
  MOD_RES (26), (27), (28), (29): Xaa is A or G or is absent
STPPTXXVPTRLSSLSILFFXXXXXXXXXLKVYPDMVVESXG

SEQ ID NO: 24874 - protein, 43 aa, Artificial Sequence
  Non-cyclic GFR-binding peptide
  MOD_RES (6), (7), (40), (42): Xaa is C or S
  MOD_RES (21), (22), (23), (24), (25): Xaa is A or G
  MOD_RES (26), (27), (28), (29): Xaa is A or G or is absent
RVPSTXXAPVKTSSLSMLFFXXXXXXXXXLKVYPMIVEEXGXL

SEQ ID NO: 24875 - protein, 38 aa, Artificial Sequence
  Non-cyclic GFR-binding peptide
  MOD_RES (2), (3), (35), (37): Xaa is C or S
PXXTPTKMSSLSMLFFNDKQQIILKVYPGMVVDRXGXS

SEQ ID NO: 24876 - protein, 36 aa, Artificial Sequence
  Non-cyclic GFR-binding peptide
  MOD_RES (5), (6): Xaa is C or S
APASXXVPARLSSLSILFFDAANNVVLKVYPDMVVE

SEQ ID NO: 24877 - protein, 35 aa, Artificial Sequence
  Non-cyclic GFR-binding peptide
  MOD_RES (34), (34): Xaa is C or S
  MOD_RES (14), (15), (16), (17), (18): Xaa is A or G
  MOD_RES (19), (20), (21), (22): Xaa is A or G or is absent
VPARLSSLSILFFXXXXXXXXXLKVYPDMVVEAXG

SEQ ID NO: 24878 - protein, 33 aa, Artificial Sequence
  Non-cyclic GFR-binding peptide
  MOD_RES (14), (15), (16), (17), (18): Xaa is A or G
  MOD_RES (19), (20), (21), (22): Xaa is A or G or is absent
APTKLSSLSVLFFXXXXXXXXXLKVYPNMVVRS

SEQ ID NO: 24879 - protein, 40 aa, Artificial Sequence
  Non-cyclic GFR-binding peptide
  MOD_RES (6), (7), (40): Xaa is C or S
  MOD_RES (21), (22), (23), (24), (25): Xaa is A or G
  MOD_RES (26), (27), (28), (29): Xaa is A or G or is absent
ASASPXXVSQDLSSLSILFFXXXXXXXXXLKVYPMIVKSX

SEQ ID NO: 24880 - protein, 39 aa, Artificial Sequence
  Non-cyclic GFR-binding peptide
  MOD_RES (2), (36), (38): Xaa is C or S
  MOD_RES (16), (17), (18), (19), (20): Xaa is A or G
  MOD_RES (21), (22), (23), (24): Xaa is A or G or is absent
TXAPTKLSSLSVLFFXXXXXXXXXLKVYPNMVVRSXGXH

SEQ ID NO: 24881 - protein, 39 aa, Artificial Sequence
  Non-cyclic GFR-binding peptide
  MOD_RES (1), (2), (36), (38): Xaa is C or S
  MOD_RES (16), (17), (18), (19), (20): Xaa is A or G
  MOD_RES (21), (22), (23), (24): Xaa is A or G or is absent
XXVPARLSSLSILFFXXXXXXXXXLKVYPDMVVEAXGXR

SEQ ID NO: 24882 - protein, 38 aa, Artificial Sequence
  Non-cyclic GFR-binding peptide
  MOD_RES (5), (6): Xaa is C or S
  MOD_RES (20), (21), (22), (23), (24): Xaa is A or G
  MOD_RES (25), (26), (27), (28): Xaa is A or G or is absent
VPKAXXAPTKLSSLSVLFFXXXXXXXXXLKVYPNMVVK

SEQ ID NO: 24883 - protein, 34 aa, Artificial Sequence
  Non-cyclic GFR-binding peptide
  MOD_RES (1), (33): Xaa is C or S
XVPTRLSSLSILFFDSANNVVLKVYPDMVVESXG

SEQ ID NO: 24884 - protein, 37 aa, Artificial Sequence
  Non-cyclic GFR-binding peptide
  MOD_RES (2), (3), (37): Xaa is C or S
  MOD_RES (17), (18), (19), (20), (21): Xaa is A or G
  MOD_RES (22), (23), (24), (25): Xaa is A or G or is absent
PXXAPTKLSSLSVLFFXXXXXXXXXLKVYPNMVVRSX

SEQ ID NO: 24885 - protein, 38 aa, Artificial Sequence
  Non-cyclic GFR-binding peptide
  MOD_RES (1), (38): Xaa is C or S
XQPSRVHHSSLSVLFFEYVRKKPKLLKVYPRLEEHLEX

SEQ ID NO: 24886 - protein, 43 aa, Artificial Sequence
  Non-cyclic GFR-binding peptide
  MOD_RES (7), (41), (43): Xaa is C or S
NDEGLEXVPTEESSLSMLFFRIKPHQGQHLKVYPFLQHNKXEX

SEQ ID NO: 24887 - protein, 40 aa, Artificial Sequence
  Non-cyclic GFR-binding peptide
  MOD_RES (5), (6), (39): Xaa is C or S
VGKAXXVPTKLSSLSVLFFDDMGVPTLKVYPEGMSVAEXG

SEQ ID NO: 24888 - protein, 32 aa, Artificial Sequence
  Non-cyclic GFR-binding peptide
  MOD_RES (14), (15), (16), (17), (18): Xaa is A or G
  MOD_RES (19), (20), (21), (22): Xaa is A or G or is absent
VPARLSSLSILFFXXXXXXXXXLKVYPDMVVE

SEQ ID NO: 24889 - protein, 40 aa, Artificial Sequence
  Non-cyclic GFR-binding peptide
  MOD_RES (6), (7): Xaa is C or S
  MOD_RES (21), (22), (23), (24), (25): Xaa is A or G
  MOD_RES (26), (27), (28), (29): Xaa is A or G or is absent
KASKAXXVPTKLSSLSILFFXXXXXXXXXLKVYPGMAVSE

SEQ ID NO: 24890 - protein, 35 aa, Artificial Sequence
  Non-cyclic GFR-binding peptide
  MOD_RES (1), (35): Xaa is C or S
  MOD_RES (15), (16), (17), (18), (19): Xaa is A or G
  MOD_RES (20), (21), (22), (23): Xaa is A or G or is absent
XAPTKLSSLSVLFFXXXXXXXXXLKVYPNMVVRSX

SEQ ID NO: 24891 - protein, 37 aa, Artificial Sequence
  Non-cyclic GFR-binding peptide
  MOD_RES (4), (5): Xaa is C or S
  MOD_RES (19), (20), (21), (22), (23): Xaa is A or G
  MOD_RES (24), (25), (26), (27): Xaa is A or G or is absent
PPTXXVPTRLSSLSILFFXXXXXXXXXLKVYPDMVVE

SEQ ID NO: 24892 - protein, 41 aa, Artificial Sequence
  Non-cyclic GFR-binding peptide
  MOD_RES (5), (6), (38), (40): Xaa is C or S
VPKPXXAPTKLSSLSVLFFDDSSNVILKVYPNMVVRSXGXH

SEQ ID NO: 24893 - protein, 40 aa, Artificial Sequence
  Non-cyclic GFR-binding peptide
  MOD_RES (5), (5): Xaa is C or S
SSVKXQPSRVHHSSLSVLFFEYVRKKPKLLKVYPRLEEHL

SEQ ID NO: 24894 - protein, 33 aa, Artificial Sequence
  Non-cyclic GFR-binding peptide
  MOD_RES (14), (15), (16), (17), (18): Xaa is A or G
  MOD_RES (19), (20), (21), (22): Xaa is A or G or is absent
VPTKLSSLSILFFXXXXXXXXXLKVYPGMAVSE

SEQ ID NO: 24895 - protein, 37 aa, Artificial Sequence
  Non-cyclic GFR-binding peptide
  MOD_RES (1), (1): Xaa is C or S
XQPSRVHHSSLSVLFFEYVRKKPKLLKVYPRLEEHLE

SEQ ID NO: 24896 - protein, 37 aa, Artificial Sequence
  Non-cyclic GFR-binding peptide
  MOD_RES (3), (4), (35), (37): Xaa is C or S
APXXVPQALSSLSILFFVGRKPKVLKVYPMIVRSXKX

SEQ ID NO: 24897 - protein, 39 aa, Artificial Sequence
  Non-cyclic GFR-binding peptide
  MOD_RES (4), (36), (38): Xaa is C or S
KPTXAPTKLSSLSVLFFDDSSNVILKVYPNMVVRSXGXH

SEQ ID NO: 24898 - protein, 37 aa, Artificial Sequence
  Non-cyclic GFR-binding peptide
  MOD_RES (34), (36): Xaa is C or S
  MOD_RES (14), (15), (16), (17), (18): Xaa is A or G
  MOD_RES (19), (20), (21), (22): Xaa is A or G or is absent
APTKLSSLSVLFFXXXXXXXXXLKVYPNMVVRSXGXH

SEQ ID NO: 24899 - protein, 35 aa, Artificial Sequence
  Non-cyclic GFR-binding peptide
  MOD_RES (32), (34): Xaa is C or S
VPTRLSSLSILFFDSANNVVLKVYPDMVVESXGXR

SEQ ID NO: 24900 - protein, 32 aa, Artificial Sequence
  Non-cyclic GFR-binding peptide
  MOD_RES (1), (2): Xaa is C or S
XXTPTKMSSLSMLFFNDKQQIILKVYPGMVVD

SEQ ID NO: 24901 - protein, 39 aa, Artificial Sequence
  Non-cyclic GFR-binding peptide
  MOD_RES (3), (4), (37), (39): Xaa is C or S
KAXXVPTKLSSLSVLFFDDMGVPTLKVYPEGMSVAEXGX

SEQ ID NO: 24902 - protein, 34 aa, Artificial Sequence
  Non-cyclic GFR-binding peptide
  MOD_RES (1), (34): Xaa is C or S
  MOD_RES (15), (16), (17), (18), (19): Xaa is A or G
  MOD_RES (20), (21), (22), (23): Xaa is A or G or is absent
XVPQDLSSLSILFFXXXXXXXXXLKVYPMVVKSX

SEQ ID NO: 24903 - protein, 41 aa, Artificial Sequence
  Non-cyclic GFR-binding peptide
  MOD_RES (6), (7), (39), (41): Xaa is C or S
GSAGPXXTPTKMSSLSMLFFNDKQQIILKVYPGMVVDRXGX

SEQ ID NO: 24904 - protein, 35 aa, Artificial Sequence
  Non-cyclic GFR-binding peptide
  MOD_RES (2), (3): Xaa is C or S
  MOD_RES (17), (18), (19), (20), (21): Xaa is A or G
  MOD_RES (22), (23), (24), (25): Xaa is A or G or is absent
TXXVPTRLSSLSILFFXXXXXXXXXLKVYPDMVVE

SEQ ID NO: 24905 - protein, 32 aa, Artificial Sequence
  Non-cyclic GFR-binding peptide
  MOD_RES (32), (32): Xaa is C or S
TPTKMSSLSMLFFNDKQQIILKVYPGMVVDRX

SEQ ID NO: 24906 - protein, 33 aa, Artificial Sequence
  Non-cyclic GFR-binding peptide
  MOD_RES (1), (2), (33): Xaa is C or S
XXAPVKTSSLSMLFFDNGRVLLLKVYPMIVEEX

SEQ ID NO: 24907 - protein, 39 aa, Artificial Sequence
  Non-cyclic GFR-binding peptide
  MOD_RES (5), (39): Xaa is C or S
  MOD_RES (19), (20), (21), (22), (23): Xaa is A or G
  MOD_RES (24), (25), (26), (27): Xaa is A or G or is absent
TKPTXAPTKLSSLSVLFFXXXXXXXXXLKVYPNMVVRSX

SEQ ID NO: 24908 - protein, 37 aa, Artificial Sequence
  Non-cyclic GFR-binding peptide
  MOD_RES (6), (7): Xaa is C or S
RVPSTXXAPVKTSSLSMLFFDNGRVLLLKVYPMIVEE

SEQ ID NO: 24909 - protein, 35 aa, Artificial Sequence
  Non-cyclic GFR-binding peptide
  MOD_RES (1), (34): Xaa is C or S
  MOD_RES (15), (16), (17), (18), (19): Xaa is A or G
  MOD_RES (20), (21), (22), (23): Xaa is A or G or is absent
XAPVKTSSLSMLFFXXXXXXXXXLKVYPMIVEEXG

SEQ ID NO: 24910 - protein, 41 aa, Artificial Sequence
  Non-cyclic GFR-binding peptide
  MOD_RES (3), (4), (38), (40): Xaa is C or S
  MOD_RES (18), (19), (20), (21), (22): Xaa is A or G
  MOD_RES (23), (24), (25), (26): Xaa is A or G or is absent
KAXXAPTKLSSLSVLFFXXXXXXXXXLKVYPNMVVKAXGXH

SEQ ID NO: 24911 - protein, 40 aa, Artificial Sequence
  Non-cyclic GFR-binding peptide
  MOD_RES (3), (4), (38), (40): Xaa is C or S
  MOD_RES (18), (19), (20), (21), (22): Xaa is A or G
  MOD_RES (23), (24), (25), (26): Xaa is A or G or is absent
PTXXVPTRLSSLSILFFXXXXXXXXXLKVYPDMVVESXGX

SEQ ID NO: 24912 - protein, 44 aa, Artificial Sequence
  Non-cyclic GFR-binding peptide
  MOD_RES (6), (7), (41), (43): Xaa is C or S
  MOD_RES (21), (22), (23), (24), (25): Xaa is A or G
  MOD_RES (26), (27), (28), (29): Xaa is A or G or is absent
AVPKAXXAPTKLSSLSVLFFXXXXXXXXXLKVYPNMVVKAXGXH

SEQ ID NO: 24913 - protein, 39 aa, Artificial Sequence
  Non-cyclic GFR-binding peptide
  MOD_RES (4), (5), (36), (38): Xaa is C or S
ASPXXVSQDLSSLSILFFIGKTPKILKVYPMIVKSXKXS

SEQ ID NO: 24914 - protein, 37 aa, Artificial Sequence
  Non-cyclic GFR-binding peptide
  MOD_RES (4), (5): Xaa is C or S
  MOD_RES (19), (20), (21), (22), (23): Xaa is A or G
  MOD_RES (24), (25), (26), (27): Xaa is A or G or is absent
AAPXXVPQALSSLSILFFXXXXXXXXXLKVYPMIVRS

SEQ ID NO: 24915 - protein, 30 aa, Artificial Sequence
  Non-cyclic GFR-binding peptide
APTKLSSLSVLFFDDSSNVILKVYPNMVVR

SEQ ID NO: 24916 - protein, 43 aa, Artificial Sequence
  Non-cyclic GFR-binding peptide
  MOD_RES (6), (7), (41), (43): Xaa is C or S
  MOD_RES (21), (22), (23), (24), (25): Xaa is A or G
  MOD_RES (26), (27), (28), (29): Xaa is A or G or is absent
AVPKAXXAPTKLSSLSVLFFXXXXXXXXXLKVYPNMVVKAXGX

SEQ ID NO: 24917 - protein, 40 aa, Artificial Sequence
  Non-cyclic GFR-binding peptide
  MOD_RES (4), (5), (37), (39): Xaa is C or S
SKAXXVPTKLSSLSILFFDKGVVTYLKVYPGMAVSEXGXR

SEQ ID NO: 24918 - protein, 33 aa, Artificial Sequence
  Non-cyclic GFR-binding peptide
  MOD_RES (2), (3): Xaa is C or S
PXXTPTKMSSLSMLFFNDKQQIILKVYPGMVVD

SEQ ID NO: 24919 - protein, 38 aa, Artificial Sequence
  Non-cyclic GFR-binding peptide
  MOD_RES (2), (3), (36), (38): Xaa is C or S
  MOD_RES (17), (18), (19), (20), (21): Xaa is A or G
  MOD_RES (22), (23), (24), (25): Xaa is A or G or is absent
PXXVSQDLSSLSILFFXXXXXXXXXLKVYPMIVKSXKX

SEQ ID NO: 24920 - protein, 35 aa, Artificial Sequence
  Non-cyclic GFR-binding peptide
  MOD_RES (2), (3): Xaa is C or S
  MOD_RES (17), (18), (19), (20), (21): Xaa is A or G
  MOD_RES (22), (23), (24), (25): Xaa is A or G or is absent
PXXAPTKLSSLSVLFFXXXXXXXXXLKVYPNMVVR

SEQ ID NO: 24921 - protein, 34 aa, Artificial Sequence
  Non-cyclic GFR-binding peptide
  MOD_RES (3), (4): Xaa is C or S
STXXAPVKTSSLSMLFFDNGRVLLLKVYPMIVEE

SEQ ID NO: 24922 - protein, 36 aa, Artificial Sequence
  Non-cyclic GFR-binding peptide
  MOD_RES (33), (35): Xaa is C or S
  MOD_RES (14), (15), (16), (17), (18): Xaa is A or G
  MOD_RES (19), (20), (21), (22): Xaa is A or G or is absent
VSQDLSSLSILFFXXXXXXXXXLKVYPMIVKSXKXS

SEQ ID NO: 24923 - protein, 36 aa, Artificial Sequence
  Non-cyclic GFR-binding peptide
  MOD_RES (2), (3), (35): Xaa is C or S
AXXVPTELSSLSMLFFDEYDKVVLKVYPEMVVEGXG

SEQ ID NO: 24924 - protein, 34 aa, Artificial Sequence
  Non-cyclic GFR-binding peptide
  MOD_RES (1), (2): Xaa is C or S
  MOD_RES (16), (17), (18), (19), (20): Xaa is A or G
  MOD_RES (21), (22), (23), (24): Xaa is A or G or is absent
XXTPTKMSSLSMLFFXXXXXXXXXLKVYPGMVVD

SEQ ID NO: 24925 - protein, 37 aa, Artificial Sequence
  Non-cyclic GFR-binding peptide
  MOD_RES (1), (2), (34), (36): Xaa is C or S
XXAPTKLSSLSVLFFDSSNNVILKVYPNMVVKAXGXH

SEQ ID NO: 24926 - protein, 40 aa, Artificial Sequence
  Non-cyclic GFR-binding peptide
  MOD_RES (6), (7), (39): Xaa is C or S
KASKAXXVPTKLSSLSILFFDKGVVTYLKVYPGMAVSEXG

SEQ ID NO: 24927 - protein, 42 aa, Artificial Sequence
  Non-cyclic GFR-binding peptide
  MOD_RES (7), (41): Xaa is C or S
  MOD_RES (21), (22), (23), (24), (25): Xaa is A or G
  MOD_RES (26), (27), (28), (29): Xaa is A or G or is absent
NDEGLEXVPTEESSLSMLFFXXXXXXXXXLKVYPFLQHNKXE

SEQ ID NO: 24928 - protein, 36 aa, Artificial Sequence
  Non-cyclic GFR-binding peptide
  MOD_RES (1), (2), (35): Xaa is C or S
  MOD_RES (16), (17), (18), (19), (20): Xaa is A or G
  MOD_RES (21), (22), (23), (24): Xaa is A or G or is absent
XXAPVKTSSLSMLFFXXXXXXXXXLKVYPMIVEEXG

SEQ ID NO: 24929 - protein, 37 aa, Artificial Sequence
  Non-cyclic GFR-binding peptide
  MOD_RES (1), (2), (36): Xaa is C or S
  MOD_RES (16), (17), (18), (19), (20): Xaa is A or G
  MOD_RES (21), (22), (23), (24): Xaa is A or G or is absent
XXAPTQLSSLSVLFFXXXXXXXXXLKVYPNMVVRAXG

SEQ ID NO: 24930 - protein, 32 aa, Artificial Sequence
  Non-cyclic GFR-binding peptide
  MOD_RES (14), (15), (16), (17), (18): Xaa is A or G
  MOD_RES (19), (20), (21), (22): Xaa is A or G or is absent
VPQDLSSLSILFFXXXXXXXXXLKVYPMVVKS

SEQ ID NO: 24931 - protein, 39 aa, Artificial Sequence
  Non-cyclic GFR-binding peptide
  MOD_RES (4), (38): Xaa is C or S
  MOD_RES (18), (19), (20), (21), (22): Xaa is A or G
  MOD_RES (23), (24), (25), (26): Xaa is A or G or is absent
GLEXVPTEESSLSMLFFXXXXXXXXXLKVYPFLQHNKXE

SEQ ID NO: 24932 - protein, 38 aa, Artificial Sequence
  Non-cyclic GFR-binding peptide
  MOD_RES (5), (6), (38): Xaa is C or S
VPKPXXAPTQLSSLSVLFFDDSSNVILKVYPNMVVRAX

SEQ ID NO: 24933 - protein, 37 aa, Artificial Sequence
  Non-cyclic GFR-binding peptide
  MOD_RES (1), (34), (36): Xaa is C or S
  MOD_RES (15), (16), (17), (18), (19): Xaa is A or G
  MOD_RES (20), (21), (22), (23): Xaa is A or G or is absent
XAPVKTSSLSMLFFXXXXXXXXXLKVYPMIVEEXGXL

SEQ ID NO: 24934 - protein, 34 aa, Artificial Sequence
  Non-cyclic GFR-binding peptide
  MOD_RES (33), (33): Xaa is C or S
  MOD_RES (14), (15), (16), (17), (18): Xaa is A or G
  MOD_RES (19), (20), (21), (22): Xaa is A or G or is absent
VSQDLSSLSILFFXXXXXXXXXLKVYPMIVKSXK

SEQ ID NO: 24935 - protein, 38 aa, Artificial Sequence
  Non-cyclic GFR-binding peptide
  MOD_RES (4), (38): Xaa is C or S
  MOD_RES (18), (19), (20), (21), (22): Xaa is A or G
  MOD_RES (23), (24), (25), (26): Xaa is A or G or is absent
KPTXAPTKLSSLSVLFFXXXXXXXXXLKVYPNMVVRSX

SEQ ID NO: 24936 - protein, 31 aa, Artificial Sequence
  Non-cyclic GFR-binding peptide
  MOD_RES (1), (1): Xaa is C or S
XAPVKTSSLSMLFFDNGRVLLLKVYPMIVEE

SEQ ID NO: 24937 - protein, 38 aa, Artificial Sequence
  Non-cyclic GFR-binding peptide
  MOD_RES (2), (2): Xaa is C or S
  MOD_RES (18), (19), (20), (21), (22): Xaa is A or G
  MOD_RES (23), (24), (25), (26): Xaa is A or G or is absent
KXQPSRVHHSSLSVLFFXXXXXXXXXLKVYPRLEEHLE

SEQ ID NO: 24938 - protein, 41 aa, Artificial Sequence
  Non-cyclic GFR-binding peptide
  MOD_RES (6), (7), (39), (41): Xaa is C or S
STPPTXXVPTRLSSLSILFFDSANNVVLKVYPDMVVESXGX

SEQ ID NO: 24939 - protein, 39 aa, Artificial Sequence
  Non-cyclic GFR-binding peptide
  MOD_RES (6), (7): Xaa is C or S
  MOD_RES (21), (22), (23), (24), (25): Xaa is A or G
  MOD_RES (26), (27), (28), (29): Xaa is A or G or is absent
GSAGPXXTPTKMSSLSMLFFXXXXXXXXXLKVYPGMVVD

SEQ ID NO: 24940 - protein, 31 aa, Artificial Sequence
  Non-cyclic GFR-binding peptide
  MOD_RES (1), (1): Xaa is C or S
XVPQALSSLSILFFVGRKPKVLKVYPMIVRS

SEQ ID NO: 24941 - protein, 41 aa, Artificial Sequence
  Non-cyclic GFR-binding peptide
  MOD_RES (6), (7), (41): Xaa is C or S
  MOD_RES (21), (22), (23), (24), (25): Xaa is A or G
  MOD_RES (26), (27), (28), (29): Xaa is A or G or is absent
AAPASXXVPARLSSLSILFFXXXXXXXXXLKVYPDMVVEAX

SEQ ID NO: 24942 - protein, 42 aa, Artificial Sequence
  Non-cyclic GFR-binding peptide
  MOD_RES (6), (7), (41): Xaa is C or S
  MOD_RES (21), (22), (23), (24), (25): Xaa is A or G
  MOD_RES (26), (27), (28), (29): Xaa is A or G or is absent
SIPKAXXVPTELSSLSMLFFXXXXXXXXXLKVYPEMVVEGXG

SEQ ID NO: 24943 - protein, 39 aa, Artificial Sequence
  Non-cyclic GFR-binding peptide
  MOD_RES (5), (6), (38): Xaa is C or S
APASXXVPARLSSLSILFFDAANNVVLKVYPDMVVEAXG

SEQ ID NO: 24944 - protein, 39 aa, Artificial Sequence
  Non-cyclic GFR-binding peptide
  MOD_RES (4), (5), (37), (39): Xaa is C or S
PKAXXVPTELSSLSMLFFDEYDKVVLKVYPEMVVEGXGX

SEQ ID NO: 24945 - protein, 40 aa, Artificial Sequence
  Non-cyclic GFR-binding peptide
  MOD_RES (6), (7), (40): Xaa is C or S
  MOD_RES (21), (22), (23), (24), (25): Xaa is A or G
  MOD_RES (26), (27), (28), (29): Xaa is A or G or is absent
RVPSTXXAPVKTSSLSMLFFXXXXXXXXXLKVYPMIVEEX

SEQ ID NO: 24946 - protein, 38 aa, Artificial Sequence
  Non-cyclic GFR-binding peptide
  MOD_RES (6), (7), (38): Xaa is C or S
ASASPXXVPQDLSSLSILFFVGRTPKVLKVYPMVVKSX

SEQ ID NO: 24947 - protein, 39 aa, Artificial Sequence
  Non-cyclic GFR-binding peptide
  MOD_RES (5), (6): Xaa is C or S
  MOD_RES (20), (21), (22), (23), (24): Xaa is A or G
  MOD_RES (25), (26), (27), (28): Xaa is A or G or is absent
VPKPXXAPTKLSSLSVLFFXXXXXXXXXLKVYPNMVVRS

SEQ ID NO: 24948 - protein, 38 aa, Artificial Sequence
  Non-cyclic GFR-binding peptide
  MOD_RES (1), (2), (35), (37): Xaa is C or S
  MOD_RES (16), (17), (18), (19), (20): Xaa is A or G
  MOD_RES (21), (22), (23), (24): Xaa is A or G or is absent
XXVPQDLSSLSILFFXXXXXXXXXLKVYPMVVKSXKXS

SEQ ID NO: 24949 - protein, 39 aa, Artificial Sequence
  Non-cyclic GFR-binding peptide
  MOD_RES (3), (3): Xaa is C or S
VKXQPSRVHHSSLSVLFFEYVRKKPKLLKVYPRLEEHLE

SEQ ID NO: 24950 - protein, 34 aa, Artificial Sequence
  Non-cyclic GFR-binding peptide
  MOD_RES (33), (33): Xaa is C or S
  MOD_RES (14), (15), (16), (17), (18): Xaa is A or G
  MOD_RES (19), (20), (21), (22): Xaa is A or G or is absent
APVKTSSLSMLFFXXXXXXXXXLKVYPMIVEEXG

SEQ ID NO: 24951 - protein, 38 aa, Artificial Sequence
  Non-cyclic GFR-binding peptide
  MOD_RES (7), (7): Xaa is C or S
HVTKPTXAPTKLSSLSVLFFDDSSNVILKVYPNMVVRS

SEQ ID NO: 24952 - protein, 35 aa, Artificial Sequence
  Non-cyclic GFR-binding peptide
  MOD_RES (2), (3), (35): Xaa is C or S
AXXAPTKLSSLSVLFFDSSNNVILKVYPNMVVKAX

SEQ ID NO: 24953 - protein, 42 aa, Artificial Sequence
  Non-cyclic GFR-binding peptide
  MOD_RES (6), (7), (41): Xaa is C or S
  MOD_RES (21), (22), (23), (24), (25): Xaa is A or G
  MOD_RES (26), (27), (28), (29): Xaa is A or G or is absent
AAPASXXVPARLSSLSILFFXXXXXXXXXLKVYPDMVVEAXG

SEQ ID NO: 24954 - protein, 37 aa, Artificial Sequence
  Non-cyclic GFR-binding peptide
  MOD_RES (4), (5), (37): Xaa is C or S
PKPXXAPTQLSSLSVLFFDDSSNVILKVYPNMVVRAX

SEQ ID NO: 24955 - protein, 36 aa, Artificial Sequence
  Non-cyclic GFR-binding peptide
  MOD_RES (35), (35): Xaa is C or S
SRVHHSSLSVLFFEYVRKKPKLLKVYPRLEEHLEXA

SEQ ID NO: 24956 - protein, 32 aa, Artificial Sequence
  Non-cyclic GFR-binding peptide
  MOD_RES (32), (32): Xaa is C or S
APTQLSSLSVLFFDDSSNVILKVYPNMVVRAX

SEQ ID NO: 24957 - protein, 37 aa, Artificial Sequence
  Non-cyclic GFR-binding peptide
  MOD_RES (1), (2), (34), (36): Xaa is C or S
XXAPTQLSSLSVLFFDDSSNVILKVYPNMVVRAXGXH

SEQ ID NO: 24958 - protein, 38 aa, Artificial Sequence
  Non-cyclic GFR-binding peptide
  MOD_RES (4), (5): Xaa is C or S
  MOD_RES (19), (20), (21), (22), (23): Xaa is A or G
  MOD_RES (24), (25), (26), (27): Xaa is A or G or is absent
PKPXXAPTKLSSLSVLFFXXXXXXXXXLKVYPNMVVRS

SEQ ID NO: 24959 - protein, 35 aa, Artificial Sequence
  Non-cyclic GFR-binding peptide
  MOD_RES (1), (2), (34): Xaa is C or S
XXAPTKLSSLSVLFFDSSNNVILKVYPNMVVKAXG

SEQ ID NO: 24960 - protein, 34 aa, Artificial Sequence
  Non-cyclic GFR-binding peptide
  MOD_RES (1), (1): Xaa is C or S
  MOD_RES (15), (16), (17), (18), (19): Xaa is A or G
  MOD_RES (20), (21), (22), (23): Xaa is A or G or is absent
XTPTKMSSLSMLFFXXXXXXXXXLKVYPGMVVDR

SEQ ID NO: 24961 - protein, 33 aa, Artificial Sequence
  Non-cyclic GFR-binding peptide
  MOD_RES (2), (3): Xaa is C or S
AXXVPTKLSSLSILFFDKGVVTYLKVYPGMAVS

SEQ ID NO: 24962 - protein, 31 aa, Artificial Sequence
  Non-cyclic GFR-binding peptide
VPARLSSLSILFFDAANNVVLKVYPDMVVEA

SEQ ID NO: 24963 - protein, 41 aa, Artificial Sequence
  Non-cyclic GFR-binding peptide
  MOD_RES (6), (7), (39), (41): Xaa is C or S
AAPASXXVPARLSSLSILFFDAANNVVLKVYPDMVVEAXGX

SEQ ID NO: 24964 - protein, 41 aa, Artificial Sequence
  Non-cyclic GFR-binding peptide
  MOD_RES (4), (41): Xaa is C or S
SVKXQPSRVHHSSLSVLFFEYVRKKPKLLKVYPRLEEHLEX

SEQ ID NO: 24965 - protein, 39 aa, Artificial Sequence
  Non-cyclic GFR-binding peptide
  MOD_RES (6), (7): Xaa is C or S
  MOD_RES (21), (22), (23), (24), (25): Xaa is A or G
  MOD_RES (26), (27), (28), (29): Xaa is A or G or is absent
HVPKPXXAPTKLSSLSVLFFXXXXXXXXXLKVYPNMVVR

SEQ ID NO: 24966 - protein, 38 aa, Artificial Sequence
  Non-cyclic GFR-binding peptide
  MOD_RES (3), (4), (36), (38): Xaa is C or S
KAXXVPTKLSSLSILFFDKGVVTYLKVYPGMAVSEXGX

SEQ ID NO: 24967 - protein, 36 aa, Artificial Sequence
  Non-cyclic GFR-binding peptide
  MOD_RES (2), (36): Xaa is C or S
  MOD_RES (16), (17), (18), (19), (20): Xaa is A or G
  MOD_RES (21), (22), (23), (24): Xaa is A or G or is absent
EXVPTEESSLSMLFFXXXXXXXXXLKVYPFLQHNKX

SEQ ID NO: 24968 - protein, 41 aa, Artificial Sequence
  Non-cyclic GFR-binding peptide
  MOD_RES (1), (38), (40): Xaa is C or S
XQPSRVHHSSLSVLFFEYVRKKPKLLKVYPRLEEHLEXAXA

SEQ ID NO: 24969 - protein, 41 aa, Artificial Sequence
  Non-cyclic GFR-binding peptide
  MOD_RES (3), (4), (38), (40): Xaa is C or S
  MOD_RES (18), (19), (20), (21), (22): Xaa is A or G
  MOD_RES (23), (24), (25), (26): Xaa is A or G or is absent
KAXXVPTKLSSLSILFFXXXXXXXXXLKVYPGMAVSEXGXR

SEQ ID NO: 24970 - protein, 38 aa, Artificial Sequence
  Non-cyclic GFR-binding peptide
  MOD_RES (3), (4), (36), (38): Xaa is C or S
KAXXVPTELSSLSMLFFDEYDKVVLKVYPEMVVEGXGX

SEQ ID NO: 24971 - protein, 35 aa, Artificial Sequence
  Non-cyclic GFR-binding peptide
  MOD_RES (2), (3), (35): Xaa is C or S
AXXVPTKLSSLSILFFDKGVVTYLKVYPGMAVSEX

SEQ ID NO: 24972 - protein, 30 aa, Artificial Sequence
  Non-cyclic GFR-binding peptide
VPTELSSLSMLFFDEYDKVVLKVYPEMVVE

SEQ ID NO: 24973 - protein, 40 aa, Artificial Sequence
  Non-cyclic GFR-binding peptide
  MOD_RES (6), (7), (40): Xaa is C or S
KVGKAXXVPTKLSSLSVLFFDDMGVPTLKVYPEGMSVAEX

SEQ ID NO: 24974 - protein, 36 aa, Artificial Sequence
  Non-cyclic GFR-binding peptide
  MOD_RES (33), (35): Xaa is C or S
VPTKLSSLSVLFFDDMGVPTLKVYPEGMSVAEXGXR

SEQ ID NO: 24975 - protein, 39 aa, Artificial Sequence
  Non-cyclic GFR-binding peptide
  MOD_RES (3), (4), (36), (38): Xaa is C or S
KPXXAPTKLSSLSVLFFDDSSNVILKVYPNMVVRSXGXH

SEQ ID NO: 24976 - protein, 35 aa, Artificial Sequence
  Non-cyclic GFR-binding peptide
  MOD_RES (1), (34): Xaa is C or S
  MOD_RES (15), (16), (17), (18), (19): Xaa is A or G
  MOD_RES (20), (21), (22), (23): Xaa is A or G or is absent
XVPQDLSSLSILFFXXXXXXXXXLKVYPMVVKSXK

SEQ ID NO: 24977 - protein, 38 aa, Artificial Sequence
  Non-cyclic GFR-binding peptide
  MOD_RES (3), (37): Xaa is C or S
LEXVPTEESSLSMLFFRIKPHQGQHLKVYPFLQHNKXE

SEQ ID NO: 24978 - protein, 37 aa, Artificial Sequence
  Non-cyclic GFR-binding peptide
  MOD_RES (2), (3), (36): Xaa is C or S
  MOD_RES (17), (18), (19), (20), (21): Xaa is A or G
  MOD_RES (22), (23), (24), (25): Xaa is A or G or is absent
PXXVPQDLSSLSILFFXXXXXXXXXLKVYPMVVKSXK

SEQ ID NO: 24979 - protein, 32 aa, Artificial Sequence
  Non-cyclic GFR-binding peptide
  MOD_RES (31), (31): Xaa is C or S
APVKTSSLSMLFFDNGRVLLLKVYPMIVEEXG

SEQ ID NO: 24980 - protein, 36 aa, Artificial Sequence
  Non-cyclic GFR-binding peptide
  MOD_RES (3), (4), (36): Xaa is C or S
GPXXTPTKMSSLSMLFFNDKQQIILKVYPGMVVDRX

SEQ ID NO: 24981 - protein, 39 aa, Artificial Sequence
  Non-cyclic GFR-binding peptide
  MOD_RES (3), (37), (39): Xaa is C or S
  MOD_RES (17), (18), (19), (20), (21): Xaa is A or G
  MOD_RES (22), (23), (24), (25): Xaa is A or G or is absent
LEXVPTEESSLSMLFFXXXXXXXXXLKVYPFLQHNKXEX

SEQ ID NO: 24982 - protein, 37 aa, Artificial Sequence
  Non-cyclic GFR-binding peptide
  MOD_RES (4), (5): Xaa is C or S
  MOD_RES (19), (20), (21), (22), (23): Xaa is A or G
  MOD_RES (24), (25), (26), (27): Xaa is A or G or is absent
PKAXXAPTKLSSLSVLFFXXXXXXXXXLKVYPNMVVK

SEQ ID NO: 24983 - protein, 35 aa, Artificial Sequence
  Non-cyclic GFR-binding peptide
  MOD_RES (3), (4), (35): Xaa is C or S
STXXAPVKTSSLSMLFFDNGRVLLLKVYPMIVEEX

SEQ ID NO: 24984 - protein, 37 aa, Artificial Sequence
  Non-cyclic GFR-binding peptide
  MOD_RES (2), (3), (36): Xaa is C or S
  MOD_RES (17), (18), (19), (20), (21): Xaa is A or G
  MOD_RES (22), (23), (24), (25): Xaa is A or G or is absent
TXXAPVKTSSLSMLFFXXXXXXXXXLKVYPMIVEEXG

SEQ ID NO: 24985 - protein, 38 aa, Artificial Sequence
  Non-cyclic GFR-binding peptide
  MOD_RES (3), (4): Xaa is C or S
  MOD_RES (18), (19), (20), (21), (22): Xaa is A or G
  MOD_RES (23), (24), (25), (26): Xaa is A or G or is absent
KAXXVPTKLSSLSVLFFXXXXXXXXXLKVYPEGMSVAE

SEQ ID NO: 24986 - protein, 34 aa, Artificial Sequence
  Non-cyclic GFR-binding peptide
  MOD_RES (34), (34): Xaa is C or S
  MOD_RES (14), (15), (16), (17), (18): Xaa is A or G
  MOD_RES (19), (20), (21), (22): Xaa is A or G or is absent
APTKLSSLSVLFFXXXXXXXXXLKVYPNMVVRSX

SEQ ID NO: 24987 - protein, 37 aa, Artificial Sequence
  Non-cyclic GFR-binding peptide
  MOD_RES (1), (2), (36): Xaa is C or S
  MOD_RES (16), (17), (18), (19), (20): Xaa is A or G
  MOD_RES (21), (22), (23), (24): Xaa is A or G or is absent
XXAPTKLSSLSVLFFXXXXXXXXXLKVYPNMVVKAXG

SEQ ID NO: 24988 - protein, 33 aa, Artificial Sequence
  Non-cyclic GFR-binding peptide
  MOD_RES (32), (32): Xaa is C or S
VPARLSSLSILFFDAANNVVLKVYPDMVVEAXG

SEQ ID NO: 24989 - protein, 36 aa, Artificial Sequence
  Non-cyclic GFR-binding peptide
  MOD_RES (1), (34), (36): Xaa is C or S
  MOD_RES (15), (16), (17), (18), (19): Xaa is A or G
  MOD_RES (20), (21), (22), (23): Xaa is A or G or is absent
XVSQDLSSLSILFFXXXXXXXXXLKVYPMIVKSXKX

SEQ ID NO: 24990 - protein, 35 aa, Artificial Sequence
  Non-cyclic GFR-binding peptide
  MOD_RES (1), (2), (35): Xaa is C or S
  MOD_RES (16), (17), (18), (19), (20): Xaa is A or G
  MOD_RES (21), (22), (23), (24): Xaa is A or G or is absent
XXVSQDLSSLSILFFXXXXXXXXXLKVYPMIVKSX

SEQ ID NO: 24991 - protein, 40 aa, Artificial Sequence
  Non-cyclic GFR-binding peptide
  MOD_RES (3), (37), (39): Xaa is C or S
LEXVPTEESSLSMLFFRIKPHQGQHLKVYPFLQHNKXEXR

SEQ ID NO: 24992 - protein, 42 aa, Artificial Sequence
  Non-cyclic GFR-binding peptide
  MOD_RES (6), (7), (39), (41): Xaa is C or S
HVPKPXXAPTKLSSLSVLFFDDSSNVILKVYPNMVVRSXGXH

SEQ ID NO: 24993 - protein, 36 aa, Artificial Sequence
  Non-cyclic GFR-binding peptide
  MOD_RES (1), (2), (36): Xaa is C or S
  MOD_RES (16), (17), (18), (19), (20): Xaa is A or G
  MOD_RES (21), (22), (23), (24): Xaa is A or G or is absent
XXAPTKLSSLSVLFFXXXXXXXXXLKVYPNMVVKAX

SEQ ID NO: 24994 - protein, 39 aa, Artificial Sequence
  Non-cyclic GFR-binding peptide
  MOD_RES (3), (4), (36), (38): Xaa is C or S
ASXXVPARLSSLSILFFDAANNVVLKVYPDMVVEAXGXR

SEQ ID NO: 24995 - protein, 42 aa, Artificial Sequence
  Non-cyclic GFR-binding peptide
  MOD_RES (5), (6), (40), (42): Xaa is C or S
  MOD_RES (20), (21), (22), (23), (24): Xaa is A or G
  MOD_RES (25), (26), (27), (28): Xaa is A or G or is absent
APASXXVPARLSSLSILFFXXXXXXXXXLKVYPDMVVEAXGX

SEQ ID NO: 24996 - protein, 38 aa, Artificial Sequence
  Non-cyclic GFR-binding peptide
  MOD_RES (1), (35), (37): Xaa is C or S
  MOD_RES (15), (16), (17), (18), (19): Xaa is A or G
  MOD_RES (20), (21), (22), (23): Xaa is A or G or is absent
XAPTQLSSLSVLFFXXXXXXXXXLKVYPNMVVRAXGXH

SEQ ID NO: 24997 - protein, 35 aa, Artificial Sequence
  Non-cyclic GFR-binding peptide
  MOD_RES (1), (2): Xaa is C or S
  MOD_RES (16), (17), (18), (19), (20): Xaa is A or G
  MOD_RES (21), (22), (23), (24): Xaa is A or G or is absent
XXVPTKLSSLSILFFXXXXXXXXXLKVYPGMAVSE

SEQ ID NO: 24998 - protein, 36 aa, Artificial Sequence
  Non-cyclic GFR-binding peptide
  MOD_RES (1), (35): Xaa is C or S
  MOD_RES (15), (16), (17), (18), (19): Xaa is A or G
  MOD_RES (20), (21), (22), (23): Xaa is A or G or is absent
XTPTKMSSLSMLFFXXXXXXXXXLKVYPGMVVDRXG

SEQ ID NO: 24999 - protein, 43 aa, Artificial Sequence
  Non-cyclic GFR-binding peptide
  MOD_RES (6), (7), (41), (43): Xaa is C or S
  MOD_RES (21), (22), (23), (24), (25): Xaa is A or G
  MOD_RES (26), (27), (28), (29): Xaa is A or G or is absent
SIPKAXXVPTELSSLSMLFFXXXXXXXXXLKVYPEMVVEGXGX

SEQ ID NO: 25000 - protein, 40 aa, Artificial Sequence
  Non-cyclic GFR-binding peptide
  MOD_RES (6), (7), (38), (40): Xaa is C or S
ASASPXXVSQDLSSLSILFFIGKTPKILKVYPMIVKSXKX

SEQ ID NO: 25001 - protein, 33 aa, Artificial Sequence
  Non-cyclic GFR-binding peptide
  MOD_RES (31), (33): Xaa is C or S
VPQALSSLSILFFVGRKPKVLKVYPMIVRSXKX

SEQ ID NO: 25002 - protein, 35 aa, Artificial Sequence
  Non-cyclic GFR-binding peptide
  MOD_RES (32), (34): Xaa is C or S
VPTKLSSLSILFFDKGVVTYLKVYPGMAVSEXGXR

SEQ ID NO: 25003 - protein, 34 aa, Artificial Sequence
  Non-cyclic GFR-binding peptide
  MOD_RES (2), (3): Xaa is C or S
AXXVPTELSSLSMLFFDEYDKVVLKVYPEMVVEG

SEQ ID NO: 25004 - protein, 39 aa, Artificial Sequence
  Non-cyclic GFR-binding peptide
  MOD_RES (5), (6), (38): Xaa is C or S
VPKAXXAPTKLSSLSVLFFDSSNNVILKVYPNMVVKAXG

SEQ ID NO: 25005 - protein, 33 aa, Artificial Sequence
  Non-cyclic GFR-binding peptide
  MOD_RES (32), (32): Xaa is C or S
VPTKLSSLSILFFDKGVVTYLKVYPGMAVSEXG

SEQ ID NO: 25006 - protein, 34 aa, Artificial Sequence
  Non-cyclic GFR-binding peptide
  MOD_RES (3), (4): Xaa is C or S
PTXXVPTRLSSLSILFFDSANNVVLKVYPDMVVE

SEQ ID NO: 25007 - protein, 34 aa, Artificial Sequence
  Non-cyclic GFR-binding peptide
  MOD_RES (32), (34): Xaa is C or S
VPTELSSLSMLFFDEYDKVVLKVYPEMVVEGXGX

SEQ ID NO: 25008 - protein, 37 aa, Artificial Sequence
  Non-cyclic GFR-binding peptide
  MOD_RES (7), (7): Xaa is C or S
HVTKPTXAPTKLSSLSVLFFDDSSNVILKVYPNMVVR

SEQ ID NO: 25009 - protein, 34 aa, Artificial Sequence
  Non-cyclic GFR-binding peptide
  MOD_RES (1), (1): Xaa is C or S
  MOD_RES (15), (16), (17), (18), (19): Xaa is A or G
  MOD_RES (20), (21), (22), (23): Xaa is A or G or is absent
XVPTEESSLSMLFFXXXXXXXXXLKVYPFLQHNK

SEQ ID NO: 25010 - protein, 39 aa, Artificial Sequence
  Non-cyclic GFR-binding peptide
  MOD_RES (37), (39): Xaa is C or S
  MOD_RES (16), (17), (18), (19), (20): Xaa is A or G
  MOD_RES (21), (22), (23), (24): Xaa is A or G or is absent
QPSRVHHSSLSVLFFXXXXXXXXXLKVYPRLEEHLEXAX

SEQ ID NO: 25011 - protein, 38 aa, Artificial Sequence
  Non-cyclic GFR-binding peptide
  MOD_RES (1), (2), (35), (37): Xaa is C or S
  MOD_RES (16), (17), (18), (19), (20): Xaa is A or G
  MOD_RES (21), (22), (23), (24): Xaa is A or G or is absent
XXVSQDLSSLSILFFXXXXXXXXXLKVYPMIVKSXKXS

SEQ ID NO: 25012 - protein, 35 aa, Artificial Sequence
  Non-cyclic GFR-binding peptide
  MOD_RES (2), (3), (34): Xaa is C or S
PXXVPQDLSSLSILFFVGRTPKVLKVYPMVVKSXK

SEQ ID NO: 25013 - protein, 37 aa, Artificial Sequence
  Non-cyclic GFR-binding peptide
  MOD_RES (2), (36): Xaa is C or S
EXVPTEESSLSMLFFRIKPHQGQHLKVYPFLQHNKXE

SEQ ID NO: 25014 - protein, 39 aa, Artificial Sequence
  Non-cyclic GFR-binding peptide
  MOD_RES (5), (6), (37), (39): Xaa is C or S
SASPXXVSQDLSSLSILFFIGKTPKILKVYPMIVKSXKX

SEQ ID NO: 25015 - protein, 37 aa, Artificial Sequence
  Non-cyclic GFR-binding peptide
  MOD_RES (3), (4), (36): Xaa is C or S
KPXXAPTQLSSLSVLFFDDSSNVILKVYPNMVVRAXG

SEQ ID NO: 25016 - protein, 36 aa, Artificial Sequence
  Non-cyclic GFR-binding peptide
  MOD_RES (1), (34), (36): Xaa is C or S
XVPTKLSSLSVLFFDDMGVPTLKVYPEGMSVAEXGX

SEQ ID NO: 25017 - protein, 41 aa, Artificial Sequence
  Non-cyclic GFR-binding peptide
  MOD_RES (6), (40): Xaa is C or S
  MOD_RES (20), (21), (22), (23), (24): Xaa is A or G
  MOD_RES (25), (26), (27), (28): Xaa is A or G or is absent
DEGLEXVPTEESSLSMLFFXXXXXXXXXLKVYPFLQHNKXE

SEQ ID NO: 25018 - protein, 36 aa, Artificial Sequence
  Non-cyclic GFR-binding peptide
  MOD_RES (35), (35): Xaa is C or S
  MOD_RES (14), (15), (16), (17), (18): Xaa is A or G
  MOD_RES (19), (20), (21), (22): Xaa is A or G or is absent
SRVHHSSLSVLFFXXXXXXXXXLKVYPRLEEHLEXA

SEQ ID NO: 25019 - protein, 41 aa, Artificial Sequence
  Non-cyclic GFR-binding peptide
  MOD_RES (4), (5), (39), (41): Xaa is C or S
  MOD_RES (19), (20), (21), (22), (23): Xaa is A or G
  MOD_RES (24), (25), (26), (27): Xaa is A or G or is absent
AGPXXTPTKMSSLSMLFFXXXXXXXXXLKVYPGMVVDRXGX

SEQ ID NO: 25020 - protein, 35 aa, Artificial Sequence
  Non-cyclic GFR-binding peptide
  MOD_RES (3), (4): Xaa is C or S
KAXXAPTKLSSLSVLFFDSSNNVILKVYPNMVVKA

SEQ ID NO: 25021 - protein, 37 aa, Artificial Sequence
  Non-cyclic GFR-binding peptide
  MOD_RES (3), (4): Xaa is C or S
  MOD_RES (18), (19), (20), (21), (22): Xaa is A or G
  MOD_RES (23), (24), (25), (26): Xaa is A or G or is absent
KAXXAPTKLSSLSVLFFXXXXXXXXXLKVYPNMVVKA

SEQ ID NO: 25022 - protein, 38 aa, Artificial Sequence
  Non-cyclic GFR-binding peptide
  MOD_RES (5), (6): Xaa is C or S
  MOD_RES (20), (21), (22), (23), (24): Xaa is A or G
  MOD_RES (25), (26), (27), (28): Xaa is A or G or is absent
ASKAXXVPTKLSSLSILFFXXXXXXXXXLKVYPGMAVS

SEQ ID NO: 25023 - protein, 38 aa, Artificial Sequence
  Non-cyclic GFR-binding peptide
  MOD_RES (6), (7): Xaa is C or S
YVPKPXXAPTKLSSLSVLFFDDSSNVILKVYPNMVVRS

SEQ ID NO: 25024 - protein, 33 aa, Artificial Sequence
  Non-cyclic GFR-binding peptide
  MOD_RES (1), (33): Xaa is C or S
XVPTELSSLSMLFFDEYDKVVLKVYPEMVVEGX

SEQ ID NO: 25025 - protein, 34 aa, Artificial Sequence
  Non-cyclic GFR-binding peptide
  MOD_RES (1), (34): Xaa is C or S
XVPTKLSSLSVLFFDDMGVPTLKVYPEGMSVAEX

SEQ ID NO: 25026 - protein, 38 aa, Artificial Sequence
  Non-cyclic GFR-binding peptide
  MOD_RES (3), (4), (37): Xaa is C or S
KAXXVPTKLSSLSVLFFDDMGVPTLKVYPEGMSVAEXG

SEQ ID NO: 25027 - protein, 36 aa, Artificial Sequence
  Non-cyclic GFR-binding peptide
  MOD_RES (5), (6): Xaa is C or S
IPKAXXVPTELSSLSMLFFDEYDKVVLKVYPEMVVE

SEQ ID NO: 25028 - protein, 40 aa, Artificial Sequence
  Non-cyclic GFR-binding peptide
  MOD_RES (7), (7): Xaa is C or S
NDEGLEXVPTEESSLSMLFFRIKPHQGQHLKVYPFLQHNK

SEQ ID NO: 25029 - protein, 38 aa, Artificial Sequence
  Non-cyclic GFR-binding peptide
  MOD_RES (37), (37): Xaa is C or S
  MOD_RES (16), (17), (18), (19), (20): Xaa is A or G
  MOD_RES (21), (22), (23), (24): Xaa is A or G or is absent
QPSRVHHSSLSVLFFXXXXXXXXXLKVYPRLEEHLEXA

SEQ ID NO: 25030 - protein, 35 aa, Artificial Sequence
  Non-cyclic GFR-binding peptide
  MOD_RES (1), (2), (34): Xaa is C or S
XXVPTELSSLSMLFFDEYDKVVLKVYPEMVVEGXG

SEQ ID NO: 25031 - protein, 33 aa, Artificial Sequence
  Non-cyclic GFR-binding peptide
  MOD_RES (32), (32): Xaa is C or S
APTKLSSLSVLFFDDSSNVILKVYPNMVVRSXG

SEQ ID NO: 25032 - protein, 42 aa, Artificial Sequence
  Non-cyclic GFR-binding peptide
  MOD_RES (3), (40), (42): Xaa is C or S
VKXQPSRVHHSSLSVLFFEYVRKKPKLLKVYPRLEEHLEXAX

SEQ ID NO: 25033 - protein, 42 aa, Artificial Sequence
  Non-cyclic GFR-binding peptide
  MOD_RES (6), (7), (42): Xaa is C or S
  MOD_RES (21), (22), (23), (24), (25): Xaa is A or G
  MOD_RES (26), (27), (28), (29): Xaa is A or G or is absent
KVGKAXXVPTKLSSLSVLFFXXXXXXXXXLKVYPEGMSVAEX

SEQ ID NO: 25034 - protein, 40 aa, Artificial Sequence
  Non-cyclic GFR-binding peptide
  MOD_RES (6), (7): Xaa is C or S
  MOD_RES (21), (22), (23), (24), (25): Xaa is A or G
  MOD_RES (26), (27), (28), (29): Xaa is A or G or is absent
SIPKAXXVPTELSSLSMLFFXXXXXXXXXLKVYPEMVVEG

SEQ ID NO: 25035 - protein, 34 aa, Artificial Sequence
  Non-cyclic GFR-binding peptide
  MOD_RES (1), (32), (34): Xaa is C or S
XVPQALSSLSILFFVGRKPKVLKVYPMIVRSXKX

SEQ ID NO: 25036 - protein, 42 aa, Artificial Sequence
  Non-cyclic GFR-binding peptide
  MOD_RES (6), (7), (40), (42): Xaa is C or S
  MOD_RES (21), (22), (23), (24), (25): Xaa is A or G
  MOD_RES (26), (27), (28), (29): Xaa is A or G or is absent
ASASPXXVPQDLSSLSILFFXXXXXXXXXLKVYPMVVKSXKX

SEQ ID NO: 25037 - protein, 37 aa, Artificial Sequence
  Non-cyclic GFR-binding peptide
  MOD_RES (5), (6): Xaa is C or S
TPPTXXVPTRLSSLSILFFDSANNVVLKVYPDMVVES

SEQ ID NO: 25038 - protein, 43 aa, Artificial Sequence
  Non-cyclic GFR-binding peptide
  MOD_RES (6), (7), (41), (43): Xaa is C or S
  MOD_RES (21), (22), (23), (24), (25): Xaa is A or G
  MOD_RES (26), (27), (28), (29): Xaa is A or G or is absent
YVPKPXXAPTKLSSLSVLFFXXXXXXXXXLKVYPNMVVRSXGX

SEQ ID NO: 25039 - protein, 39 aa, Artificial Sequence
  Non-cyclic GFR-binding peptide
  MOD_RES (3), (4), (38): Xaa is C or S
  MOD_RES (18), (19), (20), (21), (22): Xaa is A or G
  MOD_RES (23), (24), (25), (26): Xaa is A or G or is absent
KPXXAPTKLSSLSVLFFXXXXXXXXXLKVYPNMVVRSXG

SEQ ID NO: 25040 - protein, 40 aa, Artificial Sequence
  Non-cyclic GFR-binding peptide
  MOD_RES (3), (4), (38), (40): Xaa is C or S
  MOD_RES (18), (19), (20), (21), (22): Xaa is A or G
  MOD_RES (23), (24), (25), (26): Xaa is A or G or is absent
KPXXAPTKLSSLSVLFFXXXXXXXXXLKVYPNMVVRSXGX

SEQ ID NO: 25041 - protein, 35 aa, Artificial Sequence
  Non-cyclic GFR-binding peptide
  MOD_RES (1), (2): Xaa is C or S
  MOD_RES (16), (17), (18), (19), (20): Xaa is A or G
  MOD_RES (21), (22), (23), (24): Xaa is A or G or is absent
XXTPTKMSSLSMLFFXXXXXXXXXLKVYPGMVVDR

SEQ ID NO: 25042 - protein, 41 aa, Artificial Sequence
  Non-cyclic GFR-binding peptide
  MOD_RES (5), (6), (40): Xaa is C or S
  MOD_RES (20), (21), (22), (23), (24): Xaa is A or G
  MOD_RES (25), (26), (27), (28): Xaa is A or G or is absent
ASKAXXVPTKLSSLSILFFXXXXXXXXXLKVYPGMAVSEXG

SEQ ID NO: 25043 - protein, 37 aa, Artificial Sequence
  Non-cyclic GFR-binding peptide
  MOD_RES (1), (35), (37): Xaa is C or S
  MOD_RES (15), (16), (17), (18), (19): Xaa is A or G
  MOD_RES (20), (21), (22), (23): Xaa is A or G or is absent
XVPTELSSLSMLFFXXXXXXXXXLKVYPEMVVEGXGX

SEQ ID NO: 25044 - protein, 34 aa, Artificial Sequence
  Non-cyclic GFR-binding peptide
  MOD_RES (1), (1): Xaa is C or S
  MOD_RES (15), (16), (17), (18), (19): Xaa is A or G
  MOD_RES (20), (21), (22), (23): Xaa is A or G or is absent
XVPTKLSSLSILFFXXXXXXXXXLKVYPGMAVSE

SEQ ID NO: 25045 - protein, 37 aa, Artificial Sequence
  Non-cyclic GFR-binding peptide
  MOD_RES (6), (7): Xaa is C or S
YVPKPXXAPTKLSSLSVLFFDDSSNVILKVYPNMVVR

SEQ ID NO: 25046 - protein, 40 aa, Artificial Sequence
  Non-cyclic GFR-binding peptide
  MOD_RES (5), (6), (40): Xaa is C or S
  MOD_RES (20), (21), (22), (23), (24): Xaa is A or G
  MOD_RES (25), (26), (27), (28): Xaa is A or G or is absent
IPKAXXVPTELSSLSMLFFXXXXXXXXXLKVYPEMVVEGX

SEQ ID NO: 25047 - protein, 40 aa, Artificial Sequence
  Non-cyclic GFR-binding peptide
  MOD_RES (6), (7), (38), (40): Xaa is C or S
ASASPXXVPQDLSSLSILFFVGRTPKVLKVYPMVVKSXKX

SEQ ID NO: 25048 - protein, 38 aa, Artificial Sequence
  Non-cyclic GFR-binding peptide
  MOD_RES (5), (6), (38): Xaa is C or S
SAGPXXTPTKMSSLSMLFFNDKQQIILKVYPGMVVDRX

SEQ ID NO: 25049 - protein, 42 aa, Artificial Sequence
  Non-cyclic GFR-binding peptide
  MOD_RES (5), (6), (39), (41): Xaa is C or S
  MOD_RES (20), (21), (22), (23), (24): Xaa is A or G
  MOD_RES (25), (26), (27), (28): Xaa is A or G or is absent
SASPXXVPQDLSSLSILFFXXXXXXXXXLKVYPMVVKSXKXS

SEQ ID NO: 25050 - protein, 34 aa, Artificial Sequence
  Non-cyclic GFR-binding peptide
  MOD_RES (1), (2), (34): Xaa is C or S
XXVPTELSSLSMLFFDEYDKVVLKVYPEMVVEGX

SEQ ID NO: 25051 - protein, 34 aa, Artificial Sequence
  Non-cyclic GFR-binding peptide
  MOD_RES (1), (2), (33): Xaa is C or S
XXVSQDLSSLSILFFIGKTPKILKVYPMIVKSXK

SEQ ID NO: 25052 - protein, 36 aa, Artificial Sequence
  Non-cyclic GFR-binding peptide
  MOD_RES (3), (4), (36): Xaa is C or S
KPXXAPTQLSSLSVLFFDDSSNVILKVYPNMVVRAX

SEQ ID NO: 25053 - protein, 35 aa, Artificial Sequence
  Non-cyclic GFR-binding peptide
  MOD_RES (35), (35): Xaa is C or S
SRVHHSSLSVLFFEYVRKKPKLLKVYPRLEEHLEX

SEQ ID NO: 25054 - protein, 33 aa, Artificial Sequence
  Non-cyclic GFR-binding peptide
  MOD_RES (14), (15), (16), (17), (18): Xaa is A or G
  MOD_RES (19), (20), (21), (22): Xaa is A or G or is absent
APTKLSSLSVLFFXXXXXXXXXLKVYPNMVVKA

SEQ ID NO: 25055 - protein, 36 aa, Artificial Sequence
  Non-cyclic GFR-binding peptide
  MOD_RES (5), (6): Xaa is C or S
TPPTXXVPTRLSSLSILFFDSANNVVLKVYPDMVVE

SEQ ID NO: 25056 - protein, 36 aa, Artificial Sequence
  Non-cyclic GFR-binding peptide
  MOD_RES (2), (36): Xaa is C or S
EXVPTEESSLSMLFFRIKPHQGQHLKVYPFLQHNKX

SEQ ID NO: 25057 - protein, 39 aa, Artificial Sequence
  Non-cyclic GFR-binding peptide
  MOD_RES (2), (3), (37), (39): Xaa is C or S
  MOD_RES (17), (18), (19), (20), (21): Xaa is A or G
  MOD_RES (22), (23), (24), (25): Xaa is A or G or is absent
AXXVPTKLSSLSILFFXXXXXXXXXLKVYPGMAVSEXGX

SEQ ID NO: 25058 - protein, 43 aa, Artificial Sequence
  Non-cyclic GFR-binding peptide
  MOD_RES (5), (6), (40), (42): Xaa is C or S
  MOD_RES (20), (21), (22), (23), (24): Xaa is A or G
  MOD_RES (25), (26), (27), (28): Xaa is A or G or is absent
IPKAXXVPTELSSLSMLFFXXXXXXXXXLKVYPEMVVEGXGXR

SEQ ID NO: 25059 - protein, 35 aa, Artificial Sequence
  Non-cyclic GFR-binding peptide
  MOD_RES (1), (2), (33), (35): Xaa is C or S
XXAPVKTSSLSMLFFDNGRVLLLKVYPMIVEEXGX

SEQ ID NO: 25060 - protein, 34 aa, Artificial Sequence
  Non-cyclic GFR-binding peptide
PSRVHHSSLSVLFFEYVRKKPKLLKVYPRLEEHL

SEQ ID NO: 25061 - protein, 38 aa, Artificial Sequence
  Non-cyclic GFR-binding peptide
  MOD_RES (4), (36), (38): Xaa is C or S
KPTXAPTKLSSLSVLFFDDSSNVILKVYPNMVVRSXGX

SEQ ID NO: 25062 - protein, 30 aa, Artificial Sequence
  Non-cyclic GFR-binding peptide
APTKLSSLSVLFFDSSNNVILKVYPNMVVK

SEQ ID NO: 25063 - protein, 36 aa, Artificial Sequence
  Non-cyclic GFR-binding peptide
  MOD_RES (1), (2), (36): Xaa is C or S
  MOD_RES (16), (17), (18), (19), (20): Xaa is A or G
  MOD_RES (21), (22), (23), (24): Xaa is A or G or is absent
XXAPTQLSSLSVLFFXXXXXXXXXLKVYPNMVVRAX

SEQ ID NO: 25064 - protein, 44 aa, Artificial Sequence
  Non-cyclic GFR-binding peptide
  MOD_RES (6), (7), (41), (43): Xaa is C or S
  MOD_RES (21), (22), (23), (24), (25): Xaa is A or G
  MOD_RES (26), (27), (28), (29): Xaa is A or G or is absent
TVPKPXXAPTQLSSLSVLFFXXXXXXXXXLKVYPNMVVRAXGXH

SEQ ID NO: 25065 - protein, 37 aa, Artificial Sequence
  Non-cyclic GFR-binding peptide
  MOD_RES (1), (2), (34), (36): Xaa is C or S
XXVPTELSSLSMLFFDEYDKVVLKVYPEMVVEGXGXR

SEQ ID NO: 25066 - protein, 37 aa, Artificial Sequence
  Non-cyclic GFR-binding peptide
  MOD_RES (1), (2), (34), (36): Xaa is C or S
XXTPTKMSSLSMLFFNDKQQIILKVYPGMVVDRXGXS

SEQ ID NO: 25067 - protein, 40 aa, Artificial Sequence
  Non-cyclic GFR-binding peptide
  MOD_RES (5), (37), (39): Xaa is C or S
TKPTXAPTKLSSLSVLFFDDSSNVILKVYPNMVVRSXGXH

SEQ ID NO: 25068 - protein, 42 aa, Artificial Sequence
  Non-cyclic GFR-binding peptide
  MOD_RES (5), (6), (39), (41): Xaa is C or S
  MOD_RES (20), (21), (22), (23), (24): Xaa is A or G
  MOD_RES (25), (26), (27), (28): Xaa is A or G or is absent
SAAPXXVPQALSSLSILFFXXXXXXXXXLKVYPMIVRSXKXS

SEQ ID NO: 25069 - protein, 36 aa, Artificial Sequence
  Non-cyclic GFR-binding peptide
  MOD_RES (3), (4): Xaa is C or S
  MOD_RES (18), (19), (20), (21), (22): Xaa is A or G
  MOD_RES (23), (24), (25), (26): Xaa is A or G or is absent
KPXXAPTQLSSLSVLFFXXXXXXXXXLKVYPNMVVR

SEQ ID NO: 25070 - protein, 32 aa, Artificial Sequence
  Non-cyclic GFR-binding peptide
  MOD_RES (14), (15), (16), (17), (18): Xaa is A or G
  MOD_RES (19), (20), (21), (22): Xaa is A or G or is absent
APTQLSSLSVLFFXXXXXXXXXLKVYPNMVVR

SEQ ID NO: 25071 - protein, 32 aa, Artificial Sequence
  Non-cyclic GFR-binding peptide
  MOD_RES (14), (15), (16), (17), (18): Xaa is A or G
  MOD_RES (19), (20), (21), (22): Xaa is A or G or is absent
VPQALSSLSILFFXXXXXXXXXLKVYPMIVRS

SEQ ID NO: 25072 - protein, 31 aa, Artificial Sequence
  Non-cyclic GFR-binding peptide
VPTRLSSLSILFFDSANNVVLKVYPDMVVES

SEQ ID NO: 25073 - protein, 39 aa, Artificial Sequence
  Non-cyclic GFR-binding peptide
  MOD_RES (2), (3), (38): Xaa is C or S
  MOD_RES (17), (18), (19), (20), (21): Xaa is A or G
  MOD_RES (22), (23), (24), (25): Xaa is A or G or is absent
AXXVPTKLSSLSVLFFXXXXXXXXXLKVYPEGMSVAEXG

SEQ ID NO: 25074 - protein, 38 aa, Artificial Sequence
  Non-cyclic GFR-binding peptide
  MOD_RES (4), (5): Xaa is C or S
  MOD_RES (19), (20), (21), (22), (23): Xaa is A or G
  MOD_RES (24), (25), (26), (27): Xaa is A or G or is absent
PKPXXAPTQLSSLSVLFFXXXXXXXXXLKVYPNMVVRA

SEQ ID NO: 25075 - protein, 38 aa, Artificial Sequence
  Non-cyclic GFR-binding peptide
  MOD_RES (2), (3), (37): Xaa is C or S
  MOD_RES (17), (18), (19), (20), (21): Xaa is A or G
  MOD_RES (22), (23), (24), (25): Xaa is A or G or is absent
AXXAPTKLSSLSVLFFXXXXXXXXXLKVYPNMVVKAXG

SEQ ID NO: 25076 - protein, 36 aa, Artificial Sequence
  Non-cyclic GFR-binding peptide
  MOD_RES (1), (2), (34), (36): Xaa is C or S
XXAPTKLSSLSVLFFDSSNNVILKVYPNMVVKAXGX

SEQ ID NO: 25077 - protein, 37 aa, Artificial Sequence
  Non-cyclic GFR-binding peptide
  MOD_RES (2), (3), (35), (37): Xaa is C or S
SXXVPARLSSLSILFFDAANNVVLKVYPDMVVEAXGX

SEQ ID NO: 25078 - protein, 33 aa, Artificial Sequence
  Non-cyclic GFR-binding peptide
  MOD_RES (14), (15), (16), (17), (18): Xaa is A or G
  MOD_RES (19), (20), (21), (22): Xaa is A or G or is absent
VPTEESSLSMLFFXXXXXXXXXLKVYPFLQHNK

SEQ ID NO: 25079 - protein, 36 aa, Artificial Sequence
  Non-cyclic GFR-binding peptide
  MOD_RES (3), (4), (36): Xaa is C or S
ASXXVPARLSSLSILFFDAANNVVLKVYPDMVVEAX

SEQ ID NO: 25080 - protein, 42 aa, Artificial Sequence
  Non-cyclic GFR-binding peptide
  MOD_RES (6), (7), (39), (41): Xaa is C or S
STPPTXXVPTRLSSLSILFFDSANNVVLKVYPDMVVESXGXR

SEQ ID NO: 25081 - protein, 43 aa, Artificial Sequence
  Non-cyclic GFR-binding peptide
  MOD_RES (7), (41), (43): Xaa is C or S
  MOD_RES (21), (22), (23), (24), (25): Xaa is A or G
  MOD_RES (26), (27), (28), (29): Xaa is A or G or is absent
NDEGLEXVPTEESSLSMLFFXXXXXXXXXLKVYPFLQHNKXEX

SEQ ID NO: 25082 - protein, 38 aa, Artificial Sequence
  Non-cyclic GFR-binding peptide
  MOD_RES (4), (5), (38): Xaa is C or S
GKAXXVPTKLSSLSVLFFDDMGVPTLKVYPEGMSVAEX

SEQ ID NO: 25083 - protein, 34 aa, Artificial Sequence
  Non-cyclic GFR-binding peptide
  MOD_RES (1), (33): Xaa is C or S
XTPTKMSSLSMLFFNDKQQIILKVYPGMVVDRXG

SEQ ID NO: 25084 - protein, 33 aa, Artificial Sequence
  Non-cyclic GFR-binding peptide
SRVHHSSLSVLFFEYVRKKPKLLKVYPRLEEHL

SEQ ID NO: 25085 - protein, 41 aa, Artificial Sequence
  Non-cyclic GFR-binding peptide
  MOD_RES (5), (6), (40): Xaa is C or S
  MOD_RES (20), (21), (22), (23), (24): Xaa is A or G
  MOD_RES (25), (26), (27), (28): Xaa is A or G or is absent
TPPTXXVPTRLSSLSILFFXXXXXXXXXLKVYPDMVVESXG

SEQ ID NO: 25086 - protein, 37 aa, Artificial Sequence
  Non-cyclic GFR-binding peptide
  MOD_RES (3), (4), (37): Xaa is C or S
  MOD_RES (18), (19), (20), (21), (22): Xaa is A or G
  MOD_RES (23), (24), (25), (26): Xaa is A or G or is absent
STXXAPVKTSSLSMLFFXXXXXXXXXLKVYPMIVEEX

SEQ ID NO: 25087 - protein, 44 aa, Artificial Sequence
  Non-cyclic GFR-binding peptide
  MOD_RES (6), (7), (41), (43): Xaa is C or S
  MOD_RES (21), (22), (23), (24), (25): Xaa is A or G
  MOD_RES (26), (27), (28), (29): Xaa is A or G or is absent
KIPKAXXVPTELSSLSMLFFXXXXXXXXXLKVYPDMVVEGXGXR

SEQ ID NO: 25088 - protein, 37 aa, Artificial Sequence
  Non-cyclic GFR-binding peptide
  MOD_RES (3), (4): Xaa is C or S
  MOD_RES (18), (19), (20), (21), (22): Xaa is A or G
  MOD_RES (23), (24), (25), (26): Xaa is A or G or is absent
ASXXVPARLSSLSILFFXXXXXXXXXLKVYPDMVVEA

SEQ ID NO: 25089 - protein, 35 aa, Artificial Sequence
  Non-cyclic GFR-binding peptide
  MOD_RES (1), (33), (35): Xaa is C or S
XAPTKLSSLSVLFFDDSSNVILKVYPNMVVRSXGX

SEQ ID NO: 25090 - protein, 40 aa, Artificial Sequence
  Non-cyclic GFR-binding peptide
  MOD_RES (6), (7), (39): Xaa is C or S
AAPASXXVPARLSSLSILFFDAANNVVLKVYPDMVVEAXG

SEQ ID NO: 25091 - protein, 34 aa, Artificial Sequence
  Non-cyclic GFR-binding peptide
  MOD_RES (1), (2), (33): Xaa is C or S
XXAPVKTSSLSMLFFDNGRVLLLKVYPMIVEEXG

SEQ ID NO: 25092 - protein, 33 aa, Artificial Sequence
  Non-cyclic GFR-binding peptide
  MOD_RES (2), (2): Xaa is C or S
TXAPTKLSSLSVLFFDDSSNVILKVYPNMVVRS

SEQ ID NO: 25093 - protein, 35 aa, Artificial Sequence
  Non-cyclic GFR-binding peptide
  MOD_RES (1), (35): Xaa is C or S
  MOD_RES (15), (16), (17), (18), (19): Xaa is A or G
  MOD_RES (20), (21), (22), (23): Xaa is A or G or is absent
XAPTQLSSLSVLFFXXXXXXXXXLKVYPNMVVRAX

SEQ ID NO: 25094 - protein, 39 aa, Artificial Sequence
  Non-cyclic GFR-binding peptide
  MOD_RES (1), (2), (37), (39): Xaa is C or S
  MOD_RES (16), (17), (18), (19), (20): Xaa is A or G
  MOD_RES (21), (22), (23), (24): Xaa is A or G or is absent
XXVPTKLSSLSVLFFXXXXXXXXXLKVYPEGMSVAEXGX

SEQ ID NO: 25095 - protein, 33 aa, Artificial Sequence
  Non-cyclic GFR-binding peptide
  MOD_RES (2), (3): Xaa is C or S
PXXVPQDLSSLSILFFVGRTPKVLKVYPMVVKS

SEQ ID NO: 25096 - protein, 39 aa, Artificial Sequence
  Non-cyclic GFR-binding peptide
  MOD_RES (6), (7), (39): Xaa is C or S
SIPKAXXVPTELSSLSMLFFDEYDKVVLKVYPEMVVEGX

SEQ ID NO: 25097 - protein, 42 aa, Artificial Sequence
  Non-cyclic GFR-binding peptide
  MOD_RES (5), (42): Xaa is C or S
  MOD_RES (21), (22), (23), (24), (25): Xaa is A or G
  MOD_RES (26), (27), (28), (29): Xaa is A or G or is absent
SSVKXQPSRVHHSSLSVLFFXXXXXXXXXLKVYPRLEEHLEX

SEQ ID NO: 25098 - protein, 36 aa, Artificial Sequence
  Non-cyclic GFR-binding peptide
  MOD_RES (1), (35): Xaa is C or S
  MOD_RES (15), (16), (17), (18), (19): Xaa is A or G
  MOD_RES (20), (21), (22), (23): Xaa is A or G or is absent
XVPTELSSLSMLFFXXXXXXXXXLKVYPEMVVEGXG

SEQ ID NO: 25099 - protein, 37 aa, Artificial Sequence
  Non-cyclic GFR-binding peptide
  MOD_RES (4), (5), (36): Xaa is C or S
PSTXXAPVKTSSLSMLFFDNGRVLLLKVYPMIVEEXG

SEQ ID NO: 25100 - protein, 41 aa, Artificial Sequence
  Non-cyclic GFR-binding peptide
  MOD_RES (5), (6), (40): Xaa is C or S
  MOD_RES (20), (21), (22), (23), (24): Xaa is A or G
  MOD_RES (25), (26), (27), (28): Xaa is A or G or is absent
IPKAXXVPTELSSLSMLFFXXXXXXXXXLKVYPEMVVEGXG

SEQ ID NO: 25101 - protein, 36 aa, Artificial Sequence
  Non-cyclic GFR-binding peptide
  MOD_RES (3), (4): Xaa is C or S
KAXXVPTKLSSLSVLFFDDMGVPTLKVYPEGMSVAE

SEQ ID NO: 25102 - protein, 36 aa, Artificial Sequence
  Non-cyclic GFR-binding peptide
  MOD_RES (2), (3), (35): Xaa is C or S
PXXAPTKLSSLSVLFFDDSSNVILKVYPNMVVRSXG

SEQ ID NO: 25103 - protein, 39 aa, Artificial Sequence
  Non-cyclic GFR-binding peptide
  MOD_RES (4), (5), (37), (39): Xaa is C or S
PKPXXAPTKLSSLSVLFFDDSSNVILKVYPNMVVRSXGX

SEQ ID NO: 25104 - protein, 36 aa, Artificial Sequence
  Non-cyclic GFR-binding peptide
  MOD_RES (2), (3), (36): Xaa is C or S
  MOD_RES (17), (18), (19), (20), (21): Xaa is A or G
  MOD_RES (22), (23), (24), (25): Xaa is A or G or is absent
PXXVPQDLSSLSILFFXXXXXXXXXLKVYPMVVKSX

SEQ ID NO: 25105 - protein, 39 aa, Artificial Sequence
  Non-cyclic GFR-binding peptide
  MOD_RES (36), (38): Xaa is C or S
PSRVHHSSLSVLFFEYVRKKPKLLKVYPRLEEHLEXAXA

SEQ ID NO: 25106 - protein, 37 aa, Artificial Sequence
  Non-cyclic GFR-binding peptide
  MOD_RES (5), (5): Xaa is C or S
  MOD_RES (19), (20), (21), (22), (23): Xaa is A or G
  MOD_RES (24), (25), (26), (27): Xaa is A or G or is absent
EGLEXVPTEESSLSMLFFXXXXXXXXXLKVYPFLQHN

SEQ ID NO: 25107 - protein, 32 aa, Artificial Sequence
  Non-cyclic GFR-binding peptide
  MOD_RES (1), (2): Xaa is C or S
XXAPTQLSSLSVLFFDDSSNVILKVYPNMVVR

SEQ ID NO: 25108 - protein, 31 aa, Artificial Sequence
  Non-cyclic GFR-binding peptide
  MOD_RES (1), (1): Xaa is C or S
XVPTKLSSLSILFFDKGVVTYLKVYPGMAVS

SEQ ID NO: 25109 - protein, 36 aa, Artificial Sequence
  Non-cyclic GFR-binding peptide
QPSRVHHSSLSVLFFEYVRKKPKLLKVYPRLEEHLE

SEQ ID NO: 25110 - protein, 34 aa, Artificial Sequence
  Non-cyclic GFR-binding peptide
  MOD_RES (1), (1): Xaa is C or S
  MOD_RES (15), (16), (17), (18), (19): Xaa is A or G
  MOD_RES (20), (21), (22), (23): Xaa is A or G or is absent
XAPTKLSSLSVLFFXXXXXXXXXLKVYPNMVVRS

SEQ ID NO: 25111 - protein, 36 aa, Artificial Sequence
  Non-cyclic GFR-binding peptide
  MOD_RES (3), (4): Xaa is C or S
  MOD_RES (18), (19), (20), (21), (22): Xaa is A or G
  MOD_RES (23), (24), (25), (26): Xaa is A or G or is absent
APXXVPQALSSLSILFFXXXXXXXXXLKVYPMIVRS

SEQ ID NO: 25112 - protein, 38 aa, Artificial Sequence
  Non-cyclic GFR-binding peptide
  MOD_RES (4), (5): Xaa is C or S
  MOD_RES (19), (20), (21), (22), (23): Xaa is A or G
  MOD_RES (24), (25), (26), (27): Xaa is A or G or is absent
AGPXXTPTKMSSLSMLFFXXXXXXXXXLKVYPGMVVDR

SEQ ID NO: 25113 - protein, 43 aa, Artificial Sequence
  Non-cyclic GFR-binding peptide
  MOD_RES (4), (5), (40), (42): Xaa is C or S
  MOD_RES (19), (20), (21), (22), (23): Xaa is A or G
  MOD_RES (24), (25), (26), (27): Xaa is A or G or is absent
GKAXXVPTKLSSLSVLFFXXXXXXXXXLKVYPEGMSVAEXGXR

SEQ ID NO: 25114 - protein, 40 aa, Artificial Sequence
  Non-cyclic GFR-binding peptide
  MOD_RES (6), (7), (39): Xaa is C or S
GSAGPXXTPTKMSSLSMLFFNDKQQIILKVYPGMVVDRXG

SEQ ID NO: 25115 - protein, 41 aa, Artificial Sequence
  Non-cyclic GFR-binding peptide
  MOD_RES (6), (7), (40): Xaa is C or S
  MOD_RES (21), (22), (23), (24), (25): Xaa is A or G
  MOD_RES (26), (27), (28), (29): Xaa is A or G or is absent
ASASPXXVSQDLSSLSILFFXXXXXXXXXLKVYPMIVKSXK

SEQ ID NO: 25116 - protein, 32 aa, Artificial Sequence
  Non-cyclic GFR-binding peptide
  MOD_RES (32), (32): Xaa is C or S
APTKLSSLSVLFFDDSSNVILKVYPNMVVRSX

SEQ ID NO: 25117 - protein, 33 aa, Artificial Sequence
  Non-cyclic GFR-binding peptide
  MOD_RES (1), (2): Xaa is C or S
XXAPTKLSSLSVLFFDSSNNVILKVYPNMVVKA

SEQ ID NO: 25118 - protein, 32 aa, Artificial Sequence
  Non-cyclic GFR-binding peptide
  MOD_RES (14), (15), (16), (17), (18): Xaa is A or G
  MOD_RES (19), (20), (21), (22): Xaa is A or G or is absent
VPTELSSLSMLFFXXXXXXXXXLKVYPEMVVE

SEQ ID NO: 25119 - protein, 39 aa, Artificial Sequence
  Non-cyclic GFR-binding peptide
  MOD_RES (5), (6): Xaa is C or S
  MOD_RES (20), (21), (22), (23), (24): Xaa is A or G
  MOD_RES (25), (26), (27), (28): Xaa is A or G or is absent
ASKAXXVPTKLSSLSILFFXXXXXXXXXLKVYPGMAVSE

SEQ ID NO: 25120 - protein, 36 aa, Artificial Sequence
  Non-cyclic GFR-binding peptide
  MOD_RES (5), (5): Xaa is C or S
TKPTXAPTKLSSLSVLFFDDSSNVILKVYPNMVVRS

SEQ ID NO: 25121 - protein, 34 aa, Artificial Sequence
  Non-cyclic GFR-binding peptide
  MOD_RES (2), (2): Xaa is C or S
EXVPTEESSLSMLFFRIKPHQGQHLKVYPFLQHN

SEQ ID NO: 25122 - protein, 40 aa, Artificial Sequence
  Non-cyclic GFR-binding peptide
  MOD_RES (5), (39): Xaa is C or S
  MOD_RES (19), (20), (21), (22), (23): Xaa is A or G
  MOD_RES (24), (25), (26), (27): Xaa is A or G or is absent
EGLEXVPTEESSLSMLFFXXXXXXXXXLKVYPFLQHNKXE

SEQ ID NO: 25123 - protein, 32 aa, Artificial Sequence
  Non-cyclic GFR-binding peptide
  MOD_RES (1), (2): Xaa is C or S
XXAPVKTSSLSMLFFDNGRVLLLKVYPMIVEE

SEQ ID NO: 25124 - protein, 40 aa, Artificial Sequence
  Non-cyclic GFR-binding peptide
  MOD_RES (2), (3), (37), (39): Xaa is C or S
  MOD_RES (17), (18), (19), (20), (21): Xaa is A or G
  MOD_RES (22), (23), (24), (25): Xaa is A or G or is absent
AXXVPTKLSSLSILFFXXXXXXXXXLKVYPGMAVSEXGXR

SEQ ID NO: 25125 - protein, 36 aa, Artificial Sequence
  Non-cyclic GFR-binding peptide
  MOD_RES (3), (4): Xaa is C or S
  MOD_RES (18), (19), (20), (21), (22): Xaa is A or G
  MOD_RES (23), (24), (25), (26): Xaa is A or G or is absent
KAXXAPTKLSSLSVLFFXXXXXXXXXLKVYPNMVVK

SEQ ID NO: 25126 - protein, 36 aa, Artificial Sequence
  Non-cyclic GFR-binding peptide
  MOD_RES (1), (35): Xaa is C or S
  MOD_RES (15), (16), (17), (18), (19): Xaa is A or G
  MOD_RES (20), (21), (22), (23): Xaa is A or G or is absent
XVPARLSSLSILFFXXXXXXXXXLKVYPDMVVEAXG

SEQ ID NO: 25127 - protein, 37 aa, Artificial Sequence
  Non-cyclic GFR-binding peptide
  MOD_RES (4), (5), (37): Xaa is C or S
AGPXXTPTKMSSLSMLFFNDKQQIILKVYPGMVVDRX

SEQ ID NO: 25128 - protein, 41 aa, Artificial Sequence
  Non-cyclic GFR-binding peptide
  MOD_RES (5), (6), (39), (41): Xaa is C or S
  MOD_RES (20), (21), (22), (23), (24): Xaa is A or G
  MOD_RES (25), (26), (27), (28): Xaa is A or G or is absent
VPSTXXAPVKTSSLSMLFFXXXXXXXXXLKVYPMIVEEXGX

SEQ ID NO: 25129 - protein, 42 aa, Artificial Sequence
  Non-cyclic GFR-binding peptide
  MOD_RES (6), (7), (39), (41): Xaa is C or S
SIPKAXXVPTELSSLSMLFFDEYDKVVLKVYPEMVVEGXGXR

SEQ ID NO: 25130 - protein, 36 aa, Artificial Sequence
  Non-cyclic GFR-binding peptide
  MOD_RES (33), (35): Xaa is C or S
  MOD_RES (14), (15), (16), (17), (18): Xaa is A or G
  MOD_RES (19), (20), (21), (22): Xaa is A or G or is absent
VPQALSSLSILFFXXXXXXXXXLKVYPMIVRSXKXS

SEQ ID NO: 25131 - protein, 40 aa, Artificial Sequence
  Non-cyclic GFR-binding peptide
  MOD_RES (2), (3), (37), (39): Xaa is C or S
  MOD_RES (17), (18), (19), (20), (21): Xaa is A or G
  MOD_RES (22), (23), (24), (25): Xaa is A or G or is absent
TXXVPTRLSSLSILFFXXXXXXXXXLKVYPDMVVESXGXR

SEQ ID NO: 25132 - protein, 39 aa, Artificial Sequence
  Non-cyclic GFR-binding peptide
  MOD_RES (4), (5), (38): Xaa is C or S
  MOD_RES (19), (20), (21), (22), (23): Xaa is A or G
  MOD_RES (24), (25), (26), (27): Xaa is A or G or is absent
PSTXXAPVKTSSLSMLFFXXXXXXXXXLKVYPMIVEEXG

SEQ ID NO: 25133 - protein, 38 aa, Artificial Sequence
  Non-cyclic GFR-binding peptide
  MOD_RES (1), (2), (36), (38): Xaa is C or S
  MOD_RES (16), (17), (18), (19), (20): Xaa is A or G
  MOD_RES (21), (22), (23), (24): Xaa is A or G or is absent
XXTPTKMSSLSMLFFXXXXXXXXXLKVYPGMVVDRXGX

SEQ ID NO: 25134 - protein, 34 aa, Artificial Sequence
  Non-cyclic GFR-binding peptide
  MOD_RES (2), (3), (34): Xaa is C or S
PXXVSQDLSSLSILFFIGKTPKILKVYPMIVKSX

SEQ ID NO: 25135 - protein, 34 aa, Artificial Sequence
  Non-cyclic GFR-binding peptide
  MOD_RES (1), (32), (34): Xaa is C or S
XAPVKTSSLSMLFFDNGRVLLLKVYPMIVEEXGX

SEQ ID NO: 25136 - protein, 34 aa, Artificial Sequence
  Non-cyclic GFR-binding peptide
  MOD_RES (34), (34): Xaa is C or S
  MOD_RES (14), (15), (16), (17), (18): Xaa is A or G
  MOD_RES (19), (20), (21), (22): Xaa is A or G or is absent
VPTKLSSLSILFFXXXXXXXXXLKVYPGMAVSEX

SEQ ID NO: 25137 - protein, 35 aa, Artificial Sequence
  Non-cyclic GFR-binding peptide
  MOD_RES (4), (5): Xaa is C or S
ASPXXVSQDLSSLSILFFIGKTPKILKVYPMIVKS

SEQ ID NO: 25138 - protein, 42 aa, Artificial Sequence
  Non-cyclic GFR-binding peptide
  MOD_RES (6), (7), (41): Xaa is C or S
  MOD_RES (21), (22), (23), (24), (25): Xaa is A or G
  MOD_RES (26), (27), (28), (29): Xaa is A or G or is absent
YVPKPXXAPTKLSSLSVLFFXXXXXXXXXLKVYPNMVVRSXG

SEQ ID NO: 25139 - protein, 34 aa, Artificial Sequence
  Non-cyclic GFR-binding peptide
  MOD_RES (2), (3): Xaa is C or S
AXXVPTKLSSLSILFFDKGVVTYLKVYPGMAVSE

SEQ ID NO: 25140 - protein, 35 aa, Artificial Sequence
  Non-cyclic GFR-binding peptide
  MOD_RES (2), (3): Xaa is C or S
  MOD_RES (17), (18), (19), (20), (21): Xaa is A or G
  MOD_RES (22), (23), (24), (25): Xaa is A or G or is absent
AXXAPTKLSSLSVLFFXXXXXXXXXLKVYPNMVVK

SEQ ID NO: 25141 - protein, 39 aa, Artificial Sequence
  Non-cyclic GFR-binding peptide
  MOD_RES (2), (36), (38): Xaa is C or S
  MOD_RES (16), (17), (18), (19), (20): Xaa is A or G
  MOD_RES (21), (22), (23), (24): Xaa is A or G or is absent
EXVPTEESSLSMLFFXXXXXXXXXLKVYPFLQHNKXEXR

SEQ ID NO: 25142 - protein, 42 aa, Artificial Sequence
  Non-cyclic GFR-binding peptide
  MOD_RES (5), (6), (40), (42): Xaa is C or S
  MOD_RES (20), (21), (22), (23), (24): Xaa is A or G
  MOD_RES (25), (26), (27), (28): Xaa is A or G or is absent
ASKAXXVPTKLSSLSILFFXXXXXXXXXLKVYPGMAVSEXGX

SEQ ID NO: 25143 - protein, 33 aa, Artificial Sequence
  Non-cyclic GFR-binding peptide
  MOD_RES (33), (33): Xaa is C or S
  MOD_RES (14), (15), (16), (17), (18): Xaa is A or G
  MOD_RES (19), (20), (21), (22): Xaa is A or G or is absent
APVKTSSLSMLFFXXXXXXXXXLKVYPMIVEEX

SEQ ID NO: 25144 - protein, 38 aa, Artificial Sequence
  Non-cyclic GFR-binding peptide
  MOD_RES (5), (5): Xaa is C or S
  MOD_RES (19), (20), (21), (22), (23): Xaa is A or G
  MOD_RES (24), (25), (26), (27): Xaa is A or G or is absent
EGLEXVPTEESSLSMLFFXXXXXXXXXLKVYPFLQHNK

SEQ ID NO: 25145 - protein, 39 aa, Artificial Sequence
  Non-cyclic GFR-binding peptide
  MOD_RES (2), (36), (38): Xaa is C or S
EXVPTEESSLSMLFFRIKPHQGQHLKVYPFLQHNKXEXR

SEQ ID NO: 25146 - protein, 37 aa, Artificial Sequence
  Non-cyclic GFR-binding peptide
  MOD_RES (5), (6), (37): Xaa is C or S
SASPXXVSQDLSSLSILFFIGKTPKILKVYPMIVKSX

SEQ ID NO: 25147 - protein, 39 aa, Artificial Sequence
  Non-cyclic GFR-binding peptide
  MOD_RES (5), (37), (39): Xaa is C or S
TKPTXAPTKLSSLSVLFFDDSSNVILKVYPNMVVRSXGX

SEQ ID NO: 25148 - protein, 38 aa, Artificial Sequence
  Non-cyclic GFR-binding peptide
  MOD_RES (6), (7): Xaa is C or S
GSAGPXXTPTKMSSLSMLFFNDKQQIILKVYPGMVVDR

SEQ ID NO: 25149 - protein, 32 aa, Artificial Sequence
  Non-cyclic GFR-binding peptide
  MOD_RES (32), (32): Xaa is C or S
VPTKLSSLSILFFDKGVVTYLKVYPGMAVSEX

SEQ ID NO: 25150 - protein, 34 aa, Artificial Sequence
  Non-cyclic GFR-binding peptide
  MOD_RES (1), (2), (34): Xaa is C or S
XXAPTQLSSLSVLFFDDSSNVILKVYPNMVVRAX

SEQ ID NO: 25151 - protein, 37 aa, Artificial Sequence
  Non-cyclic GFR-binding peptide
  MOD_RES (4), (5): Xaa is C or S
  MOD_RES (19), (20), (21), (22), (23): Xaa is A or G
  MOD_RES (24), (25), (26), (27): Xaa is A or G or is absent
PKPXXAPTKLSSLSVLFFXXXXXXXXXLKVYPNMVVR

SEQ ID NO: 25152 - protein, 36 aa, Artificial Sequence
  Non-cyclic GFR-binding peptide
  MOD_RES (4), (5): Xaa is C or S
PKPXXAPTKLSSLSVLFFDDSSNVILKVYPNMVVRS

SEQ ID NO: 25153 - protein, 38 aa, Artificial Sequence
  Non-cyclic GFR-binding peptide
  MOD_RES (3), (3): Xaa is C or S
  MOD_RES (19), (20), (21), (22), (23): Xaa is A or G
  MOD_RES (24), (25), (26), (27): Xaa is A or G or is absent
VKXQPSRVHHSSLSVLFFXXXXXXXXXLKVYPRLEEHL

SEQ ID NO: 25154 - protein, 35 aa, Artificial Sequence
  Non-cyclic GFR-binding peptide
  MOD_RES (2), (3): Xaa is C or S
AXXVPTKLSSLSVLFFDDMGVPTLKVYPEGMSVAE

SEQ ID NO: 25155 - protein, 31 aa, Artificial Sequence
  Non-cyclic GFR-binding peptide
TPTKMSSLSMLFFNDKQQIILKVYPGMVVDR

SEQ ID NO: 25156 - protein, 35 aa, Artificial Sequence
  Non-cyclic GFR-binding peptide
  MOD_RES (1), (32), (34): Xaa is C or S
XVPQALSSLSILFFVGRKPKVLKVYPMIVRSXKXS

SEQ ID NO: 25157 - protein, 32 aa, Artificial Sequence
  Non-cyclic GFR-binding peptide
  MOD_RES (32), (32): Xaa is C or S
VPTRLSSLSILFFDSANNVVLKVYPDMVVESX

SEQ ID NO: 25158 - protein, 38 aa, Artificial Sequence
  Non-cyclic GFR-binding peptide
  MOD_RES (5), (6): Xaa is C or S
  MOD_RES (20), (21), (22), (23), (24): Xaa is A or G
  MOD_RES (25), (26), (27), (28): Xaa is A or G or is absent
IPKAXXVPTELSSLSMLFFXXXXXXXXXLKVYPEMVVE

SEQ ID NO: 25159 - protein, 40 aa, Artificial Sequence
  Non-cyclic GFR-binding peptide
  MOD_RES (6), (7): Xaa is C or S
  MOD_RES (21), (22), (23), (24), (25): Xaa is A or G
  MOD_RES (26), (27), (28), (29): Xaa is A or G or is absent
AAPASXXVPARLSSLSILFFXXXXXXXXXLKVYPDMVVEA

SEQ ID NO: 25160 - protein, 40 aa, Artificial Sequence
  Non-cyclic GFR-binding peptide
  MOD_RES (4), (5), (40): Xaa is C or S
  MOD_RES (19), (20), (21), (22), (23): Xaa is A or G
  MOD_RES (24), (25), (26), (27): Xaa is A or G or is absent
GKAXXVPTKLSSLSVLFFXXXXXXXXXLKVYPEGMSVAEX

SEQ ID NO: 25161 - protein, 40 aa, Artificial Sequence
  Non-cyclic GFR-binding peptide
  MOD_RES (6), (7): Xaa is C or S
  MOD_RES (21), (22), (23), (24), (25): Xaa is A or G
  MOD_RES (26), (27), (28), (29): Xaa is A or G or is absent
HVPKPXXAPTKLSSLSVLFFXXXXXXXXXLKVYPNMVVRS

SEQ ID NO: 25162 - protein, 38 aa, Artificial Sequence
  Non-cyclic GFR-binding peptide
  MOD_RES (4), (5), (37): Xaa is C or S
SKAXXVPTKLSSLSILFFDKGVVTYLKVYPGMAVSEXG

SEQ ID NO: 25163 - protein, 35 aa, Artificial Sequence
  Non-cyclic GFR-binding peptide
  MOD_RES (3), (4): Xaa is C or S
KAXXVPTELSSLSMLFFDEYDKVVLKVYPEMVVEG

SEQ ID NO: 25164 - protein, 36 aa, Artificial Sequence
  Non-cyclic GFR-binding peptide
  MOD_RES (1), (2), (33), (35): Xaa is C or S
XXAPVKTSSLSMLFFDNGRVLLLKVYPMIVEEXGXL

SEQ ID NO: 25165 - protein, 39 aa, Artificial Sequence
  Non-cyclic GFR-binding peptide
  MOD_RES (3), (4), (36), (38): Xaa is C or S
KAXXAPTKLSSLSVLFFDSSNNVILKVYPNMVVKAXGXH

SEQ ID NO: 25166 - protein, 36 aa, Artificial Sequence
  Non-cyclic GFR-binding peptide
  MOD_RES (1), (2), (34), (36): Xaa is C or S
XXVPTELSSLSMLFFDEYDKVVLKVYPEMVVEGXGX

SEQ ID NO: 25167 - protein, 37 aa, Artificial Sequence
  Non-cyclic GFR-binding peptide
  MOD_RES (5), (37): Xaa is C or S
TKPTXAPTKLSSLSVLFFDDSSNVILKVYPNMVVRSX

SEQ ID NO: 25168 - protein, 38 aa, Artificial Sequence
  Non-cyclic GFR-binding peptide
  MOD_RES (1), (2), (36), (38): Xaa is C or S
  MOD_RES (16), (17), (18), (19), (20): Xaa is A or G
  MOD_RES (21), (22), (23), (24): Xaa is A or G or is absent
XXAPTQLSSLSVLFFXXXXXXXXXLKVYPNMVVRAXGX

SEQ ID NO: 25169 - protein, 41 aa, Artificial Sequence
  Non-cyclic GFR-binding peptide
  MOD_RES (6), (7), (41): Xaa is C or S
  MOD_RES (21), (22), (23), (24), (25): Xaa is A or G
  MOD_RES (26), (27), (28), (29): Xaa is A or G or is absent
YVPKPXXAPTKLSSLSVLFFXXXXXXXXXLKVYPNMVVRSX

SEQ ID NO: 25170 - protein, 34 aa, Artificial Sequence
  Non-cyclic GFR-binding peptide
  MOD_RES (34), (34): Xaa is C or S
  MOD_RES (14), (15), (16), (17), (18): Xaa is A or G
  MOD_RES (19), (20), (21), (22): Xaa is A or G or is absent
VPTRLSSLSILFFXXXXXXXXXLKVYPDMVVESX

SEQ ID NO: 25171 - protein, 36 aa, Artificial Sequence
  Non-cyclic GFR-binding peptide
  MOD_RES (1), (33), (35): Xaa is C or S
XTPTKMSSLSMLFFNDKQQIILKVYPGMVVDRXGXS

SEQ ID NO: 25172 - protein, 33 aa, Artificial Sequence
  Non-cyclic GFR-binding peptide
  MOD_RES (1), (33): Xaa is C or S
XAPTKLSSLSVLFFDSSNNVILKVYPNMVVKAX

SEQ ID NO: 25173 - protein, 43 aa, Artificial Sequence
  Non-cyclic GFR-binding peptide
  MOD_RES (6), (7), (41), (43): Xaa is C or S
  MOD_RES (21), (22), (23), (24), (25): Xaa is A or G
  MOD_RES (26), (27), (28), (29): Xaa is A or G or is absent
GSAGPXXTPTKMSSLSMLFFXXXXXXXXXLKVYPGMVVDRXGX

SEQ ID NO: 25174 - protein, 35 aa, Artificial Sequence
  Non-cyclic GFR-binding peptide
  MOD_RES (32), (34): Xaa is C or S
VPTELSSLSMLFFDEYDKVVLKVYPEMVVEGXGXR

SEQ ID NO: 25175 - protein, 38 aa, Artificial Sequence
  Non-cyclic GFR-binding peptide
  MOD_RES (37), (37): Xaa is C or S
QPSRVHHSSLSVLFFEYVRKKPKLLKVYPRLEEHLEXA

SEQ ID NO: 25176 - protein, 35 aa, Artificial Sequence
  Non-cyclic GFR-binding peptide
  MOD_RES (1), (1): Xaa is C or S
  MOD_RES (15), (16), (17), (18), (19): Xaa is A or G
  MOD_RES (20), (21), (22), (23): Xaa is A or G or is absent
XVPTKLSSLSVLFFXXXXXXXXXLKVYPEGMSVAE

SEQ ID NO: 25177 - protein, 38 aa, Artificial Sequence
  Non-cyclic GFR-binding peptide
  MOD_RES (3), (37): Xaa is C or S
  MOD_RES (17), (18), (19), (20), (21): Xaa is A or G
  MOD_RES (22), (23), (24), (25): Xaa is A or G or is absent
LEXVPTEESSLSMLFFXXXXXXXXXLKVYPFLQHNKXE

SEQ ID NO: 25178 - protein, 36 aa, Artificial Sequence
  Non-cyclic GFR-binding peptide
  MOD_RES (2), (3), (35): Xaa is C or S
AXXAPTKLSSLSVLFFDSSNNVILKVYPNMVVKAXG

SEQ ID NO: 25179 - protein, 38 aa, Artificial Sequence
  Non-cyclic GFR-binding peptide
  MOD_RES (5), (6), (37): Xaa is C or S
SASPXXVSQDLSSLSILFFIGKTPKILKVYPMIVKSXK

SEQ ID NO: 25180 - protein, 33 aa, Artificial Sequence
  Non-cyclic GFR-binding peptide
  MOD_RES (1), (1): Xaa is C or S
  MOD_RES (15), (16), (17), (18), (19): Xaa is A or G
  MOD_RES (20), (21), (22), (23): Xaa is A or G or is absent
XVPTEESSLSMLFFXXXXXXXXXLKVYPFLQHN

SEQ ID NO: 25181 - protein, 39 aa, Artificial Sequence
  Non-cyclic GFR-binding peptide
  MOD_RES (6), (38): Xaa is C or S
VTKPTXAPTKLSSLSVLFFDDSSNVILKVYPNMVVRSXG

SEQ ID NO: 25182 - protein, 34 aa, Artificial Sequence
  Non-cyclic GFR-binding peptide
  MOD_RES (2), (34): Xaa is C or S
TXAPTKLSSLSVLFFDDSSNVILKVYPNMVVRSX

SEQ ID NO: 25183 - protein, 40 aa, Artificial Sequence
  Non-cyclic GFR-binding peptide
  MOD_RES (3), (40): Xaa is C or S
VKXQPSRVHHSSLSVLFFEYVRKKPKLLKVYPRLEEHLEX

SEQ ID NO: 25184 - protein, 37 aa, Artificial Sequence
  Non-cyclic GFR-binding peptide
  MOD_RES (2), (34), (36): Xaa is C or S
TXAPTKLSSLSVLFFDDSSNVILKVYPNMVVRSXGXH

SEQ ID NO: 25185 - protein, 40 aa, Artificial Sequence
  Non-cyclic GFR-binding peptide
  MOD_RES (4), (5), (37), (39): Xaa is C or S
AGPXXTPTKMSSLSMLFFNDKQQIILKVYPGMVVDRXGXS

SEQ ID NO: 25186 - protein, 40 aa, Artificial Sequence
  Non-cyclic GFR-binding peptide
  MOD_RES (5), (6): Xaa is C or S
  MOD_RES (20), (21), (22), (23), (24): Xaa is A or G
  MOD_RES (25), (26), (27), (28): Xaa is A or G or is absent
VGKAXXVPTKLSSLSVLFFXXXXXXXXXLKVYPEGMSVAE

SEQ ID NO: 25187 - protein, 32 aa, Artificial Sequence
  Non-cyclic GFR-binding peptide
  MOD_RES (14), (15), (16), (17), (18): Xaa is A or G
  MOD_RES (19), (20), (21), (22): Xaa is A or G or is absent
VPTEESSLSMLFFXXXXXXXXXLKVYPFLQHN

SEQ ID NO: 25188 - protein, 35 aa, Artificial Sequence
  Non-cyclic GFR-binding peptide
  MOD_RES (1), (34): Xaa is C or S
  MOD_RES (15), (16), (17), (18), (19): Xaa is A or G
  MOD_RES (20), (21), (22), (23): Xaa is A or G or is absent
XVPQALSSLSILFFXXXXXXXXXLKVYPMIVRSXK

SEQ ID NO: 25189 - protein, 37 aa, Artificial Sequence
  Non-cyclic GFR-binding peptide
  MOD_RES (3), (4): Xaa is C or S
  MOD_RES (18), (19), (20), (21), (22): Xaa is A or G
  MOD_RES (23), (24), (25), (26): Xaa is A or G or is absent
PTXXVPTRLSSLSILFFXXXXXXXXXLKVYPDMVVES

SEQ ID NO: 25190 - protein, 35 aa, Artificial Sequence
  Non-cyclic GFR-binding peptide
  MOD_RES (2), (3): Xaa is C or S
  MOD_RES (17), (18), (19), (20), (21): Xaa is A or G
  MOD_RES (22), (23), (24), (25): Xaa is A or G or is absent
SXXVPARLSSLSILFFXXXXXXXXXLKVYPDMVVE

SEQ ID NO: 25191 - protein, 39 aa, Artificial Sequence
  Non-cyclic GFR-binding peptide
  MOD_RES (6), (7): Xaa is C or S
KVGKAXXVPTKLSSLSVLFFDDMGVPTLKVYPEGMSVAE

SEQ ID NO: 25192 - protein, 36 aa, Artificial Sequence
  Non-cyclic GFR-binding peptide
  MOD_RES (3), (4): Xaa is C or S
  MOD_RES (18), (19), (20), (21), (22): Xaa is A or G
  MOD_RES (23), (24), (25), (26): Xaa is A or G or is absent
STXXAPVKTSSLSMLFFXXXXXXXXXLKVYPMIVEE

SEQ ID NO: 25193 - protein, 35 aa, Artificial Sequence
  Non-cyclic GFR-binding peptide
  MOD_RES (3), (3): Xaa is C or S
  MOD_RES (17), (18), (19), (20), (21): Xaa is A or G
  MOD_RES (22), (23), (24), (25): Xaa is A or G or is absent
PTXAPTKLSSLSVLFFXXXXXXXXXLKVYPNMVVR

SEQ ID NO: 25194 - protein, 32 aa, Artificial Sequence
  Non-cyclic GFR-binding peptide
  MOD_RES (1), (2): Xaa is C or S
XXVPTELSSLSMLFFDEYDKVVLKVYPEMVVE

SEQ ID NO: 25195 - protein, 34 aa, Artificial Sequence
  Non-cyclic GFR-binding peptide
  MOD_RES (3), (4): Xaa is C or S
KPXXAPTQLSSLSVLFFDDSSNVILKVYPNMVVR

SEQ ID NO: 25196 - protein, 39 aa, Artificial Sequence
  Non-cyclic GFR-binding peptide
  MOD_RES (1), (2), (36), (38): Xaa is C or S
  MOD_RES (16), (17), (18), (19), (20): Xaa is A or G
  MOD_RES (21), (22), (23), (24): Xaa is A or G or is absent
XXVPTRLSSLSILFFXXXXXXXXXLKVYPDMVVESXGXR

SEQ ID NO: 25197 - protein, 37 aa, Artificial Sequence
  Non-cyclic GFR-binding peptide
  MOD_RES (3), (4): Xaa is C or S
  MOD_RES (18), (19), (20), (21), (22): Xaa is A or G
  MOD_RES (23), (24), (25), (26): Xaa is A or G or is absent
KAXXVPTKLSSLSILFFXXXXXXXXXLKVYPGMAVSE

SEQ ID NO: 25198 - protein, 44 aa, Artificial Sequence
  Non-cyclic GFR-binding peptide
  MOD_RES (6), (7), (41), (43): Xaa is C or S
  MOD_RES (21), (22), (23), (24), (25): Xaa is A or G
  MOD_RES (26), (27), (28), (29): Xaa is A or G or is absent
STPPTXXVPTRLSSLSILFFXXXXXXXXXLKVYPDMVVESXGXR

SEQ ID NO: 25199 - protein, 37 aa, Artificial Sequence
  Non-cyclic GFR-binding peptide
  MOD_RES (34), (36): Xaa is C or S
  MOD_RES (14), (15), (16), (17), (18): Xaa is A or G
  MOD_RES (19), (20), (21), (22): Xaa is A or G or is absent
VPARLSSLSILFFXXXXXXXXXLKVYPDMVVEAXGXR

SEQ ID NO: 25200 - protein, 35 aa, Artificial Sequence
  Non-cyclic GFR-binding peptide
  MOD_RES (1), (33), (35): Xaa is C or S
XTPTKMSSLSMLFFNDKQQIILKVYPGMVVDRXGX

SEQ ID NO: 25201 - protein, 31 aa, Artificial Sequence
  Non-cyclic GFR-binding peptide
  MOD_RES (31), (31): Xaa is C or S
VSQDLSSLSILFFIGKTPKILKVYPMIVKSX

SEQ ID NO: 25202 - protein, 32 aa, Artificial Sequence
  Non-cyclic GFR-binding peptide
  MOD_RES (31), (31): Xaa is C or S
VSQDLSSLSILFFIGKTPKILKVYPMIVKSXK

SEQ ID NO: 25203 - protein, 32 aa, Artificial Sequence
  Non-cyclic GFR-binding peptide
  MOD_RES (1), (1): Xaa is C or S
XVPARLSSLSILFFDAANNVVLKVYPDMVVEA

SEQ ID NO: 25204 - protein, 39 aa, Artificial Sequence
  Non-cyclic GFR-binding peptide
  MOD_RES (6), (7): Xaa is C or S
  MOD_RES (21), (22), (23), (24), (25): Xaa is A or G
  MOD_RES (26), (27), (28), (29): Xaa is A or G or is absent
AVPKAXXAPTKLSSLSVLFFXXXXXXXXXLKVYPNMVVK

SEQ ID NO: 25205 - protein, 39 aa, Artificial Sequence
  Non-cyclic GFR-binding peptide
  MOD_RES (2), (3), (37), (39): Xaa is C or S
  MOD_RES (17), (18), (19), (20), (21): Xaa is A or G
  MOD_RES (22), (23), (24), (25): Xaa is A or G or is absent
PXXAPTKLSSLSVLFFXXXXXXXXXLKVYPNMVVRSXGX

SEQ ID NO: 25206 - protein, 36 aa, Artificial Sequence
  Non-cyclic GFR-binding peptide
  MOD_RES (4), (5), (36): Xaa is C or S
ASPXXVPQDLSSLSILFFVGRTPKVLKVYPMVVKSX

SEQ ID NO: 25207 - protein, 35 aa, Artificial Sequence
  Non-cyclic GFR-binding peptide
  MOD_RES (1), (2), (33), (35): Xaa is C or S
XXVSQDLSSLSILFFIGKTPKILKVYPMIVKSXKX

SEQ ID NO: 25208 - protein, 36 aa, Artificial Sequence
  Non-cyclic GFR-binding peptide
  MOD_RES (2), (2): Xaa is C or S
KXQPSRVHHSSLSVLFFEYVRKKPKLLKVYPRLEEH

SEQ ID NO: 25209 - protein, 39 aa, Artificial Sequence
  Non-cyclic GFR-binding peptide
  MOD_RES (3), (3): Xaa is C or S
  MOD_RES (19), (20), (21), (22), (23): Xaa is A or G
  MOD_RES (24), (25), (26), (27): Xaa is A or G or is absent
VKXQPSRVHHSSLSVLFFXXXXXXXXXLKVYPRLEEHLE

SEQ ID NO: 25210 - protein, 37 aa, Artificial Sequence
  Non-cyclic GFR-binding peptide
  MOD_RES (2), (3), (37): Xaa is C or S
  MOD_RES (17), (18), (19), (20), (21): Xaa is A or G
  MOD_RES (22), (23), (24), (25): Xaa is A or G or is absent
AXXVPTELSSLSMLFFXXXXXXXXXLKVYPEMVVEGX

SEQ ID NO: 25211 - protein, 38 aa, Artificial Sequence
  Non-cyclic GFR-binding peptide
  MOD_RES (4), (5), (37): Xaa is C or S
PKPXXAPTQLSSLSVLFFDDSSNVILKVYPNMVVRAXG

SEQ ID NO: 25212 - protein, 33 aa, Artificial Sequence
  Non-cyclic GFR-binding peptide
  MOD_RES (1), (32): Xaa is C or S
XVPQALSSLSILFFVGRKPKVLKVYPMIVRSXK

SEQ ID NO: 25213 - protein, 38 aa, Artificial Sequence
  Non-cyclic GFR-binding peptide
  MOD_RES (2), (3), (37): Xaa is C or S
  MOD_RES (17), (18), (19), (20), (21): Xaa is A or G
  MOD_RES (22), (23), (24), (25): Xaa is A or G or is absent
PXXAPTQLSSLSVLFFXXXXXXXXXLKVYPNMVVRAXG

SEQ ID NO: 25214 - protein, 37 aa, Artificial Sequence
  Non-cyclic GFR-binding peptide
  MOD_RES (1), (35), (37): Xaa is C or S
  MOD_RES (15), (16), (17), (18), (19): Xaa is A or G
  MOD_RES (20), (21), (22), (23): Xaa is A or G or is absent
XAPTKLSSLSVLFFXXXXXXXXXLKVYPNMVVRSXGX

SEQ ID NO: 25215 - protein, 37 aa, Artificial Sequence
  Non-cyclic GFR-binding peptide
  MOD_RES (5), (6): Xaa is C or S
VPKPXXAPTQLSSLSVLFFDDSSNVILKVYPNMVVRA

SEQ ID NO: 25216 - protein, 42 aa, Artificial Sequence
  Non-cyclic GFR-binding peptide
  MOD_RES (2), (39), (41): Xaa is C or S
KXQPSRVHHSSLSVLFFEYVRKKPKLLKVYPRLEEHLEXAXA

SEQ ID NO: 25217 - protein, 32 aa, Artificial Sequence
  Non-cyclic GFR-binding peptide
  MOD_RES (31), (31): Xaa is C or S
VPQDLSSLSILFFVGRTPKVLKVYPMVVKSXK

SEQ ID NO: 25218 - protein, 38 aa, Artificial Sequence
  Non-cyclic GFR-binding peptide
  MOD_RES (2), (3), (37): Xaa is C or S
  MOD_RES (17), (18), (19), (20), (21): Xaa is A or G
  MOD_RES (22), (23), (24), (25): Xaa is A or G or is absent
SXXVPARLSSLSILFFXXXXXXXXXLKVYPDMVVEAXG

SEQ ID NO: 25219 - protein, 34 aa, Artificial Sequence
  Non-cyclic GFR-binding peptide
  MOD_RES (1), (1): Xaa is C or S
  MOD_RES (15), (16), (17), (18), (19): Xaa is A or G
  MOD_RES (20), (21), (22), (23): Xaa is A or G or is absent
XAPTKLSSLSVLFFXXXXXXXXXLKVYPNMVVKA

SEQ ID NO: 25220 - protein, 40 aa, Artificial Sequence
  Non-cyclic GFR-binding peptide
  MOD_RES (4), (5), (37), (39): Xaa is C or S
PPTXXVPTRLSSLSILFFDSANNVVLKVYPDMVVESXGXR

SEQ ID NO: 25221 - protein, 43 aa, Artificial Sequence
  Non-cyclic GFR-binding peptide
  MOD_RES (6), (7), (42): Xaa is C or S
  MOD_RES (21), (22), (23), (24), (25): Xaa is A or G
  MOD_RES (26), (27), (28), (29): Xaa is A or G or is absent
KVGKAXXVPTKLSSLSVLFFXXXXXXXXXLKVYPEGMSVAEXG

SEQ ID NO: 25222 - protein, 35 aa, Artificial Sequence
  Non-cyclic GFR-binding peptide
  MOD_RES (1), (35): Xaa is C or S
XVPTEESSLSMLFFRIKPHQGQHLKVYPFLQHNKX

SEQ ID NO: 25223 - protein, 34 aa, Artificial Sequence
  Non-cyclic GFR-binding peptide
  MOD_RES (1), (33): Xaa is C or S
XAPTKLSSLSVLFFDDSSNVILKVYPNMVVRSXG

SEQ ID NO: 25224 - protein, 40 aa, Artificial Sequence
  Non-cyclic GFR-binding peptide
  MOD_RES (5), (6), (40): Xaa is C or S
  MOD_RES (20), (21), (22), (23), (24): Xaa is A or G
  MOD_RES (25), (26), (27), (28): Xaa is A or G or is absent
APASXXVPARLSSLSILFFXXXXXXXXXLKVYPDMVVEAX

SEQ ID NO: 25225 - protein, 38 aa, Artificial Sequence
  Non-cyclic GFR-binding peptide
  MOD_RES (1), (2), (36), (38): Xaa is C or S
  MOD_RES (16), (17), (18), (19), (20): Xaa is A or G
  MOD_RES (21), (22), (23), (24): Xaa is A or G or is absent
XXAPTKLSSLSVLFFXXXXXXXXXLKVYPNMVVKAXGX

SEQ ID NO: 25226 - protein, 37 aa, Artificial Sequence
  Non-cyclic GFR-binding peptide
  MOD_RES (5), (6): Xaa is C or S
VPKAXXAPTKLSSLSVLFFDSSNNVILKVYPNMVVKA

SEQ ID NO: 25227 - protein, 40 aa, Artificial Sequence
  Non-cyclic GFR-binding peptide
  MOD_RES (5), (6), (38), (40): Xaa is C or S
VPKAXXAPTKLSSLSVLFFDSSNNVILKVYPNMVVKAXGX

SEQ ID NO: 25228 - protein, 44 aa, Artificial Sequence
  Non-cyclic GFR-binding peptide
  MOD_RES (6), (7), (41), (43): Xaa is C or S
  MOD_RES (21), (22), (23), (24), (25): Xaa is A or G
  MOD_RES (26), (27), (28), (29): Xaa is A or G or is absent
SIPKAXXVPTELSSLSMLFFXXXXXXXXXLKVYPEMVVEGXGXR

SEQ ID NO: 25229 - protein, 42 aa, Artificial Sequence
  Non-cyclic GFR-binding peptide
  MOD_RES (3), (40), (42): Xaa is C or S
  MOD_RES (19), (20), (21), (22), (23): Xaa is A or G
  MOD_RES (24), (25), (26), (27): Xaa is A or G or is absent
VKXQPSRVHHSSLSVLFFXXXXXXXXXLKVYPRLEEHLEXAX

SEQ ID NO: 25230 - protein, 33 aa, Artificial Sequence
  Non-cyclic GFR-binding peptide
  MOD_RES (33), (33): Xaa is C or S
VPTKLSSLSVLFFDDMGVPTLKVYPEGMSVAEX

SEQ ID NO: 25231 - protein, 39 aa, Artificial Sequence
  Non-cyclic GFR-binding peptide
  MOD_RES (4), (4): Xaa is C or S
SVKXQPSRVHHSSLSVLFFEYVRKKPKLLKVYPRLEEHL

SEQ ID NO: 25232 - protein, 36 aa, Artificial Sequence
  Non-cyclic GFR-binding peptide
  MOD_RES (16), (17), (18), (19), (20): Xaa is A or G
  MOD_RES (21), (22), (23), (24): Xaa is A or G or is absent
QPSRVHHSSLSVLFFXXXXXXXXXLKVYPRLEEHLE

SEQ ID NO: 25233 - protein, 36 aa, Artificial Sequence
  Non-cyclic GFR-binding peptide
  MOD_RES (5), (6): Xaa is C or S
VPKPXXAPTQLSSLSVLFFDDSSNVILKVYPNMVVR

SEQ ID NO: 25234 - protein, 40 aa, Artificial Sequence
  Non-cyclic GFR-binding peptide
  MOD_RES (4), (5), (39): Xaa is C or S
  MOD_RES (19), (20), (21), (22), (23): Xaa is A or G
  MOD_RES (24), (25), (26), (27): Xaa is A or G or is absent
PKPXXAPTQLSSLSVLFFXXXXXXXXXLKVYPNMVVRAXG

SEQ ID NO: 25235 - protein, 34 aa, Artificial Sequence
  Non-cyclic GFR-binding peptide
  MOD_RES (32), (34): Xaa is C or S
APTQLSSLSVLFFDDSSNVILKVYPNMVVRAXGX

SEQ ID NO: 25236 - protein, 32 aa, Artificial Sequence
  Non-cyclic GFR-binding peptide
  MOD_RES (1), (2): Xaa is C or S
XXVPTKLSSLSILFFDKGVVTYLKVYPGMAVS

SEQ ID NO: 25237 - protein, 41 aa, Artificial Sequence
  Non-cyclic GFR-binding peptide
  MOD_RES (4), (5), (40): Xaa is C or S
  MOD_RES (19), (20), (21), (22), (23): Xaa is A or G
  MOD_RES (24), (25), (26), (27): Xaa is A or G or is absent
GKAXXVPTKLSSLSVLFFXXXXXXXXXLKVYPEGMSVAEXG

SEQ ID NO: 25238 - protein, 39 aa, Artificial Sequence
  Non-cyclic GFR-binding peptide
  MOD_RES (6), (7), (39): Xaa is C or S
YVPKPXXAPTKLSSLSVLFFDDSSNVILKVYPNMVVRSX

SEQ ID NO: 25239 - protein, 32 aa, Artificial Sequence
  Non-cyclic GFR-binding peptide
  MOD_RES (14), (15), (16), (17), (18): Xaa is A or G
  MOD_RES (19), (20), (21), (22): Xaa is A or G or is absent
VPTRLSSLSILFFXXXXXXXXXLKVYPDMVVE

SEQ ID NO: 25240 - protein, 36 aa, Artificial Sequence
  Non-cyclic GFR-binding peptide
  MOD_RES (1), (36): Xaa is C or S
  MOD_RES (15), (16), (17), (18), (19): Xaa is A or G
  MOD_RES (20), (21), (22), (23): Xaa is A or G or is absent
XVPTKLSSLSVLFFXXXXXXXXXLKVYPEGMSVAEX

SEQ ID NO: 25241 - protein, 37 aa, Artificial Sequence
  Non-cyclic GFR-binding peptide
  MOD_RES (3), (37): Xaa is C or S
  MOD_RES (17), (18), (19), (20), (21): Xaa is A or G
  MOD_RES (22), (23), (24), (25): Xaa is A or G or is absent
LEXVPTEESSLSMLFFXXXXXXXXXLKVYPFLQHNKX

SEQ ID NO: 25242 - protein, 35 aa, Artificial Sequence
  Non-cyclic GFR-binding peptide
  MOD_RES (5), (5): Xaa is C or S
TKPTXAPTKLSSLSVLFFDDSSNVILKVYPNMVVR

SEQ ID NO: 25243 - protein, 38 aa, Artificial Sequence
  Non-cyclic GFR-binding peptide
  MOD_RES (3), (4), (37): Xaa is C or S
  MOD_RES (18), (19), (20), (21), (22): Xaa is A or G
  MOD_RES (23), (24), (25), (26): Xaa is A or G or is absent
APXXVPQALSSLSILFFXXXXXXXXXLKVYPMIVRSXK

SEQ ID NO: 25244 - protein, 40 aa, Artificial Sequence
  Non-cyclic GFR-binding peptide
  MOD_RES (1), (2), (37), (39): Xaa is C or S
  MOD_RES (16), (17), (18), (19), (20): Xaa is A or G
  MOD_RES (21), (22), (23), (24): Xaa is A or G or is absent
XXVPTKLSSLSVLFFXXXXXXXXXLKVYPEGMSVAEXGXR

SEQ ID NO: 25245 - protein, 33 aa, Artificial Sequence
  Non-cyclic GFR-binding peptide
  MOD_RES (1), (1): Xaa is C or S
  MOD_RES (15), (16), (17), (18), (19): Xaa is A or G
  MOD_RES (20), (21), (22), (23): Xaa is A or G or is absent
XVPTELSSLSMLFFXXXXXXXXXLKVYPEMVVE

SEQ ID NO: 25246 - protein, 42 aa, Artificial Sequence
  Non-cyclic GFR-binding peptide
  MOD_RES (6), (7), (41): Xaa is C or S
  MOD_RES (21), (22), (23), (24), (25): Xaa is A or G
  MOD_RES (26), (27), (28), (29): Xaa is A or G or is absent
TVPKPXXAPTQLSSLSVLFFXXXXXXXXXLKVYPNMVVRAXG

SEQ ID NO: 25247 - protein, 40 aa, Artificial Sequence
  Non-cyclic GFR-binding peptide
  MOD_RES (6), (38), (40): Xaa is C or S
VTKPTXAPTKLSSLSVLFFDDSSNVILKVYPNMVVRSXGX

SEQ ID NO: 25248 - protein, 41 aa, Artificial Sequence
  Non-cyclic GFR-binding peptide
  MOD_RES (3), (40): Xaa is C or S
  MOD_RES (19), (20), (21), (22), (23): Xaa is A or G
  MOD_RES (24), (25), (26), (27): Xaa is A or G or is absent
VKXQPSRVHHSSLSVLFFXXXXXXXXXLKVYPRLEEHLEXA

SEQ ID NO: 25249 - protein, 40 aa, Artificial Sequence
  Non-cyclic GFR-binding peptide
  MOD_RES (6), (7), (38), (40): Xaa is C or S
ASAAPXXVPQALSSLSILFFVGRKPKVLKVYPMIVRSXKX

SEQ ID NO: 25250 - protein, 41 aa, Artificial Sequence
  Non-cyclic GFR-binding peptide
  MOD_RES (4), (5), (39), (41): Xaa is C or S
  MOD_RES (19), (20), (21), (22), (23): Xaa is A or G
  MOD_RES (24), (25), (26), (27): Xaa is A or G or is absent
PKAXXAPTKLSSLSVLFFXXXXXXXXXLKVYPNMVVKAXGX

SEQ ID NO: 25251 - protein, 34 aa, Artificial Sequence
  Non-cyclic GFR-binding peptide
  MOD_RES (34), (34): Xaa is C or S
  MOD_RES (14), (15), (16), (17), (18): Xaa is A or G
  MOD_RES (19), (20), (21), (22): Xaa is A or G or is absent
VPARLSSLSILFFXXXXXXXXXLKVYPDMVVEAX

SEQ ID NO: 25252 - protein, 41 aa, Artificial Sequence
  Non-cyclic GFR-binding peptide
  MOD_RES (2), (3), (38), (40): Xaa is C or S
  MOD_RES (17), (18), (19), (20), (21): Xaa is A or G
  MOD_RES (22), (23), (24), (25): Xaa is A or G or is absent
AXXVPTKLSSLSVLFFXXXXXXXXXLKVYPEGMSVAEXGXR

SEQ ID NO: 25253 - protein, 39 aa, Artificial Sequence
  Non-cyclic GFR-binding peptide
  MOD_RES (4), (5), (39): Xaa is C or S
  MOD_RES (19), (20), (21), (22), (23): Xaa is A or G
  MOD_RES (24), (25), (26), (27): Xaa is A or G or is absent
PKAXXAPTKLSSLSVLFFXXXXXXXXXLKVYPNMVVKAX

SEQ ID NO: 25254 - protein, 38 aa, Artificial Sequence
  Non-cyclic GFR-binding peptide
  MOD_RES (3), (4), (35), (37): Xaa is C or S
APXXVPQALSSLSILFFVGRKPKVLKVYPMIVRSXKXS

SEQ ID NO: 25255 - protein, 35 aa, Artificial Sequence
  Non-cyclic GFR-binding peptide
  MOD_RES (1), (2), (34): Xaa is C or S
XXAPTQLSSLSVLFFDDSSNVILKVYPNMVVRAXG

SEQ ID NO: 25256 - protein, 37 aa, Artificial Sequence
  Non-cyclic GFR-binding peptide
  MOD_RES (34), (36): Xaa is C or S
  MOD_RES (14), (15), (16), (17), (18): Xaa is A or G
  MOD_RES (19), (20), (21), (22): Xaa is A or G or is absent
VPTRLSSLSILFFXXXXXXXXXLKVYPDMVVESXGXR

SEQ ID NO: 25257 - protein, 38 aa, Artificial Sequence
  Non-cyclic GFR-binding peptide
  MOD_RES (3), (4), (36), (38): Xaa is C or S
GPXXTPTKMSSLSMLFFNDKQQIILKVYPGMVVDRXGX

SEQ ID NO: 25258 - protein, 36 aa, Artificial Sequence
  Non-cyclic GFR-binding peptide
  MOD_RES (34), (36): Xaa is C or S
  MOD_RES (14), (15), (16), (17), (18): Xaa is A or G
  MOD_RES (19), (20), (21), (22): Xaa is A or G or is absent
APTKLSSLSVLFFXXXXXXXXXLKVYPNMVVKAXGX

SEQ ID NO: 25259 - protein, 36 aa, Artificial Sequence
  Non-cyclic GFR-binding peptide
  MOD_RES (1), (35): Xaa is C or S
  MOD_RES (15), (16), (17), (18), (19): Xaa is A or G
  MOD_RES (20), (21), (22), (23): Xaa is A or G or is absent
XAPTQLSSLSVLFFXXXXXXXXXLKVYPNMVVRAXG

SEQ ID NO: 25260 - protein, 33 aa, Artificial Sequence
  Non-cyclic GFR-binding peptide
  MOD_RES (1), (2): Xaa is C or S
XXAPTQLSSLSVLFFDDSSNVILKVYPNMVVRA

SEQ ID NO: 25261 - protein, 37 aa, Artificial Sequence
  Non-cyclic GFR-binding peptide
  MOD_RES (1), (2), (35), (37): Xaa is C or S
  MOD_RES (16), (17), (18), (19), (20): Xaa is A or G
  MOD_RES (21), (22), (23), (24): Xaa is A or G or is absent
XXAPVKTSSLSMLFFXXXXXXXXXLKVYPMIVEEXGX

SEQ ID NO: 25262 - protein, 39 aa, Artificial Sequence
  Non-cyclic GFR-binding peptide
  MOD_RES (6), (6): Xaa is C or S
DEGLEXVPTEESSLSMLFFRIKPHQGQHLKVYPFLQHNK

SEQ ID NO: 25263 - protein, 38 aa, Artificial Sequence
  Non-cyclic GFR-binding peptide
  MOD_RES (35), (37): Xaa is C or S
SRVHHSSLSVLFFEYVRKKPKLLKVYPRLEEHLEXAXA

SEQ ID NO: 25264 - protein, 36 aa, Artificial Sequence
  Non-cyclic GFR-binding peptide
  MOD_RES (4), (5): Xaa is C or S
SKAXXVPTKLSSLSILFFDKGVVTYLKVYPGMAVSE

SEQ ID NO: 25265 - protein, 38 aa, Artificial Sequence
  Non-cyclic GFR-binding peptide
  MOD_RES (1), (38): Xaa is C or S
  MOD_RES (17), (18), (19), (20), (21): Xaa is A or G
  MOD_RES (22), (23), (24), (25): Xaa is A or G or is absent
XQPSRVHHSSLSVLFFXXXXXXXXXLKVYPRLEEHLEX

SEQ ID NO: 25266 - protein, 33 aa, Artificial Sequence
  Non-cyclic GFR-binding peptide
  MOD_RES (33), (33): Xaa is C or S
  MOD_RES (14), (15), (16), (17), (18): Xaa is A or G
  MOD_RES (19), (20), (21), (22): Xaa is A or G or is absent
VPQDLSSLSILFFXXXXXXXXXLKVYPMVVKSX

SEQ ID NO: 25267 - protein, 41 aa, Artificial Sequence
  Non-cyclic GFR-binding peptide
  MOD_RES (6), (7), (39), (41): Xaa is C or S
AVPKAXXAPTKLSSLSVLFFDSSNNVILKVYPNMVVKAXGX

SEQ ID NO: 25268 - protein, 36 aa, Artificial Sequence
  Non-cyclic GFR-binding peptide
  MOD_RES (3), (4), (36): Xaa is C or S
KAXXVPTKLSSLSILFFDKGVVTYLKVYPGMAVSEX

SEQ ID NO: 25269 - protein, 41 aa, Artificial Sequence
  Non-cyclic GFR-binding peptide
  MOD_RES (3), (4), (39), (41): Xaa is C or S
  MOD_RES (18), (19), (20), (21), (22): Xaa is A or G
  MOD_RES (23), (24), (25), (26): Xaa is A or G or is absent
KAXXVPTKLSSLSVLFFXXXXXXXXXLKVYPEGMSVAEXGX

SEQ ID NO: 25270 - protein, 41 aa, Artificial Sequence
  Non-cyclic GFR-binding peptide
  MOD_RES (6), (7), (38), (40): Xaa is C or S
ASAAPXXVPQALSSLSILFFVGRKPKVLKVYPMIVRSXKXS

SEQ ID NO: 25271 - protein, 38 aa, Artificial Sequence
  Non-cyclic GFR-binding peptide
  MOD_RES (5), (6), (37): Xaa is C or S
SASPXXVPQDLSSLSILFFVGRTPKVLKVYPMVVKSXK

SEQ ID NO: 25272 - protein, 42 aa, Artificial Sequence
  Non-cyclic GFR-binding peptide
  MOD_RES (4), (5), (39), (41): Xaa is C or S
  MOD_RES (19), (20), (21), (22), (23): Xaa is A or G
  MOD_RES (24), (25), (26), (27): Xaa is A or G or is absent
PPTXXVPTRLSSLSILFFXXXXXXXXXLKVYPDMVVESXGXR

SEQ ID NO: 25273 - protein, 41 aa, Artificial Sequence
  Non-cyclic GFR-binding peptide
  MOD_RES (6), (7), (40): Xaa is C or S
  MOD_RES (21), (22), (23), (24), (25): Xaa is A or G
  MOD_RES (26), (27), (28), (29): Xaa is A or G or is absent
ASASPXXVPQDLSSLSILFFXXXXXXXXXLKVYPMVVKSXK

SEQ ID NO: 25274 - protein, 35 aa, Artificial Sequence
  Non-cyclic GFR-binding peptide
  MOD_RES (4), (5): Xaa is C or S
AAPXXVPQALSSLSILFFVGRKPKVLKVYPMIVRS

SEQ ID NO: 25275 - protein, 34 aa, Artificial Sequence
  Non-cyclic GFR-binding peptide
  MOD_RES (1), (1): Xaa is C or S
  MOD_RES (15), (16), (17), (18), (19): Xaa is A or G
  MOD_RES (20), (21), (22), (23): Xaa is A or G or is absent
XAPTQLSSLSVLFFXXXXXXXXXLKVYPNMVVRA

SEQ ID NO: 25276 - protein, 36 aa, Artificial Sequence
  Non-cyclic GFR-binding peptide
  MOD_RES (4), (4): Xaa is C or S
GLEXVPTEESSLSMLFFRIKPHQGQHLKVYPFLQHN

SEQ ID NO: 25277 - protein, 38 aa, Artificial Sequence
  Non-cyclic GFR-binding peptide
  MOD_RES (4), (38): Xaa is C or S
  MOD_RES (18), (19), (20), (21), (22): Xaa is A or G
  MOD_RES (23), (24), (25), (26): Xaa is A or G or is absent
GLEXVPTEESSLSMLFFXXXXXXXXXLKVYPFLQHNKX

SEQ ID NO: 25278 - protein, 34 aa, Artificial Sequence
  Non-cyclic GFR-binding peptide
  MOD_RES (1), (2), (34): Xaa is C or S
XXVPTKLSSLSILFFDKGVVTYLKVYPGMAVSEX

SEQ ID NO: 25279 - protein, 35 aa, Artificial Sequence
  Non-cyclic GFR-binding peptide
  MOD_RES (2), (3), (35): Xaa is C or S
PXXTPTKMSSLSMLFFNDKQQIILKVYPGMVVDRX

SEQ ID NO: 25280 - protein, 33 aa, Artificial Sequence
  Non-cyclic GFR-binding peptide
  MOD_RES (1), (1): Xaa is C or S
  MOD_RES (15), (16), (17), (18), (19): Xaa is A or G
  MOD_RES (20), (21), (22), (23): Xaa is A or G or is absent
XAPTQLSSLSVLFFXXXXXXXXXLKVYPNMVVR

SEQ ID NO: 25281 - protein, 37 aa, Artificial Sequence
  Non-cyclic GFR-binding peptide
  MOD_RES (35), (37): Xaa is C or S
SRVHHSSLSVLFFEYVRKKPKLLKVYPRLEEHLEXAX

SEQ ID NO: 25282 - protein, 37 aa, Artificial Sequence
  Non-cyclic GFR-binding peptide
  MOD_RES (2), (3), (37): Xaa is C or S
  MOD_RES (17), (18), (19), (20), (21): Xaa is A or G
  MOD_RES (22), (23), (24), (25): Xaa is A or G or is absent
TXXVPTRLSSLSILFFXXXXXXXXXLKVYPDMVVESX

SEQ ID NO: 25283 - protein, 41 aa, Artificial Sequence
  Non-cyclic GFR-binding peptide
  MOD_RES (4), (5), (38), (40): Xaa is C or S
  MOD_RES (19), (20), (21), (22), (23): Xaa is A or G
  MOD_RES (24), (25), (26), (27): Xaa is A or G or is absent
ASPXXVSQDLSSLSILFFXXXXXXXXXLKVYPMIVKSXKXS

SEQ ID NO: 25284 - protein, 40 aa, Artificial Sequence
  Non-cyclic GFR-binding peptide
  MOD_RES (3), (4), (38), (40): Xaa is C or S
  MOD_RES (18), (19), (20), (21), (22): Xaa is A or G
  MOD_RES (23), (24), (25), (26): Xaa is A or G or is absent
GPXXTPTKMSSLSMLFFXXXXXXXXXLKVYPGMVVDRXGX

SEQ ID NO: 25285 - protein, 40 aa, Artificial Sequence
  Non-cyclic GFR-binding peptide
  MOD_RES (5), (6), (38), (40): Xaa is C or S
SAGPXXTPTKMSSLSMLFFNDKQQIILKVYPGMVVDRXGX

SEQ ID NO: 25286 - protein, 36 aa, Artificial Sequence
  Non-cyclic GFR-binding peptide
  MOD_RES (2), (3): Xaa is C or S
  MOD_RES (17), (18), (19), (20), (21): Xaa is A or G
  MOD_RES (22), (23), (24), (25): Xaa is A or G or is absent
SXXVPARLSSLSILFFXXXXXXXXXLKVYPDMVVEA

SEQ ID NO: 25287 - protein, 38 aa, Artificial Sequence
  Non-cyclic GFR-binding peptide
  MOD_RES (2), (3), (36), (38): Xaa is C or S
  MOD_RES (17), (18), (19), (20), (21): Xaa is A or G
  MOD_RES (22), (23), (24), (25): Xaa is A or G or is absent
PXXVPQDLSSLSILFFXXXXXXXXXLKVYPMVVKSXKX

SEQ ID NO: 25288 - protein, 36 aa, Artificial Sequence
  Non-cyclic GFR-binding peptide
  MOD_RES (2), (34), (36): Xaa is C or S
TXAPTKLSSLSVLFFDDSSNVILKVYPNMVVRSXGX

SEQ ID NO: 25289 - protein, 34 aa, Artificial Sequence
  Non-cyclic GFR-binding peptide
  MOD_RES (31), (33): Xaa is C or S
APVKTSSLSMLFFDNGRVLLLKVYPMIVEEXGXL

SEQ ID NO: 25290 - protein, 36 aa, Artificial Sequence
  Non-cyclic GFR-binding peptide
  MOD_RES (3), (4), (36): Xaa is C or S
PTXXVPTRLSSLSILFFDSANNVVLKVYPDMVVESX

SEQ ID NO: 25291 - protein, 40 aa, Artificial Sequence
  Non-cyclic GFR-binding peptide
  MOD_RES (4), (5), (39): Xaa is C or S
  MOD_RES (19), (20), (21), (22), (23): Xaa is A or G
  MOD_RES (24), (25), (26), (27): Xaa is A or G or is absent
AGPXXTPTKMSSLSMLFFXXXXXXXXXLKVYPGMVVDRXG

SEQ ID NO: 25292 - protein, 35 aa, Artificial Sequence
  Non-cyclic GFR-binding peptide
  MOD_RES (3), (4): Xaa is C or S
GPXXTPTKMSSLSMLFFNDKQQIILKVYPGMVVDR

SEQ ID NO: 25293 - protein, 40 aa, Artificial Sequence
  Non-cyclic GFR-binding peptide
  MOD_RES (7), (7): Xaa is C or S
  MOD_RES (21), (22), (23), (24), (25): Xaa is A or G
  MOD_RES (26), (27), (28), (29): Xaa is A or G or is absent
HVTKPTXAPTKLSSLSVLFFXXXXXXXXXLKVYPNMVVRS

SEQ ID NO: 25294 - protein, 36 aa, Artificial Sequence
  Non-cyclic GFR-binding peptide
  MOD_RES (2), (3), (34), (36): Xaa is C or S
PXXVPQDLSSLSILFFVGRTPKVLKVYPMVVKSXKX

SEQ ID NO: 25295 - protein, 42 aa, Artificial Sequence
  Non-cyclic GFR-binding peptide
  MOD_RES (7), (39), (41): Xaa is C or S
HVTKPTXAPTKLSSLSVLFFDDSSNVILKVYPNMVVRSXGXH

SEQ ID NO: 25296 - protein, 39 aa, Artificial Sequence
  Non-cyclic GFR-binding peptide
  MOD_RES (6), (7): Xaa is C or S
  MOD_RES (21), (22), (23), (24), (25): Xaa is A or G
  MOD_RES (26), (27), (28), (29): Xaa is A or G or is absent
ASASPXXVPQDLSSLSILFFXXXXXXXXXLKVYPMVVKS

SEQ ID NO: 25297 - protein, 38 aa, Artificial Sequence
  Non-cyclic GFR-binding peptide
  MOD_RES (5), (6), (38): Xaa is C or S
TPPTXXVPTRLSSLSILFFDSANNVVLKVYPDMVVESX

SEQ ID NO: 25298 - protein, 35 aa, Artificial Sequence
  Non-cyclic GFR-binding peptide
QPSRVHHSSLSVLFFEYVRKKPKLLKVYPRLEEHL

SEQ ID NO: 25299 - protein, 35 aa, Artificial Sequence
  Non-cyclic GFR-binding peptide
  MOD_RES (4), (5): Xaa is C or S
AGPXXTPTKMSSLSMLFFNDKQQIILKVYPGMVVD

SEQ ID NO: 25300 - protein, 40 aa, Artificial Sequence
  Non-cyclic GFR-binding peptide
  MOD_RES (3), (4), (37), (39): Xaa is C or S
  MOD_RES (18), (19), (20), (21), (22): Xaa is A or G
  MOD_RES (23), (24), (25), (26): Xaa is A or G or is absent
SPXXVSQDLSSLSILFFXXXXXXXXXLKVYPMIVKSXKXS

SEQ ID NO: 25301 - protein, 39 aa, Artificial Sequence
  Non-cyclic GFR-binding peptide
  MOD_RES (4), (5), (39): Xaa is C or S
  MOD_RES (19), (20), (21), (22), (23): Xaa is A or G
  MOD_RES (24), (25), (26), (27): Xaa is A or G or is absent
PKAXXVPTELSSLSMLFFXXXXXXXXXLKVYPEMVVEGX

SEQ ID NO: 25302 - protein, 36 aa, Artificial Sequence
  Non-cyclic GFR-binding peptide
  MOD_RES (1), (1): Xaa is C or S
XQPSRVHHSSLSVLFFEYVRKKPKLLKVYPRLEEHL

SEQ ID NO: 25303 - protein, 40 aa, Artificial Sequence
  Non-cyclic GFR-binding peptide
  MOD_RES (4), (5), (39): Xaa is C or S
  MOD_RES (19), (20), (21), (22), (23): Xaa is A or G
  MOD_RES (24), (25), (26), (27): Xaa is A or G or is absent
PKAXXAPTKLSSLSVLFFXXXXXXXXXLKVYPNMVVKAXG

SEQ ID NO: 25304 - protein, 38 aa, Artificial Sequence
  Non-cyclic GFR-binding peptide
  MOD_RES (2), (3), (35), (37): Xaa is C or S
SXXVPARLSSLSILFFDAANNVVLKVYPDMVVEAXGXR

SEQ ID NO: 25305 - protein, 34 aa, Artificial Sequence
  Non-cyclic GFR-binding peptide
  MOD_RES (1), (34): Xaa is C or S
  MOD_RES (15), (16), (17), (18), (19): Xaa is A or G
  MOD_RES (20), (21), (22), (23): Xaa is A or G or is absent
XAPVKTSSLSMLFFXXXXXXXXXLKVYPMIVEEX

SEQ ID NO: 25306 - protein, 38 aa, Artificial Sequence
  Non-cyclic GFR-binding peptide
  MOD_RES (4), (5), (38): Xaa is C or S
  MOD_RES (19), (20), (21), (22), (23): Xaa is A or G
  MOD_RES (24), (25), (26), (27): Xaa is A or G or is absent
ASPXXVSQDLSSLSILFFXXXXXXXXXLKVYPMIVKSX

SEQ ID NO: 25307 - protein, 42 aa, Artificial Sequence
  Non-cyclic GFR-binding peptide
  MOD_RES (5), (6), (39), (41): Xaa is C or S
VGKAXXVPTKLSSLSVLFFDDMGVPTLKVYPEGMSVAEXGXR

SEQ ID NO: 25308 - protein, 35 aa, Artificial Sequence
  Non-cyclic GFR-binding peptide
  MOD_RES (1), (2): Xaa is C or S
  MOD_RES (16), (17), (18), (19), (20): Xaa is A or G
  MOD_RES (21), (22), (23), (24): Xaa is A or G or is absent
XXAPTKLSSLSVLFFXXXXXXXXXLKVYPNMVVRS

SEQ ID NO: 25309 - protein, 34 aa, Artificial Sequence
  Non-cyclic GFR-binding peptide
  MOD_RES (3), (4): Xaa is C or S
KPXXAPTKLSSLSVLFFDDSSNVILKVYPNMVVR

SEQ ID NO: 25310 - protein, 35 aa, Artificial Sequence
  Non-cyclic GFR-binding peptide
  MOD_RES (1), (32), (34): Xaa is C or S
XVPQDLSSLSILFFVGRTPKVLKVYPMVVKSXKXS

SEQ ID NO: 25311 - protein, 40 aa, Artificial Sequence
  Non-cyclic GFR-binding peptide
  MOD_RES (2), (3), (37), (39): Xaa is C or S
  MOD_RES (17), (18), (19), (20), (21): Xaa is A or G
  MOD_RES (22), (23), (24), (25): Xaa is A or G or is absent
PXXTPTKMSSLSMLFFXXXXXXXXXLKVYPGMVVDRXGXS

SEQ ID NO: 25312 - protein, 39 aa, Artificial Sequence
  Non-cyclic GFR-binding peptide
  MOD_RES (4), (5): Xaa is C or S
  MOD_RES (19), (20), (21), (22), (23): Xaa is A or G
  MOD_RES (24), (25), (26), (27): Xaa is A or G or is absent
GKAXXVPTKLSSLSVLFFXXXXXXXXXLKVYPEGMSVAE

SEQ ID NO: 25313 - protein, 39 aa, Artificial Sequence
  Non-cyclic GFR-binding peptide
  MOD_RES (3), (4), (36), (38): Xaa is C or S
KAXXVPTKLSSLSILFFDKGVVTYLKVYPGMAVSEXGXR

SEQ ID NO: 25314 - protein, 35 aa, Artificial Sequence
  Non-cyclic GFR-binding peptide
  MOD_RES (4), (5): Xaa is C or S
PKAXXAPTKLSSLSVLFFDSSNNVILKVYPNMVVK

SEQ ID NO: 25315 - protein, 39 aa, Artificial Sequence
  Non-cyclic GFR-binding peptide
  MOD_RES (4), (38): Xaa is C or S
GLEXVPTEESSLSMLFFRIKPHQGQHLKVYPFLQHNKXE

SEQ ID NO: 25316 - protein, 44 aa, Artificial Sequence
  Non-cyclic GFR-binding peptide
  MOD_RES (6), (7), (41), (43): Xaa is C or S
  MOD_RES (21), (22), (23), (24), (25): Xaa is A or G
  MOD_RES (26), (27), (28), (29): Xaa is A or G or is absent
YVPKPXXAPTKLSSLSVLFFXXXXXXXXXLKVYPNMVVRSXGXH

SEQ ID NO: 25317 - protein, 40 aa, Artificial Sequence
  Non-cyclic GFR-binding peptide
  MOD_RES (5), (6), (40): Xaa is C or S
  MOD_RES (20), (21), (22), (23), (24): Xaa is A or G
  MOD_RES (25), (26), (27), (28): Xaa is A or G or is absent
VPKAXXAPTKLSSLSVLFFXXXXXXXXXLKVYPNMVVKAX

SEQ ID NO: 25318 - protein, 33 aa, Artificial Sequence
  Non-cyclic GFR-binding peptide
  MOD_RES (1), (2): Xaa is C or S
XXTPTKMSSLSMLFFNDKQQIILKVYPGMVVDR

SEQ ID NO: 25319 - protein, 35 aa, Artificial Sequence
  Non-cyclic GFR-binding peptide
  MOD_RES (1), (2), (34): Xaa is C or S
XXVPARLSSLSILFFDAANNVVLKVYPDMVVEAXG

SEQ ID NO: 25320 - protein, 39 aa, Artificial Sequence
  Non-cyclic GFR-binding peptide
  MOD_RES (3), (37), (39): Xaa is C or S
LEXVPTEESSLSMLFFRIKPHQGQHLKVYPFLQHNKXEX

SEQ ID NO: 25321 - protein, 36 aa, Artificial Sequence
  Non-cyclic GFR-binding peptide
  MOD_RES (1), (34), (36): Xaa is C or S
  MOD_RES (15), (16), (17), (18), (19): Xaa is A or G
  MOD_RES (20), (21), (22), (23): Xaa is A or G or is absent
XAPVKTSSLSMLFFXXXXXXXXXLKVYPMIVEEXGX

SEQ ID NO: 25322 - protein, 39 aa, Artificial Sequence
  Non-cyclic GFR-binding peptide
  MOD_RES (7), (39): Xaa is C or S
HVTKPTXAPTKLSSLSVLFFDDSSNVILKVYPNMVVRSX

SEQ ID NO: 25323 - protein, 35 aa, Artificial Sequence
  Non-cyclic GFR-binding peptide
  MOD_RES (2), (3): Xaa is C or S
  MOD_RES (17), (18), (19), (20), (21): Xaa is A or G
  MOD_RES (22), (23), (24), (25): Xaa is A or G or is absent
PXXVPQALSSLSILFFXXXXXXXXXLKVYPMIVRS

SEQ ID NO: 25324 - protein, 35 aa, Artificial Sequence
  Non-cyclic GFR-binding peptide
  MOD_RES (1), (2): Xaa is C or S
  MOD_RES (16), (17), (18), (19), (20): Xaa is A or G
  MOD_RES (21), (22), (23), (24): Xaa is A or G or is absent
XXAPTQLSSLSVLFFXXXXXXXXXLKVYPNMVVRA

SEQ ID NO: 25325 - protein, 36 aa, Artificial Sequence
  Non-cyclic GFR-binding peptide
  MOD_RES (1), (2), (35): Xaa is C or S
  MOD_RES (16), (17), (18), (19), (20): Xaa is A or G
  MOD_RES (21), (22), (23), (24): Xaa is A or G or is absent
XXVPQALSSLSILFFXXXXXXXXXLKVYPMIVRSXK

SEQ ID NO: 25326 - protein, 35 aa, Artificial Sequence
  Non-cyclic GFR-binding peptide
  MOD_RES (32), (34): Xaa is C or S
TPTKMSSLSMLFFNDKQQIILKVYPGMVVDRXGXS

SEQ ID NO: 25327 - protein, 33 aa, Artificial Sequence
  Non-cyclic GFR-binding peptide
  MOD_RES (33), (33): Xaa is C or S
  MOD_RES (14), (15), (16), (17), (18): Xaa is A or G
  MOD_RES (19), (20), (21), (22): Xaa is A or G or is absent
VSQDLSSLSILFFXXXXXXXXXLKVYPMIVKSX

SEQ ID NO: 25328 - protein, 41 aa, Artificial Sequence
  Non-cyclic GFR-binding peptide
  MOD_RES (4), (5), (38), (40): Xaa is C or S
  MOD_RES (19), (20), (21), (22), (23): Xaa is A or G
  MOD_RES (24), (25), (26), (27): Xaa is A or G or is absent
PSTXXAPVKTSSLSMLFFXXXXXXXXXLKVYPMIVEEXGXL

SEQ ID NO: 25329 - protein, 34 aa, Artificial Sequence
  Non-cyclic GFR-binding peptide
  MOD_RES (16), (17), (18), (19), (20): Xaa is A or G
  MOD_RES (21), (22), (23), (24): Xaa is A or G or is absent
QPSRVHHSSLSVLFFXXXXXXXXXLKVYPRLEEH

SEQ ID NO: 25330 - protein, 40 aa, Artificial Sequence
  Non-cyclic GFR-binding peptide
  MOD_RES (6), (7), (39): Xaa is C or S
AVPKAXXAPTKLSSLSVLFFDSSNNVILKVYPNMVVKAXG

SEQ ID NO: 25331 - protein, 38 aa, Artificial Sequence
  Non-cyclic GFR-binding peptide
  MOD_RES (4), (5): Xaa is C or S
  MOD_RES (19), (20), (21), (22), (23): Xaa is A or G
  MOD_RES (24), (25), (26), (27): Xaa is A or G or is absent
PKAXXVPTELSSLSMLFFXXXXXXXXXLKVYPEMVVEG

SEQ ID NO: 25332 - protein, 40 aa, Artificial Sequence
  Non-cyclic GFR-binding peptide
  MOD_RES (5), (6), (39): Xaa is C or S
  MOD_RES (20), (21), (22), (23), (24): Xaa is A or G
  MOD_RES (25), (26), (27), (28): Xaa is A or G or is absent
VPSTXXAPVKTSSLSMLFFXXXXXXXXXLKVYPMIVEEXG

SEQ ID NO: 25333 - protein, 37 aa, Artificial Sequence
  Non-cyclic GFR-binding peptide
  MOD_RES (3), (4), (36): Xaa is C or S
GPXXTPTKMSSLSMLFFNDKQQIILKVYPGMVVDRXG

SEQ ID NO: 25334 - protein, 36 aa, Artificial Sequence
  Non-cyclic GFR-binding peptide
  MOD_RES (2), (3), (36): Xaa is C or S
  MOD_RES (17), (18), (19), (20), (21): Xaa is A or G
  MOD_RES (22), (23), (24), (25): Xaa is A or G or is absent
PXXVSQDLSSLSILFFXXXXXXXXXLKVYPMIVKSX

SEQ ID NO: 25335 - protein, 36 aa, Artificial Sequence
  Non-cyclic GFR-binding peptide
  MOD_RES (1), (33), (35): Xaa is C or S
XVPTELSSLSMLFFDEYDKVVLKVYPEMVVEGXGXR

SEQ ID NO: 25336 - protein, 37 aa, Artificial Sequence
  Non-cyclic GFR-binding peptide
  MOD_RES (4), (5): Xaa is C or S
  MOD_RES (19), (20), (21), (22), (23): Xaa is A or G
  MOD_RES (24), (25), (26), (27): Xaa is A or G or is absent
PASXXVPARLSSLSILFFXXXXXXXXXLKVYPDMVVE

SEQ ID NO: 25337 - protein, 37 aa, Artificial Sequence
  Non-cyclic GFR-binding peptide
  MOD_RES (2), (3), (37): Xaa is C or S
  MOD_RES (17), (18), (19), (20), (21): Xaa is A or G
  MOD_RES (22), (23), (24), (25): Xaa is A or G or is absent
PXXTPTKMSSLSMLFFXXXXXXXXXLKVYPGMVVDRX

SEQ ID NO: 25338 - protein, 42 aa, Artificial Sequence
  Non-cyclic GFR-binding peptide
  MOD_RES (5), (39), (41): Xaa is C or S
  MOD_RES (19), (20), (21), (22), (23): Xaa is A or G
  MOD_RES (24), (25), (26), (27): Xaa is A or G or is absent
TKPTXAPTKLSSLSVLFFXXXXXXXXXLKVYPNMVVRSXGXH

SEQ ID NO: 25339 - protein, 39 aa, Artificial Sequence
  Non-cyclic GFR-binding peptide
  MOD_RES (6), (7), (39): Xaa is C or S
AAPASXXVPARLSSLSILFFDAANNVVLKVYPDMVVEAX

SEQ ID NO: 25340 - protein, 37 aa, Artificial Sequence
  Non-cyclic GFR-binding peptide
  MOD_RES (4), (5), (37): Xaa is C or S
PKAXXVPTELSSLSMLFFDEYDKVVLKVYPEMVVEGX

SEQ ID NO: 25341 - protein, 40 aa, Artificial Sequence
  Non-cyclic GFR-binding peptide
  MOD_RES (4), (5), (39): Xaa is C or S
  MOD_RES (19), (20), (21), (22), (23): Xaa is A or G
  MOD_RES (24), (25), (26), (27): Xaa is A or G or is absent
PASXXVPARLSSLSILFFXXXXXXXXXLKVYPDMVVEAXG

SEQ ID NO: 25342 - protein, 39 aa, Artificial Sequence
  Non-cyclic GFR-binding peptide
  MOD_RES (5), (6), (39): Xaa is C or S
  MOD_RES (20), (21), (22), (23), (24): Xaa is A or G
  MOD_RES (25), (26), (27), (28): Xaa is A or G or is absent
SAAPXXVPQALSSLSILFFXXXXXXXXXLKVYPMIVRSX

SEQ ID NO: 25343 - protein, 39 aa, Artificial Sequence
  Non-cyclic GFR-binding peptide
  MOD_RES (3), (4), (38): Xaa is C or S
  MOD_RES (18), (19), (20), (21), (22): Xaa is A or G
  MOD_RES (23), (24), (25), (26): Xaa is A or G or is absent
KAXXVPTELSSLSMLFFXXXXXXXXXLKVYPEMVVEGXG

SEQ ID NO: 25344 - protein, 38 aa, Artificial Sequence
  Non-cyclic GFR-binding peptide
  MOD_RES (35), (37): Xaa is C or S
  MOD_RES (14), (15), (16), (17), (18): Xaa is A or G
  MOD_RES (19), (20), (21), (22): Xaa is A or G or is absent
VPTKLSSLSVLFFXXXXXXXXXLKVYPEGMSVAEXGXR

SEQ ID NO: 25345 - protein, 37 aa, Artificial Sequence
  Non-cyclic GFR-binding peptide
  MOD_RES (2), (3), (35), (37): Xaa is C or S
PXXAPTKLSSLSVLFFDDSSNVILKVYPNMVVRSXGX

SEQ ID NO: 25346 - protein, 39 aa, Artificial Sequence
  Non-cyclic GFR-binding peptide
  MOD_RES (5), (6): Xaa is C or S
  MOD_RES (20), (21), (22), (23), (24): Xaa is A or G
  MOD_RES (25), (26), (27), (28): Xaa is A or G or is absent
APASXXVPARLSSLSILFFXXXXXXXXXLKVYPDMVVEA

SEQ ID NO: 25347 - protein, 37 aa, Artificial Sequence
  Non-cyclic GFR-binding peptide
  MOD_RES (4), (4): Xaa is C or S
GLEXVPTEESSLSMLFFRIKPHQGQHLKVYPFLQHNK

SEQ ID NO: 25348 - protein, 39 aa, Artificial Sequence
  Non-cyclic GFR-binding peptide
  MOD_RES (5), (6), (38): Xaa is C or S
IPKAXXVPTELSSLSMLFFDEYDKVVLKVYPEMVVEGXG

SEQ ID NO: 25349 - protein, 32 aa, Artificial Sequence
  Non-cyclic GFR-binding peptide
  MOD_RES (14), (15), (16), (17), (18): Xaa is A or G
  MOD_RES (19), (20), (21), (22): Xaa is A or G or is absent
SRVHHSSLSVLFFXXXXXXXXXLKVYPRLEEH

SEQ ID NO: 25350 - protein, 35 aa, Artificial Sequence
  Non-cyclic GFR-binding peptide
  MOD_RES (1), (35): Xaa is C or S
  MOD_RES (15), (16), (17), (18), (19): Xaa is A or G
  MOD_RES (20), (21), (22), (23): Xaa is A or G or is absent
XTPTKMSSLSMLFFXXXXXXXXXLKVYPGMVVDRX

SEQ ID NO: 25351 - protein, 38 aa, Artificial Sequence
  Non-cyclic GFR-binding peptide
  MOD_RES (4), (5), (36), (38): Xaa is C or S
ASPXXVSQDLSSLSILFFIGKTPKILKVYPMIVKSXKX

SEQ ID NO: 25352 - protein, 35 aa, Artificial Sequence
  Non-cyclic GFR-binding peptide
  MOD_RES (2), (3): Xaa is C or S
  MOD_RES (17), (18), (19), (20), (21): Xaa is A or G
  MOD_RES (22), (23), (24), (25): Xaa is A or G or is absent
PXXAPTQLSSLSVLFFXXXXXXXXXLKVYPNMVVR

SEQ ID NO: 25353 - protein, 39 aa, Artificial Sequence
  Non-cyclic GFR-binding peptide
  MOD_RES (4), (5), (39): Xaa is C or S
  MOD_RES (19), (20), (21), (22), (23): Xaa is A or G
  MOD_RES (24), (25), (26), (27): Xaa is A or G or is absent
SKAXXVPTKLSSLSILFFXXXXXXXXXLKVYPGMAVSEX

SEQ ID NO: 25354 - protein, 39 aa, Artificial Sequence
  Non-cyclic GFR-binding peptide
  MOD_RES (1), (2), (36), (38): Xaa is C or S
  MOD_RES (16), (17), (18), (19), (20): Xaa is A or G
  MOD_RES (21), (22), (23), (24): Xaa is A or G or is absent
XXAPTKLSSLSVLFFXXXXXXXXXLKVYPNMVVRSXGXH

SEQ ID NO: 25355 - protein, 37 aa, Artificial Sequence
  Non-cyclic GFR-binding peptide
  MOD_RES (6), (7): Xaa is C or S
HVPKPXXAPTKLSSLSVLFFDDSSNVILKVYPNMVVR

SEQ ID NO: 25356 - protein, 38 aa, Artificial Sequence
  Non-cyclic GFR-binding peptide
  MOD_RES (4), (4): Xaa is C or S
  MOD_RES (20), (21), (22), (23), (24): Xaa is A or G
  MOD_RES (25), (26), (27), (28): Xaa is A or G or is absent
SVKXQPSRVHHSSLSVLFFXXXXXXXXXLKVYPRLEEH

SEQ ID NO: 25357 - protein, 37 aa, Artificial Sequence
  Non-cyclic GFR-binding peptide
  MOD_RES (2), (3), (35), (37): Xaa is C or S
PXXTPTKMSSLSMLFFNDKQQIILKVYPGMVVDRXGX

SEQ ID NO: 25358 - protein, 37 aa, Artificial Sequence
  Non-cyclic GFR-binding peptide
  MOD_RES (4), (5), (37): Xaa is C or S
PKAXXAPTKLSSLSVLFFDSSNNVILKVYPNMVVKAX

SEQ ID NO: 25359 - protein, 33 aa, Artificial Sequence
  Non-cyclic GFR-binding peptide
  MOD_RES (31), (33): Xaa is C or S
VSQDLSSLSILFFIGKTPKILKVYPMIVKSXKX

SEQ ID NO: 25360 - protein, 35 aa, Artificial Sequence
  Non-cyclic GFR-binding peptide
  MOD_RES (34), (34): Xaa is C or S
VPTEESSLSMLFFRIKPHQGQHLKVYPFLQHNKXE

SEQ ID NO: 25361 - protein, 35 aa, Artificial Sequence
  Non-cyclic GFR-binding peptide
  MOD_RES (2), (3), (34): Xaa is C or S
PXXVSQDLSSLSILFFIGKTPKILKVYPMIVKSXK

SEQ ID NO: 25362 - protein, 36 aa, Artificial Sequence
  Non-cyclic GFR-binding peptide
  MOD_RES (3), (3): Xaa is C or S
  MOD_RES (17), (18), (19), (20), (21): Xaa is A or G
  MOD_RES (22), (23), (24), (25): Xaa is A or G or is absent
PTXAPTKLSSLSVLFFXXXXXXXXXLKVYPNMVVRS

SEQ ID NO: 25363 - protein, 33 aa, Artificial Sequence
  Non-cyclic GFR-binding peptide
  MOD_RES (32), (32): Xaa is C or S
VPTRLSSLSILFFDSANNVVLKVYPDMVVESXG

SEQ ID NO: 25364 - protein, 36 aa, Artificial Sequence
  Non-cyclic GFR-binding peptide
  MOD_RES (5), (6): Xaa is C or S
VPSTXXAPVKTSSLSMLFFDNGRVLLLKVYPMIVEE

SEQ ID NO: 25365 - protein, 41 aa, Artificial Sequence
  Non-cyclic GFR-binding peptide
  MOD_RES (5), (6), (38), (40): Xaa is C or S
SAGPXXTPTKMSSLSMLFFNDKQQIILKVYPGMVVDRXGXS

SEQ ID NO: 25366 - protein, 37 aa, Artificial Sequence
  Non-cyclic GFR-binding peptide
  MOD_RES (36), (36): Xaa is C or S
PSRVHHSSLSVLFFEYVRKKPKLLKVYPRLEEHLEXA

SEQ ID NO: 25367 - protein, 37 aa, Artificial Sequence
  Non-cyclic GFR-binding peptide
  MOD_RES (4), (5): Xaa is C or S
  MOD_RES (19), (20), (21), (22), (23): Xaa is A or G
  MOD_RES (24), (25), (26), (27): Xaa is A or G or is absent
ASPXXVPQDLSSLSILFFXXXXXXXXXLKVYPMVVKS

SEQ ID NO: 25368 - protein, 35 aa, Artificial Sequence
  Non-cyclic GFR-binding peptide
  MOD_RES (1), (2), (34): Xaa is C or S
XXAPTKLSSLSVLFFDDSSNVILKVYPNMVVRSXG

SEQ ID NO: 25369 - protein, 38 aa, Artificial Sequence
  Non-cyclic GFR-binding peptide
  MOD_RES (4), (5), (38): Xaa is C or S
  MOD_RES (19), (20), (21), (22), (23): Xaa is A or G
  MOD_RES (24), (25), (26), (27): Xaa is A or G or is absent
PSTXXAPVKTSSLSMLFFXXXXXXXXXLKVYPMIVEEX

SEQ ID NO: 25370 - protein, 39 aa, Artificial Sequence
  Non-cyclic GFR-binding peptide
  MOD_RES (6), (7): Xaa is C or S
  MOD_RES (21), (22), (23), (24), (25): Xaa is A or G
  MOD_RES (26), (27), (28), (29): Xaa is A or G or is absent
AAPASXXVPARLSSLSILFFXXXXXXXXXLKVYPDMVVE

SEQ ID NO: 25371 - protein, 38 aa, Artificial Sequence
  Non-cyclic GFR-binding peptide
  MOD_RES (3), (4), (36), (38): Xaa is C or S
PTXXVPTRLSSLSILFFDSANNVVLKVYPDMVVESXGX

SEQ ID NO: 25372 - protein, 36 aa, Artificial Sequence
  Non-cyclic GFR-binding peptide
  MOD_RES (5), (6): Xaa is C or S
VPKAXXAPTKLSSLSVLFFDSSNNVILKVYPNMVVK

SEQ ID NO: 25373 - protein, 33 aa, Artificial Sequence
  Non-cyclic GFR-binding peptide
  MOD_RES (1), (2): Xaa is C or S
XXVPTELSSLSMLFFDEYDKVVLKVYPEMVVEG

SEQ ID NO: 25374 - protein, 39 aa, Artificial Sequence
  Non-cyclic GFR-binding peptide
  MOD_RES (5), (6), (39): Xaa is C or S
VGKAXXVPTKLSSLSVLFFDDMGVPTLKVYPEGMSVAEX

SEQ ID NO: 25375 - protein, 43 aa, Artificial Sequence
  Non-cyclic GFR-binding peptide
  MOD_RES (4), (41), (43): Xaa is C or S
SVKXQPSRVHHSSLSVLFFEYVRKKPKLLKVYPRLEEHLEXAX

SEQ ID NO: 25376 - protein, 37 aa, Artificial Sequence
  Non-cyclic GFR-binding peptide
  MOD_RES (5), (6), (37): Xaa is C or S
VPSTXXAPVKTSSLSMLFFDNGRVLLLKVYPMIVEEX

SEQ ID NO: 25377 - protein, 40 aa, Artificial Sequence
  Non-cyclic GFR-binding peptide
  MOD_RES (5), (6), (40): Xaa is C or S
  MOD_RES (20), (21), (22), (23), (24): Xaa is A or G
  MOD_RES (25), (26), (27), (28): Xaa is A or G or is absent
SAGPXXTPTKMSSLSMLFFXXXXXXXXXLKVYPGMVVDRX

SEQ ID NO: 25378 - protein, 36 aa, Artificial Sequence
  Non-cyclic GFR-binding peptide
  MOD_RES (2), (3): Xaa is C or S
  MOD_RES (17), (18), (19), (20), (21): Xaa is A or G
  MOD_RES (22), (23), (24), (25): Xaa is A or G or is absent
PXXTPTKMSSLSMLFFXXXXXXXXXLKVYPGMVVDR

SEQ ID NO: 25379 - protein, 34 aa, Artificial Sequence
  Non-cyclic GFR-binding peptide
  MOD_RES (1), (2): Xaa is C or S
  MOD_RES (16), (17), (18), (19), (20): Xaa is A or G
  MOD_RES (21), (22), (23), (24): Xaa is A or G or is absent
XXAPVKTSSLSMLFFXXXXXXXXXLKVYPMIVEE

SEQ ID NO: 25380 - protein, 36 aa, Artificial Sequence
  Non-cyclic GFR-binding peptide
  MOD_RES (4), (5): Xaa is C or S
PASXXVPARLSSLSILFFDAANNVVLKVYPDMVVEA

SEQ ID NO: 25381 - protein, 34 aa, Artificial Sequence
  Non-cyclic GFR-binding peptide
  MOD_RES (32), (34): Xaa is C or S
APTKLSSLSVLFFDSSNNVILKVYPNMVVKAXGX

SEQ ID NO: 25382 - protein, 43 aa, Artificial Sequence
  Non-cyclic GFR-binding peptide
  MOD_RES (6), (7), (40), (42): Xaa is C or S
  MOD_RES (21), (22), (23), (24), (25): Xaa is A or G
  MOD_RES (26), (27), (28), (29): Xaa is A or G or is absent
ASAAPXXVPQALSSLSILFFXXXXXXXXXLKVYPMIVRSXKXS

SEQ ID NO: 25383 - protein, 34 aa, Artificial Sequence
  Non-cyclic GFR-binding peptide
  MOD_RES (1), (32), (34): Xaa is C or S
XVPQDLSSLSILFFVGRTPKVLKVYPMVVKSXKX

SEQ ID NO: 25384 - protein, 37 aa, Artificial Sequence
  Non-cyclic GFR-binding peptide
  MOD_RES (3), (4): Xaa is C or S
  MOD_RES (18), (19), (20), (21), (22): Xaa is A or G
  MOD_RES (23), (24), (25), (26): Xaa is A or G or is absent
KPXXAPTQLSSLSVLFFXXXXXXXXXLKVYPNMVVRA

SEQ ID NO: 25385 - protein, 39 aa, Artificial Sequence
  Non-cyclic GFR-binding peptide
  MOD_RES (4), (5), (36), (38): Xaa is C or S
ASPXXVPQDLSSLSILFFVGRTPKVLKVYPMVVKSXKXS

SEQ ID NO: 25386 - protein, 40 aa, Artificial Sequence
  Non-cyclic GFR-binding peptide
  MOD_RES (6), (40): Xaa is C or S
DEGLEXVPTEESSLSMLFFRIKPHQGQHLKVYPFLQHNKX

SEQ ID NO: 25387 - protein, 36 aa, Artificial Sequence
  Non-cyclic GFR-binding peptide
  MOD_RES (2), (3), (35): Xaa is C or S
PXXTPTKMSSLSMLFFNDKQQIILKVYPGMVVDRXG

SEQ ID NO: 25388 - protein, 41 aa, Artificial Sequence
  Non-cyclic GFR-binding peptide
  MOD_RES (5), (6), (39), (41): Xaa is C or S
VGKAXXVPTKLSSLSVLFFDDMGVPTLKVYPEGMSVAEXGX

SEQ ID NO: 25389 - protein, 34 aa, Artificial Sequence
  Non-cyclic GFR-binding peptide
  MOD_RES (1), (32), (34): Xaa is C or S
XVSQDLSSLSILFFIGKTPKILKVYPMIVKSXKX

SEQ ID NO: 25390 - protein, 42 aa, Artificial Sequence
  Non-cyclic GFR-binding peptide
  MOD_RES (7), (41): Xaa is C or S
NDEGLEXVPTEESSLSMLFFRIKPHQGQHLKVYPFLQHNKXE

SEQ ID NO: 25391 - protein, 38 aa, Artificial Sequence
  Non-cyclic GFR-binding peptide
  MOD_RES (3), (4), (37): Xaa is C or S
  MOD_RES (18), (19), (20), (21), (22): Xaa is A or G
  MOD_RES (23), (24), (25), (26): Xaa is A or G or is absent
SPXXVSQDLSSLSILFFXXXXXXXXXLKVYPMIVKSXK

SEQ ID NO: 25392 - protein, 36 aa, Artificial Sequence
  Non-cyclic GFR-binding peptide
  MOD_RES (3), (4): Xaa is C or S
  MOD_RES (18), (19), (20), (21), (22): Xaa is A or G
  MOD_RES (23), (24), (25), (26): Xaa is A or G or is absent
GPXXTPTKMSSLSMLFFXXXXXXXXXLKVYPGMVVD

SEQ ID NO: 25393 - protein, 41 aa, Artificial Sequence
  Non-cyclic GFR-binding peptide
  MOD_RES (6), (7), (41): Xaa is C or S
  MOD_RES (21), (22), (23), (24), (25): Xaa is A or G
  MOD_RES (26), (27), (28), (29): Xaa is A or G or is absent
HVPKPXXAPTKLSSLSVLFFXXXXXXXXXLKVYPNMVVRSX

SEQ ID NO: 25394 - protein, 41 aa, Artificial Sequence
  Non-cyclic GFR-binding peptide
  MOD_RES (4), (5), (39), (41): Xaa is C or S
  MOD_RES (19), (20), (21), (22), (23): Xaa is A or G
  MOD_RES (24), (25), (26), (27): Xaa is A or G or is absent
SKAXXVPTKLSSLSILFFXXXXXXXXXLKVYPGMAVSEXGX

SEQ ID NO: 25395 - protein, 34 aa, Artificial Sequence
  Non-cyclic GFR-binding peptide
  MOD_RES (32), (34): Xaa is C or S
VPTRLSSLSILFFDSANNVVLKVYPDMVVESXGX

SEQ ID NO: 25396 - protein, 38 aa, Artificial Sequence
  Non-cyclic GFR-binding peptide
  MOD_RES (2), (3), (37): Xaa is C or S
  MOD_RES (17), (18), (19), (20), (21): Xaa is A or G
  MOD_RES (22), (23), (24), (25): Xaa is A or G or is absent
TXXVPTRLSSLSILFFXXXXXXXXXLKVYPDMVVESXG

SEQ ID NO: 25397 - protein, 39 aa, Artificial Sequence
  Non-cyclic GFR-binding peptide
  MOD_RES (6), (7), (39): Xaa is C or S
KASKAXXVPTKLSSLSILFFDKGVVTYLKVYPGMAVSEX

SEQ ID NO: 25398 - protein, 35 aa, Artificial Sequence
  Non-cyclic GFR-binding peptide
  MOD_RES (1), (2), (34): Xaa is C or S
XXVPTKLSSLSILFFDKGVVTYLKVYPGMAVSEXG

SEQ ID NO: 25399 - protein, 41 aa, Artificial Sequence
  Non-cyclic GFR-binding peptide
  MOD_RES (6), (7), (41): Xaa is C or S
  MOD_RES (21), (22), (23), (24), (25): Xaa is A or G
  MOD_RES (26), (27), (28), (29): Xaa is A or G or is absent
AVPKAXXAPTKLSSLSVLFFXXXXXXXXXLKVYPNMVVKAX

SEQ ID NO: 25400 - protein, 39 aa, Artificial Sequence
  Non-cyclic GFR-binding peptide
  MOD_RES (3), (37), (39): Xaa is C or S
  MOD_RES (17), (18), (19), (20), (21): Xaa is A or G
  MOD_RES (22), (23), (24), (25): Xaa is A or G or is absent
PTXAPTKLSSLSVLFFXXXXXXXXXLKVYPNMVVRSXGX

SEQ ID NO: 25401 - protein, 35 aa, Artificial Sequence
  Non-cyclic GFR-binding peptide
  MOD_RES (34), (34): Xaa is C or S
  MOD_RES (14), (15), (16), (17), (18): Xaa is A or G
  MOD_RES (19), (20), (21), (22): Xaa is A or G or is absent
VPTKLSSLSILFFXXXXXXXXXLKVYPGMAVSEXG

SEQ ID NO: 25402 - protein, 34 aa, Artificial Sequence
  Non-cyclic GFR-binding peptide
  MOD_RES (34), (34): Xaa is C or S
  MOD_RES (14), (15), (16), (17), (18): Xaa is A or G
  MOD_RES (19), (20), (21), (22): Xaa is A or G or is absent
APTQLSSLSVLFFXXXXXXXXXLKVYPNMVVRAX

SEQ ID NO: 25403 - protein, 34 aa, Artificial Sequence
  Non-cyclic GFR-binding peptide
  MOD_RES (14), (15), (16), (17), (18): Xaa is A or G
  MOD_RES (19), (20), (21), (22): Xaa is A or G or is absent
VPTKLSSLSVLFFXXXXXXXXXLKVYPEGMSVAE

SEQ ID NO: 25404 - protein, 40 aa, Artificial Sequence
  Non-cyclic GFR-binding peptide
  MOD_RES (5), (6), (40): Xaa is C or S
  MOD_RES (20), (21), (22), (23), (24): Xaa is A or G
  MOD_RES (25), (26), (27), (28): Xaa is A or G or is absent
VPKPXXAPTQLSSLSVLFFXXXXXXXXXLKVYPNMVVRAX

SEQ ID NO: 25405 - protein, 40 aa, Artificial Sequence
  Non-cyclic GFR-binding peptide
  MOD_RES (5), (6), (37), (39): Xaa is C or S
VPSTXXAPVKTSSLSMLFFDNGRVLLLKVYPMIVEEXGXL

SEQ ID NO: 25406 - protein, 37 aa, Artificial Sequence
  Non-cyclic GFR-binding peptide
  MOD_RES (1), (1): Xaa is C or S
  MOD_RES (17), (18), (19), (20), (21): Xaa is A or G
  MOD_RES (22), (23), (24), (25): Xaa is A or G or is absent
XQPSRVHHSSLSVLFFXXXXXXXXXLKVYPRLEEHLE

SEQ ID NO: 25407 - protein, 38 aa, Artificial Sequence
  Non-cyclic GFR-binding peptide
  MOD_RES (4), (5), (38): Xaa is C or S
  MOD_RES (19), (20), (21), (22), (23): Xaa is A or G
  MOD_RES (24), (25), (26), (27): Xaa is A or G or is absent
ASPXXVPQDLSSLSILFFXXXXXXXXXLKVYPMVVKSX

SEQ ID NO: 25408 - protein, 41 aa, Artificial Sequence
  Non-cyclic GFR-binding peptide
  MOD_RES (6), (7), (40): Xaa is C or S
  MOD_RES (21), (22), (23), (24), (25): Xaa is A or G
  MOD_RES (26), (27), (28), (29): Xaa is A or G or is absent
RVPSTXXAPVKTSSLSMLFFXXXXXXXXXLKVYPMIVEEXG

SEQ ID NO: 25409 - protein, 36 aa, Artificial Sequence
  Non-cyclic GFR-binding peptide
  MOD_RES (34), (36): Xaa is C or S
  MOD_RES (14), (15), (16), (17), (18): Xaa is A or G
  MOD_RES (19), (20), (21), (22): Xaa is A or G or is absent
APTQLSSLSVLFFXXXXXXXXXLKVYPNMVVRAXGX

SEQ ID NO: 25410 - protein, 42 aa, Artificial Sequence
  Non-cyclic GFR-binding peptide
  MOD_RES (4), (5), (39), (41): Xaa is C or S
  MOD_RES (19), (20), (21), (22), (23): Xaa is A or G
  MOD_RES (24), (25), (26), (27): Xaa is A or G or is absent
PKPXXAPTKLSSLSVLFFXXXXXXXXXLKVYPNMVVRSXGXH

SEQ ID NO: 25411 - protein, 40 aa, Artificial Sequence
  Non-cyclic GFR-binding peptide
  MOD_RES (5), (6), (37), (39): Xaa is C or S
SASPXXVSQDLSSLSILFFIGKTPKILKVYPMIVKSXKXS

SEQ ID NO: 25412 - protein, 38 aa, Artificial Sequence
  Non-cyclic GFR-binding peptide
  MOD_RES (3), (37): Xaa is C or S
  MOD_RES (17), (18), (19), (20), (21): Xaa is A or G
  MOD_RES (22), (23), (24), (25): Xaa is A or G or is absent
PTXAPTKLSSLSVLFFXXXXXXXXXLKVYPNMVVRSXG

SEQ ID NO: 25413 - protein, 33 aa, Artificial Sequence
  Non-cyclic GFR-binding peptide
  MOD_RES (32), (32): Xaa is C or S
TPTKMSSLSMLFFNDKQQIILKVYPGMVVDRXG

SEQ ID NO: 25414 - protein, 36 aa, Artificial Sequence
  Non-cyclic GFR-binding peptide
  MOD_RES (2), (3), (34), (36): Xaa is C or S
TXXAPVKTSSLSMLFFDNGRVLLLKVYPMIVEEXGX

SEQ ID NO: 25415 - protein, 31 aa, Artificial Sequence
  Non-cyclic GFR-binding peptide
APTKLSSLSVLFFDSSNNVILKVYPNMVVKA

SEQ ID NO: 25416 - protein, 34 aa, Artificial Sequence
  Non-cyclic GFR-binding peptide
  MOD_RES (1), (2), (33): Xaa is C or S
XXVPQDLSSLSILFFVGRTPKVLKVYPMVVKSXK

SEQ ID NO: 25417 - protein, 32 aa, Artificial Sequence
  Non-cyclic GFR-binding peptide
  MOD_RES (1), (2): Xaa is C or S
XXVPTRLSSLSILFFDSANNVVLKVYPDMVVE

SEQ ID NO: 25418 - protein, 37 aa, Artificial Sequence
  Non-cyclic GFR-binding peptide
  MOD_RES (2), (3), (36): Xaa is C or S
AXXVPTKLSSLSVLFFDDMGVPTLKVYPEGMSVAEXG

SEQ ID NO: 25419 - protein, 35 aa, Artificial Sequence
  Non-cyclic GFR-binding peptide
  MOD_RES (15), (16), (17), (18), (19): Xaa is A or G
  MOD_RES (20), (21), (22), (23): Xaa is A or G or is absent
PSRVHHSSLSVLFFXXXXXXXXXLKVYPRLEEHLE

SEQ ID NO: 25420 - protein, 42 aa, Artificial Sequence
  Non-cyclic GFR-binding peptide
  MOD_RES (5), (6), (40), (42): Xaa is C or S
  MOD_RES (20), (21), (22), (23), (24): Xaa is A or G
  MOD_RES (25), (26), (27), (28): Xaa is A or G or is absent
VPKPXXAPTKLSSLSVLFFXXXXXXXXXLKVYPNMVVRSXGX

SEQ ID NO: 25421 - protein, 38 aa, Artificial Sequence
  Non-cyclic GFR-binding peptide
  MOD_RES (1), (35), (37): Xaa is C or S
  MOD_RES (15), (16), (17), (18), (19): Xaa is A or G
  MOD_RES (20), (21), (22), (23): Xaa is A or G or is absent
XVPTRLSSLSILFFXXXXXXXXXLKVYPDMVVESXGXR

SEQ ID NO: 25422 - protein, 40 aa, Artificial Sequence
  Non-cyclic GFR-binding peptide
  MOD_RES (6), (40): Xaa is C or S
  MOD_RES (20), (21), (22), (23), (24): Xaa is A or G
  MOD_RES (25), (26), (27), (28): Xaa is A or G or is absent
VTKPTXAPTKLSSLSVLFFXXXXXXXXXLKVYPNMVVRSX

SEQ ID NO: 25423 - protein, 31 aa, Artificial Sequence
  Non-cyclic GFR-binding peptide
  MOD_RES (1), (1): Xaa is C or S
XVPTRLSSLSILFFDSANNVVLKVYPDMVVE

SEQ ID NO: 25424 - protein, 38 aa, Artificial Sequence
  Non-cyclic GFR-binding peptide
  MOD_RES (3), (4), (38): Xaa is C or S
  MOD_RES (18), (19), (20), (21), (22): Xaa is A or G
  MOD_RES (23), (24), (25), (26): Xaa is A or G or is absent
GPXXTPTKMSSLSMLFFXXXXXXXXXLKVYPGMVVDRX

SEQ ID NO: 25425 - protein, 35 aa, Artificial Sequence
  Non-cyclic GFR-binding peptide
  MOD_RES (4), (5): Xaa is C or S
ASPXXVPQDLSSLSILFFVGRTPKVLKVYPMVVKS

SEQ ID NO: 25426 - protein, 41 aa, Artificial Sequence
  Non-cyclic GFR-binding peptide
  MOD_RES (6), (7), (38), (40): Xaa is C or S
RVPSTXXAPVKTSSLSMLFFDNGRVLLLKVYPMIVEEXGXL

SEQ ID NO: 25427 - protein, 34 aa, Artificial Sequence
  Non-cyclic GFR-binding peptide
  MOD_RES (1), (1): Xaa is C or S
XVPTEESSLSMLFFRIKPHQGQHLKVYPFLQHNK

SEQ ID NO: 25428 - protein, 36 aa, Artificial Sequence
  Non-cyclic GFR-binding peptide
  MOD_RES (2), (3), (35): Xaa is C or S
AXXVPTKLSSLSILFFDKGVVTYLKVYPGMAVSEXG

SEQ ID NO: 25429 - protein, 39 aa, Artificial Sequence
  Non-cyclic GFR-binding peptide
  MOD_RES (4), (5), (37), (39): Xaa is C or S
PASXXVPARLSSLSILFFDAANNVVLKVYPDMVVEAXGX

SEQ ID NO: 25430 - protein, 41 aa, Artificial Sequence
  Non-cyclic GFR-binding peptide
  MOD_RES (4), (38), (40): Xaa is C or S
  MOD_RES (18), (19), (20), (21), (22): Xaa is A or G
  MOD_RES (23), (24), (25), (26): Xaa is A or G or is absent
GLEXVPTEESSLSMLFFXXXXXXXXXLKVYPFLQHNKXEXR

SEQ ID NO: 25431 - protein, 37 aa, Artificial Sequence
  Non-cyclic GFR-binding peptide
  MOD_RES (4), (5), (37): Xaa is C or S
PKPXXAPTKLSSLSVLFFDDSSNVILKVYPNMVVRSX

SEQ ID NO: 25432 - protein, 39 aa, Artificial Sequence
  Non-cyclic GFR-binding peptide
  MOD_RES (1), (2), (36), (38): Xaa is C or S
  MOD_RES (16), (17), (18), (19), (20): Xaa is A or G
  MOD_RES (21), (22), (23), (24): Xaa is A or G or is absent
XXAPTKLSSLSVLFFXXXXXXXXXLKVYPNMVVKAXGXH

SEQ ID NO: 25433 - protein, 37 aa, Artificial Sequence
  Non-cyclic GFR-binding peptide
  MOD_RES (34), (36): Xaa is C or S
  MOD_RES (14), (15), (16), (17), (18): Xaa is A or G
  MOD_RES (19), (20), (21), (22): Xaa is A or G or is absent
APTQLSSLSVLFFXXXXXXXXXLKVYPNMVVRAXGXH

SEQ ID NO: 25434 - protein, 42 aa, Artificial Sequence
  Non-cyclic GFR-binding peptide
  MOD_RES (6), (40), (42): Xaa is C or S
  MOD_RES (20), (21), (22), (23), (24): Xaa is A or G
  MOD_RES (25), (26), (27), (28): Xaa is A or G or is absent
DEGLEXVPTEESSLSMLFFXXXXXXXXXLKVYPFLQHNKXEX

SEQ ID NO: 25435 - protein, 42 aa, Artificial Sequence
  Non-cyclic GFR-binding peptide
  MOD_RES (2), (39), (41): Xaa is C or S
  MOD_RES (18), (19), (20), (21), (22): Xaa is A or G
  MOD_RES (23), (24), (25), (26): Xaa is A or G or is absent
KXQPSRVHHSSLSVLFFXXXXXXXXXLKVYPRLEEHLEXAXA

SEQ ID NO: 25436 - protein, 39 aa, Artificial Sequence
  Non-cyclic GFR-binding peptide
  MOD_RES (5), (6), (38): Xaa is C or S
VPKPXXAPTQLSSLSVLFFDDSSNVILKVYPNMVVRAXG

SEQ ID NO: 25437 - protein, 38 aa, Artificial Sequence
  Non-cyclic GFR-binding peptide
  MOD_RES (3), (4), (38): Xaa is C or S
  MOD_RES (18), (19), (20), (21), (22): Xaa is A or G
  MOD_RES (23), (24), (25), (26): Xaa is A or G or is absent
KAXXVPTKLSSLSILFFXXXXXXXXXLKVYPGMAVSEX

SEQ ID NO: 25438 - protein, 32 aa, Artificial Sequence
  Non-cyclic GFR-binding peptide
  MOD_RES (2), (2): Xaa is C or S
TXAPTKLSSLSVLFFDDSSNVILKVYPNMVVR

SEQ ID NO: 25439 - protein, 32 aa, Artificial Sequence
  Non-cyclic GFR-binding peptide
  MOD_RES (1), (1): Xaa is C or S
XAPTKLSSLSVLFFDDSSNVILKVYPNMVVRS

SEQ ID NO: 25440 - protein, 39 aa, Artificial Sequence
  Non-cyclic GFR-binding peptide
  MOD_RES (7), (7): Xaa is C or S
NDEGLEXVPTEESSLSMLFFRIKPHQGQHLKVYPFLQHN

SEQ ID NO: 25441 - protein, 42 aa, Artificial Sequence
  Non-cyclic GFR-binding peptide
  MOD_RES (4), (41): Xaa is C or S
SVKXQPSRVHHSSLSVLFFEYVRKKPKLLKVYPRLEEHLEXA

SEQ ID NO: 25442 - protein, 38 aa, Artificial Sequence
  Non-cyclic GFR-binding peptide
  MOD_RES (2), (3), (35), (37): Xaa is C or S
PXXAPTQLSSLSVLFFDDSSNVILKVYPNMVVRAXGXH

SEQ ID NO: 25443 - protein, 38 aa, Artificial Sequence
  Non-cyclic GFR-binding peptide
  MOD_RES (3), (4), (36), (38): Xaa is C or S
ASXXVPARLSSLSILFFDAANNVVLKVYPDMVVEAXGX

SEQ ID NO: 25444 - protein, 42 aa, Artificial Sequence
  Non-cyclic GFR-binding peptide
  MOD_RES (5), (42): Xaa is C or S
SSVKXQPSRVHHSSLSVLFFEYVRKKPKLLKVYPRLEEHLEX

SEQ ID NO: 25445 - protein, 36 aa, Artificial Sequence
  Non-cyclic GFR-binding peptide
  MOD_RES (4), (4): Xaa is C or S
  MOD_RES (18), (19), (20), (21), (22): Xaa is A or G
  MOD_RES (23), (24), (25), (26): Xaa is A or G or is absent
GLEXVPTEESSLSMLFFXXXXXXXXXLKVYPFLQHN

SEQ ID NO: 25446 - protein, 40 aa, Artificial Sequence
  Non-cyclic GFR-binding peptide
  MOD_RES (6), (7), (39): Xaa is C or S
YVPKPXXAPTKLSSLSVLFFDDSSNVILKVYPNMVVRSXG

SEQ ID NO: 25447 - protein, 37 aa, Artificial Sequence
  Non-cyclic GFR-binding peptide
  MOD_RES (4), (5), (37): Xaa is C or S
PASXXVPARLSSLSILFFDAANNVVLKVYPDMVVEAX

SEQ ID NO: 25448 - protein, 35 aa, Artificial Sequence
  Non-cyclic GFR-binding peptide
  MOD_RES (1), (32), (34): Xaa is C or S
XAPVKTSSLSMLFFDNGRVLLLKVYPMIVEEXGXL

SEQ ID NO: 25449 - protein, 39 aa, Artificial Sequence
  Non-cyclic GFR-binding peptide
  MOD_RES (2), (3), (36), (38): Xaa is C or S
  MOD_RES (17), (18), (19), (20), (21): Xaa is A or G
  MOD_RES (22), (23), (24), (25): Xaa is A or G or is absent
PXXVPQALSSLSILFFXXXXXXXXXLKVYPMIVRSXKXS

SEQ ID NO: 25450 - protein, 36 aa, Artificial Sequence
  Non-cyclic GFR-binding peptide
  MOD_RES (2), (3): Xaa is C or S
  MOD_RES (17), (18), (19), (20), (21): Xaa is A or G
  MOD_RES (22), (23), (24), (25): Xaa is A or G or is absent
AXXVPTKLSSLSILFFXXXXXXXXXLKVYPGMAVSE

SEQ ID NO: 25451 - protein, 35 aa, Artificial Sequence
  Non-cyclic GFR-binding peptide
  MOD_RES (1), (1): Xaa is C or S
XQPSRVHHSSLSVLFFEYVRKKPKLLKVYPRLEEH

SEQ ID NO: 25452 - protein, 40 aa, Artificial Sequence
  Non-cyclic GFR-binding peptide
  MOD_RES (3), (4), (38), (40): Xaa is C or S
  MOD_RES (18), (19), (20), (21), (22): Xaa is A or G
  MOD_RES (23), (24), (25), (26): Xaa is A or G or is absent
KAXXAPTKLSSLSVLFFXXXXXXXXXLKVYPNMVVKAXGX

SEQ ID NO: 25453 - protein, 32 aa, Artificial Sequence
  Non-cyclic GFR-binding peptide
  MOD_RES (1), (2): Xaa is C or S
XXAPTKLSSLSVLFFDDSSNVILKVYPNMVVR

SEQ ID NO: 25454 - protein, 37 aa, Artificial Sequence
  Non-cyclic GFR-binding peptide
  MOD_RES (6), (7): Xaa is C or S
ASASPXXVPQDLSSLSILFFVGRTPKVLKVYPMVVKS

SEQ ID NO: 25455 - protein, 37 aa, Artificial Sequence
  Non-cyclic GFR-binding peptide
  MOD_RES (1), (34), (36): Xaa is C or S
  MOD_RES (15), (16), (17), (18), (19): Xaa is A or G
  MOD_RES (20), (21), (22), (23): Xaa is A or G or is absent
XVPQALSSLSILFFXXXXXXXXXLKVYPMIVRSXKXS

SEQ ID NO: 25456 - protein, 38 aa, Artificial Sequence
  Non-cyclic GFR-binding peptide
  MOD_RES (6), (7): Xaa is C or S
AVPKAXXAPTKLSSLSVLFFDSSNNVILKVYPNMVVKA

SEQ ID NO: 25457 - protein, 37 aa, Artificial Sequence
  Non-cyclic GFR-binding peptide
  MOD_RES (4), (5): Xaa is C or S
  MOD_RES (19), (20), (21), (22), (23): Xaa is A or G
  MOD_RES (24), (25), (26), (27): Xaa is A or G or is absent
ASPXXVSQDLSSLSILFFXXXXXXXXXLKVYPMIVKS

SEQ ID NO: 25458 - protein, 34 aa, Artificial Sequence
  Non-cyclic GFR-binding peptide
  MOD_RES (3), (4): Xaa is C or S
ASXXVPARLSSLSILFFDAANNVVLKVYPDMVVE

SEQ ID NO: 25459 - protein, 37 aa, Artificial Sequence
  Non-cyclic GFR-binding peptide
  MOD_RES (1), (2), (36): Xaa is C or S
  MOD_RES (16), (17), (18), (19), (20): Xaa is A or G
  MOD_RES (21), (22), (23), (24): Xaa is A or G or is absent
XXVPTKLSSLSILFFXXXXXXXXXLKVYPGMAVSEXG

SEQ ID NO: 25460 - protein, 35 aa, Artificial Sequence
  Non-cyclic GFR-binding peptide
  MOD_RES (2), (3): Xaa is C or S
  MOD_RES (17), (18), (19), (20), (21): Xaa is A or G
  MOD_RES (22), (23), (24), (25): Xaa is A or G or is absent
PXXVSQDLSSLSILFFXXXXXXXXXLKVYPMIVKS

SEQ ID NO: 25461 - protein, 39 aa, Artificial Sequence
  Non-cyclic GFR-binding peptide
  MOD_RES (4), (5), (37), (39): Xaa is C or S
PKAXXAPTKLSSLSVLFFDSSNNVILKVYPNMVVKAXGX

SEQ ID NO: 25462 - protein, 34 aa, Artificial Sequence
  Non-cyclic GFR-binding peptide
  MOD_RES (2), (3): Xaa is C or S
AXXAPTKLSSLSVLFFDSSNNVILKVYPNMVVKA

SEQ ID NO: 25463 - protein, 33 aa, Artificial Sequence
  Non-cyclic GFR-binding peptide
  MOD_RES (1), (1): Xaa is C or S
  MOD_RES (15), (16), (17), (18), (19): Xaa is A or G
  MOD_RES (20), (21), (22), (23): Xaa is A or G or is absent
XVPTRLSSLSILFFXXXXXXXXXLKVYPDMVVE

SEQ ID NO: 25464 - protein, 37 aa, Artificial Sequence
  Non-cyclic GFR-binding peptide
  MOD_RES (1), (35), (37): Xaa is C or S
XVPTEESSLSMLFFRIKPHQGQHLKVYPFLQHNKXEX

SEQ ID NO: 25465 - protein, 39 aa, Artificial Sequence
  Non-cyclic GFR-binding peptide
  MOD_RES (3), (4), (36), (38): Xaa is C or S
GPXXTPTKMSSLSMLFFNDKQQIILKVYPGMVVDRXGXS

SEQ ID NO: 25466 - protein, 38 aa, Artificial Sequence
  Non-cyclic GFR-binding peptide
  MOD_RES (1), (36), (38): Xaa is C or S
  MOD_RES (15), (16), (17), (18), (19): Xaa is A or G
  MOD_RES (20), (21), (22), (23): Xaa is A or G or is absent
XVPTKLSSLSVLFFXXXXXXXXXLKVYPEGMSVAEXGX

SEQ ID NO: 25467 - protein, 37 aa, Artificial Sequence
  Non-cyclic GFR-binding peptide
  MOD_RES (6), (7): Xaa is C or S
STPPTXXVPTRLSSLSILFFDSANNVVLKVYPDMVVE

SEQ ID NO: 25468 - protein, 39 aa, Artificial Sequence
  Non-cyclic GFR-binding peptide
  MOD_RES (6), (7): Xaa is C or S
  MOD_RES (21), (22), (23), (24), (25): Xaa is A or G
  MOD_RES (26), (27), (28), (29): Xaa is A or G or is absent
RVPSTXXAPVKTSSLSMLFFXXXXXXXXXLKVYPMIVEE

SEQ ID NO: 25469 - protein, 35 aa, Artificial Sequence
  Non-cyclic GFR-binding peptide
  MOD_RES (2), (3), (34): Xaa is C or S
PXXVPQALSSLSILFFVGRKPKVLKVYPMIVRSXK

SEQ ID NO: 25470 - protein, 33 aa, Artificial Sequence
  Non-cyclic GFR-binding peptide
  MOD_RES (3), (3): Xaa is C or S
PTXAPTKLSSLSVLFFDDSSNVILKVYPNMVVR

SEQ ID NO: 25471 - protein, 42 aa, Artificial Sequence
  Non-cyclic GFR-binding peptide
  MOD_RES (6), (7), (41): Xaa is C or S
  MOD_RES (21), (22), (23), (24), (25): Xaa is A or G
  MOD_RES (26), (27), (28), (29): Xaa is A or G or is absent
GSAGPXXTPTKMSSLSMLFFXXXXXXXXXLKVYPGMVVDRXG

SEQ ID NO: 25472 - protein, 40 aa, Artificial Sequence
  Non-cyclic GFR-binding peptide
  MOD_RES (5), (6), (38), (40): Xaa is C or S
VPKPXXAPTQLSSLSVLFFDDSSNVILKVYPNMVVRAXGX

SEQ ID NO: 25473 - protein, 36 aa, Artificial Sequence
  Non-cyclic GFR-binding peptide
  MOD_RES (1), (2): Xaa is C or S
  MOD_RES (16), (17), (18), (19), (20): Xaa is A or G
  MOD_RES (21), (22), (23), (24): Xaa is A or G or is absent
XXVPTKLSSLSVLFFXXXXXXXXXLKVYPEGMSVAE

SEQ ID NO: 25474 - protein, 37 aa, Artificial Sequence
  Non-cyclic GFR-binding peptide
  MOD_RES (1), (34), (36): Xaa is C or S
XVPTKLSSLSVLFFDDMGVPTLKVYPEGMSVAEXGXR

SEQ ID NO: 25475 - protein, 39 aa, Artificial Sequence
  Non-cyclic GFR-binding peptide
  MOD_RES (3), (4), (36), (38): Xaa is C or S
KPXXAPTQLSSLSVLFFDDSSNVILKVYPNMVVRAXGXH

SEQ ID NO: 25476 - protein, 33 aa, Artificial Sequence
  Non-cyclic GFR-binding peptide
  MOD_RES (2), (3): Xaa is C or S
AXXVPTELSSLSMLFFDEYDKVVLKVYPEMVVE

SEQ ID NO: 25477 - protein, 39 aa, Artificial Sequence
  Non-cyclic GFR-binding peptide
  MOD_RES (5), (6): Xaa is C or S
  MOD_RES (20), (21), (22), (23), (24): Xaa is A or G
  MOD_RES (25), (26), (27), (28): Xaa is A or G or is absent
VPKPXXAPTQLSSLSVLFFXXXXXXXXXLKVYPNMVVRA

SEQ ID NO: 25478 - protein, 35 aa, Artificial Sequence
  Non-cyclic GFR-binding peptide
  MOD_RES (3), (35): Xaa is C or S
PTXAPTKLSSLSVLFFDDSSNVILKVYPNMVVRSX

SEQ ID NO: 25479 - protein, 34 aa, Artificial Sequence
  Non-cyclic GFR-binding peptide
QPSRVHHSSLSVLFFEYVRKKPKLLKVYPRLEEH

SEQ ID NO: 25480 - protein, 33 aa, Artificial Sequence
  Non-cyclic GFR-binding peptide
  MOD_RES (14), (15), (16), (17), (18): Xaa is A or G
  MOD_RES (19), (20), (21), (22): Xaa is A or G or is absent
APTQLSSLSVLFFXXXXXXXXXLKVYPNMVVRA

SEQ ID NO: 25481 - protein, 41 aa, Artificial Sequence
  Non-cyclic GFR-binding peptide
  MOD_RES (5), (6), (41): Xaa is C or S
  MOD_RES (20), (21), (22), (23), (24): Xaa is A or G
  MOD_RES (25), (26), (27), (28): Xaa is A or G or is absent
VGKAXXVPTKLSSLSVLFFXXXXXXXXXLKVYPEGMSVAEX

SEQ ID NO: 25482 - protein, 41 aa, Artificial Sequence
  Non-cyclic GFR-binding peptide
  MOD_RES (4), (5), (39), (41): Xaa is C or S
  MOD_RES (19), (20), (21), (22), (23): Xaa is A or G
  MOD_RES (24), (25), (26), (27): Xaa is A or G or is absent
PPTXXVPTRLSSLSILFFXXXXXXXXXLKVYPDMVVESXGX

SEQ ID NO: 25483 - protein, 34 aa, Artificial Sequence
  Non-cyclic GFR-binding peptide
  MOD_RES (1), (2), (34): Xaa is C or S
XXVPTRLSSLSILFFDSANNVVLKVYPDMVVESX

SEQ ID NO: 25484 - protein, 37 aa, Artificial Sequence
  Non-cyclic GFR-binding peptide
  MOD_RES (35), (37): Xaa is C or S
  MOD_RES (14), (15), (16), (17), (18): Xaa is A or G
  MOD_RES (19), (20), (21), (22): Xaa is A or G or is absent
SRVHHSSLSVLFFXXXXXXXXXLKVYPRLEEHLEXAX

SEQ ID NO: 25485 - protein, 35 aa, Artificial Sequence
  Non-cyclic GFR-binding peptide
  MOD_RES (32), (34): Xaa is C or S
APTKLSSLSVLFFDSSNNVILKVYPNMVVKAXGXH

SEQ ID NO: 25486 - protein, 33 aa, Artificial Sequence
  Non-cyclic GFR-binding peptide
  MOD_RES (14), (15), (16), (17), (18): Xaa is A or G
  MOD_RES (19), (20), (21), (22): Xaa is A or G or is absent
VPARLSSLSILFFXXXXXXXXXLKVYPDMVVEA

SEQ ID NO: 25487 - protein, 40 aa, Artificial Sequence
  Non-cyclic GFR-binding peptide
  MOD_RES (5), (6), (40): Xaa is C or S
  MOD_RES (20), (21), (22), (23), (24): Xaa is A or G
  MOD_RES (25), (26), (27), (28): Xaa is A or G or is absent
TPPTXXVPTRLSSLSILFFXXXXXXXXXLKVYPDMVVESX

SEQ ID NO: 25488 - protein, 34 aa, Artificial Sequence
  Non-cyclic GFR-binding peptide
  MOD_RES (1), (2), (34): Xaa is C or S
XXAPTKLSSLSVLFFDSSNNVILKVYPNMVVKAX

SEQ ID NO: 25489 - protein, 33 aa, Artificial Sequence
  Non-cyclic GFR-binding peptide
  MOD_RES (31), (33): Xaa is C or S
APVKTSSLSMLFFDNGRVLLLKVYPMIVEEXGX

SEQ ID NO: 25490 - protein, 33 aa, Artificial Sequence
  Non-cyclic GFR-binding peptide
  MOD_RES (2), (3): Xaa is C or S
PXXAPTKLSSLSVLFFDDSSNVILKVYPNMVVR

SEQ ID NO: 25491 - protein, 42 aa, Artificial Sequence
  Non-cyclic GFR-binding peptide
  MOD_RES (6), (40), (42): Xaa is C or S
  MOD_RES (20), (21), (22), (23), (24): Xaa is A or G
  MOD_RES (25), (26), (27), (28): Xaa is A or G or is absent
VTKPTXAPTKLSSLSVLFFXXXXXXXXXLKVYPNMVVRSXGX

SEQ ID NO: 25492 - protein, 39 aa, Artificial Sequence
  Non-cyclic GFR-binding peptide
  MOD_RES (5), (5): Xaa is C or S
SSVKXQPSRVHHSSLSVLFFEYVRKKPKLLKVYPRLEEH

SEQ ID NO: 25493 - protein, 33 aa, Artificial Sequence
  Non-cyclic GFR-binding peptide
  MOD_RES (2), (3): Xaa is C or S
TXXAPVKTSSLSMLFFDNGRVLLLKVYPMIVEE

SEQ ID NO: 25494 - protein, 37 aa, Artificial Sequence
  Non-cyclic GFR-binding peptide
  MOD_RES (4), (5): Xaa is C or S
GKAXXVPTKLSSLSVLFFDDMGVPTLKVYPEGMSVAE

SEQ ID NO: 25495 - protein, 33 aa, Artificial Sequence
  Non-cyclic GFR-binding peptide
  MOD_RES (1), (2): Xaa is C or S
XXVPTKLSSLSILFFDKGVVTYLKVYPGMAVSE

SEQ ID NO: 25496 - protein, 41 aa, Artificial Sequence
  Non-cyclic GFR-binding peptide
  MOD_RES (5), (6), (40): Xaa is C or S
  MOD_RES (20), (21), (22), (23), (24): Xaa is A or G
  MOD_RES (25), (26), (27), (28): Xaa is A or G or is absent
SAGPXXTPTKMSSLSMLFFXXXXXXXXXLKVYPGMVVDRXG

SEQ ID NO: 25497 - protein, 36 aa, Artificial Sequence
  Non-cyclic GFR-binding peptide
  MOD_RES (3), (4): Xaa is C or S
  MOD_RES (18), (19), (20), (21), (22): Xaa is A or G
  MOD_RES (23), (24), (25), (26): Xaa is A or G or is absent
SPXXVPQDLSSLSILFFXXXXXXXXXLKVYPMVVKS

SEQ ID NO: 25498 - protein, 37 aa, Artificial Sequence
  Non-cyclic GFR-binding peptide
  MOD_RES (3), (4), (35), (37): Xaa is C or S
STXXAPVKTSSLSMLFFDNGRVLLLKVYPMIVEEXGX

SEQ ID NO: 25499 - protein, 35 aa, Artificial Sequence
  Non-cyclic GFR-binding peptide
  MOD_RES (35), (35): Xaa is C or S
  MOD_RES (14), (15), (16), (17), (18): Xaa is A or G
  MOD_RES (19), (20), (21), (22): Xaa is A or G or is absent
VPTKLSSLSVLFFXXXXXXXXXLKVYPEGMSVAEX

SEQ ID NO: 25500 - protein, 37 aa, Artificial Sequence
  Non-cyclic GFR-binding peptide
  MOD_RES (6), (7): Xaa is C or S
AVPKAXXAPTKLSSLSVLFFDSSNNVILKVYPNMVVK

SEQ ID NO: 25501 - protein, 38 aa, Artificial Sequence
  Non-cyclic GFR-binding peptide
  MOD_RES (4), (5), (38): Xaa is C or S
  MOD_RES (19), (20), (21), (22), (23): Xaa is A or G
  MOD_RES (24), (25), (26), (27): Xaa is A or G or is absent
AAPXXVPQALSSLSILFFXXXXXXXXXLKVYPMIVRSX

SEQ ID NO: 25502 - protein, 41 aa, Artificial Sequence
  Non-cyclic GFR-binding peptide
  MOD_RES (7), (41): Xaa is C or S
  MOD_RES (21), (22), (23), (24), (25): Xaa is A or G
  MOD_RES (26), (27), (28), (29): Xaa is A or G or is absent
NDEGLEXVPTEESSLSMLFFXXXXXXXXXLKVYPFLQHNKX

SEQ ID NO: 25503 - protein, 38 aa, Artificial Sequence
  Non-cyclic GFR-binding peptide
  MOD_RES (3), (35), (37): Xaa is C or S
PTXAPTKLSSLSVLFFDDSSNVILKVYPNMVVRSXGXH

SEQ ID NO: 25504 - protein, 37 aa, Artificial Sequence
  Non-cyclic GFR-binding peptide
  MOD_RES (2), (3), (34), (36): Xaa is C or S
PXXVPQDLSSLSILFFVGRTPKVLKVYPMVVKSXKXS

SEQ ID NO: 25505 - protein, 30 aa, Artificial Sequence
  Non-cyclic GFR-binding peptide
TPTKMSSLSMLFFNDKQQIILKVYPGMVVD

SEQ ID NO: 25506 - protein, 37 aa, Artificial Sequence
  Non-cyclic GFR-binding peptide
  MOD_RES (6), (7): Xaa is C or S
SIPKAXXVPTELSSLSMLFFDEYDKVVLKVYPEMVVE

SEQ ID NO: 25507 - protein, 36 aa, Artificial Sequence
  Non-cyclic GFR-binding peptide
  MOD_RES (1), (33), (35): Xaa is C or S
XVPARLSSLSILFFDAANNVVLKVYPDMVVEAXGXR

SEQ ID NO: 25508 - protein, 36 aa, Artificial Sequence
  Non-cyclic GFR-binding peptide
  MOD_RES (4), (5): Xaa is C or S
AGPXXTPTKMSSLSMLFFNDKQQIILKVYPGMVVDR

SEQ ID NO: 25509 - protein, 39 aa, Artificial Sequence
  Non-cyclic GFR-binding peptide
  MOD_RES (2), (3), (36), (38): Xaa is C or S
  MOD_RES (17), (18), (19), (20), (21): Xaa is A or G
  MOD_RES (22), (23), (24), (25): Xaa is A or G or is absent
TXXAPVKTSSLSMLFFXXXXXXXXXLKVYPMIVEEXGXL

SEQ ID NO: 25510 - protein, 37 aa, Artificial Sequence
  Non-cyclic GFR-binding peptide
  MOD_RES (1), (36): Xaa is C or S
  MOD_RES (15), (16), (17), (18), (19): Xaa is A or G
  MOD_RES (20), (21), (22), (23): Xaa is A or G or is absent
XVPTKLSSLSVLFFXXXXXXXXXLKVYPEGMSVAEXG

SEQ ID NO: 25511 - protein, 32 aa, Artificial Sequence
  Non-cyclic GFR-binding peptide
  MOD_RES (1), (1): Xaa is C or S
XVPTKLSSLSILFFDKGVVTYLKVYPGMAVSE

SEQ ID NO: 25512 - protein, 38 aa, Artificial Sequence
  Non-cyclic GFR-binding peptide
  MOD_RES (3), (4), (35), (37): Xaa is C or S
SPXXVSQDLSSLSILFFIGKTPKILKVYPMIVKSXKXS

SEQ ID NO: 25513 - protein, 36 aa, Artificial Sequence
  Non-cyclic GFR-binding peptide
  MOD_RES (35), (35): Xaa is C or S
  MOD_RES (14), (15), (16), (17), (18): Xaa is A or G
  MOD_RES (19), (20), (21), (22): Xaa is A or G or is absent
VPTKLSSLSVLFFXXXXXXXXXLKVYPEGMSVAEXG

SEQ ID NO: 25514 - protein, 43 aa, Artificial Sequence
  Non-cyclic GFR-binding peptide
  MOD_RES (5), (6), (40), (42): Xaa is C or S
  MOD_RES (20), (21), (22), (23), (24): Xaa is A or G
  MOD_RES (25), (26), (27), (28): Xaa is A or G or is absent
VPKPXXAPTKLSSLSVLFFXXXXXXXXXLKVYPNMVVRSXGXH

SEQ ID NO: 25515 - protein, 36 aa, Artificial Sequence
  Non-cyclic GFR-binding peptide
  MOD_RES (2), (3): Xaa is C or S
  MOD_RES (17), (18), (19), (20), (21): Xaa is A or G
  MOD_RES (22), (23), (24), (25): Xaa is A or G or is absent
TXXVPTRLSSLSILFFXXXXXXXXXLKVYPDMVVES

SEQ ID NO: 25516 - protein, 35 aa, Artificial Sequence
  Non-cyclic GFR-binding peptide
  MOD_RES (33), (35): Xaa is C or S
  MOD_RES (14), (15), (16), (17), (18): Xaa is A or G
  MOD_RES (19), (20), (21), (22): Xaa is A or G or is absent
APVKTSSLSMLFFXXXXXXXXXLKVYPMIVEEXGX

SEQ ID NO: 25517 - protein, 35 aa, Artificial Sequence
  Non-cyclic GFR-binding peptide
  MOD_RES (34), (34): Xaa is C or S
  MOD_RES (14), (15), (16), (17), (18): Xaa is A or G
  MOD_RES (19), (20), (21), (22): Xaa is A or G or is absent
APTQLSSLSVLFFXXXXXXXXXLKVYPNMVVRAXG

SEQ ID NO: 25518 - protein, 33 aa, Artificial Sequence
  Non-cyclic GFR-binding peptide
  MOD_RES (33), (33): Xaa is C or S
  MOD_RES (14), (15), (16), (17), (18): Xaa is A or G
  MOD_RES (19), (20), (21), (22): Xaa is A or G or is absent
VPQALSSLSILFFXXXXXXXXXLKVYPMIVRSX

SEQ ID NO: 25519 - protein, 36 aa, Artificial Sequence
  Non-cyclic GFR-binding peptide
  MOD_RES (1), (2), (34), (36): Xaa is C or S
XXAPTKLSSLSVLFFDDSSNVILKVYPNMVVRSXGX

SEQ ID NO: 25520 - protein, 44 aa, Artificial Sequence
  Non-cyclic GFR-binding peptide
  MOD_RES (5), (42), (44): Xaa is C or S
SSVKXQPSRVHHSSLSVLFFEYVRKKPKLLKVYPRLEEHLEXAX

SEQ ID NO: 25521 - protein, 38 aa, Artificial Sequence
  Non-cyclic GFR-binding peptide
  MOD_RES (5), (6), (37): Xaa is C or S
VPSTXXAPVKTSSLSMLFFDNGRVLLLKVYPMIVEEXG

SEQ ID NO: 25522 - protein, 34 aa, Artificial Sequence
  Non-cyclic GFR-binding peptide
  MOD_RES (1), (2), (34): Xaa is C or S
XXAPTKLSSLSVLFFDDSSNVILKVYPNMVVRSX

SEQ ID NO: 25523 - protein, 41 aa, Artificial Sequence
  Non-cyclic GFR-binding peptide
  MOD_RES (3), (4), (38), (40): Xaa is C or S
  MOD_RES (18), (19), (20), (21), (22): Xaa is A or G
  MOD_RES (23), (24), (25), (26): Xaa is A or G or is absent
KAXXVPTELSSLSMLFFXXXXXXXXXLKVYPEMVVEGXGXR

SEQ ID NO: 25524 - protein, 39 aa, Artificial Sequence
  Non-cyclic GFR-binding peptide
  MOD_RES (5), (39): Xaa is C or S
EGLEXVPTEESSLSMLFFRIKPHQGQHLKVYPFLQHNKX

SEQ ID NO: 25525 - protein, 31 aa, Artificial Sequence
  Non-cyclic GFR-binding peptide
  MOD_RES (1), (1): Xaa is C or S
XVPTELSSLSMLFFDEYDKVVLKVYPEMVVE

SEQ ID NO: 25526 - protein, 38 aa, Artificial Sequence
  Non-cyclic GFR-binding peptide
  MOD_RES (4), (38): Xaa is C or S
GLEXVPTEESSLSMLFFRIKPHQGQHLKVYPFLQHNKX

SEQ ID NO: 25527 - protein, 34 aa, Artificial Sequence
  Non-cyclic GFR-binding peptide
  MOD_RES (1), (33): Xaa is C or S
XVPTKLSSLSILFFDKGVVTYLKVYPGMAVSEXG

SEQ ID NO: 25528 - protein, 40 aa, Artificial Sequence
  Non-cyclic GFR-binding peptide
  MOD_RES (2), (3), (38), (40): Xaa is C or S
  MOD_RES (17), (18), (19), (20), (21): Xaa is A or G
  MOD_RES (22), (23), (24), (25): Xaa is A or G or is absent
AXXVPTKLSSLSVLFFXXXXXXXXXLKVYPEGMSVAEXGX

SEQ ID NO: 25529 - protein, 41 aa, Artificial Sequence
  Non-cyclic GFR-binding peptide
  MOD_RES (5), (5): Xaa is C or S
  MOD_RES (21), (22), (23), (24), (25): Xaa is A or G
  MOD_RES (26), (27), (28), (29): Xaa is A or G or is absent
SSVKXQPSRVHHSSLSVLFFXXXXXXXXXLKVYPRLEEHLE

SEQ ID NO: 25530 - protein, 39 aa, Artificial Sequence
  Non-cyclic GFR-binding peptide
  MOD_RES (3), (4), (38): Xaa is C or S
  MOD_RES (18), (19), (20), (21), (22): Xaa is A or G
  MOD_RES (23), (24), (25), (26): Xaa is A or G or is absent
PTXXVPTRLSSLSILFFXXXXXXXXXLKVYPDMVVESXG

SEQ ID NO: 25531 - protein, 34 aa, Artificial Sequence
  Non-cyclic GFR-binding peptide
  MOD_RES (1), (2): Xaa is C or S
  MOD_RES (16), (17), (18), (19), (20): Xaa is A or G
  MOD_RES (21), (22), (23), (24): Xaa is A or G or is absent
XXVPTRLSSLSILFFXXXXXXXXXLKVYPDMVVE

SEQ ID NO: 25532 - protein, 35 aa, Artificial Sequence
  Non-cyclic GFR-binding peptide
  MOD_RES (32), (34): Xaa is C or S
APTQLSSLSVLFFDDSSNVILKVYPNMVVRAXGXH

SEQ ID NO: 25533 - protein, 35 aa, Artificial Sequence
  Non-cyclic GFR-binding peptide
  MOD_RES (2), (2): Xaa is C or S
  MOD_RES (16), (17), (18), (19), (20): Xaa is A or G
  MOD_RES (21), (22), (23), (24): Xaa is A or G or is absent
TXAPTKLSSLSVLFFXXXXXXXXXLKVYPNMVVRS

SEQ ID NO: 25534 - protein, 36 aa, Artificial Sequence
  Non-cyclic GFR-binding peptide
  MOD_RES (1), (2), (33), (35): Xaa is C or S
XXVSQDLSSLSILFFIGKTPKILKVYPMIVKSXKXS

SEQ ID NO: 25535 - protein, 38 aa, Artificial Sequence
  Non-cyclic GFR-binding peptide
  MOD_RES (5), (6), (38): Xaa is C or S
APASXXVPARLSSLSILFFDAANNVVLKVYPDMVVEAX

SEQ ID NO: 25536 - protein, 35 aa, Artificial Sequence
  Non-cyclic GFR-binding peptide
  MOD_RES (2), (2): Xaa is C or S
  MOD_RES (16), (17), (18), (19), (20): Xaa is A or G
  MOD_RES (21), (22), (23), (24): Xaa is A or G or is absent
EXVPTEESSLSMLFFXXXXXXXXXLKVYPFLQHNK

SEQ ID NO: 25537 - protein, 36 aa, Artificial Sequence
  Non-cyclic GFR-binding peptide
  MOD_RES (3), (4): Xaa is C or S
  MOD_RES (18), (19), (20), (21), (22): Xaa is A or G
  MOD_RES (23), (24), (25), (26): Xaa is A or G or is absent
KPXXAPTKLSSLSVLFFXXXXXXXXXLKVYPNMVVR

SEQ ID NO: 25538 - protein, 38 aa, Artificial Sequence
  Non-cyclic GFR-binding peptide
  MOD_RES (3), (4), (38): Xaa is C or S
  MOD_RES (18), (19), (20), (21), (22): Xaa is A or G
  MOD_RES (23), (24), (25), (26): Xaa is A or G or is absent
KPXXAPTQLSSLSVLFFXXXXXXXXXLKVYPNMVVRAX

SEQ ID NO: 25539 - protein, 37 aa, Artificial Sequence
  Non-cyclic GFR-binding peptide
  MOD_RES (6), (7): Xaa is C or S
GSAGPXXTPTKMSSLSMLFFNDKQQIILKVYPGMVVD

SEQ ID NO: 25540 - protein, 34 aa, Artificial Sequence
  Non-cyclic GFR-binding peptide
  MOD_RES (1), (2): Xaa is C or S
  MOD_RES (16), (17), (18), (19), (20): Xaa is A or G
  MOD_RES (21), (22), (23), (24): Xaa is A or G or is absent
XXAPTQLSSLSVLFFXXXXXXXXXLKVYPNMVVR

SEQ ID NO: 25541 - protein, 35 aa, Artificial Sequence
  Non-cyclic GFR-binding peptide
  MOD_RES (2), (3), (35): Xaa is C or S
PXXAPTKLSSLSVLFFDDSSNVILKVYPNMVVRSX

SEQ ID NO: 25542 - protein, 39 aa, Artificial Sequence
  Non-cyclic GFR-binding peptide
  MOD_RES (5), (6): Xaa is C or S
  MOD_RES (20), (21), (22), (23), (24): Xaa is A or G
  MOD_RES (25), (26), (27), (28): Xaa is A or G or is absent
TPPTXXVPTRLSSLSILFFXXXXXXXXXLKVYPDMVVES

SEQ ID NO: 25543 - protein, 35 aa, Artificial Sequence
  Non-cyclic GFR-binding peptide
  MOD_RES (3), (4), (35): Xaa is C or S
SPXXVPQDLSSLSILFFVGRTPKVLKVYPMVVKSX

SEQ ID NO: 25544 - protein, 38 aa, Artificial Sequence
  Non-cyclic GFR-binding peptide
  MOD_RES (1), (35), (37): Xaa is C or S
  MOD_RES (15), (16), (17), (18), (19): Xaa is A or G
  MOD_RES (20), (21), (22), (23): Xaa is A or G or is absent
XAPTKLSSLSVLFFXXXXXXXXXLKVYPNMVVRSXGXH

SEQ ID NO: 25545 - protein, 37 aa, Artificial Sequence
  Non-cyclic GFR-binding peptide
  MOD_RES (5), (6): Xaa is C or S
SAGPXXTPTKMSSLSMLFFNDKQQIILKVYPGMVVDR

SEQ ID NO: 25546 - protein, 43 aa, Artificial Sequence
  Non-cyclic GFR-binding peptide
  MOD_RES (6), (7), (40), (42): Xaa is C or S
  MOD_RES (21), (22), (23), (24), (25): Xaa is A or G
  MOD_RES (26), (27), (28), (29): Xaa is A or G or is absent
ASASPXXVPQDLSSLSILFFXXXXXXXXXLKVYPMVVKSXKXS

SEQ ID NO: 25547 - protein, 36 aa, Artificial Sequence
  Non-cyclic GFR-binding peptide
  MOD_RES (3), (4): Xaa is C or S
  MOD_RES (18), (19), (20), (21), (22): Xaa is A or G
  MOD_RES (23), (24), (25), (26): Xaa is A or G or is absent
SPXXVSQDLSSLSILFFXXXXXXXXXLKVYPMIVKS

SEQ ID NO: 25548 - protein, 35 aa, Artificial Sequence
  Non-cyclic GFR-binding peptide
  MOD_RES (2), (3): Xaa is C or S
  MOD_RES (17), (18), (19), (20), (21): Xaa is A or G
  MOD_RES (22), (23), (24), (25): Xaa is A or G or is absent
PXXVPQDLSSLSILFFXXXXXXXXXLKVYPMVVKS

SEQ ID NO: 25549 - protein, 35 aa, Artificial Sequence
  Non-cyclic GFR-binding peptide
  MOD_RES (4), (4): Xaa is C or S
KPTXAPTKLSSLSVLFFDDSSNVILKVYPNMVVRS

SEQ ID NO: 25550 - protein, 36 aa, Artificial Sequence
  Non-cyclic GFR-binding peptide
  MOD_RES (1), (2), (34), (36): Xaa is C or S
XXAPTQLSSLSVLFFDDSSNVILKVYPNMVVRAXGX

SEQ ID NO: 25551 - protein, 35 aa, Artificial Sequence
  Non-cyclic GFR-binding peptide
  MOD_RES (1), (35): Xaa is C or S
  MOD_RES (15), (16), (17), (18), (19): Xaa is A or G
  MOD_RES (20), (21), (22), (23): Xaa is A or G or is absent
XVPTRLSSLSILFFXXXXXXXXXLKVYPDMVVESX

SEQ ID NO: 25552 - protein, 37 aa, Artificial Sequence
  Non-cyclic GFR-binding peptide
  MOD_RES (34), (36): Xaa is C or S
  MOD_RES (14), (15), (16), (17), (18): Xaa is A or G
  MOD_RES (19), (20), (21), (22): Xaa is A or G or is absent
VPTELSSLSMLFFXXXXXXXXXLKVYPEMVVEGXGXR

SEQ ID NO: 25553 - protein, 37 aa, Artificial Sequence
  Non-cyclic GFR-binding peptide
  MOD_RES (2), (3), (35), (37): Xaa is C or S
AXXVPTELSSLSMLFFDEYDKVVLKVYPEMVVEGXGX

SEQ ID NO: 25554 - protein, 38 aa, Artificial Sequence
  Non-cyclic GFR-binding peptide
  MOD_RES (5), (6), (38): Xaa is C or S
IPKAXXVPTELSSLSMLFFDEYDKVVLKVYPEMVVEGX

SEQ ID NO: 25555 - protein, 34 aa, Artificial Sequence
  Non-cyclic GFR-binding peptide
  MOD_RES (1), (33): Xaa is C or S
XVPTELSSLSMLFFDEYDKVVLKVYPEMVVEGXG

SEQ ID NO: 25556 - protein, 36 aa, Artificial Sequence
  Non-cyclic GFR-binding peptide
  MOD_RES (1), (2), (33), (35): Xaa is C or S
XXVPQALSSLSILFFVGRKPKVLKVYPMIVRSXKXS

SEQ ID NO: 25557 - protein, 35 aa, Artificial Sequence
  Non-cyclic GFR-binding peptide
  MOD_RES (1), (33), (35): Xaa is C or S
XVPTKLSSLSILFFDKGVVTYLKVYPGMAVSEXGX

SEQ ID NO: 25558 - protein, 37 aa, Artificial Sequence
  Non-cyclic GFR-binding peptide
  MOD_RES (2), (3), (35), (37): Xaa is C or S
AXXVPTKLSSLSILFFDKGVVTYLKVYPGMAVSEXGX

SEQ ID NO: 25559 - protein, 43 aa, Artificial Sequence
  Non-cyclic GFR-binding peptide
  MOD_RES (4), (41), (43): Xaa is C or S
  MOD_RES (20), (21), (22), (23), (24): Xaa is A or G
  MOD_RES (25), (26), (27), (28): Xaa is A or G or is absent
SVKXQPSRVHHSSLSVLFFXXXXXXXXXLKVYPRLEEHLEXAX

SEQ ID NO: 25560 - protein, 36 aa, Artificial Sequence
  Non-cyclic GFR-binding peptide
  MOD_RES (3), (4), (35): Xaa is C or S
APXXVPQALSSLSILFFVGRKPKVLKVYPMIVRSXK

SEQ ID NO: 25561 - protein, 35 aa, Artificial Sequence
  Non-cyclic GFR-binding peptide
  MOD_RES (1), (33), (35): Xaa is C or S
XVPTELSSLSMLFFDEYDKVVLKVYPEMVVEGXGX

SEQ ID NO: 25562 - protein, 32 aa, Artificial Sequence
  Non-cyclic GFR-binding peptide
  MOD_RES (14), (15), (16), (17), (18): Xaa is A or G
  MOD_RES (19), (20), (21), (22): Xaa is A or G or is absent
APTKLSSLSVLFFXXXXXXXXXLKVYPNMVVK

SEQ ID NO: 25563 - protein, 35 aa, Artificial Sequence
  Non-cyclic GFR-binding peptide
  MOD_RES (4), (5): Xaa is C or S
PKAXXVPTELSSLSMLFFDEYDKVVLKVYPEMVVE

SEQ ID NO: 25564 - protein, 35 aa, Artificial Sequence
  Non-cyclic GFR-binding peptide
  MOD_RES (4), (5): Xaa is C or S
PKPXXAPTQLSSLSVLFFDDSSNVILKVYPNMVVR

SEQ ID NO: 25565 - protein, 40 aa, Artificial Sequence
  Non-cyclic GFR-binding peptide
  MOD_RES (3), (4), (38), (40): Xaa is C or S
  MOD_RES (18), (19), (20), (21), (22): Xaa is A or G
  MOD_RES (23), (24), (25), (26): Xaa is A or G or is absent
KAXXVPTKLSSLSILFFXXXXXXXXXLKVYPGMAVSEXGX

SEQ ID NO: 25566 - protein, 36 aa, Artificial Sequence
  Non-cyclic GFR-binding peptide
  MOD_RES (4), (5): Xaa is C or S
PPTXXVPTRLSSLSILFFDSANNVVLKVYPDMVVES

SEQ ID NO: 25567 - protein, 44 aa, Artificial Sequence
  Non-cyclic GFR-binding peptide
  MOD_RES (7), (41), (43): Xaa is C or S
  MOD_RES (21), (22), (23), (24), (25): Xaa is A or G
  MOD_RES (26), (27), (28), (29): Xaa is A or G or is absent
NDEGLEXVPTEESSLSMLFFXXXXXXXXXLKVYPFLQHNKXEXR

SEQ ID NO: 25568 - protein, 37 aa, Artificial Sequence
  Non-cyclic GFR-binding peptide
  MOD_RES (1), (2), (34), (36): Xaa is C or S
XXAPTKLSSLSVLFFDDSSNVILKVYPNMVVRSXGXH

SEQ ID NO: 25569 - protein, 32 aa, Artificial Sequence
  Non-cyclic GFR-binding peptide
  MOD_RES (14), (15), (16), (17), (18): Xaa is A or G
  MOD_RES (19), (20), (21), (22): Xaa is A or G or is absent
APVKTSSLSMLFFXXXXXXXXXLKVYPMIVEE

SEQ ID NO: 25570 - protein, 40 aa, Artificial Sequence
  Non-cyclic GFR-binding peptide
  MOD_RES (6), (7): Xaa is C or S
  MOD_RES (21), (22), (23), (24), (25): Xaa is A or G
  MOD_RES (26), (27), (28), (29): Xaa is A or G or is absent
TVPKPXXAPTQLSSLSVLFFXXXXXXXXXLKVYPNMVVRA

SEQ ID NO: 25571 - protein, 39 aa, Artificial Sequence
  Non-cyclic GFR-binding peptide
  MOD_RES (4), (5), (39): Xaa is C or S
  MOD_RES (19), (20), (21), (22), (23): Xaa is A or G
  MOD_RES (24), (25), (26), (27): Xaa is A or G or is absent
PKPXXAPTKLSSLSVLFFXXXXXXXXXLKVYPNMVVRSX

SEQ ID NO: 25572 - protein, 34 aa, Artificial Sequence
  Non-cyclic GFR-binding peptide
  MOD_RES (1), (34): Xaa is C or S
  MOD_RES (15), (16), (17), (18), (19): Xaa is A or G
  MOD_RES (20), (21), (22), (23): Xaa is A or G or is absent
XVSQDLSSLSILFFXXXXXXXXXLKVYPMIVKSX

SEQ ID NO: 25573 - protein, 40 aa, Artificial Sequence
  Non-cyclic GFR-binding peptide
  MOD_RES (5), (6), (39): Xaa is C or S
  MOD_RES (20), (21), (22), (23), (24): Xaa is A or G
  MOD_RES (25), (26), (27), (28): Xaa is A or G or is absent
SAAPXXVPQALSSLSILFFXXXXXXXXXLKVYPMIVRSXK

SEQ ID NO: 25574 - protein, 36 aa, Artificial Sequence
  Non-cyclic GFR-binding peptide
  MOD_RES (34), (36): Xaa is C or S
  MOD_RES (14), (15), (16), (17), (18): Xaa is A or G
  MOD_RES (19), (20), (21), (22): Xaa is A or G or is absent
APTKLSSLSVLFFXXXXXXXXXLKVYPNMVVRSXGX

SEQ ID NO: 25575 - protein, 34 aa, Artificial Sequence
  Non-cyclic GFR-binding peptide
  MOD_RES (2), (2): Xaa is C or S
  MOD_RES (16), (17), (18), (19), (20): Xaa is A or G
  MOD_RES (21), (22), (23), (24): Xaa is A or G or is absent
EXVPTEESSLSMLFFXXXXXXXXXLKVYPFLQHN

SEQ ID NO: 25576 - protein, 41 aa, Artificial Sequence
  Non-cyclic GFR-binding peptide
  MOD_RES (3), (4), (38), (40): Xaa is C or S
  MOD_RES (18), (19), (20), (21), (22): Xaa is A or G
  MOD_RES (23), (24), (25), (26): Xaa is A or G or is absent
KPXXAPTQLSSLSVLFFXXXXXXXXXLKVYPNMVVRAXGXH

SEQ ID NO: 25577 - protein, 39 aa, Artificial Sequence
  Non-cyclic GFR-binding peptide
  MOD_RES (3), (4), (38): Xaa is C or S
  MOD_RES (18), (19), (20), (21), (22): Xaa is A or G
  MOD_RES (23), (24), (25), (26): Xaa is A or G or is absent
GPXXTPTKMSSLSMLFFXXXXXXXXXLKVYPGMVVDRXG

SEQ ID NO: 25578 - protein, 40 aa, Artificial Sequence
  Non-cyclic GFR-binding peptide
  MOD_RES (5), (6), (39): Xaa is C or S
  MOD_RES (20), (21), (22), (23), (24): Xaa is A or G
  MOD_RES (25), (26), (27), (28): Xaa is A or G or is absent
SASPXXVSQDLSSLSILFFXXXXXXXXXLKVYPMIVKSXK

SEQ ID NO: 25579 - protein, 34 aa, Artificial Sequence
  Non-cyclic GFR-binding peptide
  MOD_RES (33), (33): Xaa is C or S
  MOD_RES (14), (15), (16), (17), (18): Xaa is A or G
  MOD_RES (19), (20), (21), (22): Xaa is A or G or is absent
VPQALSSLSILFFXXXXXXXXXLKVYPMIVRSXK

SEQ ID NO: 25580 - protein, 37 aa, Artificial Sequence
  Non-cyclic GFR-binding peptide
  MOD_RES (5), (6), (37): Xaa is C or S
SAAPXXVPQALSSLSILFFVGRKPKVLKVYPMIVRSX

SEQ ID NO: 25581 - protein, 32 aa, Artificial Sequence
  Non-cyclic GFR-binding peptide
  MOD_RES (14), (15), (16), (17), (18): Xaa is A or G
  MOD_RES (19), (20), (21), (22): Xaa is A or G or is absent
APTKLSSLSVLFFXXXXXXXXXLKVYPNMVVR

SEQ ID NO: 25582 - protein, 33 aa, Artificial Sequence
  Non-cyclic GFR-binding peptide
  MOD_RES (1), (1): Xaa is C or S
  MOD_RES (15), (16), (17), (18), (19): Xaa is A or G
  MOD_RES (20), (21), (22), (23): Xaa is A or G or is absent
XAPTKLSSLSVLFFXXXXXXXXXLKVYPNMVVK

SEQ ID NO: 25583 - protein, 37 aa, Artificial Sequence
  Non-cyclic GFR-binding peptide
  MOD_RES (1), (2), (34), (36): Xaa is C or S
XXVPTRLSSLSILFFDSANNVVLKVYPDMVVESXGXR

SEQ ID NO: 25584 - protein, 33 aa, Artificial Sequence
  Non-cyclic GFR-binding peptide
  MOD_RES (1), (1): Xaa is C or S
  MOD_RES (15), (16), (17), (18), (19): Xaa is A or G
  MOD_RES (20), (21), (22), (23): Xaa is A or G or is absent
XAPTKLSSLSVLFFXXXXXXXXXLKVYPNMVVR

SEQ ID NO: 25585 - protein, 36 aa, Artificial Sequence
  Non-cyclic GFR-binding peptide
  MOD_RES (3), (4), (35): Xaa is C or S
STXXAPVKTSSLSMLFFDNGRVLLLKVYPMIVEEXG

SEQ ID NO: 25586 - protein, 35 aa, Artificial Sequence
  Non-cyclic GFR-binding peptide
  MOD_RES (4), (5): Xaa is C or S
PKPXXAPTKLSSLSVLFFDDSSNVILKVYPNMVVR

SEQ ID NO: 25587 - protein, 41 aa, Artificial Sequence
  Non-cyclic GFR-binding peptide
  MOD_RES (5), (6), (38), (40): Xaa is C or S
VPKPXXAPTQLSSLSVLFFDDSSNVILKVYPNMVVRAXGXH

SEQ ID NO: 25588 - protein, 35 aa, Artificial Sequence
  Non-cyclic GFR-binding peptide
  MOD_RES (33), (35): Xaa is C or S
  MOD_RES (14), (15), (16), (17), (18): Xaa is A or G
  MOD_RES (19), (20), (21), (22): Xaa is A or G or is absent
VPQALSSLSILFFXXXXXXXXXLKVYPMIVRSXKX

SEQ ID NO: 25589 - protein, 39 aa, Artificial Sequence
  Non-cyclic GFR-binding peptide
  MOD_RES (3), (4), (38): Xaa is C or S
  MOD_RES (18), (19), (20), (21), (22): Xaa is A or G
  MOD_RES (23), (24), (25), (26): Xaa is A or G or is absent
KAXXAPTKLSSLSVLFFXXXXXXXXXLKVYPNMVVKAXG

SEQ ID NO: 25590 - protein, 37 aa, Artificial Sequence
  Non-cyclic GFR-binding peptide
  MOD_RES (3), (3): Xaa is C or S
  MOD_RES (19), (20), (21), (22), (23): Xaa is A or G
  MOD_RES (24), (25), (26), (27): Xaa is A or G or is absent
VKXQPSRVHHSSLSVLFFXXXXXXXXXLKVYPRLEEH

SEQ ID NO: 25591 - protein, 33 aa, Artificial Sequence
  Non-cyclic GFR-binding peptide
PSRVHHSSLSVLFFEYVRKKPKLLKVYPRLEEH

SEQ ID NO: 25592 - protein, 38 aa, Artificial Sequence
  Non-cyclic GFR-binding peptide
  MOD_RES (5), (6): Xaa is C or S
VGKAXXVPTKLSSLSVLFFDDMGVPTLKVYPEGMSVAE

SEQ ID NO: 25593 - protein, 38 aa, Artificial Sequence
  Non-cyclic GFR-binding peptide
  MOD_RES (6), (7), (38): Xaa is C or S
ASAAPXXVPQALSSLSILFFVGRKPKVLKVYPMIVRSX

SEQ ID NO: 25594 - protein, 38 aa, Artificial Sequence
  Non-cyclic GFR-binding peptide
  MOD_RES (1), (2), (36), (38): Xaa is C or S
  MOD_RES (16), (17), (18), (19), (20): Xaa is A or G
  MOD_RES (21), (22), (23), (24): Xaa is A or G or is absent
XXVPTRLSSLSILFFXXXXXXXXXLKVYPDMVVESXGX

SEQ ID NO: 25595 - protein, 40 aa, Artificial Sequence
  Non-cyclic GFR-binding peptide
  MOD_RES (4), (5), (39): Xaa is C or S
  MOD_RES (19), (20), (21), (22), (23): Xaa is A or G
  MOD_RES (24), (25), (26), (27): Xaa is A or G or is absent
PPTXXVPTRLSSLSILFFXXXXXXXXXLKVYPDMVVESXG

SEQ ID NO: 25596 - protein, 38 aa, Artificial Sequence
  Non-cyclic GFR-binding peptide
  MOD_RES (3), (4), (37): Xaa is C or S
  MOD_RES (18), (19), (20), (21), (22): Xaa is A or G
  MOD_RES (23), (24), (25), (26): Xaa is A or G or is absent
SPXXVPQDLSSLSILFFXXXXXXXXXLKVYPMVVKSXK

SEQ ID NO: 25597 - protein, 37 aa, Artificial Sequence
  Non-cyclic GFR-binding peptide
  MOD_RES (3), (4), (35), (37): Xaa is C or S
SPXXVSQDLSSLSILFFIGKTPKILKVYPMIVKSXKX

SEQ ID NO: 25598 - protein, 39 aa, Artificial Sequence
  Non-cyclic GFR-binding peptide
  MOD_RES (5), (6), (39): Xaa is C or S
  MOD_RES (20), (21), (22), (23), (24): Xaa is A or G
  MOD_RES (25), (26), (27), (28): Xaa is A or G or is absent
SASPXXVSQDLSSLSILFFXXXXXXXXXLKVYPMIVKSX

SEQ ID NO: 25599 - protein, 44 aa, Artificial Sequence
  Non-cyclic GFR-binding peptide
  MOD_RES (7), (41), (43): Xaa is C or S
  MOD_RES (21), (22), (23), (24), (25): Xaa is A or G
  MOD_RES (26), (27), (28), (29): Xaa is A or G or is absent
HVTKPTXAPTKLSSLSVLFFXXXXXXXXXLKVYPNMVVRSXGXH

SEQ ID NO: 25600 - protein, 39 aa, Artificial Sequence
  Non-cyclic GFR-binding peptide
  MOD_RES (3), (4), (36), (38): Xaa is C or S
PTXXVPTRLSSLSILFFDSANNVVLKVYPDMVVESXGXR

SEQ ID NO: 25601 - protein, 36 aa, Artificial Sequence
  Non-cyclic GFR-binding peptide
  MOD_RES (36), (36): Xaa is C or S
  MOD_RES (15), (16), (17), (18), (19): Xaa is A or G
  MOD_RES (20), (21), (22), (23): Xaa is A or G or is absent
PSRVHHSSLSVLFFXXXXXXXXXLKVYPRLEEHLEX

SEQ ID NO: 25602 - protein, 39 aa, Artificial Sequence
  Non-cyclic GFR-binding peptide
  MOD_RES (6), (7), (38): Xaa is C or S
ASAAPXXVPQALSSLSILFFVGRKPKVLKVYPMIVRSXK

SEQ ID NO: 25603 - protein, 40 aa, Artificial Sequence
  Non-cyclic GFR-binding peptide
  MOD_RES (6), (7), (39): Xaa is C or S
TVPKPXXAPTQLSSLSVLFFDDSSNVILKVYPNMVVRAXG

SEQ ID NO: 25604 - protein, 37 aa, Artificial Sequence
  Non-cyclic GFR-binding peptide
  MOD_RES (1), (35), (37): Xaa is C or S
  MOD_RES (15), (16), (17), (18), (19): Xaa is A or G
  MOD_RES (20), (21), (22), (23): Xaa is A or G or is absent
XVPTEESSLSMLFFXXXXXXXXXLKVYPFLQHNKXEX

SEQ ID NO: 25605 - protein, 39 aa, Artificial Sequence
  Non-cyclic GFR-binding peptide
  MOD_RES (7), (7): Xaa is C or S
  MOD_RES (21), (22), (23), (24), (25): Xaa is A or G
  MOD_RES (26), (27), (28), (29): Xaa is A or G or is absent
HVTKPTXAPTKLSSLSVLFFXXXXXXXXXLKVYPNMVVR

SEQ ID NO: 25606 - protein, 38 aa, Artificial Sequence
  Non-cyclic GFR-binding peptide
  MOD_RES (2), (36), (38): Xaa is C or S
  MOD_RES (16), (17), (18), (19), (20): Xaa is A or G
  MOD_RES (21), (22), (23), (24): Xaa is A or G or is absent
EXVPTEESSLSMLFFXXXXXXXXXLKVYPFLQHNKXEX

SEQ ID NO: 25607 - protein, 35 aa, Artificial Sequence
  Non-cyclic GFR-binding peptide
  MOD_RES (1), (33), (35): Xaa is C or S
XVPARLSSLSILFFDAANNVVLKVYPDMVVEAXGX

SEQ ID NO: 25608 - protein, 32 aa, Artificial Sequence
  Non-cyclic GFR-binding peptide
VPTKLSSLSVLFFDDMGVPTLKVYPEGMSVAE

SEQ ID NO: 25609 - protein, 37 aa, Artificial Sequence
  Non-cyclic GFR-binding peptide
  MOD_RES (5), (5): Xaa is C or S
EGLEXVPTEESSLSMLFFRIKPHQGQHLKVYPFLQHN

SEQ ID NO: 25610 - protein, 41 aa, Artificial Sequence
  Non-cyclic GFR-binding peptide
  MOD_RES (7), (39), (41): Xaa is C or S
HVTKPTXAPTKLSSLSVLFFDDSSNVILKVYPNMVVRSXGX

SEQ ID NO: 25611 - protein, 41 aa, Artificial Sequence
  Non-cyclic GFR-binding peptide
  MOD_RES (6), (7), (39), (41): Xaa is C or S
HVPKPXXAPTKLSSLSVLFFDDSSNVILKVYPNMVVRSXGX

SEQ ID NO: 25612 - protein, 33 aa, Artificial Sequence
  Non-cyclic GFR-binding peptide
  MOD_RES (1), (1): Xaa is C or S
  MOD_RES (15), (16), (17), (18), (19): Xaa is A or G
  MOD_RES (20), (21), (22), (23): Xaa is A or G or is absent
XAPVKTSSLSMLFFXXXXXXXXXLKVYPMIVEE

SEQ ID NO: 25613 - protein, 36 aa, Artificial Sequence
  Non-cyclic GFR-binding peptide
  MOD_RES (2), (3), (35): Xaa is C or S
PXXAPTQLSSLSVLFFDDSSNVILKVYPNMVVRAXG

SEQ ID NO: 25614 - protein, 33 aa, Artificial Sequence
  Non-cyclic GFR-binding peptide
  MOD_RES (14), (15), (16), (17), (18): Xaa is A or G
  MOD_RES (19), (20), (21), (22): Xaa is A or G or is absent
SRVHHSSLSVLFFXXXXXXXXXLKVYPRLEEHL

SEQ ID NO: 25615 - protein, 42 aa, Artificial Sequence
  Non-cyclic GFR-binding peptide
  MOD_RES (4), (5), (39), (41): Xaa is C or S
  MOD_RES (19), (20), (21), (22), (23): Xaa is A or G
  MOD_RES (24), (25), (26), (27): Xaa is A or G or is absent
PKAXXAPTKLSSLSVLFFXXXXXXXXXLKVYPNMVVKAXGXH

SEQ ID NO: 25616 - protein, 39 aa, Artificial Sequence
  Non-cyclic GFR-binding peptide
  MOD_RES (2), (3), (37), (39): Xaa is C or S
  MOD_RES (17), (18), (19), (20), (21): Xaa is A or G
  MOD_RES (22), (23), (24), (25): Xaa is A or G or is absent
AXXVPTELSSLSMLFFXXXXXXXXXLKVYPEMVVEGXGX

SEQ ID NO: 25617 - protein, 34 aa, Artificial Sequence
  Non-cyclic GFR-binding peptide
  MOD_RES (3), (4): Xaa is C or S
KAXXAPTKLSSLSVLFFDSSNNVILKVYPNMVVK

SEQ ID NO: 25618 - protein, 42 aa, Artificial Sequence
  Non-cyclic GFR-binding peptide
  MOD_RES (6), (7), (41): Xaa is C or S
  MOD_RES (21), (22), (23), (24), (25): Xaa is A or G
  MOD_RES (26), (27), (28), (29): Xaa is A or G or is absent
KASKAXXVPTKLSSLSILFFXXXXXXXXXLKVYPGMAVSEXG

SEQ ID NO: 25619 - protein, 37 aa, Artificial Sequence
  Non-cyclic GFR-binding peptide
  MOD_RES (2), (3): Xaa is C or S
  MOD_RES (17), (18), (19), (20), (21): Xaa is A or G
  MOD_RES (22), (23), (24), (25): Xaa is A or G or is absent
AXXVPTKLSSLSVLFFXXXXXXXXXLKVYPEGMSVAE

SEQ ID NO: 25620 - protein, 43 aa, Artificial Sequence
  Non-cyclic GFR-binding peptide
  MOD_RES (6), (7), (40), (42): Xaa is C or S
  MOD_RES (21), (22), (23), (24), (25): Xaa is A or G
  MOD_RES (26), (27), (28), (29): Xaa is A or G or is absent
ASASPXXVSQDLSSLSILFFXXXXXXXXXLKVYPMIVKSXKXS

SEQ ID NO: 25621 - protein, 36 aa, Artificial Sequence
  Non-cyclic GFR-binding peptide
  MOD_RES (2), (3), (35): Xaa is C or S
SXXVPARLSSLSILFFDAANNVVLKVYPDMVVEAXG

SEQ ID NO: 25622 - protein, 41 aa, Artificial Sequence
  Non-cyclic GFR-binding peptide
  MOD_RES (5), (39), (41): Xaa is C or S
EGLEXVPTEESSLSMLFFRIKPHQGQHLKVYPFLQHNKXEX

SEQ ID NO: 25623 - protein, 37 aa, Artificial Sequence
  Non-cyclic GFR-binding peptide
  MOD_RES (2), (3), (37): Xaa is C or S
  MOD_RES (17), (18), (19), (20), (21): Xaa is A or G
  MOD_RES (22), (23), (24), (25): Xaa is A or G or is absent
AXXVPTKLSSLSILFFXXXXXXXXXLKVYPGMAVSEX

SEQ ID NO: 25624 - protein, 38 aa, Artificial Sequence
  Non-cyclic GFR-binding peptide
  MOD_RES (3), (4), (37): Xaa is C or S
  MOD_RES (18), (19), (20), (21), (22): Xaa is A or G
  MOD_RES (23), (24), (25), (26): Xaa is A or G or is absent
STXXAPVKTSSLSMLFFXXXXXXXXXLKVYPMIVEEXG

SEQ ID NO: 25625 - protein, 43 aa, Artificial Sequence
  Non-cyclic GFR-binding peptide
  MOD_RES (5), (6), (40), (42): Xaa is C or S
  MOD_RES (20), (21), (22), (23), (24): Xaa is A or G
  MOD_RES (25), (26), (27), (28): Xaa is A or G or is absent
ASKAXXVPTKLSSLSILFFXXXXXXXXXLKVYPGMAVSEXGXR

SEQ ID NO: 25626 - protein, 37 aa, Artificial Sequence
  Non-cyclic GFR-binding peptide
  MOD_RES (1), (35), (37): Xaa is C or S
  MOD_RES (15), (16), (17), (18), (19): Xaa is A or G
  MOD_RES (20), (21), (22), (23): Xaa is A or G or is absent
XVPTKLSSLSILFFXXXXXXXXXLKVYPGMAVSEXGX

SEQ ID NO: 25627 - protein, 33 aa, Artificial Sequence
  Non-cyclic GFR-binding peptide
  MOD_RES (1), (2), (33): Xaa is C or S
XXVPQDLSSLSILFFVGRTPKVLKVYPMVVKSX

SEQ ID NO: 25628 - protein, 42 aa, Artificial Sequence
  Non-cyclic GFR-binding peptide
  MOD_RES (6), (7), (39), (41): Xaa is C or S
AVPKAXXAPTKLSSLSVLFFDSSNNVILKVYPNMVVKAXGXH

SEQ ID NO: 25629 - protein, 40 aa, Artificial Sequence
  Non-cyclic GFR-binding peptide
  MOD_RES (7), (39): Xaa is C or S
HVTKPTXAPTKLSSLSVLFFDDSSNVILKVYPNMVVRSXG

SEQ ID NO: 25630 - protein, 39 aa, Artificial Sequence
  Non-cyclic GFR-binding peptide
  MOD_RES (6), (7): Xaa is C or S
  MOD_RES (21), (22), (23), (24), (25): Xaa is A or G
  MOD_RES (26), (27), (28), (29): Xaa is A or G or is absent
ASAAPXXVPQALSSLSILFFXXXXXXXXXLKVYPMIVRS

SEQ ID NO: 25631 - protein, 36 aa, Artificial Sequence
  Non-cyclic GFR-binding peptide
  MOD_RES (1), (2), (34), (36): Xaa is C or S
XXVPTRLSSLSILFFDSANNVVLKVYPDMVVESXGX

SEQ ID NO: 25632 - protein, 38 aa, Artificial Sequence
  Non-cyclic GFR-binding peptide
  MOD_RES (5), (6), (38): Xaa is C or S
ASKAXXVPTKLSSLSILFFDKGVVTYLKVYPGMAVSEX

SEQ ID NO: 25633 - protein, 40 aa, Artificial Sequence
  Non-cyclic GFR-binding peptide
  MOD_RES (4), (4): Xaa is C or S
  MOD_RES (20), (21), (22), (23), (24): Xaa is A or G
  MOD_RES (25), (26), (27), (28): Xaa is A or G or is absent
SVKXQPSRVHHSSLSVLFFXXXXXXXXXLKVYPRLEEHLE

SEQ ID NO: 25634 - protein, 40 aa, Artificial Sequence
  Non-cyclic GFR-binding peptide
  MOD_RES (6), (7), (39): Xaa is C or S
STPPTXXVPTRLSSLSILFFDSANNVVLKVYPDMVVESXG

SEQ ID NO: 25635 - protein, 37 aa, Artificial Sequence
  Non-cyclic GFR-binding peptide
  MOD_RES (34), (36): Xaa is C or S
  MOD_RES (14), (15), (16), (17), (18): Xaa is A or G
  MOD_RES (19), (20), (21), (22): Xaa is A or G or is absent
VPTEESSLSMLFFXXXXXXXXXLKVYPFLQHNKXEXR

SEQ ID NO: 25636 - protein, 41 aa, Artificial Sequence
  Non-cyclic GFR-binding peptide
  MOD_RES (2), (39), (41): Xaa is C or S
KXQPSRVHHSSLSVLFFEYVRKKPKLLKVYPRLEEHLEXAX

SEQ ID NO: 25637 - protein, 40 aa, Artificial Sequence
  Non-cyclic GFR-binding peptide
  MOD_RES (6), (7), (39): Xaa is C or S
SIPKAXXVPTELSSLSMLFFDEYDKVVLKVYPEMVVEGXG

SEQ ID NO: 25638 - protein, 37 aa, Artificial Sequence
  Non-cyclic GFR-binding peptide
  MOD_RES (4), (5): Xaa is C or S
  MOD_RES (19), (20), (21), (22), (23): Xaa is A or G
  MOD_RES (24), (25), (26), (27): Xaa is A or G or is absent
PSTXXAPVKTSSLSMLFFXXXXXXXXXLKVYPMIVEE

SEQ ID NO: 25639 - protein, 32 aa, Artificial Sequence
  Non-cyclic GFR-binding peptide
  MOD_RES (14), (15), (16), (17), (18): Xaa is A or G
  MOD_RES (19), (20), (21), (22): Xaa is A or G or is absent
TPTKMSSLSMLFFXXXXXXXXXLKVYPGMVVD

SEQ ID NO: 25640 - protein, 41 aa, Artificial Sequence
  Non-cyclic GFR-binding peptide
  MOD_RES (5), (5): Xaa is C or S
SSVKXQPSRVHHSSLSVLFFEYVRKKPKLLKVYPRLEEHLE

SEQ ID NO: 25641 - protein, 43 aa, Artificial Sequence
  Non-cyclic GFR-binding peptide
  MOD_RES (6), (7), (41), (43): Xaa is C or S
  MOD_RES (21), (22), (23), (24), (25): Xaa is A or G
  MOD_RES (26), (27), (28), (29): Xaa is A or G or is absent
HVPKPXXAPTKLSSLSVLFFXXXXXXXXXLKVYPNMVVRSXGX

SEQ ID NO: 25642 - protein, 43 aa, Artificial Sequence
  Non-cyclic GFR-binding peptide
  MOD_RES (6), (7), (41), (43): Xaa is C or S
  MOD_RES (21), (22), (23), (24), (25): Xaa is A or G
  MOD_RES (26), (27), (28), (29): Xaa is A or G or is absent
KASKAXXVPTKLSSLSILFFXXXXXXXXXLKVYPGMAVSEXGX

SEQ ID NO: 25643 - protein, 44 aa, Artificial Sequence
  Non-cyclic GFR-binding peptide
  MOD_RES (4), (41), (43): Xaa is C or S
SVKXQPSRVHHSSLSVLFFEYVRKKPKLLKVYPRLEEHLEXAXA

SEQ ID NO: 25644 - protein, 37 aa, Artificial Sequence
  Non-cyclic GFR-binding peptide
  MOD_RES (1), (35), (37): Xaa is C or S
  MOD_RES (15), (16), (17), (18), (19): Xaa is A or G
  MOD_RES (20), (21), (22), (23): Xaa is A or G or is absent
XVPARLSSLSILFFXXXXXXXXXLKVYPDMVVEAXGX

SEQ ID NO: 25645 - protein, 42 aa, Artificial Sequence
  Non-cyclic GFR-binding peptide
  MOD_RES (6), (7), (39), (41): Xaa is C or S
TVPKPXXAPTQLSSLSVLFFDDSSNVILKVYPNMVVRAXGXH

SEQ ID NO: 25646 - protein, 40 aa, Artificial Sequence
  Non-cyclic GFR-binding peptide
  MOD_RES (4), (38), (40): Xaa is C or S
  MOD_RES (18), (19), (20), (21), (22): Xaa is A or G
  MOD_RES (23), (24), (25), (26): Xaa is A or G or is absent
KPTXAPTKLSSLSVLFFXXXXXXXXXLKVYPNMVVRSXGX

SEQ ID NO: 25647 - protein, 40 aa, Artificial Sequence
  Non-cyclic GFR-binding peptide
  MOD_RES (6), (7), (39): Xaa is C or S
HVPKPXXAPTKLSSLSVLFFDDSSNVILKVYPNMVVRSXG

SEQ ID NO: 25648 - protein, 40 aa, Artificial Sequence
  Non-cyclic GFR-binding peptide
  MOD_RES (5), (6), (37), (39): Xaa is C or S
SAAPXXVPQALSSLSILFFVGRKPKVLKVYPMIVRSXKXS

SEQ ID NO: 25649 - protein, 37 aa, Artificial Sequence
  Non-cyclic GFR-binding peptide
  MOD_RES (1), (2), (34), (36): Xaa is C or S
XXVPTKLSSLSILFFDKGVVTYLKVYPGMAVSEXGXR

SEQ ID NO: 25650 - protein, 37 aa, Artificial Sequence
  Non-cyclic GFR-binding peptide
  MOD_RES (2), (2): Xaa is C or S
KXQPSRVHHSSLSVLFFEYVRKKPKLLKVYPRLEEHL

SEQ ID NO: 25651 - protein, 43 aa, Artificial Sequence
  Non-cyclic GFR-binding peptide
  MOD_RES (3), (40), (42): Xaa is C or S
  MOD_RES (19), (20), (21), (22), (23): Xaa is A or G
  MOD_RES (24), (25), (26), (27): Xaa is A or G or is absent
VKXQPSRVHHSSLSVLFFXXXXXXXXXLKVYPRLEEHLEXAXA

SEQ ID NO: 25652 - protein, 38 aa, Artificial Sequence
  Non-cyclic GFR-binding peptide
  MOD_RES (1), (35), (37): Xaa is C or S
  MOD_RES (15), (16), (17), (18), (19): Xaa is A or G
  MOD_RES (20), (21), (22), (23): Xaa is A or G or is absent
XVPARLSSLSILFFXXXXXXXXXLKVYPDMVVEAXGXR

SEQ ID NO: 25653 - protein, 40 aa, Artificial Sequence
  Non-cyclic GFR-binding peptide
  MOD_RES (6), (7), (40): Xaa is C or S
  MOD_RES (21), (22), (23), (24), (25): Xaa is A or G
  MOD_RES (26), (27), (28), (29): Xaa is A or G or is absent
ASASPXXVPQDLSSLSILFFXXXXXXXXXLKVYPMVVKSX

SEQ ID NO: 25654 - protein, 37 aa, Artificial Sequence
  Non-cyclic GFR-binding peptide
  MOD_RES (2), (3), (37): Xaa is C or S
  MOD_RES (17), (18), (19), (20), (21): Xaa is A or G
  MOD_RES (22), (23), (24), (25): Xaa is A or G or is absent
AXXAPTKLSSLSVLFFXXXXXXXXXLKVYPNMVVKAX

SEQ ID NO: 25655 - protein, 34 aa, Artificial Sequence
  Non-cyclic GFR-binding peptide
  MOD_RES (2), (3): Xaa is C or S
SXXVPARLSSLSILFFDAANNVVLKVYPDMVVEA

SEQ ID NO: 25656 - protein, 41 aa, Artificial Sequence
  Non-cyclic GFR-binding peptide
  MOD_RES (3), (4), (38), (40): Xaa is C or S
  MOD_RES (18), (19), (20), (21), (22): Xaa is A or G
  MOD_RES (23), (24), (25), (26): Xaa is A or G or is absent
GPXXTPTKMSSLSMLFFXXXXXXXXXLKVYPGMVVDRXGXS

SEQ ID NO: 25657 - protein, 37 aa, Artificial Sequence
  Non-cyclic GFR-binding peptide
  MOD_RES (2), (3), (35), (37): Xaa is C or S
AXXAPTKLSSLSVLFFDSSNNVILKVYPNMVVKAXGX

SEQ ID NO: 25658 - protein, 35 aa, Artificial Sequence
  Non-cyclic GFR-binding peptide
PSRVHHSSLSVLFFEYVRKKPKLLKVYPRLEEHLE

SEQ ID NO: 25659 - protein, 42 aa, Artificial Sequence
  Non-cyclic GFR-binding peptide
  MOD_RES (6), (7), (39), (41): Xaa is C or S
KASKAXXVPTKLSSLSILFFDKGVVTYLKVYPGMAVSEXGXR

SEQ ID NO: 25660 - protein, 38 aa, Artificial Sequence
  Non-cyclic GFR-binding peptide
  MOD_RES (2), (3), (37): Xaa is C or S
  MOD_RES (17), (18), (19), (20), (21): Xaa is A or G
  MOD_RES (22), (23), (24), (25): Xaa is A or G or is absent
AXXVPTKLSSLSILFFXXXXXXXXXLKVYPGMAVSEXG

SEQ ID NO: 25661 - protein, 37 aa, Artificial Sequence
  Non-cyclic GFR-binding peptide
  MOD_RES (4), (4): Xaa is C or S
  MOD_RES (18), (19), (20), (21), (22): Xaa is A or G
  MOD_RES (23), (24), (25), (26): Xaa is A or G or is absent
KPTXAPTKLSSLSVLFFXXXXXXXXXLKVYPNMVVRS

SEQ ID NO: 25662 - protein, 39 aa, Artificial Sequence
  Non-cyclic GFR-binding peptide
  MOD_RES (2), (3), (37), (39): Xaa is C or S
  MOD_RES (17), (18), (19), (20), (21): Xaa is A or G
  MOD_RES (22), (23), (24), (25): Xaa is A or G or is absent
TXXVPTRLSSLSILFFXXXXXXXXXLKVYPDMVVESXGX

SEQ ID NO: 25663 - protein, 37 aa, Artificial Sequence
  Non-cyclic GFR-binding peptide
  MOD_RES (1), (35), (37): Xaa is C or S
  MOD_RES (15), (16), (17), (18), (19): Xaa is A or G
  MOD_RES (20), (21), (22), (23): Xaa is A or G or is absent
XAPTKLSSLSVLFFXXXXXXXXXLKVYPNMVVKAXGX

SEQ ID NO: 25664 - protein, 37 aa, Artificial Sequence
  Non-cyclic GFR-binding peptide
  MOD_RES (5), (6): Xaa is C or S
VPKPXXAPTKLSSLSVLFFDDSSNVILKVYPNMVVRS

SEQ ID NO: 25665 - protein, 39 aa, Artificial Sequence
  Non-cyclic GFR-binding peptide
  MOD_RES (5), (39): Xaa is C or S
  MOD_RES (19), (20), (21), (22), (23): Xaa is A or G
  MOD_RES (24), (25), (26), (27): Xaa is A or G or is absent
EGLEXVPTEESSLSMLFFXXXXXXXXXLKVYPFLQHNKX

SEQ ID NO: 25666 - protein, 34 aa, Artificial Sequence
  Non-cyclic GFR-binding peptide
  MOD_RES (1), (2): Xaa is C or S
  MOD_RES (16), (17), (18), (19), (20): Xaa is A or G
  MOD_RES (21), (22), (23), (24): Xaa is A or G or is absent
XXVPTELSSLSMLFFXXXXXXXXXLKVYPEMVVE

SEQ ID NO: 25667 - protein, 39 aa, Artificial Sequence
  Non-cyclic GFR-binding peptide
  MOD_RES (4), (5), (38): Xaa is C or S
GKAXXVPTKLSSLSVLFFDDMGVPTLKVYPEGMSVAEXG

SEQ ID NO: 25668 - protein, 40 aa, Artificial Sequence
  Non-cyclic GFR-binding peptide
  MOD_RES (7), (7): Xaa is C or S
  MOD_RES (21), (22), (23), (24), (25): Xaa is A or G
  MOD_RES (26), (27), (28), (29): Xaa is A or G or is absent
NDEGLEXVPTEESSLSMLFFXXXXXXXXXLKVYPFLQHNK

SEQ ID NO: 25669 - protein, 42 aa, Artificial Sequence
  Non-cyclic GFR-binding peptide
  MOD_RES (4), (41): Xaa is C or S
  MOD_RES (20), (21), (22), (23), (24): Xaa is A or G
  MOD_RES (25), (26), (27), (28): Xaa is A or G or is absent
SVKXQPSRVHHSSLSVLFFXXXXXXXXXLKVYPRLEEHLEXA

SEQ ID NO: 25670 - protein, 37 aa, Artificial Sequence
  Non-cyclic GFR-binding peptide
  MOD_RES (1), (2), (35), (37): Xaa is C or S
XXVPTKLSSLSVLFFDDMGVPTLKVYPEGMSVAEXGX

SEQ ID NO: 25671 - protein, 39 aa, Artificial Sequence
  Non-cyclic GFR-binding peptide
  MOD_RES (3), (4), (39): Xaa is C or S
  MOD_RES (18), (19), (20), (21), (22): Xaa is A or G
  MOD_RES (23), (24), (25), (26): Xaa is A or G or is absent
KAXXVPTKLSSLSVLFFXXXXXXXXXLKVYPEGMSVAEX

SEQ ID NO: 25672 - protein, 39 aa, Artificial Sequence
  Non-cyclic GFR-binding peptide
  MOD_RES (2), (3), (37), (39): Xaa is C or S
  MOD_RES (17), (18), (19), (20), (21): Xaa is A or G
  MOD_RES (22), (23), (24), (25): Xaa is A or G or is absent
SXXVPARLSSLSILFFXXXXXXXXXLKVYPDMVVEAXGX

SEQ ID NO: 25673 - protein, 32 aa, Artificial Sequence
  Non-cyclic GFR-binding peptide
  MOD_RES (1), (2): Xaa is C or S
XXAPTKLSSLSVLFFDSSNNVILKVYPNMVVK

SEQ ID NO: 25674 - protein, 34 aa, Artificial Sequence
  Non-cyclic GFR-binding peptide
  MOD_RES (1), (2): Xaa is C or S
  MOD_RES (16), (17), (18), (19), (20): Xaa is A or G
  MOD_RES (21), (22), (23), (24): Xaa is A or G or is absent
XXVPQDLSSLSILFFXXXXXXXXXLKVYPMVVKS

SEQ ID NO: 25675 - protein, 36 aa, Artificial Sequence
  Non-cyclic GFR-binding peptide
  MOD_RES (5), (6): Xaa is C or S
VPKPXXAPTKLSSLSVLFFDDSSNVILKVYPNMVVR

SEQ ID NO: 25676 - protein, 35 aa, Artificial Sequence
  Non-cyclic GFR-binding peptide
  MOD_RES (34), (34): Xaa is C or S
  MOD_RES (14), (15), (16), (17), (18): Xaa is A or G
  MOD_RES (19), (20), (21), (22): Xaa is A or G or is absent
VPTEESSLSMLFFXXXXXXXXXLKVYPFLQHNKXE

SEQ ID NO: 25677 - protein, 39 aa, Artificial Sequence
  Non-cyclic GFR-binding peptide
  MOD_RES (4), (5), (38): Xaa is C or S
  MOD_RES (19), (20), (21), (22), (23): Xaa is A or G
  MOD_RES (24), (25), (26), (27): Xaa is A or G or is absent
AAPXXVPQALSSLSILFFXXXXXXXXXLKVYPMIVRSXK

SEQ ID NO: 25678 - protein, 38 aa, Artificial Sequence
  Non-cyclic GFR-binding peptide
  MOD_RES (6), (7): Xaa is C or S
STPPTXXVPTRLSSLSILFFDSANNVVLKVYPDMVVES

SEQ ID NO: 25679 - protein, 35 aa, Artificial Sequence
  Non-cyclic GFR-binding peptide
  MOD_RES (3), (3): Xaa is C or S
  MOD_RES (17), (18), (19), (20), (21): Xaa is A or G
  MOD_RES (22), (23), (24), (25): Xaa is A or G or is absent
LEXVPTEESSLSMLFFXXXXXXXXXLKVYPFLQHN

SEQ ID NO: 25680 - protein, 39 aa, Artificial Sequence
  Non-cyclic GFR-binding peptide
  MOD_RES (6), (7): Xaa is C or S
  MOD_RES (21), (22), (23), (24), (25): Xaa is A or G
  MOD_RES (26), (27), (28), (29): Xaa is A or G or is absent
STPPTXXVPTRLSSLSILFFXXXXXXXXXLKVYPDMVVE

SEQ ID NO: 25681 - protein, 43 aa, Artificial Sequence
  Non-cyclic GFR-binding peptide
  MOD_RES (5), (42): Xaa is C or S
  MOD_RES (21), (22), (23), (24), (25): Xaa is A or G
  MOD_RES (26), (27), (28), (29): Xaa is A or G or is absent
SSVKXQPSRVHHSSLSVLFFXXXXXXXXXLKVYPRLEEHLEXA

SEQ ID NO: 25682 - protein, 40 aa, Artificial Sequence
  Non-cyclic GFR-binding peptide
  MOD_RES (4), (5), (37), (39): Xaa is C or S
PASXXVPARLSSLSILFFDAANNVVLKVYPDMVVEAXGXR

SEQ ID NO: 25683 - protein, 44 aa, Artificial Sequence
  Non-cyclic GFR-binding peptide
  MOD_RES (6), (7), (41), (43): Xaa is C or S
  MOD_RES (21), (22), (23), (24), (25): Xaa is A or G
  MOD_RES (26), (27), (28), (29): Xaa is A or G or is absent
AAPASXXVPARLSSLSILFFXXXXXXXXXLKVYPDMVVEAXGXR

SEQ ID NO: 25684 - protein, 35 aa, Artificial Sequence
  Non-cyclic GFR-binding peptide
  MOD_RES (2), (3), (35): Xaa is C or S
SXXVPARLSSLSILFFDAANNVVLKVYPDMVVEAX

SEQ ID NO: 25685 - protein, 37 aa, Artificial Sequence
  Non-cyclic GFR-binding peptide
  MOD_RES (3), (37): Xaa is C or S
  MOD_RES (17), (18), (19), (20), (21): Xaa is A or G
  MOD_RES (22), (23), (24), (25): Xaa is A or G or is absent
PTXAPTKLSSLSVLFFXXXXXXXXXLKVYPNMVVRSX

SEQ ID NO: 25686 - protein, 38 aa, Artificial Sequence
  Non-cyclic GFR-binding peptide
  MOD_RES (6), (6): Xaa is C or S
DEGLEXVPTEESSLSMLFFRIKPHQGQHLKVYPFLQHN

SEQ ID NO: 25687 - protein, 43 aa, Artificial Sequence
  Non-cyclic GFR-binding peptide
  MOD_RES (5), (6), (40), (42): Xaa is C or S
  MOD_RES (20), (21), (22), (23), (24): Xaa is A or G
  MOD_RES (25), (26), (27), (28): Xaa is A or G or is absent
VPKAXXAPTKLSSLSVLFFXXXXXXXXXLKVYPNMVVKAXGXH

SEQ ID NO: 25688 - protein, 40 aa, Artificial Sequence
  Non-cyclic GFR-binding peptide
  MOD_RES (5), (6), (38), (40): Xaa is C or S
VPKPXXAPTKLSSLSVLFFDDSSNVILKVYPNMVVRSXGX

SEQ ID NO: 25689 - protein, 36 aa, Artificial Sequence
  Non-cyclic GFR-binding peptide
  MOD_RES (5), (6): Xaa is C or S
SAGPXXTPTKMSSLSMLFFNDKQQIILKVYPGMVVD

SEQ ID NO: 25690 - protein, 31 aa, Artificial Sequence
  Non-cyclic GFR-binding peptide
  MOD_RES (1), (1): Xaa is C or S
XAPTQLSSLSVLFFDDSSNVILKVYPNMVVR

SEQ ID NO: 25691 - protein, 37 aa, Artificial Sequence
  Non-cyclic GFR-binding peptide
  MOD_RES (3), (4), (36): Xaa is C or S
KAXXVPTELSSLSMLFFDEYDKVVLKVYPEMVVEGXG

SEQ ID NO: 25692 - protein, 39 aa, Artificial Sequence
  Non-cyclic GFR-binding peptide
  MOD_RES (4), (5), (37), (39): Xaa is C or S
PKPXXAPTQLSSLSVLFFDDSSNVILKVYPNMVVRAXGX

SEQ ID NO: 25693 - protein, 35 aa, Artificial Sequence
  Non-cyclic GFR-binding peptide
  MOD_RES (3), (4): Xaa is C or S
KPXXAPTKLSSLSVLFFDDSSNVILKVYPNMVVRS

SEQ ID NO: 25694 - protein, 42 aa, Artificial Sequence
  Non-cyclic GFR-binding peptide
  MOD_RES (6), (7), (40), (42): Xaa is C or S
KVGKAXXVPTKLSSLSVLFFDDMGVPTLKVYPEGMSVAEXGX

SEQ ID NO: 25695 - protein, 33 aa, Artificial Sequence
  Non-cyclic GFR-binding peptide
  MOD_RES (1), (1): Xaa is C or S
  MOD_RES (15), (16), (17), (18), (19): Xaa is A or G
  MOD_RES (20), (21), (22), (23): Xaa is A or G or is absent
XTPTKMSSLSMLFFXXXXXXXXXLKVYPGMVVD

SEQ ID NO: 25696 - protein, 35 aa, Artificial Sequence
  Non-cyclic GFR-binding peptide
  MOD_RES (1), (2), (34): Xaa is C or S
XXVPTRLSSLSILFFDSANNVVLKVYPDMVVESXG

SEQ ID NO: 25697 - protein, 36 aa, Artificial Sequence
  Non-cyclic GFR-binding peptide
  MOD_RES (2), (3): Xaa is C or S
  MOD_RES (17), (18), (19), (20), (21): Xaa is A or G
  MOD_RES (22), (23), (24), (25): Xaa is A or G or is absent
PXXAPTQLSSLSVLFFXXXXXXXXXLKVYPNMVVRA

SEQ ID NO: 25698 - protein, 38 aa, Artificial Sequence
  Non-cyclic GFR-binding peptide
  MOD_RES (6), (7): Xaa is C or S
TVPKPXXAPTQLSSLSVLFFDDSSNVILKVYPNMVVRA

SEQ ID NO: 25699 - protein, 36 aa, Artificial Sequence
  Non-cyclic GFR-binding peptide
  MOD_RES (3), (4): Xaa is C or S
  MOD_RES (18), (19), (20), (21), (22): Xaa is A or G
  MOD_RES (23), (24), (25), (26): Xaa is A or G or is absent
ASXXVPARLSSLSILFFXXXXXXXXXLKVYPDMVVE

SEQ ID NO: 25700 - protein, 33 aa, Artificial Sequence
  Non-cyclic GFR-binding peptide
  MOD_RES (2), (3): Xaa is C or S
PXXAPTQLSSLSVLFFDDSSNVILKVYPNMVVR

SEQ ID NO: 25701 - protein, 39 aa, Artificial Sequence
  Non-cyclic GFR-binding peptide
  MOD_RES (1), (2), (36), (38): Xaa is C or S
  MOD_RES (16), (17), (18), (19), (20): Xaa is A or G
  MOD_RES (21), (22), (23), (24): Xaa is A or G or is absent
XXVPTKLSSLSILFFXXXXXXXXXLKVYPGMAVSEXGXR

SEQ ID NO: 25702 - protein, 36 aa, Artificial Sequence
  Non-cyclic GFR-binding peptide
  MOD_RES (1), (33), (35): Xaa is C or S
XAPTQLSSLSVLFFDDSSNVILKVYPNMVVRAXGXH

SEQ ID NO: 25703 - protein, 34 aa, Artificial Sequence
  Non-cyclic GFR-binding peptide
  MOD_RES (1), (1): Xaa is C or S
  MOD_RES (15), (16), (17), (18), (19): Xaa is A or G
  MOD_RES (20), (21), (22), (23): Xaa is A or G or is absent
XVPARLSSLSILFFXXXXXXXXXLKVYPDMVVEA

SEQ ID NO: 25704 - protein, 39 aa, Artificial Sequence
  Non-cyclic GFR-binding peptide
  MOD_RES (6), (7), (39): Xaa is C or S
GSAGPXXTPTKMSSLSMLFFNDKQQIILKVYPGMVVDRX

SEQ ID NO: 25705 - protein, 37 aa, Artificial Sequence
  Non-cyclic GFR-binding peptide
  MOD_RES (3), (4), (36): Xaa is C or S
KAXXAPTKLSSLSVLFFDSSNNVILKVYPNMVVKAXG

SEQ ID NO: 25706 - protein, 40 aa, Artificial Sequence
  Non-cyclic GFR-binding peptide
  MOD_RES (2), (3), (37), (39): Xaa is C or S
  MOD_RES (17), (18), (19), (20), (21): Xaa is A or G
  MOD_RES (22), (23), (24), (25): Xaa is A or G or is absent
AXXAPTKLSSLSVLFFXXXXXXXXXLKVYPNMVVKAXGXH

SEQ ID NO: 25707 - protein, 36 aa, Artificial Sequence
  Non-cyclic GFR-binding peptide
  MOD_RES (1), (33), (35): Xaa is C or S
XAPTKLSSLSVLFFDSSNNVILKVYPNMVVKAXGXH

SEQ ID NO: 25708 - protein, 39 aa, Artificial Sequence
  Non-cyclic GFR-binding peptide
  MOD_RES (4), (38): Xaa is C or S
  MOD_RES (18), (19), (20), (21), (22): Xaa is A or G
  MOD_RES (23), (24), (25), (26): Xaa is A or G or is absent
KPTXAPTKLSSLSVLFFXXXXXXXXXLKVYPNMVVRSXG

SEQ ID NO: 25709 - protein, 34 aa, Artificial Sequence
  Non-cyclic GFR-binding peptide
  MOD_RES (1), (1): Xaa is C or S
  MOD_RES (15), (16), (17), (18), (19): Xaa is A or G
  MOD_RES (20), (21), (22), (23): Xaa is A or G or is absent
XVPTELSSLSMLFFXXXXXXXXXLKVYPEMVVEG

SEQ ID NO: 25710 - protein, 38 aa, Artificial Sequence
  Non-cyclic GFR-binding peptide
  MOD_RES (4), (5): Xaa is C or S
  MOD_RES (19), (20), (21), (22), (23): Xaa is A or G
  MOD_RES (24), (25), (26), (27): Xaa is A or G or is absent
PPTXXVPTRLSSLSILFFXXXXXXXXXLKVYPDMVVES

SEQ ID NO: 25711 - protein, 41 aa, Artificial Sequence
  Non-cyclic GFR-binding peptide
  MOD_RES (4), (38), (40): Xaa is C or S
GLEXVPTEESSLSMLFFRIKPHQGQHLKVYPFLQHNKXEXR

SEQ ID NO: 25712 - protein, 38 aa, Artificial Sequence
  Non-cyclic GFR-binding peptide
  MOD_RES (3), (4), (36), (38): Xaa is C or S
KPXXAPTQLSSLSVLFFDDSSNVILKVYPNMVVRAXGX

SEQ ID NO: 25713 - protein, 37 aa, Artificial Sequence
  Non-cyclic GFR-binding peptide
  MOD_RES (5), (6): Xaa is C or S
IPKAXXVPTELSSLSMLFFDEYDKVVLKVYPEMVVEG

SEQ ID NO: 25714 - protein, 41 aa, Artificial Sequence
  Non-cyclic GFR-binding peptide
  MOD_RES (6), (7), (39), (41): Xaa is C or S
TVPKPXXAPTQLSSLSVLFFDDSSNVILKVYPNMVVRAXGX

SEQ ID NO: 25715 - protein, 34 aa, Artificial Sequence
  Non-cyclic GFR-binding peptide
  MOD_RES (1), (2): Xaa is C or S
  MOD_RES (16), (17), (18), (19), (20): Xaa is A or G
  MOD_RES (21), (22), (23), (24): Xaa is A or G or is absent
XXVPQALSSLSILFFXXXXXXXXXLKVYPMIVRS

SEQ ID NO: 25716 - protein, 44 aa, Artificial Sequence
  Non-cyclic GFR-binding peptide
  MOD_RES (7), (41), (43): Xaa is C or S
NDEGLEXVPTEESSLSMLFFRIKPHQGQHLKVYPFLQHNKXEXR

SEQ ID NO: 25717 - protein, 35 aa, Artificial Sequence
  Non-cyclic GFR-binding peptide
  MOD_RES (1), (2), (35): Xaa is C or S
  MOD_RES (16), (17), (18), (19), (20): Xaa is A or G
  MOD_RES (21), (22), (23), (24): Xaa is A or G or is absent
XXVPQDLSSLSILFFXXXXXXXXXLKVYPMVVKSX

SEQ ID NO: 25718 - protein, 39 aa, Artificial Sequence
  Non-cyclic GFR-binding peptide
  MOD_RES (4), (5), (38): Xaa is C or S
  MOD_RES (19), (20), (21), (22), (23): Xaa is A or G
  MOD_RES (24), (25), (26), (27): Xaa is A or G or is absent
ASPXXVPQDLSSLSILFFXXXXXXXXXLKVYPMVVKSXK

SEQ ID NO: 25719 - protein, 42 aa, Artificial Sequence
  Non-cyclic GFR-binding peptide
  MOD_RES (4), (5), (39), (41): Xaa is C or S
  MOD_RES (19), (20), (21), (22), (23): Xaa is A or G
  MOD_RES (24), (25), (26), (27): Xaa is A or G or is absent
PASXXVPARLSSLSILFFXXXXXXXXXLKVYPDMVVEAXGXR

SEQ ID NO: 25720 - protein, 35 aa, Artificial Sequence
  Non-cyclic GFR-binding peptide
  MOD_RES (1), (2): Xaa is C or S
  MOD_RES (16), (17), (18), (19), (20): Xaa is A or G
  MOD_RES (21), (22), (23), (24): Xaa is A or G or is absent
XXVPTELSSLSMLFFXXXXXXXXXLKVYPEMVVEG

SEQ ID NO: 25721 - protein, 35 aa, Artificial Sequence
  Non-cyclic GFR-binding peptide
  MOD_RES (1), (2), (34): Xaa is C or S
XXTPTKMSSLSMLFFNDKQQIILKVYPGMVVDRXG

SEQ ID NO: 25722 - protein, 37 aa, Artificial Sequence
  Non-cyclic GFR-binding peptide
  MOD_RES (4), (5), (36): Xaa is C or S
ASPXXVSQDLSSLSILFFIGKTPKILKVYPMIVKSXK

SEQ ID NO: 25723 - protein, 40 aa, Artificial Sequence
  Non-cyclic GFR-binding peptide
  MOD_RES (6), (7), (40): Xaa is C or S
  MOD_RES (21), (22), (23), (24), (25): Xaa is A or G
  MOD_RES (26), (27), (28), (29): Xaa is A or G or is absent
ASAAPXXVPQALSSLSILFFXXXXXXXXXLKVYPMIVRSX

SEQ ID NO: 25724 - protein, 33 aa, Artificial Sequence
  Non-cyclic GFR-binding peptide
  MOD_RES (1), (1): Xaa is C or S
XVPTKLSSLSVLFFDDMGVPTLKVYPEGMSVAE

SEQ ID NO: 25725 - protein, 35 aa, Artificial Sequence
  Non-cyclic GFR-binding peptide
  MOD_RES (2), (3): Xaa is C or S
  MOD_RES (17), (18), (19), (20), (21): Xaa is A or G
  MOD_RES (22), (23), (24), (25): Xaa is A or G or is absent
AXXVPTELSSLSMLFFXXXXXXXXXLKVYPEMVVE

SEQ ID NO: 25726 - protein, 39 aa, Artificial Sequence
  Non-cyclic GFR-binding peptide
  MOD_RES (1), (38): Xaa is C or S
XQPSRVHHSSLSVLFFEYVRKKPKLLKVYPRLEEHLEXA

SEQ ID NO: 25727 - protein, 35 aa, Artificial Sequence
  Non-cyclic GFR-binding peptide
  MOD_RES (3), (4): Xaa is C or S
KPXXAPTQLSSLSVLFFDDSSNVILKVYPNMVVRA

SEQ ID NO: 25728 - protein, 38 aa, Artificial Sequence
  Non-cyclic GFR-binding peptide
  MOD_RES (6), (6): Xaa is C or S
  MOD_RES (20), (21), (22), (23), (24): Xaa is A or G
  MOD_RES (25), (26), (27), (28): Xaa is A or G or is absent
VTKPTXAPTKLSSLSVLFFXXXXXXXXXLKVYPNMVVR

SEQ ID NO: 25729 - protein, 35 aa, Artificial Sequence
  Non-cyclic GFR-binding peptide
  MOD_RES (2), (3), (35): Xaa is C or S
TXXVPTRLSSLSILFFDSANNVVLKVYPDMVVESX

SEQ ID NO: 25730 - protein, 40 aa, Artificial Sequence
  Non-cyclic GFR-binding peptide
  MOD_RES (3), (4), (38), (40): Xaa is C or S
  MOD_RES (18), (19), (20), (21), (22): Xaa is A or G
  MOD_RES (23), (24), (25), (26): Xaa is A or G or is absent
ASXXVPARLSSLSILFFXXXXXXXXXLKVYPDMVVEAXGX

SEQ ID NO: 25731 - protein, 32 aa, Artificial Sequence
  Non-cyclic GFR-binding peptide
  MOD_RES (1), (32): Xaa is C or S
XAPVKTSSLSMLFFDNGRVLLLKVYPMIVEEX

SEQ ID NO: 25732 - protein, 37 aa, Artificial Sequence
  Non-cyclic GFR-binding peptide
  MOD_RES (34), (36): Xaa is C or S
VPTEESSLSMLFFRIKPHQGQHLKVYPFLQHNKXEXR

SEQ ID NO: 25733 - protein, 31 aa, Artificial Sequence
  Non-cyclic GFR-binding peptide
  MOD_RES (31), (31): Xaa is C or S
APVKTSSLSMLFFDNGRVLLLKVYPMIVEEX

SEQ ID NO: 25734 - protein, 40 aa, Artificial Sequence
  Non-cyclic GFR-binding peptide
  MOD_RES (5), (6), (40): Xaa is C or S
  MOD_RES (20), (21), (22), (23), (24): Xaa is A or G
  MOD_RES (25), (26), (27), (28): Xaa is A or G or is absent
ASKAXXVPTKLSSLSILFFXXXXXXXXXLKVYPGMAVSEX

SEQ ID NO: 25735 - protein, 33 aa, Artificial Sequence
  Non-cyclic GFR-binding peptide
  MOD_RES (1), (2), (33): Xaa is C or S
XXVSQDLSSLSILFFIGKTPKILKVYPMIVKSX

SEQ ID NO: 25736 - protein, 37 aa, Artificial Sequence
  Non-cyclic GFR-binding peptide
  MOD_RES (2), (3), (34), (36): Xaa is C or S
PXXVPQALSSLSILFFVGRKPKVLKVYPMIVRSXKXS

SEQ ID NO: 25737 - protein, 36 aa, Artificial Sequence
  Non-cyclic GFR-binding peptide
  MOD_RES (1), (34), (36): Xaa is C or S
  MOD_RES (15), (16), (17), (18), (19): Xaa is A or G
  MOD_RES (20), (21), (22), (23): Xaa is A or G or is absent
XVPQALSSLSILFFXXXXXXXXXLKVYPMIVRSXKX

SEQ ID NO: 25738 - protein, 35 aa, Artificial Sequence
  Non-cyclic GFR-binding peptide
  MOD_RES (3), (4): Xaa is C or S
ASXXVPARLSSLSILFFDAANNVVLKVYPDMVVEA

SEQ ID NO: 25739 - protein, 38 aa, Artificial Sequence
  Non-cyclic GFR-binding peptide
  MOD_RES (6), (7): Xaa is C or S
HVPKPXXAPTKLSSLSVLFFDDSSNVILKVYPNMVVRS

SEQ ID NO: 25740 - protein, 41 aa, Artificial Sequence
  Non-cyclic GFR-binding peptide
  MOD_RES (4), (5), (39), (41): Xaa is C or S
  MOD_RES (19), (20), (21), (22), (23): Xaa is A or G
  MOD_RES (24), (25), (26), (27): Xaa is A or G or is absent
PKPXXAPTQLSSLSVLFFXXXXXXXXXLKVYPNMVVRAXGX

SEQ ID NO: 25741 - protein, 42 aa, Artificial Sequence
  Non-cyclic GFR-binding peptide
  MOD_RES (6), (7), (39), (41): Xaa is C or S
YVPKPXXAPTKLSSLSVLFFDDSSNVILKVYPNMVVRSXGXH

SEQ ID NO: 25742 - protein, 35 aa, Artificial Sequence
  Non-cyclic GFR-binding peptide
  MOD_RES (3), (3): Xaa is C or S
LEXVPTEESSLSMLFFRIKPHQGQHLKVYPFLQHN

SEQ ID NO: 25743 - protein, 40 aa, Artificial Sequence
  Non-cyclic GFR-binding peptide
  MOD_RES (4), (5), (37), (39): Xaa is C or S
PKPXXAPTKLSSLSVLFFDDSSNVILKVYPNMVVRSXGXH

SEQ ID NO: 25744 - protein, 39 aa, Artificial Sequence
  Non-cyclic GFR-binding peptide
  MOD_RES (36), (38): Xaa is C or S
  MOD_RES (15), (16), (17), (18), (19): Xaa is A or G
  MOD_RES (20), (21), (22), (23): Xaa is A or G or is absent
PSRVHHSSLSVLFFXXXXXXXXXLKVYPRLEEHLEXAXA

SEQ ID NO: 25745 - protein, 39 aa, Artificial Sequence
  Non-cyclic GFR-binding peptide
  MOD_RES (5), (6), (39): Xaa is C or S
  MOD_RES (20), (21), (22), (23), (24): Xaa is A or G
  MOD_RES (25), (26), (27), (28): Xaa is A or G or is absent
VPSTXXAPVKTSSLSMLFFXXXXXXXXXLKVYPMIVEEX

SEQ ID NO: 25746 - protein, 40 aa, Artificial Sequence
  Non-cyclic GFR-binding peptide
  MOD_RES (3), (4), (37), (39): Xaa is C or S
  MOD_RES (18), (19), (20), (21), (22): Xaa is A or G
  MOD_RES (23), (24), (25), (26): Xaa is A or G or is absent
APXXVPQALSSLSILFFXXXXXXXXXLKVYPMIVRSXKXS

SEQ ID NO: 25747 - protein, 34 aa, Artificial Sequence
  Non-cyclic GFR-binding peptide
  MOD_RES (2), (3), (34): Xaa is C or S
PXXVPQALSSLSILFFVGRKPKVLKVYPMIVRSX

SEQ ID NO: 25748 - protein, 38 aa, Artificial Sequence
  Non-cyclic GFR-binding peptide
  MOD_RES (1), (2), (35), (37): Xaa is C or S
  MOD_RES (16), (17), (18), (19), (20): Xaa is A or G
  MOD_RES (21), (22), (23), (24): Xaa is A or G or is absent
XXVPQALSSLSILFFXXXXXXXXXLKVYPMIVRSXKXS

SEQ ID NO: 25749 - protein, 35 aa, Artificial Sequence
  Non-cyclic GFR-binding peptide
  MOD_RES (3), (4): Xaa is C or S
KAXXVPTKLSSLSILFFDKGVVTYLKVYPGMAVSE

SEQ ID NO: 25750 - protein, 39 aa, Artificial Sequence
  Non-cyclic GFR-binding peptide
  MOD_RES (7), (7): Xaa is C or S
  MOD_RES (21), (22), (23), (24), (25): Xaa is A or G
  MOD_RES (26), (27), (28), (29): Xaa is A or G or is absent
NDEGLEXVPTEESSLSMLFFXXXXXXXXXLKVYPFLQHN

SEQ ID NO: 25751 - protein, 38 aa, Artificial Sequence
  Non-cyclic GFR-binding peptide
  MOD_RES (2), (3), (36), (38): Xaa is C or S
  MOD_RES (17), (18), (19), (20), (21): Xaa is A or G
  MOD_RES (22), (23), (24), (25): Xaa is A or G or is absent
PXXVPQALSSLSILFFXXXXXXXXXLKVYPMIVRSXKX

SEQ ID NO: 25752 - protein, 40 aa, Artificial Sequence
  Non-cyclic GFR-binding peptide
  MOD_RES (4), (38), (40): Xaa is C or S
GLEXVPTEESSLSMLFFRIKPHQGQHLKVYPFLQHNKXEX

SEQ ID NO: 25753 - protein, 41 aa, Artificial Sequence
  Non-cyclic GFR-binding peptide
  MOD_RES (2), (39): Xaa is C or S
AXELHEELRNSLQELKPKKRVYEYYLVTLPEHHVRSPQXKV

SEQ ID NO: 25754 - protein, 34 aa, Artificial Sequence
  Non-cyclic GFR-binding peptide
  MOD_RES (1), (33), (34): Xaa is C or S
XGEVVMEVQVEKVVKDYEDVKAMKVSRLETPVXX

SEQ ID NO: 25755 - protein, 35 aa, Artificial Sequence
  Non-cyclic GFR-binding peptide
  MOD_RES (2), (34), (35): Xaa is C or S
GXGEVVMEVQVEKVVKDYEDVKAMKVSRLETPVXX

SEQ ID NO: 25756 - protein, 36 aa, Artificial Sequence
  Non-cyclic GFR-binding peptide
  MOD_RES (35), (35): Xaa is C or S
  MOD_RES (11), (12), (13), (14), (15): Xaa is A or G
  MOD_RES (16), (17), (18), (19): Xaa is A or G or is absent
HDELTNSLQEXXXXXXXXXYYLVTLPELQVQTPRXQ

SEQ ID NO: 25757 - protein, 39 aa, Artificial Sequence
  Non-cyclic GFR-binding peptide
  MOD_RES (1), (3), (35), (36): Xaa is C or S
XGXSRVVMNVQVEKIVNSSDDVKAVKVSRLKTPAXXPKP

SEQ ID NO: 25758 - protein, 34 aa, Artificial Sequence
  Non-cyclic GFR-binding peptide
  MOD_RES (1), (3), (34): Xaa is C or S
XKXSRVIMVQVEKVKPKRGVVKAIKVSRLAQPVX

SEQ ID NO: 25759 - protein, 38 aa, Artificial Sequence
  Non-cyclic GFR-binding peptide
  MOD_RES (2), (4), (38): Xaa is C or S
  MOD_RES (16), (17), (18), (19), (20): Xaa is A or G
  MOD_RES (21), (22), (23), (24): Xaa is A or G or is absent
RXEXKNHQLFNSLQEXXXXXXXXXYYLMTLPEEETPVX

SEQ ID NO: 25760 - protein, 38 aa, Artificial Sequence
  Non-cyclic GFR-binding peptide
  MOD_RES (2), (4), (36): Xaa is C or S
HXGXSRVVMNSMEGIIVNSSDDMIQVTINSLKTPAXTP

SEQ ID NO: 25761 - protein, 41 aa, Artificial Sequence
  Non-cyclic GFR-binding peptide
  MOD_RES (2), (4), (38): Xaa is C or S
RXEXKNHQLFNSLQEHQGQHPKIRYYVMPLPEEETPVXELG

SEQ ID NO: 25762 - protein, 42 aa, Artificial Sequence
  Non-cyclic GFR-binding peptide
  MOD_RES (1), (3), (37), (38): Xaa is C or S
  MOD_RES (15), (16), (17), (18), (19): Xaa is A or G
  MOD_RES (20), (21), (22), (23): Xaa is A or G or is absent
XGXARVVMNVQVEKXXXXXXXXXVKAVKVSRLQTPAXXPKPV

SEQ ID NO: 25763 - protein, 36 aa, Artificial Sequence
  Non-cyclic GFR-binding peptide
  MOD_RES (2), (4): Xaa is C or S
  MOD_RES (15), (16), (17), (18), (19): Xaa is A or G
  MOD_RES (20), (21), (22), (23): Xaa is A or G or is absent
SXKXSKVIMVTAKKXXXXXXXXXIKRIQVPRLDQSV

SEQ ID NO: 25764 - protein, 38 aa, Artificial Sequence
  Non-cyclic GFR-binding peptide
  MOD_RES (1), (3), (37): Xaa is C or S
XEXKNHQLFNSLQEHQGQHPKIRYYVMPLPEEETPVXE

SEQ ID NO: 25765 - protein, 39 aa, Artificial Sequence
  Non-cyclic GFR-binding peptide
  MOD_RES (1), (35): Xaa is C or S
  MOD_RES (13), (14), (15), (16), (17): Xaa is A or G
  MOD_RES (18), (19), (20), (21): Xaa is A or G or is absent
XSRVVMNSMEGIXXXXXXXXXMIQVTINSLKTPAXTPKT

SEQ ID NO: 25766 - protein, 40 aa, Artificial Sequence
  Non-cyclic GFR-binding peptide
  MOD_RES (2), (34), (35): Xaa is C or S
GXGEVVMEVTAKKVVKDYEDIKRMQVPRLETPVXXAKPIS

SEQ ID NO: 25767 - protein, 33 aa, Artificial Sequence
  Non-cyclic GFR-binding peptide
  MOD_RES (33), (33): Xaa is C or S
  MOD_RES (11), (12), (13), (14), (15): Xaa is A or G
  MOD_RES (16), (17), (18), (19): Xaa is A or G or is absent
RVVMNSMEGIXXXXXXXXXMIQVTINSLQTPAX

SEQ ID NO: 25768 - protein, 36 aa, Artificial Sequence
  Non-cyclic GFR-binding peptide
  MOD_RES (2), (33), (34): Xaa is C or S
KXSKVIMVQVEKIKPTKGIVKAIKVSRLDQSVXXPS

SEQ ID NO: 25769 - protein, 43 aa, Artificial Sequence
  Non-cyclic GFR-binding peptide
  MOD_RES (1), (3), (40): Xaa is C or S
  MOD_RES (16), (17), (18), (19), (20): Xaa is A or G
  MOD_RES (21), (22), (23), (24): Xaa is A or G or is absent
XAXELHEELRNSLQEXXXXXXXXXYYVVPLPEHHVRSPQXKVS

SEQ ID NO: 25770 - protein, 35 aa, Artificial Sequence
  Non-cyclic GFR-binding peptide
  MOD_RES (12), (13), (14), (15), (16): Xaa is A or G
  MOD_RES (17), (18), (19), (20): Xaa is A or G or is absent
LHDELTNSLQEXXXXXXXXXYYLVTLPELQVQTPR

SEQ ID NO: 25771 - protein, 42 aa, Artificial Sequence
  Non-cyclic GFR-binding peptide
  MOD_RES (1), (3), (40): Xaa is C or S
  MOD_RES (16), (17), (18), (19), (20): Xaa is A or G
  MOD_RES (21), (22), (23), (24): Xaa is A or G or is absent
XKXALHDELTNSLQEXXXXXXXXXYYLVTLPELQVQTPRXQV

SEQ ID NO: 25772 - protein, 34 aa, Artificial Sequence
  Non-cyclic GFR-binding peptide
  MOD_RES (33), (34): Xaa is C or S
  MOD_RES (11), (12), (13), (14), (15): Xaa is A or G
  MOD_RES (16), (17), (18), (19): Xaa is A or G or is absent
RVVMNVQVEKXXXXXXXXXVKAVKVSRLKTPAXX

SEQ ID NO: 25773 - protein, 35 aa, Artificial Sequence
  Non-cyclic GFR-binding peptide
  MOD_RES (2), (4): Xaa is C or S
RXGXGEVVMDVQVEKVVKENEDVKAMKVSRLETPV

SEQ ID NO: 25774 - protein, 30 aa, Artificial Sequence
  Non-cyclic GFR-binding peptide
SKVVMVTAKKVKPTRGVIKRIQVPRLDQPV

SEQ ID NO: 25775 - protein, 38 aa, Artificial Sequence
  Non-cyclic GFR-binding peptide
  MOD_RES (34), (34): Xaa is C or S
  MOD_RES (12), (13), (14), (15), (16): Xaa is A or G
  MOD_RES (17), (18), (19), (20): Xaa is A or G or is absent
KNHQLFNSLQEXXXXXXXXXYYVMPLPEEETPVXELGE

SEQ ID NO: 25776 - protein, 39 aa, Artificial Sequence
  Non-cyclic GFR-binding peptide
  MOD_RES (33), (33): Xaa is C or S
  MOD_RES (11), (12), (13), (14), (15): Xaa is A or G
  MOD_RES (16), (17), (18), (19): Xaa is A or G or is absent
NHQLFNSLQEXXXXXXXXXYYVMPLPEEETPVXELGEDN

SEQ ID NO: 25777 - protein, 40 aa, Artificial Sequence
  Non-cyclic GFR-binding peptide
  MOD_RES (1), (3), (35): Xaa is C or S
XGXSRVVMNVTAKKIVNSSDDIKRVQVPRLKTPAXTPKTV

SEQ ID NO: 25778 - protein, 33 aa, Artificial Sequence
  Non-cyclic GFR-binding peptide
  MOD_RES (1), (32), (33): Xaa is C or S
XSKVIMVQVEKIKPTKGIVKAIKVSRLDQSVXX

SEQ ID NO: 25779 - protein, 39 aa, Artificial Sequence
  Non-cyclic GFR-binding peptide
  MOD_RES (2), (33), (34): Xaa is C or S
KXSKVIMVQVEKIKPTKGIVKAIKVSRLDQSVXXPSASA

SEQ ID NO: 25780 - protein, 38 aa, Artificial Sequence
  Non-cyclic GFR-binding peptide
  MOD_RES (34), (35): Xaa is C or S
  MOD_RES (12), (13), (14), (15), (16): Xaa is A or G
  MOD_RES (17), (18), (19), (20): Xaa is A or G or is absent
SRVVMNSMEGIXXXXXXXXXMIQVTINSLKTPAXXPKP

SEQ ID NO: 25781 - protein, 39 aa, Artificial Sequence
  Non-cyclic GFR-binding peptide
  MOD_RES (2), (4), (36), (37): Xaa is C or S
HXGXSRVVMNSMEGIIVNSSDDMIQVTINSLKTPAXXPK

SEQ ID NO: 25782 - protein, 40 aa, Artificial Sequence
  Non-cyclic GFR-binding peptide
  MOD_RES (1), (35), (36): Xaa is C or S
  MOD_RES (13), (14), (15), (16), (17): Xaa is A or G
  MOD_RES (18), (19), (20), (21): Xaa is A or G or is absent
XGEVVMDVQVEKXXXXXXXXXVKAMKVSRLETPVXXAKPI

SEQ ID NO: 25783 - protein, 31 aa, Artificial Sequence
  Non-cyclic GFR-binding peptide
  MOD_RES (31), (31): Xaa is C or S
RVVMNVQVEKIVNSSDDVKAVKVSRLKTPAX

SEQ ID NO: 25784 - protein, 40 aa, Artificial Sequence
  Non-cyclic GFR-binding peptide
  MOD_RES (1), (3), (37), (38): Xaa is C or S
  MOD_RES (15), (16), (17), (18), (19): Xaa is A or G
  MOD_RES (20), (21), (22), (23): Xaa is A or G or is absent
XGXGEVVMDVQVEKXXXXXXXXXVKAMKVSRLETPVXXAK

SEQ ID NO: 25785 - protein, 41 aa, Artificial Sequence
  Non-cyclic GFR-binding peptide
  MOD_RES (2), (36), (37): Xaa is C or S
  MOD_RES (14), (15), (16), (17), (18): Xaa is A or G
  MOD_RES (19), (20), (21), (22): Xaa is A or G or is absent
GXGEVVMDSMEGIXXXXXXXXXMIQMTINSLETPVXXAKPI

SEQ ID NO: 25786 - protein, 33 aa, Artificial Sequence
  Non-cyclic GFR-binding peptide
  MOD_RES (1), (33): Xaa is C or S
XSRVVMNSMEGIIVNSSDDMIQVTINSLKTPAX

SEQ ID NO: 25787 - protein, 36 aa, Artificial Sequence
  Non-cyclic GFR-binding peptide
  MOD_RES (13), (14), (15), (16), (17): Xaa is A or G
  MOD_RES (18), (19), (20), (21): Xaa is A or G or is absent
ELHEELRNSLQEXXXXXXXXXYYLVTLPEHHVRSPQ

SEQ ID NO: 25788 - protein, 37 aa, Artificial Sequence
  Non-cyclic GFR-binding peptide
  MOD_RES (36), (36): Xaa is C or S
  MOD_RES (12), (13), (14), (15), (16): Xaa is A or G
  MOD_RES (17), (18), (19), (20): Xaa is A or G or is absent
LHDELTNSLQEXXXXXXXXXYYLVTLPELQVQTPRXQ

SEQ ID NO: 25789 - protein, 37 aa, Artificial Sequence
  Non-cyclic GFR-binding peptide
  MOD_RES (34), (35): Xaa is C or S
  MOD_RES (12), (13), (14), (15), (16): Xaa is A or G
  MOD_RES (17), (18), (19), (20): Xaa is A or G or is absent
SRVVMNVTAKKXXXXXXXXXIKRVQVPRLKTPAXXPK

SEQ ID NO: 25790 - protein, 36 aa, Artificial Sequence
  Non-cyclic GFR-binding peptide
  MOD_RES (2), (34), (35): Xaa is C or S
GXARVVMNVTAKKIVNSSDDIKRVQVPRLQTPAXXP

SEQ ID NO: 25791 - protein, 32 aa, Artificial Sequence
  Non-cyclic GFR-binding peptide
  MOD_RES (1), (1): Xaa is C or S
XGEVVMDVQVEKVVKENEDVKAMKVSRLETPV

SEQ ID NO: 25792 - protein, 36 aa, Artificial Sequence
  Non-cyclic GFR-binding peptide
  MOD_RES (32), (33): Xaa is C or S
GEVVMEVQVEKVVKDYEDVKAMKVSRLETPVXXAKP

SEQ ID NO: 25793 - protein, 40 aa, Artificial Sequence
  Non-cyclic GFR-binding peptide
  MOD_RES (1), (35): Xaa is C or S
  MOD_RES (13), (14), (15), (16), (17): Xaa is A or G
  MOD_RES (18), (19), (20), (21): Xaa is A or G or is absent
XSRVVMNVQVEKXXXXXXXXXVKAVKVSRLKTPAXTPKTV

SEQ ID NO: 25794 - protein, 42 aa, Artificial Sequence
  Non-cyclic GFR-binding peptide
  MOD_RES (1), (3), (37): Xaa is C or S
  MOD_RES (15), (16), (17), (18), (19): Xaa is A or G
  MOD_RES (20), (21), (22), (23): Xaa is A or G or is absent
XEXKNHQLFNSLQEXXXXXXXXXYYVMPLPEEETPVXELGED

SEQ ID NO: 25795 - protein, 42 aa, Artificial Sequence
  Non-cyclic GFR-binding peptide
  MOD_RES (1), (3), (37), (38): Xaa is C or S
  MOD_RES (15), (16), (17), (18), (19): Xaa is A or G
  MOD_RES (20), (21), (22), (23): Xaa is A or G or is absent
XGXSRVVMNSMEGIXXXXXXXXXMIQVTINSLKTPAXXPKPV

SEQ ID NO: 25796 - protein, 33 aa, Artificial Sequence
  Non-cyclic GFR-binding peptide
  MOD_RES (2), (2): Xaa is C or S
GXGEVVMESMEGIVVKDYEDMIQMTINSLETPV

SEQ ID NO: 25797 - protein, 38 aa, Artificial Sequence
  Non-cyclic GFR-binding peptide
  MOD_RES (2), (35), (36): Xaa is C or S
  MOD_RES (13), (14), (15), (16), (17): Xaa is A or G
  MOD_RES (18), (19), (20), (21): Xaa is A or G or is absent
KXSKVIMVTAKKXXXXXXXXXIKRIQVPRLDQSVXXPS

SEQ ID NO: 25798 - protein, 43 aa, Artificial Sequence
  Non-cyclic GFR-binding peptide
  MOD_RES (1), (3), (37), (38): Xaa is C or S
  MOD_RES (15), (16), (17), (18), (19): Xaa is A or G
  MOD_RES (20), (21), (22), (23): Xaa is A or G or is absent
XGXGEVVMDVQVEKXXXXXXXXXVKAMKVSRLETPVXXAKPIK

SEQ ID NO: 25799 - protein, 37 aa, Artificial Sequence
  Non-cyclic GFR-binding peptide
  MOD_RES (1), (35), (36): Xaa is C or S
  MOD_RES (13), (14), (15), (16), (17): Xaa is A or G
  MOD_RES (18), (19), (20), (21): Xaa is A or G or is absent
XSRVVMNSMEGIXXXXXXXXXMIQVTINSLKTPAXXP

SEQ ID NO: 25800 - protein, 33 aa, Artificial Sequence
  Non-cyclic GFR-binding peptide
  MOD_RES (1), (3): Xaa is C or S
XKXSRVIMVTAKKVKPKRGVIKRIQVPRLAQPV

SEQ ID NO: 25801 - protein, 41 aa, Artificial Sequence
  Non-cyclic GFR-binding peptide
  MOD_RES (37), (37): Xaa is C or S
ELHEELRNSLQELKPKKRVYEYYVVPLPEHHVRSPQXKVSS

SEQ ID NO: 25802 - protein, 43 aa, Artificial Sequence
  Non-cyclic GFR-binding peptide
  MOD_RES (1), (3), (37): Xaa is C or S
  MOD_RES (15), (16), (17), (18), (19): Xaa is A or G
  MOD_RES (20), (21), (22), (23): Xaa is A or G or is absent
XGXSRVVMNVQVEKXXXXXXXXXVKAVKVSRLKTPAXTPKTVH

SEQ ID NO: 25803 - protein, 38 aa, Artificial Sequence
  Non-cyclic GFR-binding peptide
  MOD_RES (36), (36): Xaa is C or S
  MOD_RES (12), (13), (14), (15), (16): Xaa is A or G
  MOD_RES (17), (18), (19), (20): Xaa is A or G or is absent
LHEELRNSLQEXXXXXXXXXYYVVPLPEHHVRSPQXKV

SEQ ID NO: 25804 - protein, 40 aa, Artificial Sequence
  Non-cyclic GFR-binding peptide
  MOD_RES (1), (3), (37): Xaa is C or S
XEXKNHQLFNSLQEHQGQHPKIRYYLMTLPEEETPVXELG

SEQ ID NO: 25805 - protein, 34 aa, Artificial Sequence
  Non-cyclic GFR-binding peptide
  MOD_RES (33), (34): Xaa is C or S
  MOD_RES (11), (12), (13), (14), (15): Xaa is A or G
  MOD_RES (16), (17), (18), (19): Xaa is A or G or is absent
EVVMESMEGIXXXXXXXXXMIQMTINSLETPVXX

SEQ ID NO: 25806 - protein, 35 aa, Artificial Sequence
  Non-cyclic GFR-binding peptide
  MOD_RES (1), (3), (34), (35): Xaa is C or S
XKXSRVIMVQVEKVKPKRGVVKAIKVSRLAQPVXX

SEQ ID NO: 25807 - protein, 38 aa, Artificial Sequence
  Non-cyclic GFR-binding peptide
  MOD_RES (1), (3), (34), (35): Xaa is C or S
XKXSKVIMSMEGIIKPTKGIMIQITINSLDQSVXXPSA

SEQ ID NO: 25808 - protein, 34 aa, Artificial Sequence
  Non-cyclic GFR-binding peptide
  MOD_RES (2), (2): Xaa is C or S
  MOD_RES (13), (14), (15), (16), (17): Xaa is A or G
  MOD_RES (18), (19), (20), (21): Xaa is A or G or is absent
KXSRVIMSMEGIXXXXXXXXXMIQITINSLAQPV

SEQ ID NO: 25809 - protein, 37 aa, Artificial Sequence
  Non-cyclic GFR-binding peptide
  MOD_RES (32), (32): Xaa is C or S
SRVVMNVTAKKIVNSSDDIKRVQVPRLKTPAXTPKTV

SEQ ID NO: 25810 - protein, 34 aa, Artificial Sequence
  Non-cyclic GFR-binding peptide
  MOD_RES (32), (33): Xaa is C or S
GEVVMEVTAKKVVKDYEDIKRMQVPRLETPVXXA

SEQ ID NO: 25811 - protein, 35 aa, Artificial Sequence
  Non-cyclic GFR-binding peptide
  MOD_RES (34), (35): Xaa is C or S
  MOD_RES (12), (13), (14), (15), (16): Xaa is A or G
  MOD_RES (17), (18), (19), (20): Xaa is A or G or is absent
ARVVMNSMEGIXXXXXXXXXMIQVTINSLQTPAXX

SEQ ID NO: 25812 - protein, 35 aa, Artificial Sequence
  Non-cyclic GFR-binding peptide
  MOD_RES (2), (35): Xaa is C or S
  MOD_RES (13), (14), (15), (16), (17): Xaa is A or G
  MOD_RES (18), (19), (20), (21): Xaa is A or G or is absent
KXSRVIMVQVEKXXXXXXXXXVKAIKVSRLAQPVX

SEQ ID NO: 25813 - protein, 37 aa, Artificial Sequence
  Non-cyclic GFR-binding peptide
  MOD_RES (2), (36): Xaa is C or S
EXKNHQLFNSLQEHQGQHPKIRYYLMTLPEEETPVXE

SEQ ID NO: 25814 - protein, 40 aa, Artificial Sequence
  Non-cyclic GFR-binding peptide
  MOD_RES (2), (4), (38), (39): Xaa is C or S
  MOD_RES (16), (17), (18), (19), (20): Xaa is A or G
  MOD_RES (21), (22), (23), (24): Xaa is A or G or is absent
HXGXSRVVMNVTAKKXXXXXXXXXIKRVQVPRLKTPAXXP

SEQ ID NO: 25815 - protein, 41 aa, Artificial Sequence
  Non-cyclic GFR-binding peptide
  MOD_RES (2), (39): Xaa is C or S
KXALHDELTNSLQEFIPKKRVIEYYLVTLPELQVQTPRXQV

SEQ ID NO: 25816 - protein, 39 aa, Artificial Sequence
  Non-cyclic GFR-binding peptide
  MOD_RES (1), (3), (35), (36): Xaa is C or S
XGXGEVVMDVTAKKVVKENEDIKRMQVPRLETPVXXAKP

SEQ ID NO: 25817 - protein, 38 aa, Artificial Sequence
  Non-cyclic GFR-binding peptide
  MOD_RES (1), (32), (33): Xaa is C or S
XSKVVMVTAKKVKPTRGVIKRIQVPRLDQPVXXPSASA

SEQ ID NO: 25818 - protein, 40 aa, Artificial Sequence
  Non-cyclic GFR-binding peptide
  MOD_RES (2), (4), (38), (39): Xaa is C or S
  MOD_RES (16), (17), (18), (19), (20): Xaa is A or G
  MOD_RES (21), (22), (23), (24): Xaa is A or G or is absent
HXGXSRVVMNVQVEKXXXXXXXXXVKAVKVSRLKTPAXXP

SEQ ID NO: 25819 - protein, 40 aa, Artificial Sequence
  Non-cyclic GFR-binding peptide
  MOD_RES (2), (4), (36): Xaa is C or S
HXGXSRVVMNVQVEKIVNSSDDVKAVKVSRLKTPAXTPKT

SEQ ID NO: 25820 - protein, 37 aa, Artificial Sequence
  Non-cyclic GFR-binding peptide
  MOD_RES (33), (34): Xaa is C or S
  MOD_RES (11), (12), (13), (14), (15): Xaa is A or G
  MOD_RES (16), (17), (18), (19): Xaa is A or G or is absent
SRVIMSMEGIXXXXXXXXXMIQITINSLAQPVXXPAA

SEQ ID NO: 25821 - protein, 34 aa, Artificial Sequence
  Non-cyclic GFR-binding peptide
  MOD_RES (31), (31): Xaa is C or S
RVVMNSMEGIIVNSSDDMIQVTINSLKTPAXTPK

SEQ ID NO: 25822 - protein, 44 aa, Artificial Sequence
  Non-cyclic GFR-binding peptide
  MOD_RES (1), (3), (40): Xaa is C or S
XAXELHEELRNSLQELKPKKRVYEYYLVTLPEHHVRSPQXKVSS

SEQ ID NO: 25823 - protein, 40 aa, Artificial Sequence
  Non-cyclic GFR-binding peptide
  MOD_RES (1), (3), (34), (35): Xaa is C or S
XKXSKVVMVTAKKVKPTRGVIKRIQVPRLDQPVXXPSASA

SEQ ID NO: 25824 - protein, 38 aa, Artificial Sequence
  Non-cyclic GFR-binding peptide
  MOD_RES (35), (35): Xaa is C or S
  MOD_RES (11), (12), (13), (14), (15): Xaa is A or G
  MOD_RES (16), (17), (18), (19): Xaa is A or G or is absent
HEELRNSLQEXXXXXXXXXYYVVPLPEHHVRSPQXKVS

SEQ ID NO: 25825 - protein, 36 aa, Artificial Sequence
  Non-cyclic GFR-binding peptide
  MOD_RES (2), (35), (36): Xaa is C or S
  MOD_RES (13), (14), (15), (16), (17): Xaa is A or G
  MOD_RES (18), (19), (20), (21): Xaa is A or G or is absent
KXSRVIMVQVEKXXXXXXXXXVKAIKVSRLAQPVXX

SEQ ID NO: 25826 - protein, 40 aa, Artificial Sequence
  Non-cyclic GFR-binding peptide
  MOD_RES (2), (34), (35): Xaa is C or S
GXGEVVMDVQVEKVVKENEDVKAMKVSRLETPVXXAKPIK

SEQ ID NO: 25827 - protein, 37 aa, Artificial Sequence
  Non-cyclic GFR-binding peptide
  MOD_RES (1), (3), (37): Xaa is C or S
  MOD_RES (15), (16), (17), (18), (19): Xaa is A or G
  MOD_RES (20), (21), (22), (23): Xaa is A or G or is absent
XGXSRVVMNSMEGIXXXXXXXXXMIQVTINSLKTPAX

SEQ ID NO: 25828 - protein, 39 aa, Artificial Sequence
  Non-cyclic GFR-binding peptide
  MOD_RES (2), (4), (35), (36): Xaa is C or S
SXKXSKVVMVTAKKVKPTRGVIKRIQVPRLDQPVXXPSA

SEQ ID NO: 25829 - protein, 37 aa, Artificial Sequence
  Non-cyclic GFR-binding peptide
  MOD_RES (2), (4), (36): Xaa is C or S
HXGXSRVVMNVQVEKIVNSSDDVKAVKVSRLKTPAXT

SEQ ID NO: 25830 - protein, 35 aa, Artificial Sequence
  Non-cyclic GFR-binding peptide
  MOD_RES (31), (32): Xaa is C or S
EVVMDSMEGIVVKENEDMIQMTINSLETPVXXAKP

SEQ ID NO: 25831 - protein, 34 aa, Artificial Sequence
  Non-cyclic GFR-binding peptide
  MOD_RES (33), (34): Xaa is C or S
  MOD_RES (11), (12), (13), (14), (15): Xaa is A or G
  MOD_RES (16), (17), (18), (19): Xaa is A or G or is absent
SRVIMSMEGIXXXXXXXXXMIQITINSLAQPVXX

SEQ ID NO: 25832 - protein, 35 aa, Artificial Sequence
  Non-cyclic GFR-binding peptide
  MOD_RES (2), (4), (35): Xaa is C or S
SXKXSKVIMSMEGIIKPTKGIMIQITINSLDQSVX

SEQ ID NO: 25833 - protein, 37 aa, Artificial Sequence
  Non-cyclic GFR-binding peptide
  MOD_RES (2), (33), (34): Xaa is C or S
KXSKVIMSMEGIIKPTKGIMIQITINSLDQSVXXPSA

SEQ ID NO: 25834 - protein, 37 aa, Artificial Sequence
  Non-cyclic GFR-binding peptide
  MOD_RES (33), (33): Xaa is C or S
  MOD_RES (11), (12), (13), (14), (15): Xaa is A or G
  MOD_RES (16), (17), (18), (19): Xaa is A or G or is absent
NHQLFNSLQEXXXXXXXXXYYLMTLPEEETPVXELGE

SEQ ID NO: 25835 - protein, 32 aa, Artificial Sequence
  Non-cyclic GFR-binding peptide
  MOD_RES (32), (32): Xaa is C or S
ARVVMNVTAKKIVNSSDDIKRVQVPRLQTPAX

SEQ ID NO: 25836 - protein, 40 aa, Artificial Sequence
  Non-cyclic GFR-binding peptide
  MOD_RES (1), (3), (40): Xaa is C or S
XAXELHEELRNSLQELKPKKRVYEYYVVPLPEHHVRSPQX

SEQ ID NO: 25837 - protein, 36 aa, Artificial Sequence
  Non-cyclic GFR-binding peptide
  MOD_RES (2), (2): Xaa is C or S
KXALHDELTNSLQEFIPKKRVIEYYLVTLPELQVQT

SEQ ID NO: 25838 - protein, 37 aa, Artificial Sequence
  Non-cyclic GFR-binding peptide
  MOD_RES (37), (37): Xaa is C or S
ELHEELRNSLQELKPKKRVYEYYVVPLPEHHVRSPQX

SEQ ID NO: 25839 - protein, 35 aa, Artificial Sequence
  Non-cyclic GFR-binding peptide
  MOD_RES (1), (33), (34): Xaa is C or S
XSRVVMNVTAKKIVNSSDDIKRVQVPRLKTPAXXP

SEQ ID NO: 25840 - protein, 38 aa, Artificial Sequence
  Non-cyclic GFR-binding peptide
  MOD_RES (35), (35): Xaa is C or S
  MOD_RES (11), (12), (13), (14), (15): Xaa is A or G
  MOD_RES (16), (17), (18), (19): Xaa is A or G or is absent
HDELTNSLQEXXXXXXXXXYYVVPLPELQVQTPRXQVN

SEQ ID NO: 25841 - protein, 40 aa, Artificial Sequence
  Non-cyclic GFR-binding peptide
  MOD_RES (36), (36): Xaa is C or S
  MOD_RES (12), (13), (14), (15), (16): Xaa is A or G
  MOD_RES (17), (18), (19), (20): Xaa is A or G or is absent
LHEELRNSLQEXXXXXXXXXYYLVTLPEHHVRSPQXKVSS

SEQ ID NO: 25842 - protein, 31 aa, Artificial Sequence
  Non-cyclic GFR-binding peptide
ARVVMNSMEGIIVNSSDDMIQVTINSLQTPA

SEQ ID NO: 25843 - protein, 42 aa, Artificial Sequence
  Non-cyclic GFR-binding peptide
  MOD_RES (2), (4), (38): Xaa is C or S
RXEXKNHQLFNSLQEHQGQHPKIRYYVMPLPEEETPVXELGE

SEQ ID NO: 25844 - protein, 40 aa, Artificial Sequence
  Non-cyclic GFR-binding peptide
  MOD_RES (2), (4): Xaa is C or S
  MOD_RES (17), (18), (19), (20), (21): Xaa is A or G
  MOD_RES (22), (23), (24), (25): Xaa is A or G or is absent
AXAXELHEELRNSLQEXXXXXXXXXYYLVTLPEHHVRSPQ

SEQ ID NO: 25845 - protein, 40 aa, Artificial Sequence
  Non-cyclic GFR-binding peptide
  MOD_RES (1), (34), (35): Xaa is C or S
  MOD_RES (12), (13), (14), (15), (16): Xaa is A or G
  MOD_RES (17), (18), (19), (20): Xaa is A or G or is absent
XSKVIMVQVEKXXXXXXXXXVKAIKVSRLDQSVXXPSASA

SEQ ID NO: 25846 - protein, 39 aa, Artificial Sequence
  Non-cyclic GFR-binding peptide
  MOD_RES (2), (4), (38), (39): Xaa is C or S
  MOD_RES (16), (17), (18), (19), (20): Xaa is A or G
  MOD_RES (21), (22), (23), (24): Xaa is A or G or is absent
HXGXARVVMNSMEGIXXXXXXXXXMIQVTINSLQTPAXX

SEQ ID NO: 25847 - protein, 40 aa, Artificial Sequence
  Non-cyclic GFR-binding peptide
  MOD_RES (37), (37): Xaa is C or S
  MOD_RES (13), (14), (15), (16), (17): Xaa is A or G
  MOD_RES (18), (19), (20), (21): Xaa is A or G or is absent
ELHEELRNSLQEXXXXXXXXXYYVVPLPEHHVRSPQXKVS

SEQ ID NO: 25848 - protein, 42 aa, Artificial Sequence
  Non-cyclic GFR-binding peptide
  MOD_RES (1), (38): Xaa is C or S
  MOD_RES (14), (15), (16), (17), (18): Xaa is A or G
  MOD_RES (19), (20), (21), (22): Xaa is A or G or is absent
XELHEELRNSLQEXXXXXXXXXYYLVTLPEHHVRSPQXKVSS

SEQ ID NO: 25849 - protein, 34 aa, Artificial Sequence
  Non-cyclic GFR-binding peptide
  MOD_RES (1), (3), (34): Xaa is C or S
XKXSKVIMSMEGIIKPTKGIMIQITINSLDQSVX

SEQ ID NO: 25850 - protein, 39 aa, Artificial Sequence
  Non-cyclic GFR-binding peptide
  MOD_RES (2), (36): Xaa is C or S
  MOD_RES (14), (15), (16), (17), (18): Xaa is A or G
  MOD_RES (19), (20), (21), (22): Xaa is A or G or is absent
EXKNHQLFNSLQEXXXXXXXXXYYVMPLPEEETPVXELG

SEQ ID NO: 25851 - protein, 35 aa, Artificial Sequence
  Non-cyclic GFR-binding peptide
  MOD_RES (2), (2): Xaa is C or S
  MOD_RES (14), (15), (16), (17), (18): Xaa is A or G
  MOD_RES (19), (20), (21), (22): Xaa is A or G or is absent
GXGEVVMESMEGIXXXXXXXXXMIQMTINSLETPV

SEQ ID NO: 25852 - protein, 35 aa, Artificial Sequence
  Non-cyclic GFR-binding peptide
  MOD_RES (33), (34): Xaa is C or S
  MOD_RES (11), (12), (13), (14), (15): Xaa is A or G
  MOD_RES (16), (17), (18), (19): Xaa is A or G or is absent
SKVVMVTAKKXXXXXXXXXIKRIQVPRLDQPVXXP

SEQ ID NO: 25853 - protein, 40 aa, Artificial Sequence
  Non-cyclic GFR-binding peptide
  MOD_RES (2), (34), (35): Xaa is C or S
GXSRVVMNSMEGIIVNSSDDMIQVTINSLKTPAXXPKPVY

SEQ ID NO: 25854 - protein, 40 aa, Artificial Sequence
  Non-cyclic GFR-binding peptide
  MOD_RES (1), (3), (34), (35): Xaa is C or S
XKXSKVIMVQVEKIKPTKGIVKAIKVSRLDQSVXXPSASA

SEQ ID NO: 25855 - protein, 35 aa, Artificial Sequence
  Non-cyclic GFR-binding peptide
  MOD_RES (34), (35): Xaa is C or S
  MOD_RES (12), (13), (14), (15), (16): Xaa is A or G
  MOD_RES (17), (18), (19), (20): Xaa is A or G or is absent
SRVVMNSMEGIXXXXXXXXXMIQVTINSLKTPAXX

SEQ ID NO: 25856 - protein, 34 aa, Artificial Sequence
  Non-cyclic GFR-binding peptide
  MOD_RES (31), (32): Xaa is C or S
SRVIMSMEGIVKPKRGVMIQITINSLAQPVXXPA

SEQ ID NO: 25857 - protein, 39 aa, Artificial Sequence
  Non-cyclic GFR-binding peptide
  MOD_RES (1), (3), (37), (38): Xaa is C or S
  MOD_RES (15), (16), (17), (18), (19): Xaa is A or G
  MOD_RES (20), (21), (22), (23): Xaa is A or G or is absent
XGXSRVVMNSMEGIXXXXXXXXXMIQVTINSLKTPAXXP

SEQ ID NO: 25858 - protein, 40 aa, Artificial Sequence
  Non-cyclic GFR-binding peptide
  MOD_RES (1), (35), (36): Xaa is C or S
  MOD_RES (13), (14), (15), (16), (17): Xaa is A or G
  MOD_RES (18), (19), (20), (21): Xaa is A or G or is absent
XSRVVMNSMEGIXXXXXXXXXMIQVTINSLKTPAXXPKPV

SEQ ID NO: 25859 - protein, 35 aa, Artificial Sequence
  Non-cyclic GFR-binding peptide
  MOD_RES (33), (34): Xaa is C or S
  MOD_RES (11), (12), (13), (14), (15): Xaa is A or G
  MOD_RES (16), (17), (18), (19): Xaa is A or G or is absent
SKVVMVQVEKXXXXXXXXXVKAIKVSRLDQPVXXP

SEQ ID NO: 25860 - protein, 42 aa, Artificial Sequence
  Non-cyclic GFR-binding peptide
  MOD_RES (1), (3), (37), (38): Xaa is C or S
  MOD_RES (15), (16), (17), (18), (19): Xaa is A or G
  MOD_RES (20), (21), (22), (23): Xaa is A or G or is absent
XGXARVVMNVTAKKXXXXXXXXXIKRVQVPRLQTPAXXPKPV

SEQ ID NO: 25861 - protein, 32 aa, Artificial Sequence
  Non-cyclic GFR-binding peptide
  MOD_RES (31), (32): Xaa is C or S
RVVMNVTAKKIVNSSDDIKRVQVPRLQTPAXX

SEQ ID NO: 25862 - protein, 42 aa, Artificial Sequence
  Non-cyclic GFR-binding peptide
  MOD_RES (2), (4), (38), (39): Xaa is C or S
  MOD_RES (16), (17), (18), (19), (20): Xaa is A or G
  MOD_RES (21), (22), (23), (24): Xaa is A or G or is absent
HXGXARVVMNVTAKKXXXXXXXXXIKRVQVPRLQTPAXXPKP

SEQ ID NO: 25863 - protein, 37 aa, Artificial Sequence
  Non-cyclic GFR-binding peptide
  MOD_RES (2), (35), (36): Xaa is C or S
  MOD_RES (13), (14), (15), (16), (17): Xaa is A or G
  MOD_RES (18), (19), (20), (21): Xaa is A or G or is absent
KXSKVIMSMEGIXXXXXXXXXMIQITINSLDQSVXXP

SEQ ID NO: 25864 - protein, 34 aa, Artificial Sequence
  Non-cyclic GFR-binding peptide
  MOD_RES (2), (33), (34): Xaa is C or S
KXSRVIMVTAKKVKPKRGVIKRIQVPRLAQPVXX

SEQ ID NO: 25865 - protein, 38 aa, Artificial Sequence
  Non-cyclic GFR-binding peptide
  MOD_RES (33), (34): Xaa is C or S
  MOD_RES (11), (12), (13), (14), (15): Xaa is A or G
  MOD_RES (16), (17), (18), (19): Xaa is A or G or is absent
SKVVMSMEGIXXXXXXXXXMIQITINSLDQPVXXPSAS

SEQ ID NO: 25866 - protein, 40 aa, Artificial Sequence
  Non-cyclic GFR-binding peptide
  MOD_RES (1), (3), (37), (38): Xaa is C or S
  MOD_RES (15), (16), (17), (18), (19): Xaa is A or G
  MOD_RES (20), (21), (22), (23): Xaa is A or G or is absent
XGXGEVVMDVTAKKXXXXXXXXXIKRMQVPRLETPVXXAK

SEQ ID NO: 25867 - protein, 35 aa, Artificial Sequence
  Non-cyclic GFR-binding peptide
  MOD_RES (1), (32), (33): Xaa is C or S
XSRVIMVQVEKVKPKRGVVKAIKVSRLAQPVXXPA

SEQ ID NO: 25868 - protein, 32 aa, Artificial Sequence
  Non-cyclic GFR-binding peptide
  MOD_RES (11), (12), (13), (14), (15): Xaa is A or G
  MOD_RES (16), (17), (18), (19): Xaa is A or G or is absent
RVVMNVTAKKXXXXXXXXXIKRVQVPRLKTPA

SEQ ID NO: 25869 - protein, 38 aa, Artificial Sequence
  Non-cyclic GFR-binding peptide
  MOD_RES (1), (3), (37): Xaa is C or S
  MOD_RES (15), (16), (17), (18), (19): Xaa is A or G
  MOD_RES (20), (21), (22), (23): Xaa is A or G or is absent
XGXSRVVMNVTAKKXXXXXXXXXIKRVQVPRLKTPAXT

SEQ ID NO: 25870 - protein, 38 aa, Artificial Sequence
  Non-cyclic GFR-binding peptide
  MOD_RES (1), (38): Xaa is C or S
XELHEELRNSLQELKPKKRVYEYYVVPLPEHHVRSPQX

SEQ ID NO: 25871 - protein, 37 aa, Artificial Sequence
  Non-cyclic GFR-binding peptide
  MOD_RES (2), (4): Xaa is C or S
  MOD_RES (16), (17), (18), (19), (20): Xaa is A or G
  MOD_RES (21), (22), (23), (24): Xaa is A or G or is absent
RXEXKNHQLFNSLQEXXXXXXXXXYYLMTLPEEETPV

SEQ ID NO: 25872 - protein, 39 aa, Artificial Sequence
  Non-cyclic GFR-binding peptide
  MOD_RES (1), (3), (34), (35): Xaa is C or S
XKXSKVVMVQVEKVKPTRGVVKAIKVSRLDQPVXXPSAS

SEQ ID NO: 25873 - protein, 38 aa, Artificial Sequence
  Non-cyclic GFR-binding peptide
  MOD_RES (37), (37): Xaa is C or S
  MOD_RES (13), (14), (15), (16), (17): Xaa is A or G
  MOD_RES (18), (19), (20), (21): Xaa is A or G or is absent
ELHEELRNSLQEXXXXXXXXXYYVVPLPEHHVRSPQXK

SEQ ID NO: 25874 - protein, 34 aa, Artificial Sequence
  Non-cyclic GFR-binding peptide
  MOD_RES (31), (31): Xaa is C or S
RVVMNVQVEKIVNSSDDVKAVKVSRLKTPAXTPK

SEQ ID NO: 25875 - protein, 39 aa, Artificial Sequence
  Non-cyclic GFR-binding peptide
  MOD_RES (1), (35): Xaa is C or S
XKNHQLFNSLQEHQGQHPKIRYYLMTLPEEETPVXELGE

SEQ ID NO: 25876 - protein, 38 aa, Artificial Sequence
  Non-cyclic GFR-binding peptide
  MOD_RES (1), (3), (35), (36): Xaa is C or S
XGXARVVMNVQVEKIVNSSDDVKAVKVSRLQTPAXXPK

SEQ ID NO: 25877 - protein, 41 aa, Artificial Sequence
  Non-cyclic GFR-binding peptide
  MOD_RES (1), (3), (40): Xaa is C or S
XAXELHEELRNSLQELKPKKRVYEYYLVTLPEHHVRSPQXK

SEQ ID NO: 25878 - protein, 40 aa, Artificial Sequence
  Non-cyclic GFR-binding peptide
  MOD_RES (1), (3), (35): Xaa is C or S
XGXSRVVMNVQVEKIVNSSDDVKAVKVSRLKTPAXTPKTV

SEQ ID NO: 25879 - protein, 36 aa, Artificial Sequence
  Non-cyclic GFR-binding peptide
  MOD_RES (2), (4): Xaa is C or S
  MOD_RES (15), (16), (17), (18), (19): Xaa is A or G
  MOD_RES (20), (21), (22), (23): Xaa is A or G or is absent
SXKXSKVIMVQVEKXXXXXXXXXVKAIKVSRLDQSV

SEQ ID NO: 25880 - protein, 37 aa, Artificial Sequence
  Non-cyclic GFR-binding peptide
  MOD_RES (34), (35): Xaa is C or S
  MOD_RES (12), (13), (14), (15), (16): Xaa is A or G
  MOD_RES (17), (18), (19), (20): Xaa is A or G or is absent
GEVVMDSMEGIXXXXXXXXXMIQMTINSLETPVXXAK

SEQ ID NO: 25881 - protein, 37 aa, Artificial Sequence
  Non-cyclic GFR-binding peptide
  MOD_RES (34), (35): Xaa is C or S
  MOD_RES (12), (13), (14), (15), (16): Xaa is A or G
  MOD_RES (17), (18), (19), (20): Xaa is A or G or is absent
GEVVMEVQVEKXXXXXXXXXVKAMKVSRLETPVXXAK

SEQ ID NO: 25882 - protein, 33 aa, Artificial Sequence
  Non-cyclic GFR-binding peptide
LHEELRNSLQELKPKKRVYEYYVVPLPEHHVRS

SEQ ID NO: 25883 - protein, 42 aa, Artificial Sequence
  Non-cyclic GFR-binding peptide
  MOD_RES (2), (36), (37): Xaa is C or S
  MOD_RES (14), (15), (16), (17), (18): Xaa is A or G
  MOD_RES (19), (20), (21), (22): Xaa is A or G or is absent
GXGEVVMEVTAKKXXXXXXXXXIKRMQVPRLETPVXXAKPIS

SEQ ID NO: 25884 - protein, 38 aa, Artificial Sequence
  Non-cyclic GFR-binding peptide
  MOD_RES (2), (36), (37): Xaa is C or S
  MOD_RES (14), (15), (16), (17), (18): Xaa is A or G
  MOD_RES (19), (20), (21), (22): Xaa is A or G or is absent
GXGEVVMEVTAKKXXXXXXXXXIKRMQVPRLETPVXXA

SEQ ID NO: 25885 - protein, 42 aa, Artificial Sequence
  Non-cyclic GFR-binding peptide
  MOD_RES (2), (4), (38), (39): Xaa is C or S
  MOD_RES (16), (17), (18), (19), (20): Xaa is A or G
  MOD_RES (21), (22), (23), (24): Xaa is A or G or is absent
HXGXARVVMNSMEGIXXXXXXXXXMIQVTINSLQTPAXXPKP

SEQ ID NO: 25886 - protein, 35 aa, Artificial Sequence
  Non-cyclic GFR-binding peptide
  MOD_RES (31), (32): Xaa is C or S
SKVIMVTAKKIKPTKGIIKRIQVPRLDQSVXXPSA

SEQ ID NO: 25887 - protein, 37 aa, Artificial Sequence
  Non-cyclic GFR-binding peptide
  MOD_RES (2), (36), (37): Xaa is C or S
  MOD_RES (14), (15), (16), (17), (18): Xaa is A or G
  MOD_RES (19), (20), (21), (22): Xaa is A or G or is absent
GXSRVVMNVQVEKXXXXXXXXXVKAVKVSRLKTPAXX

SEQ ID NO: 25888 - protein, 32 aa, Artificial Sequence
  Non-cyclic GFR-binding peptide
  MOD_RES (31), (32): Xaa is C or S
SKVVMVQVEKVKPTRGVVKAIKVSRLDQPVXX

SEQ ID NO: 25889 - protein, 35 aa, Artificial Sequence
  Non-cyclic GFR-binding peptide
  MOD_RES (2), (4): Xaa is C or S
RXGXGEVVMEVTAKKVVKDYEDIKRMQVPRLETPV

SEQ ID NO: 25890 - protein, 42 aa, Artificial Sequence
  Non-cyclic GFR-binding peptide
  MOD_RES (1), (3), (36), (37): Xaa is C or S
  MOD_RES (14), (15), (16), (17), (18): Xaa is A or G
  MOD_RES (19), (20), (21), (22): Xaa is A or G or is absent
XKXSKVVMVQVEKXXXXXXXXXVKAIKVSRLDQPVXXPSASA

SEQ ID NO: 25891 - protein, 37 aa, Artificial Sequence
  Non-cyclic GFR-binding peptide
  MOD_RES (2), (4): Xaa is C or S
  MOD_RES (16), (17), (18), (19), (20): Xaa is A or G
  MOD_RES (21), (22), (23), (24): Xaa is A or G or is absent
HXGXARVVMNVTAKKXXXXXXXXXIKRVQVPRLQTPA

SEQ ID NO: 25892 - protein, 34 aa, Artificial Sequence
  Non-cyclic GFR-binding peptide
  MOD_RES (1), (3): Xaa is C or S
XGXSRVVMNSMEGIIVNSSDDMIQVTINSLKTPA

SEQ ID NO: 25893 - protein, 39 aa, Artificial Sequence
  Non-cyclic GFR-binding peptide
  MOD_RES (1), (35), (36): Xaa is C or S
  MOD_RES (13), (14), (15), (16), (17): Xaa is A or G
  MOD_RES (18), (19), (20), (21): Xaa is A or G or is absent
XARVVMNVTAKKXXXXXXXXXIKRVQVPRLQTPAXXPKP

SEQ ID NO: 25894 - protein, 31 aa, Artificial Sequence
  Non-cyclic GFR-binding peptide
  MOD_RES (1), (1): Xaa is C or S
XSRVIMVQVEKVKPKRGVVKAIKVSRLAQPV

SEQ ID NO: 25895 - protein, 37 aa, Artificial Sequence
  Non-cyclic GFR-binding peptide
  MOD_RES (2), (4), (36), (37): Xaa is C or S
RXGXGEVVMEVTAKKVVKDYEDIKRMQVPRLETPVXX

SEQ ID NO: 25896 - protein, 32 aa, Artificial Sequence
  Non-cyclic GFR-binding peptide
  MOD_RES (11), (12), (13), (14), (15): Xaa is A or G
  MOD_RES (16), (17), (18), (19): Xaa is A or G or is absent
SKVIMVTAKKXXXXXXXXXIKRIQVPRLDQSV

SEQ ID NO: 25897 - protein, 35 aa, Artificial Sequence
  Non-cyclic GFR-binding peptide
  MOD_RES (2), (34): Xaa is C or S
GXSRVVMNVTAKKIVNSSDDIKRVQVPRLKTPAXT

SEQ ID NO: 25898 - protein, 35 aa, Artificial Sequence
  Non-cyclic GFR-binding peptide
  MOD_RES (2), (2): Xaa is C or S
  MOD_RES (14), (15), (16), (17), (18): Xaa is A or G
  MOD_RES (19), (20), (21), (22): Xaa is A or G or is absent
GXGEVVMDVTAKKXXXXXXXXXIKRMQVPRLETPV

SEQ ID NO: 25899 - protein, 36 aa, Artificial Sequence
  Non-cyclic GFR-binding peptide
  MOD_RES (34), (35): Xaa is C or S
  MOD_RES (12), (13), (14), (15), (16): Xaa is A or G
  MOD_RES (17), (18), (19), (20): Xaa is A or G or is absent
GEVVMDVTAKKXXXXXXXXXIKRMQVPRLETPVXXA

SEQ ID NO: 25900 - protein, 39 aa, Artificial Sequence
  Non-cyclic GFR-binding peptide
  MOD_RES (1), (34), (35): Xaa is C or S
  MOD_RES (12), (13), (14), (15), (16): Xaa is A or G
  MOD_RES (17), (18), (19), (20): Xaa is A or G or is absent
XSRVIMVQVEKXXXXXXXXXVKAIKVSRLAQPVXXPAAS

SEQ ID NO: 25901 - protein, 34 aa, Artificial Sequence
  Non-cyclic GFR-binding peptide
  MOD_RES (31), (32): Xaa is C or S
SKVVMVQVEKVKPTRGVVKAIKVSRLDQPVXXPS

SEQ ID NO: 25902 - protein, 40 aa, Artificial Sequence
  Non-cyclic GFR-binding peptide
  MOD_RES (2), (36): Xaa is C or S
  MOD_RES (14), (15), (16), (17), (18): Xaa is A or G
  MOD_RES (19), (20), (21), (22): Xaa is A or G or is absent
EXKNHQLFNSLQEXXXXXXXXXYYLMTLPEEETPVXELGE

SEQ ID NO: 25903 - protein, 38 aa, Artificial Sequence
  Non-cyclic GFR-binding peptide
  MOD_RES (1), (3), (37): Xaa is C or S
  MOD_RES (15), (16), (17), (18), (19): Xaa is A or G
  MOD_RES (20), (21), (22), (23): Xaa is A or G or is absent
XEXKNHQLFNSLQEXXXXXXXXXYYLMTLPEEETPVXE

SEQ ID NO: 25904 - protein, 36 aa, Artificial Sequence
  Non-cyclic GFR-binding peptide
  MOD_RES (33), (34): Xaa is C or S
  MOD_RES (11), (12), (13), (14), (15): Xaa is A or G
  MOD_RES (16), (17), (18), (19): Xaa is A or G or is absent
RVVMNSMEGIXXXXXXXXXMIQVTINSLKTPAXXPK

SEQ ID NO: 25905 - protein, 33 aa, Artificial Sequence
  Non-cyclic GFR-binding peptide
  MOD_RES (12), (13), (14), (15), (16): Xaa is A or G
  MOD_RES (17), (18), (19), (20): Xaa is A or G or is absent
GEVVMEVQVEKXXXXXXXXXVKAMKVSRLETPV

SEQ ID NO: 25906 - protein, 32 aa, Artificial Sequence
  Non-cyclic GFR-binding peptide
  MOD_RES (11), (12), (13), (14), (15): Xaa is A or G
  MOD_RES (16), (17), (18), (19): Xaa is A or G or is absent
SKVIMVQVEKXXXXXXXXXVKAIKVSRLDQSV

SEQ ID NO: 25907 - protein, 37 aa, Artificial Sequence
  Non-cyclic GFR-binding peptide
  MOD_RES (2), (2): Xaa is C or S
  MOD_RES (15), (16), (17), (18), (19): Xaa is A or G
  MOD_RES (20), (21), (22), (23): Xaa is A or G or is absent
AXELHEELRNSLQEXXXXXXXXXYYLVTLPEHHVRSP

SEQ ID NO: 25908 - protein, 38 aa, Artificial Sequence
  Non-cyclic GFR-binding peptide
  MOD_RES (33), (33): Xaa is C or S
NHQLFNSLQEHQGQHPKIRYYVMPLPEEETPVXELGED

SEQ ID NO: 25909 - protein, 34 aa, Artificial Sequence
  Non-cyclic GFR-binding peptide
  MOD_RES (1), (34): Xaa is C or S
  MOD_RES (12), (13), (14), (15), (16): Xaa is A or G
  MOD_RES (17), (18), (19), (20): Xaa is A or G or is absent
XSKVVMSMEGIXXXXXXXXXMIQITINSLDQPVX

SEQ ID NO: 25910 - protein, 39 aa, Artificial Sequence
  Non-cyclic GFR-binding peptide
  MOD_RES (2), (4), (38): Xaa is C or S
RXEXKNHQLFNSLQEHQGQHPKIRYYLMTLPEEETPVXE

SEQ ID NO: 25911 - protein, 38 aa, Artificial Sequence
  Non-cyclic GFR-binding peptide
  MOD_RES (1), (33), (34): Xaa is C or S
XGEVVMEVTAKKVVKDYEDIKRMQVPRLETPVXXAKPI

SEQ ID NO: 25912 - protein, 40 aa, Artificial Sequence
  Non-cyclic GFR-binding peptide
  MOD_RES (1), (3), (35), (36): Xaa is C or S
XGXARVVMNVTAKKIVNSSDDIKRVQVPRLQTPAXXPKPV

SEQ ID NO: 25913 - protein, 34 aa, Artificial Sequence
  Non-cyclic GFR-binding peptide
  MOD_RES (13), (14), (15), (16), (17): Xaa is A or G
  MOD_RES (18), (19), (20), (21): Xaa is A or G or is absent
ELHEELRNSLQEXXXXXXXXXYYVVPLPEHHVRS

SEQ ID NO: 25914 - protein, 37 aa, Artificial Sequence
  Non-cyclic GFR-binding peptide
  MOD_RES (34), (35): Xaa is C or S
  MOD_RES (12), (13), (14), (15), (16): Xaa is A or G
  MOD_RES (17), (18), (19), (20): Xaa is A or G or is absent
ARVVMNVTAKKXXXXXXXXXIKRVQVPRLQTPAXXPK

SEQ ID NO: 25915 - protein, 33 aa, Artificial Sequence
  Non-cyclic GFR-binding peptide
  MOD_RES (31), (32): Xaa is C or S
RVVMNSMEGIIVNSSDDMIQVTINSLQTPAXXP

SEQ ID NO: 25916 - protein, 32 aa, Artificial Sequence
  Non-cyclic GFR-binding peptide
  MOD_RES (11), (12), (13), (14), (15): Xaa is A or G
  MOD_RES (16), (17), (18), (19): Xaa is A or G or is absent
EVVMDVQVEKXXXXXXXXXVKAMKVSRLETPV

SEQ ID NO: 25917 - protein, 38 aa, Artificial Sequence
  Non-cyclic GFR-binding peptide
  MOD_RES (2), (35), (36): Xaa is C or S
  MOD_RES (13), (14), (15), (16), (17): Xaa is A or G
  MOD_RES (18), (19), (20), (21): Xaa is A or G or is absent
KXSRVIMSMEGIXXXXXXXXXMIQITINSLAQPVXXPA

SEQ ID NO: 25918 - protein, 35 aa, Artificial Sequence
  Non-cyclic GFR-binding peptide
  MOD_RES (32), (33): Xaa is C or S
GEVVMDSMEGIVVKENEDMIQMTINSLETPVXXAK

SEQ ID NO: 25919 - protein, 39 aa, Artificial Sequence
  Non-cyclic GFR-binding peptide
  MOD_RES (2), (36), (37): Xaa is C or S
  MOD_RES (14), (15), (16), (17), (18): Xaa is A or G
  MOD_RES (19), (20), (21), (22): Xaa is A or G or is absent
GXARVVMNSMEGIXXXXXXXXXMIQVTINSLQTPAXXPK

SEQ ID NO: 25920 - protein, 35 aa, Artificial Sequence
  Non-cyclic GFR-binding peptide
  MOD_RES (2), (33), (34): Xaa is C or S
KXSKVVMVQVEKVKPTRGVVKAIKVSRLDQPVXXP

SEQ ID NO: 25921 - protein, 34 aa, Artificial Sequence
  Non-cyclic GFR-binding peptide
  MOD_RES (34), (34): Xaa is C or S
  MOD_RES (12), (13), (14), (15), (16): Xaa is A or G
  MOD_RES (17), (18), (19), (20): Xaa is A or G or is absent
GEVVMESMEGIXXXXXXXXXMIQMTINSLETPVX

SEQ ID NO: 25922 - protein, 36 aa, Artificial Sequence
  Non-cyclic GFR-binding peptide
  MOD_RES (33), (33): Xaa is C or S
NHQLFNSLQEHQGQHPKIRYYLMTLPEEETPVXELG

SEQ ID NO: 25923 - protein, 35 aa, Artificial Sequence
  Non-cyclic GFR-binding peptide
  MOD_RES (2), (33), (34): Xaa is C or S
KXSKVIMVQVEKIKPTKGIVKAIKVSRLDQSVXXP

SEQ ID NO: 25924 - protein, 30 aa, Artificial Sequence
  Non-cyclic GFR-binding peptide
SKVIMVQVEKIKPTKGIVKAIKVSRLDQSV

SEQ ID NO: 25925 - protein, 40 aa, Artificial Sequence
  Non-cyclic GFR-binding peptide
  MOD_RES (1), (3), (37), (38): Xaa is C or S
  MOD_RES (15), (16), (17), (18), (19): Xaa is A or G
  MOD_RES (20), (21), (22), (23): Xaa is A or G or is absent
XGXGEVVMEVTAKKXXXXXXXXXIKRMQVPRLETPVXXAK

SEQ ID NO: 25926 - protein, 35 aa, Artificial Sequence
  Non-cyclic GFR-binding peptide
  MOD_RES (2), (2): Xaa is C or S
  MOD_RES (14), (15), (16), (17), (18): Xaa is A or G
  MOD_RES (19), (20), (21), (22): Xaa is A or G or is absent
GXSRVVMNVTAKKXXXXXXXXXIKRVQVPRLKTPA

SEQ ID NO: 25927 - protein, 43 aa, Artificial Sequence
  Non-cyclic GFR-binding peptide
  MOD_RES (1), (3), (37), (38): Xaa is C or S
  MOD_RES (15), (16), (17), (18), (19): Xaa is A or G
  MOD_RES (20), (21), (22), (23): Xaa is A or G or is absent
XGXGEVVMDVTAKKXXXXXXXXXIKRMQVPRLETPVXXAKPIK

SEQ ID NO: 25928 - protein, 37 aa, Artificial Sequence
  Non-cyclic GFR-binding peptide
  MOD_RES (31), (32): Xaa is C or S
RVVMNVQVEKIVNSSDDVKAVKVSRLKTPAXXPKPVY

SEQ ID NO: 25929 - protein, 34 aa, Artificial Sequence
  Non-cyclic GFR-binding peptide
  MOD_RES (1), (3), (34): Xaa is C or S
XKXSKVVMSMEGIVKPTRGVMIQITINSLDQPVX

SEQ ID NO: 25930 - protein, 33 aa, Artificial Sequence
  Non-cyclic GFR-binding peptide
  MOD_RES (1), (32), (33): Xaa is C or S
XSKVIMSMEGIIKPTKGIMIQITINSLDQSVXX

SEQ ID NO: 25931 - protein, 39 aa, Artificial Sequence
  Non-cyclic GFR-binding peptide
  MOD_RES (35), (35): Xaa is C or S
  MOD_RES (11), (12), (13), (14), (15): Xaa is A or G
  MOD_RES (16), (17), (18), (19): Xaa is A or G or is absent
HDELTNSLQEXXXXXXXXXYYVVPLPELQVQTPRXQVNR

SEQ ID NO: 25932 - protein, 37 aa, Artificial Sequence
  Non-cyclic GFR-binding peptide
  MOD_RES (1), (35): Xaa is C or S
  MOD_RES (13), (14), (15), (16), (17): Xaa is A or G
  MOD_RES (18), (19), (20), (21): Xaa is A or G or is absent
XSRVVMNVQVEKXXXXXXXXXVKAVKVSRLKTPAXTP

SEQ ID NO: 25933 - protein, 35 aa, Artificial Sequence
  Non-cyclic GFR-binding peptide
  MOD_RES (1), (34), (35): Xaa is C or S
  MOD_RES (12), (13), (14), (15), (16): Xaa is A or G
  MOD_RES (17), (18), (19), (20): Xaa is A or G or is absent
XSKVIMVQVEKXXXXXXXXXVKAIKVSRLDQSVXX

SEQ ID NO: 25934 - protein, 40 aa, Artificial Sequence
  Non-cyclic GFR-binding peptide
  MOD_RES (1), (38): Xaa is C or S
XALHDELTNSLQEFIPKKRVIEYYVVPLPELQVQTPRXQV

SEQ ID NO: 25935 - protein, 36 aa, Artificial Sequence
  Non-cyclic GFR-binding peptide
  MOD_RES (33), (34): Xaa is C or S
  MOD_RES (11), (12), (13), (14), (15): Xaa is A or G
  MOD_RES (16), (17), (18), (19): Xaa is A or G or is absent
SRVIMSMEGIXXXXXXXXXMIQITINSLAQPVXXPA

SEQ ID NO: 25936 - protein, 38 aa, Artificial Sequence
  Non-cyclic GFR-binding peptide
  MOD_RES (2), (35), (36): Xaa is C or S
  MOD_RES (13), (14), (15), (16), (17): Xaa is A or G
  MOD_RES (18), (19), (20), (21): Xaa is A or G or is absent
KXSKVVMVTAKKXXXXXXXXXIKRIQVPRLDQPVXXPS

SEQ ID NO: 25937 - protein, 37 aa, Artificial Sequence
  Non-cyclic GFR-binding peptide
  MOD_RES (2), (33), (34): Xaa is C or S
KXSKVVMSMEGIVKPTRGVMIQITINSLDQPVXXPSA

SEQ ID NO: 25938 - protein, 38 aa, Artificial Sequence
  Non-cyclic GFR-binding peptide
  MOD_RES (1), (3), (37), (38): Xaa is C or S
  MOD_RES (15), (16), (17), (18), (19): Xaa is A or G
  MOD_RES (20), (21), (22), (23): Xaa is A or G or is absent
XGXARVVMNSMEGIXXXXXXXXXMIQVTINSLQTPAXX

SEQ ID NO: 25939 - protein, 39 aa, Artificial Sequence
  Non-cyclic GFR-binding peptide
  MOD_RES (1), (35), (36): Xaa is C or S
  MOD_RES (13), (14), (15), (16), (17): Xaa is A or G
  MOD_RES (18), (19), (20), (21): Xaa is A or G or is absent
XARVVMNVQVEKXXXXXXXXXVKAVKVSRLQTPAXXPKP

SEQ ID NO: 25940 - protein, 41 aa, Artificial Sequence
  Non-cyclic GFR-binding peptide
  MOD_RES (2), (39): Xaa is C or S
KXALHDELTNSLQEFIPKKRVIEYYVVPLPELQVQTPRXQV

SEQ ID NO: 25941 - protein, 36 aa, Artificial Sequence
  Non-cyclic GFR-binding peptide
  MOD_RES (33), (34): Xaa is C or S
  MOD_RES (11), (12), (13), (14), (15): Xaa is A or G
  MOD_RES (16), (17), (18), (19): Xaa is A or G or is absent
EVVMDSMEGIXXXXXXXXXMIQMTINSLETPVXXAK

SEQ ID NO: 25942 - protein, 39 aa, Artificial Sequence
  Non-cyclic GFR-binding peptide
  MOD_RES (33), (34): Xaa is C or S
  MOD_RES (11), (12), (13), (14), (15): Xaa is A or G
  MOD_RES (16), (17), (18), (19): Xaa is A or G or is absent
RVVMNVQVEKXXXXXXXXXVKAVKVSRLKTPAXXPKPVY

SEQ ID NO: 25943 - protein, 35 aa, Artificial Sequence
  Non-cyclic GFR-binding peptide
  MOD_RES (1), (1): Xaa is C or S
XALHDELTNSLQEFIPKKRVIEYYVVPLPELQVQT

SEQ ID NO: 25944 - protein, 39 aa, Artificial Sequence
  Non-cyclic GFR-binding peptide
  MOD_RES (2), (34), (35): Xaa is C or S
GXGEVVMDSMEGIVVKENEDMIQMTINSLETPVXXAKPI

SEQ ID NO: 25945 - protein, 37 aa, Artificial Sequence
  Non-cyclic GFR-binding peptide
  MOD_RES (2), (35), (36): Xaa is C or S
  MOD_RES (13), (14), (15), (16), (17): Xaa is A or G
  MOD_RES (18), (19), (20), (21): Xaa is A or G or is absent
KXSKVVMVQVEKXXXXXXXXXVKAIKVSRLDQPVXXP

SEQ ID NO: 25946 - protein, 40 aa, Artificial Sequence
  Non-cyclic GFR-binding peptide
  MOD_RES (2), (4): Xaa is C or S
EXKXALHDELTNSLQEFIPKKRVIEYYVVPLPELQVQTPR

SEQ ID NO: 25947 - protein, 33 aa, Artificial Sequence
  Non-cyclic GFR-binding peptide
  MOD_RES (32), (33): Xaa is C or S
GEVVMDSMEGIVVKENEDMIQMTINSLETPVXX

SEQ ID NO: 25948 - protein, 39 aa, Artificial Sequence
  Non-cyclic GFR-binding peptide
  MOD_RES (2), (35), (36): Xaa is C or S
  MOD_RES (13), (14), (15), (16), (17): Xaa is A or G
  MOD_RES (18), (19), (20), (21): Xaa is A or G or is absent
KXSRVIMVTAKKXXXXXXXXXIKRIQVPRLAQPVXXPAA

SEQ ID NO: 25949 - protein, 34 aa, Artificial Sequence
  Non-cyclic GFR-binding peptide
  MOD_RES (1), (32), (33): Xaa is C or S
XSKVVMVQVEKVKPTRGVVKAIKVSRLDQPVXXP

SEQ ID NO: 25950 - protein, 36 aa, Artificial Sequence
  Non-cyclic GFR-binding peptide
  MOD_RES (1), (35), (36): Xaa is C or S
  MOD_RES (13), (14), (15), (16), (17): Xaa is A or G
  MOD_RES (18), (19), (20), (21): Xaa is A or G or is absent
XARVVMNSMEGIXXXXXXXXXMIQVTINSLQTPAXX

SEQ ID NO: 25951 - protein, 39 aa, Artificial Sequence
  Non-cyclic GFR-binding peptide
  MOD_RES (36), (36): Xaa is C or S
  MOD_RES (12), (13), (14), (15), (16): Xaa is A or G
  MOD_RES (17), (18), (19), (20): Xaa is A or G or is absent
LHDELTNSLQEXXXXXXXXXYYLVTLPELQVQTPRXQVN

SEQ ID NO: 25952 - protein, 39 aa, Artificial Sequence
  Non-cyclic GFR-binding peptide
  MOD_RES (34), (35): Xaa is C or S
  MOD_RES (12), (13), (14), (15), (16): Xaa is A or G
  MOD_RES (17), (18), (19), (20): Xaa is A or G or is absent
GEVVMDVQVEKXXXXXXXXXVKAMKVSRLETPVXXAKPI

SEQ ID NO: 25953 - protein, 31 aa, Artificial Sequence
  Non-cyclic GFR-binding peptide
  MOD_RES (31), (31): Xaa is C or S
RVVMNSMEGIIVNSSDDMIQVTINSLKTPAX

SEQ ID NO: 25954 - protein, 35 aa, Artificial Sequence
  Non-cyclic GFR-binding peptide
  MOD_RES (1), (35): Xaa is C or S
  MOD_RES (13), (14), (15), (16), (17): Xaa is A or G
  MOD_RES (18), (19), (20), (21): Xaa is A or G or is absent
XARVVMNSMEGIXXXXXXXXXMIQVTINSLQTPAX

SEQ ID NO: 25955 - protein, 37 aa, Artificial Sequence
  Non-cyclic GFR-binding peptide
  MOD_RES (1), (1): Xaa is C or S
  MOD_RES (14), (15), (16), (17), (18): Xaa is A or G
  MOD_RES (19), (20), (21), (22): Xaa is A or G or is absent
XELHEELRNSLQEXXXXXXXXXYYLVTLPEHHVRSPQ

SEQ ID NO: 25956 - protein, 39 aa, Artificial Sequence
  Non-cyclic GFR-binding peptide
  MOD_RES (1), (3), (37), (38): Xaa is C or S
  MOD_RES (15), (16), (17), (18), (19): Xaa is A or G
  MOD_RES (20), (21), (22), (23): Xaa is A or G or is absent
XGXARVVMNVTAKKXXXXXXXXXIKRVQVPRLQTPAXXP

SEQ ID NO: 25957 - protein, 40 aa, Artificial Sequence
  Non-cyclic GFR-binding peptide
  MOD_RES (2), (36), (37): Xaa is C or S
  MOD_RES (14), (15), (16), (17), (18): Xaa is A or G
  MOD_RES (19), (20), (21), (22): Xaa is A or G or is absent
GXGEVVMDVTAKKXXXXXXXXXIKRMQVPRLETPVXXAKP

SEQ ID NO: 25958 - protein, 39 aa, Artificial Sequence
  Non-cyclic GFR-binding peptide
  MOD_RES (2), (4), (38), (39): Xaa is C or S
  MOD_RES (16), (17), (18), (19), (20): Xaa is A or G
  MOD_RES (21), (22), (23), (24): Xaa is A or G or is absent
HXGXARVVMNVQVEKXXXXXXXXXVKAVKVSRLQTPAXX

SEQ ID NO: 25959 - protein, 33 aa, Artificial Sequence
  Non-cyclic GFR-binding peptide
  MOD_RES (33), (33): Xaa is C or S
  MOD_RES (11), (12), (13), (14), (15): Xaa is A or G
  MOD_RES (16), (17), (18), (19): Xaa is A or G or is absent
SKVVMVQVEKXXXXXXXXXVKAIKVSRLDQPVX

SEQ ID NO: 25960 - protein, 40 aa, Artificial Sequence
  Non-cyclic GFR-binding peptide
  MOD_RES (34), (35): Xaa is C or S
  MOD_RES (12), (13), (14), (15), (16): Xaa is A or G
  MOD_RES (17), (18), (19), (20): Xaa is A or G or is absent
ARVVMNVQVEKXXXXXXXXXVKAVKVSRLQTPAXXPKPVT

SEQ ID NO: 25961 - protein, 33 aa, Artificial Sequence
  Non-cyclic GFR-binding peptide
  MOD_RES (33), (33): Xaa is C or S
  MOD_RES (11), (12), (13), (14), (15): Xaa is A or G
  MOD_RES (16), (17), (18), (19): Xaa is A or G or is absent
SRVIMVTAKKXXXXXXXXXIKRIQVPRLAQPVX

SEQ ID NO: 25962 - protein, 39 aa, Artificial Sequence
  Non-cyclic GFR-binding peptide
  MOD_RES (2), (36), (37): Xaa is C or S
  MOD_RES (14), (15), (16), (17), (18): Xaa is A or G
  MOD_RES (19), (20), (21), (22): Xaa is A or G or is absent
GXSRVVMNVQVEKXXXXXXXXXVKAVKVSRLKTPAXXPK

SEQ ID NO: 25963 - protein, 42 aa, Artificial Sequence
  Non-cyclic GFR-binding peptide
  MOD_RES (2), (4), (36): Xaa is C or S
HXGXSRVVMNVQVEKIVNSSDDVKAVKVSRLKTPAXTPKTVH

SEQ ID NO: 25964 - protein, 35 aa, Artificial Sequence
  Non-cyclic GFR-binding peptide
  MOD_RES (35), (35): Xaa is C or S
HDELTNSLQEFIPKKRVIEYYLVTLPELQVQTPRX

SEQ ID NO: 25965 - protein, 42 aa, Artificial Sequence
  Non-cyclic GFR-binding peptide
  MOD_RES (2), (36), (37): Xaa is C or S
  MOD_RES (14), (15), (16), (17), (18): Xaa is A or G
  MOD_RES (19), (20), (21), (22): Xaa is A or G or is absent
GXSRVVMNVQVEKXXXXXXXXXVKAVKVSRLKTPAXXPKPVY

SEQ ID NO: 25966 - protein, 40 aa, Artificial Sequence
  Non-cyclic GFR-binding peptide
  MOD_RES (2), (4), (37), (38): Xaa is C or S
  MOD_RES (15), (16), (17), (18), (19): Xaa is A or G
  MOD_RES (20), (21), (22), (23): Xaa is A or G or is absent
SXKXSKVVMVQVEKXXXXXXXXXVKAIKVSRLDQPVXXPS

SEQ ID NO: 25967 - protein, 40 aa, Artificial Sequence
  Non-cyclic GFR-binding peptide
  MOD_RES (37), (37): Xaa is C or S
ALHDELTNSLQEFIPKKRVIEYYVVPLPELQVQTPRXQVN

SEQ ID NO: 25968 - protein, 33 aa, Artificial Sequence
  Non-cyclic GFR-binding peptide
  MOD_RES (1), (32), (33): Xaa is C or S
XSRVIMVQVEKVKPKRGVVKAIKVSRLAQPVXX

SEQ ID NO: 25969 - protein, 38 aa, Artificial Sequence
  Non-cyclic GFR-binding peptide
  MOD_RES (2), (4), (35), (36): Xaa is C or S
SXKXSKVVMSMEGIVKPTRGVMIQITINSLDQPVXXPS

SEQ ID NO: 25970 - protein, 34 aa, Artificial Sequence
  Non-cyclic GFR-binding peptide
  MOD_RES (1), (1): Xaa is C or S
  MOD_RES (13), (14), (15), (16), (17): Xaa is A or G
  MOD_RES (18), (19), (20), (21): Xaa is A or G or is absent
XARVVMNSMEGIXXXXXXXXXMIQVTINSLQTPA

SEQ ID NO: 25971 - protein, 39 aa, Artificial Sequence
  Non-cyclic GFR-binding peptide
  MOD_RES (1), (3), (37): Xaa is C or S
  MOD_RES (15), (16), (17), (18), (19): Xaa is A or G
  MOD_RES (20), (21), (22), (23): Xaa is A or G or is absent
XGXSRVVMNSMEGIXXXXXXXXXMIQVTINSLKTPAXTP

SEQ ID NO: 25972 - protein, 38 aa, Artificial Sequence
  Non-cyclic GFR-binding peptide
  MOD_RES (33), (34): Xaa is C or S
  MOD_RES (11), (12), (13), (14), (15): Xaa is A or G
  MOD_RES (16), (17), (18), (19): Xaa is A or G or is absent
EVVMESMEGIXXXXXXXXXMIQMTINSLETPVXXAKPI

SEQ ID NO: 25973 - protein, 39 aa, Artificial Sequence
  Non-cyclic GFR-binding peptide
  MOD_RES (1), (3), (37): Xaa is C or S
XEXKNHQLFNSLQEHQGQHPKIRYYLMTLPEEETPVXEL

SEQ ID NO: 25974 - protein, 32 aa, Artificial Sequence
  Non-cyclic GFR-binding peptide
  MOD_RES (2), (2): Xaa is C or S
KXSRVIMSMEGIVKPKRGVMIQITINSLAQPV

SEQ ID NO: 25975 - protein, 40 aa, Artificial Sequence
  Non-cyclic GFR-binding peptide
  MOD_RES (1), (3), (40): Xaa is C or S
XAXELHEELRNSLQELKPKKRVYEYYLVTLPEHHVRSPQX

SEQ ID NO: 25976 - protein, 38 aa, Artificial Sequence
  Non-cyclic GFR-binding peptide
  MOD_RES (1), (33): Xaa is C or S
XSRVVMNSMEGIIVNSSDDMIQVTINSLKTPAXTPKTV

SEQ ID NO: 25977 - protein, 43 aa, Artificial Sequence
  Non-cyclic GFR-binding peptide
  MOD_RES (2), (4), (38), (39): Xaa is C or S
  MOD_RES (16), (17), (18), (19), (20): Xaa is A or G
  MOD_RES (21), (22), (23), (24): Xaa is A or G or is absent
HXGXARVVMNSMEGIXXXXXXXXXMIQVTINSLQTPAXXPKPV

SEQ ID NO: 25978 - protein, 37 aa, Artificial Sequence
  Non-cyclic GFR-binding peptide
  MOD_RES (34), (34): Xaa is C or S
KNHQLFNSLQEHQGQHPKIRYYVMPLPEEETPVXELG

SEQ ID NO: 25979 - protein, 40 aa, Artificial Sequence
  Non-cyclic GFR-binding peptide
  MOD_RES (1), (3), (35), (36): Xaa is C or S
XGXGEVVMDSMEGIVVKENEDMIQMTINSLETPVXXAKPI

SEQ ID NO: 25980 - protein, 43 aa, Artificial Sequence
  Non-cyclic GFR-binding peptide
  MOD_RES (1), (3), (37), (38): Xaa is C or S
  MOD_RES (15), (16), (17), (18), (19): Xaa is A or G
  MOD_RES (20), (21), (22), (23): Xaa is A or G or is absent
XGXARVVMNVTAKKXXXXXXXXXIKRVQVPRLQTPAXXPKPVT

SEQ ID NO: 25981 - protein, 32 aa, Artificial Sequence
  Non-cyclic GFR-binding peptide
  MOD_RES (1), (1): Xaa is C or S
XARVVMNVQVEKIVNSSDDVKAVKVSRLQTPA

SEQ ID NO: 25982 - protein, 38 aa, Artificial Sequence
  Non-cyclic GFR-binding peptide
  MOD_RES (32), (33): Xaa is C or S
GEVVMDVQVEKVVKENEDVKAMKVSRLETPVXXAKPIK

SEQ ID NO: 25983 - protein, 41 aa, Artificial Sequence
  Non-cyclic GFR-binding peptide
  MOD_RES (1), (35): Xaa is C or S
  MOD_RES (13), (14), (15), (16), (17): Xaa is A or G
  MOD_RES (18), (19), (20), (21): Xaa is A or G or is absent
XKNHQLFNSLQEXXXXXXXXXYYVMPLPEEETPVXELGEDN

SEQ ID NO: 25984 - protein, 34 aa, Artificial Sequence
  Non-cyclic GFR-binding peptide
  MOD_RES (33), (34): Xaa is C or S
  MOD_RES (11), (12), (13), (14), (15): Xaa is A or G
  MOD_RES (16), (17), (18), (19): Xaa is A or G or is absent
RVVMNVTAKKXXXXXXXXXIKRVQVPRLQTPAXX

SEQ ID NO: 25985 - protein, 40 aa, Artificial Sequence
  Non-cyclic GFR-binding peptide
  MOD_RES (2), (34): Xaa is C or S
GXSRVVMNVQVEKIVNSSDDVKAVKVSRLKTPAXTPKTVH

SEQ ID NO: 25986 - protein, 36 aa, Artificial Sequence
  Non-cyclic GFR-binding peptide
  MOD_RES (1), (3), (35), (36): Xaa is C or S
XGXGEVVMEVQVEKVVKDYEDVKAMKVSRLETPVXX

SEQ ID NO: 25987 - protein, 38 aa, Artificial Sequence
  Non-cyclic GFR-binding peptide
  MOD_RES (32), (33): Xaa is C or S
SRVVMNVTAKKIVNSSDDIKRVQVPRLKTPAXXPKPVY

SEQ ID NO: 25988 - protein, 38 aa, Artificial Sequence
  Non-cyclic GFR-binding peptide
  MOD_RES (2), (4), (36): Xaa is C or S
HXGXSRVVMNVQVEKIVNSSDDVKAVKVSRLKTPAXTP

SEQ ID NO: 25989 - protein, 33 aa, Artificial Sequence
  Non-cyclic GFR-binding peptide
  MOD_RES (12), (13), (14), (15), (16): Xaa is A or G
  MOD_RES (17), (18), (19), (20): Xaa is A or G or is absent
SRVVMNVQVEKXXXXXXXXXVKAVKVSRLKTPA

SEQ ID NO: 25990 - protein, 36 aa, Artificial Sequence
  Non-cyclic GFR-binding peptide
  MOD_RES (2), (34), (35): Xaa is C or S
GXSRVVMNVQVEKIVNSSDDVKAVKVSRLKTPAXXP

SEQ ID NO: 25991 - protein, 38 aa, Artificial Sequence
  Non-cyclic GFR-binding peptide
  MOD_RES (35), (35): Xaa is C or S
  MOD_RES (11), (12), (13), (14), (15): Xaa is A or G
  MOD_RES (16), (17), (18), (19): Xaa is A or G or is absent
HEELRNSLQEXXXXXXXXXYYLVTLPEHHVRSPQXKVS

SEQ ID NO: 25992 - protein, 39 aa, Artificial Sequence
  Non-cyclic GFR-binding peptide
  MOD_RES (2), (4), (35), (36): Xaa is C or S
SXKXSRVIMSMEGIVKPKRGVMIQITINSLAQPVXXPAA

SEQ ID NO: 25993 - protein, 36 aa, Artificial Sequence
  Non-cyclic GFR-binding peptide
  MOD_RES (2), (34), (35): Xaa is C or S
GXGEVVMEVQVEKVVKDYEDVKAMKVSRLETPVXXA

SEQ ID NO: 25994 - protein, 38 aa, Artificial Sequence
  Non-cyclic GFR-binding peptide
  MOD_RES (1), (3), (36), (37): Xaa is C or S
  MOD_RES (14), (15), (16), (17), (18): Xaa is A or G
  MOD_RES (19), (20), (21), (22): Xaa is A or G or is absent
XKXSKVVMVQVEKXXXXXXXXXVKAIKVSRLDQPVXXP

SEQ ID NO: 25995 - protein, 36 aa, Artificial Sequence
  Non-cyclic GFR-binding peptide
  MOD_RES (13), (14), (15), (16), (17): Xaa is A or G
  MOD_RES (18), (19), (20), (21): Xaa is A or G or is absent
ALHDELTNSLQEXXXXXXXXXYYLVTLPELQVQTPR

SEQ ID NO: 25996 - protein, 39 aa, Artificial Sequence
  Non-cyclic GFR-binding peptide
  MOD_RES (2), (34), (35): Xaa is C or S
GXSRVVMNVTAKKIVNSSDDIKRVQVPRLKTPAXXPKPV

SEQ ID NO: 25997 - protein, 39 aa, Artificial Sequence
  Non-cyclic GFR-binding peptide
  MOD_RES (33), (34): Xaa is C or S
  MOD_RES (11), (12), (13), (14), (15): Xaa is A or G
  MOD_RES (16), (17), (18), (19): Xaa is A or G or is absent
EVVMDVTAKKXXXXXXXXXIKRMQVPRLETPVXXAKPIK

SEQ ID NO: 25998 - protein, 36 aa, Artificial Sequence
  Non-cyclic GFR-binding peptide
  MOD_RES (2), (36): Xaa is C or S
  MOD_RES (14), (15), (16), (17), (18): Xaa is A or G
  MOD_RES (19), (20), (21), (22): Xaa is A or G or is absent
GXGEVVMDSMEGIXXXXXXXXXMIQMTINSLETPVX

SEQ ID NO: 25999 - protein, 43 aa, Artificial Sequence
  Non-cyclic GFR-binding peptide
  MOD_RES (2), (39): Xaa is C or S
KXALHDELTNSLQEFIPKKRVIEYYLVTLPELQVQTPRXQVNR

SEQ ID NO: 26000 - protein, 36 aa, Artificial Sequence
  Non-cyclic GFR-binding peptide
  MOD_RES (1), (32), (33): Xaa is C or S
XSRVIMSMEGIVKPKRGVMIQITINSLAQPVXXPAA

SEQ ID NO: 26001 - protein, 37 aa, Artificial Sequence
  Non-cyclic GFR-binding peptide
  MOD_RES (2), (4), (36), (37): Xaa is C or S
RXGXGEVVMDVQVEKVVKENEDVKAMKVSRLETPVXX

SEQ ID NO: 26002 - protein, 34 aa, Artificial Sequence
  Non-cyclic GFR-binding peptide
  MOD_RES (31), (32): Xaa is C or S
SRVIMVQVEKVKPKRGVVKAIKVSRLAQPVXXPA

SEQ ID NO: 26003 - protein, 33 aa, Artificial Sequence
  Non-cyclic GFR-binding peptide
  MOD_RES (1), (32), (33): Xaa is C or S
XSRVIMSMEGIVKPKRGVMIQITINSLAQPVXX

SEQ ID NO: 26004 - protein, 39 aa, Artificial Sequence
  Non-cyclic GFR-binding peptide
  MOD_RES (33), (34): Xaa is C or S
  MOD_RES (11), (12), (13), (14), (15): Xaa is A or G
  MOD_RES (16), (17), (18), (19): Xaa is A or G or is absent
SRVIMVTAKKXXXXXXXXXIKRIQVPRLAQPVXXPAASA

SEQ ID NO: 26005 - protein, 33 aa, Artificial Sequence
  Non-cyclic GFR-binding peptide
  MOD_RES (31), (32): Xaa is C or S
EVVMDVTAKKVVKENEDIKRMQVPRLETPVXXA

SEQ ID NO: 26006 - protein, 40 aa, Artificial Sequence
  Non-cyclic GFR-binding peptide
  MOD_RES (1), (3), (37), (38): Xaa is C or S
  MOD_RES (15), (16), (17), (18), (19): Xaa is A or G
  MOD_RES (20), (21), (22), (23): Xaa is A or G or is absent
XGXARVVMNSMEGIXXXXXXXXXMIQVTINSLQTPAXXPK

SEQ ID NO: 26007 - protein, 41 aa, Artificial Sequence
  Non-cyclic GFR-binding peptide
  MOD_RES (1), (3), (35), (36): Xaa is C or S
XGXARVVMNSMEGIIVNSSDDMIQVTINSLQTPAXXPKPVT

SEQ ID NO: 26008 - protein, 37 aa, Artificial Sequence
  Non-cyclic GFR-binding peptide
  MOD_RES (1), (35), (36): Xaa is C or S
  MOD_RES (13), (14), (15), (16), (17): Xaa is A or G
  MOD_RES (18), (19), (20), (21): Xaa is A or G or is absent
XSRVVMNVQVEKXXXXXXXXXVKAVKVSRLKTPAXXP

SEQ ID NO: 26009 - protein, 45 aa, Artificial Sequence
  Non-cyclic GFR-binding peptide
  MOD_RES (2), (4), (41): Xaa is C or S
EXKXALHDELTNSLQEFIPKKRVIEYYVVPLPELQVQTPRXQVNR

SEQ ID NO: 26010 - protein, 36 aa, Artificial Sequence
  Non-cyclic GFR-binding peptide
  MOD_RES (1), (32), (33): Xaa is C or S
XSRVIMVQVEKVKPKRGVVKAIKVSRLAQPVXXPAA

SEQ ID NO: 26011 - protein, 34 aa, Artificial Sequence
  Non-cyclic GFR-binding peptide
  MOD_RES (2), (4): Xaa is C or S
SXKXSKVVMSMEGIVKPTRGVMIQITINSLDQPV

SEQ ID NO: 26012 - protein, 33 aa, Artificial Sequence
  Non-cyclic GFR-binding peptide
  MOD_RES (2), (2): Xaa is C or S
GXSRVVMNVQVEKIVNSSDDVKAVKVSRLKTPA

SEQ ID NO: 26013 - protein, 39 aa, Artificial Sequence
  Non-cyclic GFR-binding peptide
  MOD_RES (2), (4), (36), (37): Xaa is C or S
RXGXGEVVMEVTAKKVVKDYEDIKRMQVPRLETPVXXAK

SEQ ID NO: 26014 - protein, 40 aa, Artificial Sequence
  Non-cyclic GFR-binding peptide
  MOD_RES (34), (35): Xaa is C or S
  MOD_RES (12), (13), (14), (15), (16): Xaa is A or G
  MOD_RES (17), (18), (19), (20): Xaa is A or G or is absent
ARVVMNVTAKKXXXXXXXXXIKRVQVPRLQTPAXXPKPVT

SEQ ID NO: 26015 - protein, 33 aa, Artificial Sequence
  Non-cyclic GFR-binding peptide
  MOD_RES (33), (33): Xaa is C or S
  MOD_RES (11), (12), (13), (14), (15): Xaa is A or G
  MOD_RES (16), (17), (18), (19): Xaa is A or G or is absent
NHQLFNSLQEXXXXXXXXXYYVMPLPEEETPVX

SEQ ID NO: 26016 - protein, 37 aa, Artificial Sequence
  Non-cyclic GFR-binding peptide
  MOD_RES (1), (3), (37): Xaa is C or S
  MOD_RES (15), (16), (17), (18), (19): Xaa is A or G
  MOD_RES (20), (21), (22), (23): Xaa is A or G or is absent
XGXARVVMNVQVEKXXXXXXXXXVKAVKVSRLQTPAX

SEQ ID NO: 26017 - protein, 40 aa, Artificial Sequence
  Non-cyclic GFR-binding peptide
  MOD_RES (1), (35): Xaa is C or S
XKNHQLFNSLQEHQGQHPKIRYYVMPLPEEETPVXELGED

SEQ ID NO: 26018 - protein, 37 aa, Artificial Sequence
  Non-cyclic GFR-binding peptide
  MOD_RES (1), (35), (36): Xaa is C or S
  MOD_RES (13), (14), (15), (16), (17): Xaa is A or G
  MOD_RES (18), (19), (20), (21): Xaa is A or G or is absent
XGEVVMDVTAKKXXXXXXXXXIKRMQVPRLETPVXXA

SEQ ID NO: 26019 - protein, 42 aa, Artificial Sequence
  Non-cyclic GFR-binding peptide
  MOD_RES (2), (4), (38), (39): Xaa is C or S
  MOD_RES (16), (17), (18), (19), (20): Xaa is A or G
  MOD_RES (21), (22), (23), (24): Xaa is A or G or is absent
HXGXARVVMNVQVEKXXXXXXXXXVKAVKVSRLQTPAXXPKP

SEQ ID NO: 26020 - protein, 41 aa, Artificial Sequence
  Non-cyclic GFR-binding peptide
  MOD_RES (2), (4), (36), (37): Xaa is C or S
HXGXARVVMNSMEGIIVNSSDDMIQVTINSLQTPAXXPKPV

SEQ ID NO: 26021 - protein, 31 aa, Artificial Sequence
  Non-cyclic GFR-binding peptide
  MOD_RES (1), (1): Xaa is C or S
XSRVIMSMEGIVKPKRGVMIQITINSLAQPV

SEQ ID NO: 26022 - protein, 36 aa, Artificial Sequence
  Non-cyclic GFR-binding peptide
  MOD_RES (2), (35), (36): Xaa is C or S
  MOD_RES (13), (14), (15), (16), (17): Xaa is A or G
  MOD_RES (18), (19), (20), (21): Xaa is A or G or is absent
KXSRVIMSMEGIXXXXXXXXXMIQITINSLAQPVXX

SEQ ID NO: 26023 - protein, 39 aa, Artificial Sequence
  Non-cyclic GFR-binding peptide
  MOD_RES (2), (4), (35), (36): Xaa is C or S
SXKXSKVVMVQVEKVKPTRGVVKAIKVSRLDQPVXXPSA

SEQ ID NO: 26024 - protein, 35 aa, Artificial Sequence
  Non-cyclic GFR-binding peptide
  MOD_RES (1), (3), (35): Xaa is C or S
XGXGEVVMDSMEGIVVKENEDMIQMTINSLETPVX

SEQ ID NO: 26025 - protein, 38 aa, Artificial Sequence
  Non-cyclic GFR-binding peptide
  MOD_RES (2), (36), (37): Xaa is C or S
  MOD_RES (14), (15), (16), (17), (18): Xaa is A or G
  MOD_RES (19), (20), (21), (22): Xaa is A or G or is absent
GXARVVMNVQVEKXXXXXXXXXVKAVKVSRLQTPAXXP

SEQ ID NO: 26026 - protein, 36 aa, Artificial Sequence
  Non-cyclic GFR-binding peptide
  MOD_RES (2), (33), (34): Xaa is C or S
KXSKVVMVQVEKVKPTRGVVKAIKVSRLDQPVXXPS

SEQ ID NO: 26027 - protein, 37 aa, Artificial Sequence
  Non-cyclic GFR-binding peptide
  MOD_RES (2), (2): Xaa is C or S
  MOD_RES (15), (16), (17), (18), (19): Xaa is A or G
  MOD_RES (20), (21), (22), (23): Xaa is A or G or is absent
AXELHEELRNSLQEXXXXXXXXXYYVVPLPEHHVRSP

SEQ ID NO: 26028 - protein, 37 aa, Artificial Sequence
  Non-cyclic GFR-binding peptide
  MOD_RES (1), (34), (35): Xaa is C or S
  MOD_RES (12), (13), (14), (15), (16): Xaa is A or G
  MOD_RES (17), (18), (19), (20): Xaa is A or G or is absent
XSKVVMVTAKKXXXXXXXXXIKRIQVPRLDQPVXXPS

SEQ ID NO: 26029 - protein, 37 aa, Artificial Sequence
  Non-cyclic GFR-binding peptide
  MOD_RES (1), (3), (35), (36): Xaa is C or S
XGXSRVVMNVTAKKIVNSSDDIKRVQVPRLKTPAXXP

SEQ ID NO: 26030 - protein, 41 aa, Artificial Sequence
  Non-cyclic GFR-binding peptide
  MOD_RES (2), (4), (41): Xaa is C or S
AXAXELHEELRNSLQELKPKKRVYEYYVVPLPEHHVRSPQX

SEQ ID NO: 26031 - protein, 38 aa, Artificial Sequence
  Non-cyclic GFR-binding peptide
  MOD_RES (1), (3), (36), (37): Xaa is C or S
  MOD_RES (14), (15), (16), (17), (18): Xaa is A or G
  MOD_RES (19), (20), (21), (22): Xaa is A or G or is absent
XKXSRVIMSMEGIXXXXXXXXXMIQITINSLAQPVXXP

SEQ ID NO: 26032 - protein, 36 aa, Artificial Sequence
  Non-cyclic GFR-binding peptide
  MOD_RES (33), (34): Xaa is C or S
  MOD_RES (11), (12), (13), (14), (15): Xaa is A or G
  MOD_RES (16), (17), (18), (19): Xaa is A or G or is absent
RVVMNSMEGIXXXXXXXXXMIQVTINSLQTPAXXPK

SEQ ID NO: 26033 - protein, 34 aa, Artificial Sequence
  Non-cyclic GFR-binding peptide
  MOD_RES (32), (33): Xaa is C or S
GEVVMDVTAKKVVKENEDIKRMQVPRLETPVXXA

SEQ ID NO: 26034 - protein, 40 aa, Artificial Sequence
  Non-cyclic GFR-binding peptide
  MOD_RES (36), (36): Xaa is C or S
  MOD_RES (12), (13), (14), (15), (16): Xaa is A or G
  MOD_RES (17), (18), (19), (20): Xaa is A or G or is absent
LHDELTNSLQEXXXXXXXXXYYLVTLPELQVQTPRXQVNR

SEQ ID NO: 26035 - protein, 32 aa, Artificial Sequence
  Non-cyclic GFR-binding peptide
  MOD_RES (32), (32): Xaa is C or S
SRVVMNSMEGIIVNSSDDMIQVTINSLKTPAX

SEQ ID NO: 26036 - protein, 39 aa, Artificial Sequence
  Non-cyclic GFR-binding peptide
  MOD_RES (2), (35), (36): Xaa is C or S
  MOD_RES (13), (14), (15), (16), (17): Xaa is A or G
  MOD_RES (18), (19), (20), (21): Xaa is A or G or is absent
KXSRVIMVQVEKXXXXXXXXXVKAIKVSRLAQPVXXPAA

SEQ ID NO: 26037 - protein, 36 aa, Artificial Sequence
  Non-cyclic GFR-binding peptide
  MOD_RES (2), (4), (36): Xaa is C or S
RXGXGEVVMEVTAKKVVKDYEDIKRMQVPRLETPVX

SEQ ID NO: 26038 - protein, 34 aa, Artificial Sequence
  Non-cyclic GFR-binding peptide
  MOD_RES (2), (34): Xaa is C or S
GXGEVVMEVTAKKVVKDYEDIKRMQVPRLETPVX

SEQ ID NO: 26039 - protein, 35 aa, Artificial Sequence
  Non-cyclic GFR-binding peptide
  MOD_RES (1), (33), (34): Xaa is C or S
XARVVMNSMEGIIVNSSDDMIQVTINSLQTPAXXP

SEQ ID NO: 26040 - protein, 40 aa, Artificial Sequence
  Non-cyclic GFR-binding peptide
  MOD_RES (36), (36): Xaa is C or S
LHDELTNSLQEFIPKKRVIEYYVVPLPELQVQTPRXQVNR

SEQ ID NO: 26041 - protein, 35 aa, Artificial Sequence
  Non-cyclic GFR-binding peptide
  MOD_RES (31), (32): Xaa is C or S
RVVMNSMEGIIVNSSDDMIQVTINSLKTPAXXPKP

SEQ ID NO: 26042 - protein, 40 aa, Artificial Sequence
  Non-cyclic GFR-binding peptide
  MOD_RES (1), (3), (36), (37): Xaa is C or S
  MOD_RES (14), (15), (16), (17), (18): Xaa is A or G
  MOD_RES (19), (20), (21), (22): Xaa is A or G or is absent
XKXSKVVMSMEGIXXXXXXXXXMIQITINSLDQPVXXPSA

SEQ ID NO: 26043 - protein, 35 aa, Artificial Sequence
  Non-cyclic GFR-binding peptide
  MOD_RES (1), (3), (34), (35): Xaa is C or S
XKXSKVIMSMEGIIKPTKGIMIQITINSLDQSVXX

SEQ ID NO: 26044 - protein, 36 aa, Artificial Sequence
  Non-cyclic GFR-binding peptide
  MOD_RES (2), (36): Xaa is C or S
  MOD_RES (14), (15), (16), (17), (18): Xaa is A or G
  MOD_RES (19), (20), (21), (22): Xaa is A or G or is absent
GXARVVMNVTAKKXXXXXXXXXIKRVQVPRLQTPAX

SEQ ID NO: 26045 - protein, 43 aa, Artificial Sequence
  Non-cyclic GFR-binding peptide
  MOD_RES (2), (4), (38), (39): Xaa is C or S
  MOD_RES (16), (17), (18), (19), (20): Xaa is A or G
  MOD_RES (21), (22), (23), (24): Xaa is A or G or is absent
HXGXSRVVMNVQVEKXXXXXXXXXVKAVKVSRLKTPAXXPKPV

SEQ ID NO: 26046 - protein, 36 aa, Artificial Sequence
  Non-cyclic GFR-binding peptide
  MOD_RES (35), (35): Xaa is C or S
  MOD_RES (11), (12), (13), (14), (15): Xaa is A or G
  MOD_RES (16), (17), (18), (19): Xaa is A or G or is absent
HDELTNSLQEXXXXXXXXXYYVVPLPELQVQTPRXQ

SEQ ID NO: 26047 - protein, 40 aa, Artificial Sequence
  Non-cyclic GFR-binding peptide
  MOD_RES (2), (4), (35), (36): Xaa is C or S
SXKXSKVVMSMEGIVKPTRGVMIQITINSLDQPVXXPSAS

SEQ ID NO: 26048 - protein, 38 aa, Artificial Sequence
  Non-cyclic GFR-binding peptide
  MOD_RES (1), (35), (36): Xaa is C or S
  MOD_RES (13), (14), (15), (16), (17): Xaa is A or G
  MOD_RES (18), (19), (20), (21): Xaa is A or G or is absent
XGEVVMDSMEGIXXXXXXXXXMIQMTINSLETPVXXAK

SEQ ID NO: 26049 - protein, 41 aa, Artificial Sequence
  Non-cyclic GFR-binding peptide
  MOD_RES (1), (35), (36): Xaa is C or S
  MOD_RES (13), (14), (15), (16), (17): Xaa is A or G
  MOD_RES (18), (19), (20), (21): Xaa is A or G or is absent
XGEVVMDSMEGIXXXXXXXXXMIQMTINSLETPVXXAKPIK

SEQ ID NO: 26050 - protein, 35 aa, Artificial Sequence
  Non-cyclic GFR-binding peptide
  MOD_RES (1), (1): Xaa is C or S
  MOD_RES (14), (15), (16), (17), (18): Xaa is A or G
  MOD_RES (19), (20), (21), (22): Xaa is A or G or is absent
XALHDELTNSLQEXXXXXXXXXYYVVPLPELQVQT

SEQ ID NO: 26051 - protein, 36 aa, Artificial Sequence
  Non-cyclic GFR-binding peptide
  MOD_RES (1), (33), (34): Xaa is C or S
XGEVVMDVQVEKVVKENEDVKAMKVSRLETPVXXAK

SEQ ID NO: 26052 - protein, 32 aa, Artificial Sequence
  Non-cyclic GFR-binding peptide
  MOD_RES (1), (1): Xaa is C or S
XGEVVMEVQVEKVVKDYEDVKAMKVSRLETPV

SEQ ID NO: 26053 - protein, 35 aa, Artificial Sequence
  Non-cyclic GFR-binding peptide
  MOD_RES (1), (3), (34), (35): Xaa is C or S
XKXSKVVMSMEGIVKPTRGVMIQITINSLDQPVXX

SEQ ID NO: 26054 - protein, 39 aa, Artificial Sequence
  Non-cyclic GFR-binding peptide
  MOD_RES (2), (35), (36): Xaa is C or S
  MOD_RES (13), (14), (15), (16), (17): Xaa is A or G
  MOD_RES (18), (19), (20), (21): Xaa is A or G or is absent
KXSKVIMVTAKKXXXXXXXXXIKRIQVPRLDQSVXXPSA

SEQ ID NO: 26055 - protein, 37 aa, Artificial Sequence
  Non-cyclic GFR-binding peptide
  MOD_RES (1), (33), (34): Xaa is C or S
XGEVVMESMEGIVVKDYEDMIQMTINSLETPVXXAKP

SEQ ID NO: 26056 - protein, 35 aa, Artificial Sequence
  Non-cyclic GFR-binding peptide
  MOD_RES (1), (32), (33): Xaa is C or S
XSRVIMSMEGIVKPKRGVMIQITINSLAQPVXXPA

SEQ ID NO: 26057 - protein, 36 aa, Artificial Sequence
  Non-cyclic GFR-binding peptide
  MOD_RES (2), (4), (36): Xaa is C or S
RXGXGEVVMDVQVEKVVKENEDVKAMKVSRLETPVX

SEQ ID NO: 26058 - protein, 38 aa, Artificial Sequence
  Non-cyclic GFR-binding peptide
  MOD_RES (2), (33), (34): Xaa is C or S
KXSKVVMVQVEKVKPTRGVVKAIKVSRLDQPVXXPSAS

SEQ ID NO: 26059 - protein, 41 aa, Artificial Sequence
  Non-cyclic GFR-binding peptide
  MOD_RES (2), (4), (37), (38): Xaa is C or S
  MOD_RES (15), (16), (17), (18), (19): Xaa is A or G
  MOD_RES (20), (21), (22), (23): Xaa is A or G or is absent
SXKXSKVVMVTAKKXXXXXXXXXIKRIQVPRLDQPVXXPSA

SEQ ID NO: 26060 - protein, 35 aa, Artificial Sequence
  Non-cyclic GFR-binding peptide
  MOD_RES (33), (34): Xaa is C or S
  MOD_RES (11), (12), (13), (14), (15): Xaa is A or G
  MOD_RES (16), (17), (18), (19): Xaa is A or G or is absent
EVVMDSMEGIXXXXXXXXXMIQMTINSLETPVXXA

SEQ ID NO: 26061 - protein, 38 aa, Artificial Sequence
  Non-cyclic GFR-binding peptide
  MOD_RES (2), (36): Xaa is C or S
  MOD_RES (14), (15), (16), (17), (18): Xaa is A or G
  MOD_RES (19), (20), (21), (22): Xaa is A or G or is absent
EXKNHQLFNSLQEXXXXXXXXXYYLMTLPEEETPVXEL

SEQ ID NO: 26062 - protein, 34 aa, Artificial Sequence
  Non-cyclic GFR-binding peptide
  MOD_RES (33), (34): Xaa is C or S
  MOD_RES (11), (12), (13), (14), (15): Xaa is A or G
  MOD_RES (16), (17), (18), (19): Xaa is A or G or is absent
SKVIMVTAKKXXXXXXXXXIKRIQVPRLDQSVXX

SEQ ID NO: 26063 - protein, 36 aa, Artificial Sequence
  Non-cyclic GFR-binding peptide
  MOD_RES (36), (36): Xaa is C or S
LHDELTNSLQEFIPKKRVIEYYVVPLPELQVQTPRX

SEQ ID NO: 26064 - protein, 33 aa, Artificial Sequence
  Non-cyclic GFR-binding peptide
  MOD_RES (33), (33): Xaa is C or S
  MOD_RES (11), (12), (13), (14), (15): Xaa is A or G
  MOD_RES (16), (17), (18), (19): Xaa is A or G or is absent
NHQLFNSLQEXXXXXXXXXYYLMTLPEEETPVX

SEQ ID NO: 26065 - protein, 37 aa, Artificial Sequence
  Non-cyclic GFR-binding peptide
  MOD_RES (1), (35): Xaa is C or S
  MOD_RES (13), (14), (15), (16), (17): Xaa is A or G
  MOD_RES (18), (19), (20), (21): Xaa is A or G or is absent
XKNHQLFNSLQEXXXXXXXXXYYVMPLPEEETPVXEL

SEQ ID NO: 26066 - protein, 35 aa, Artificial Sequence
  Non-cyclic GFR-binding peptide
  MOD_RES (32), (33): Xaa is C or S
SRVVMNVQVEKIVNSSDDVKAVKVSRLKTPAXXPK

SEQ ID NO: 26067 - protein, 41 aa, Artificial Sequence
  Non-cyclic GFR-binding peptide
  MOD_RES (2), (36), (37): Xaa is C or S
  MOD_RES (14), (15), (16), (17), (18): Xaa is A or G
  MOD_RES (19), (20), (21), (22): Xaa is A or G or is absent
GXSRVVMNSMEGIXXXXXXXXXMIQVTINSLKTPAXXPKPV

SEQ ID NO: 26068 - protein, 35 aa, Artificial Sequence
  Non-cyclic GFR-binding peptide
  MOD_RES (31), (32): Xaa is C or S
RVVMNVQVEKIVNSSDDVKAVKVSRLKTPAXXPKP

SEQ ID NO: 26069 - protein, 35 aa, Artificial Sequence
  Non-cyclic GFR-binding peptide
  MOD_RES (31), (32): Xaa is C or S
SRVIMVTAKKVKPKRGVIKRIQVPRLAQPVXXPAA

SEQ ID NO: 26070 - protein, 34 aa, Artificial Sequence
  Non-cyclic GFR-binding peptide
  MOD_RES (33), (34): Xaa is C or S
  MOD_RES (11), (12), (13), (14), (15): Xaa is A or G
  MOD_RES (16), (17), (18), (19): Xaa is A or G or is absent
EVVMDVQVEKXXXXXXXXXVKAMKVSRLETPVXX

SEQ ID NO: 26071 - protein, 37 aa, Artificial Sequence
  Non-cyclic GFR-binding peptide
  MOD_RES (1), (33), (34): Xaa is C or S
XGEVVMDSMEGIVVKENEDMIQMTINSLETPVXXAKP

SEQ ID NO: 26072 - protein, 39 aa, Artificial Sequence
  Non-cyclic GFR-binding peptide
  MOD_RES (1), (3), (35), (36): Xaa is C or S
XGXGEVVMESMEGIVVKDYEDMIQMTINSLETPVXXAKP

SEQ ID NO: 26073 - protein, 38 aa, Artificial Sequence
  Non-cyclic GFR-binding peptide
  MOD_RES (2), (4), (36), (37): Xaa is C or S
HXGXSRVVMNVTAKKIVNSSDDIKRVQVPRLKTPAXXP

SEQ ID NO: 26074 - protein, 43 aa, Artificial Sequence
  Non-cyclic GFR-binding peptide
  MOD_RES (2), (4), (38), (39): Xaa is C or S
  MOD_RES (16), (17), (18), (19), (20): Xaa is A or G
  MOD_RES (21), (22), (23), (24): Xaa is A or G or is absent
RXGXGEVVMDVQVEKXXXXXXXXXVKAMKVSRLETPVXXAKPI

SEQ ID NO: 26075 - protein, 34 aa, Artificial Sequence
  Non-cyclic GFR-binding peptide
  MOD_RES (33), (34): Xaa is C or S
  MOD_RES (11), (12), (13), (14), (15): Xaa is A or G
  MOD_RES (16), (17), (18), (19): Xaa is A or G or is absent
SKVIMVQVEKXXXXXXXXXVKAIKVSRLDQSVXX

SEQ ID NO: 26076 - protein, 37 aa, Artificial Sequence
  Non-cyclic GFR-binding peptide
  MOD_RES (1), (3): Xaa is C or S
  MOD_RES (16), (17), (18), (19), (20): Xaa is A or G
  MOD_RES (21), (22), (23), (24): Xaa is A or G or is absent
XAXELHEELRNSLQEXXXXXXXXXYYVVPLPEHHVRS

SEQ ID NO: 26077 - protein, 43 aa, Artificial Sequence
  Non-cyclic GFR-binding peptide
  MOD_RES (2), (39): Xaa is C or S
  MOD_RES (15), (16), (17), (18), (19): Xaa is A or G
  MOD_RES (20), (21), (22), (23): Xaa is A or G or is absent
AXELHEELRNSLQEXXXXXXXXXYYLVTLPEHHVRSPQXKVSS

SEQ ID NO: 26078 - protein, 35 aa, Artificial Sequence
  Non-cyclic GFR-binding peptide
  MOD_RES (34), (35): Xaa is C or S
  MOD_RES (12), (13), (14), (15), (16): Xaa is A or G
  MOD_RES (17), (18), (19), (20): Xaa is A or G or is absent
GEVVMEVQVEKXXXXXXXXXVKAMKVSRLETPVXX

SEQ ID NO: 26079 - protein, 36 aa, Artificial Sequence
  Non-cyclic GFR-binding peptide
  MOD_RES (2), (2): Xaa is C or S
AXELHEELRNSLQELKPKKRVYEYYLVTLPEHHVRS

SEQ ID NO: 26080 - protein, 41 aa, Artificial Sequence
  Non-cyclic GFR-binding peptide
  MOD_RES (2), (39): Xaa is C or S
AXELHEELRNSLQELKPKKRVYEYYVVPLPEHHVRSPQXKV

SEQ ID NO: 26081 - protein, 35 aa, Artificial Sequence
  Non-cyclic GFR-binding peptide
  MOD_RES (31), (31): Xaa is C or S
RVVMNVTAKKIVNSSDDIKRVQVPRLKTPAXTPKT

SEQ ID NO: 26082 - protein, 36 aa, Artificial Sequence
  Non-cyclic GFR-binding peptide
  MOD_RES (36), (36): Xaa is C or S
  MOD_RES (12), (13), (14), (15), (16): Xaa is A or G
  MOD_RES (17), (18), (19), (20): Xaa is A or G or is absent
LHDELTNSLQEXXXXXXXXXYYLVTLPELQVQTPRX

SEQ ID NO: 26083 - protein, 34 aa, Artificial Sequence
  Non-cyclic GFR-binding peptide
  MOD_RES (2), (2): Xaa is C or S
  MOD_RES (13), (14), (15), (16), (17): Xaa is A or G
  MOD_RES (18), (19), (20), (21): Xaa is A or G or is absent
KXSKVIMVTAKKXXXXXXXXXIKRIQVPRLDQSV

SEQ ID NO: 26084 - protein, 35 aa, Artificial Sequence
  Non-cyclic GFR-binding peptide
  MOD_RES (33), (34): Xaa is C or S
  MOD_RES (11), (12), (13), (14), (15): Xaa is A or G
  MOD_RES (16), (17), (18), (19): Xaa is A or G or is absent
RVVMNSMEGIXXXXXXXXXMIQVTINSLKTPAXXP

SEQ ID NO: 26085 - protein, 41 aa, Artificial Sequence
  Non-cyclic GFR-binding peptide
  MOD_RES (1), (35), (36): Xaa is C or S
  MOD_RES (13), (14), (15), (16), (17): Xaa is A or G
  MOD_RES (18), (19), (20), (21): Xaa is A or G or is absent
XSRVVMNSMEGIXXXXXXXXXMIQVTINSLKTPAXXPKPVY

SEQ ID NO: 26086 - protein, 38 aa, Artificial Sequence
  Non-cyclic GFR-binding peptide
  MOD_RES (32), (32): Xaa is C or S
SRVVMNVTAKKIVNSSDDIKRVQVPRLKTPAXTPKTVH

SEQ ID NO: 26087 - protein, 39 aa, Artificial Sequence
  Non-cyclic GFR-binding peptide
  MOD_RES (2), (4), (37), (38): Xaa is C or S
  MOD_RES (15), (16), (17), (18), (19): Xaa is A or G
  MOD_RES (20), (21), (22), (23): Xaa is A or G or is absent
SXKXSKVVMSMEGIXXXXXXXXXMIQITINSLDQPVXXP

SEQ ID NO: 26088 - protein, 40 aa, Artificial Sequence
  Non-cyclic GFR-binding peptide
  MOD_RES (2), (4), (36), (37): Xaa is C or S
HXGXSRVVMNSMEGIIVNSSDDMIQVTINSLKTPAXXPKP

SEQ ID NO: 26089 - protein, 34 aa, Artificial Sequence
  Non-cyclic GFR-binding peptide
  MOD_RES (13), (14), (15), (16), (17): Xaa is A or G
  MOD_RES (18), (19), (20), (21): Xaa is A or G or is absent
ALHDELTNSLQEXXXXXXXXXYYLVTLPELQVQT

SEQ ID NO: 26090 - protein, 36 aa, Artificial Sequence
  Non-cyclic GFR-binding peptide
  MOD_RES (36), (36): Xaa is C or S
  MOD_RES (12), (13), (14), (15), (16): Xaa is A or G
  MOD_RES (17), (18), (19), (20): Xaa is A or G or is absent
LHEELRNSLQEXXXXXXXXXYYLVTLPEHHVRSPQX

SEQ ID NO: 26091 - protein, 37 aa, Artificial Sequence
  Non-cyclic GFR-binding peptide
  MOD_RES (1), (34), (35): Xaa is C or S
  MOD_RES (12), (13), (14), (15), (16): Xaa is A or G
  MOD_RES (17), (18), (19), (20): Xaa is A or G or is absent
XSRVIMVTAKKXXXXXXXXXIKRIQVPRLAQPVXXPA

SEQ ID NO: 26092 - protein, 40 aa, Artificial Sequence
  Non-cyclic GFR-binding peptide
  MOD_RES (2), (39): Xaa is C or S
  MOD_RES (15), (16), (17), (18), (19): Xaa is A or G
  MOD_RES (20), (21), (22), (23): Xaa is A or G or is absent
KXALHDELTNSLQEXXXXXXXXXYYVVPLPELQVQTPRXQ

SEQ ID NO: 26093 - protein, 38 aa, Artificial Sequence
  Non-cyclic GFR-binding peptide
  MOD_RES (33), (34): Xaa is C or S
  MOD_RES (11), (12), (13), (14), (15): Xaa is A or G
  MOD_RES (16), (17), (18), (19): Xaa is A or G or is absent
EVVMDVTAKKXXXXXXXXXIKRMQVPRLETPVXXAKPI

SEQ ID NO: 26094 - protein, 37 aa, Artificial Sequence
  Non-cyclic GFR-binding peptide
  MOD_RES (34), (35): Xaa is C or S
  MOD_RES (12), (13), (14), (15), (16): Xaa is A or G
  MOD_RES (17), (18), (19), (20): Xaa is A or G or is absent
ARVVMNVQVEKXXXXXXXXXVKAVKVSRLQTPAXXPK

SEQ ID NO: 26095 - protein, 38 aa, Artificial Sequence
  Non-cyclic GFR-binding peptide
  MOD_RES (36), (36): Xaa is C or S
LHDELTNSLQEFIPKKRVIEYYLVTLPELQVQTPRXQV

SEQ ID NO: 26096 - protein, 39 aa, Artificial Sequence
  Non-cyclic GFR-binding peptide
  MOD_RES (35), (35): Xaa is C or S
  MOD_RES (11), (12), (13), (14), (15): Xaa is A or G
  MOD_RES (16), (17), (18), (19): Xaa is A or G or is absent
HEELRNSLQEXXXXXXXXXYYLVTLPEHHVRSPQXKVSS

SEQ ID NO: 26097 - protein, 33 aa, Artificial Sequence
  Non-cyclic GFR-binding peptide
  MOD_RES (12), (13), (14), (15), (16): Xaa is A or G
  MOD_RES (17), (18), (19), (20): Xaa is A or G or is absent
ARVVMNVQVEKXXXXXXXXXVKAVKVSRLQTPA

SEQ ID NO: 26098 - protein, 40 aa, Artificial Sequence
  Non-cyclic GFR-binding peptide
  MOD_RES (1), (3), (34), (35): Xaa is C or S
XKXSKVVMVQVEKVKPTRGVVKAIKVSRLDQPVXXPSASA

SEQ ID NO: 26099 - protein, 36 aa, Artificial Sequence
  Non-cyclic GFR-binding peptide
  MOD_RES (2), (36): Xaa is C or S
  MOD_RES (14), (15), (16), (17), (18): Xaa is A or G
  MOD_RES (19), (20), (21), (22): Xaa is A or G or is absent
GXGEVVMESMEGIXXXXXXXXXMIQMTINSLETPVX

SEQ ID NO: 26100 - protein, 40 aa, Artificial Sequence
  Non-cyclic GFR-binding peptide
  MOD_RES (2), (36): Xaa is C or S
  MOD_RES (14), (15), (16), (17), (18): Xaa is A or G
  MOD_RES (19), (20), (21), (22): Xaa is A or G or is absent
GXSRVVMNVTAKKXXXXXXXXXIKRVQVPRLKTPAXTPKT

SEQ ID NO: 26101 - protein, 38 aa, Artificial Sequence
  Non-cyclic GFR-binding peptide
  MOD_RES (33), (33): Xaa is C or S
NHQLFNSLQEHQGQHPKIRYYLMTLPEEETPVXELGED

SEQ ID NO: 26102 - protein, 35 aa, Artificial Sequence
  Non-cyclic GFR-binding peptide
  MOD_RES (2), (4), (35): Xaa is C or S
SXKXSKVVMSMEGIVKPTRGVMIQITINSLDQPVX

SEQ ID NO: 26103 - protein, 34 aa, Artificial Sequence
  Non-cyclic GFR-binding peptide
  MOD_RES (2), (2): Xaa is C or S
  MOD_RES (13), (14), (15), (16), (17): Xaa is A or G
  MOD_RES (18), (19), (20), (21): Xaa is A or G or is absent
KXSKVVMVTAKKXXXXXXXXXIKRIQVPRLDQPV

SEQ ID NO: 26104 - protein, 37 aa, Artificial Sequence
  Non-cyclic GFR-binding peptide
  MOD_RES (34), (34): Xaa is C or S
  MOD_RES (12), (13), (14), (15), (16): Xaa is A or G
  MOD_RES (17), (18), (19), (20): Xaa is A or G or is absent
SRVVMNVTAKKXXXXXXXXXIKRVQVPRLKTPAXTPK

SEQ ID NO: 26105 - protein, 41 aa, Artificial Sequence
  Non-cyclic GFR-binding peptide
  MOD_RES (1), (35), (36): Xaa is C or S
  MOD_RES (13), (14), (15), (16), (17): Xaa is A or G
  MOD_RES (18), (19), (20), (21): Xaa is A or G or is absent
XGEVVMDVQVEKXXXXXXXXXVKAMKVSRLETPVXXAKPIK

SEQ ID NO: 26106 - protein, 36 aa, Artificial Sequence
  Non-cyclic GFR-binding peptide
  MOD_RES (1), (35), (36): Xaa is C or S
  MOD_RES (13), (14), (15), (16), (17): Xaa is A or G
  MOD_RES (18), (19), (20), (21): Xaa is A or G or is absent
XARVVMNVTAKKXXXXXXXXXIKRVQVPRLQTPAXX

SEQ ID NO: 26107 - protein, 38 aa, Artificial Sequence
  Non-cyclic GFR-binding peptide
  MOD_RES (1), (32), (33): Xaa is C or S
XSKVIMVQVEKIKPTKGIVKAIKVSRLDQSVXXPSASA

SEQ ID NO: 26108 - protein, 39 aa, Artificial Sequence
  Non-cyclic GFR-binding peptide
  MOD_RES (34), (34): Xaa is C or S
  MOD_RES (12), (13), (14), (15), (16): Xaa is A or G
  MOD_RES (17), (18), (19), (20): Xaa is A or G or is absent
KNHQLFNSLQEXXXXXXXXXYYLMTLPEEETPVXELGED

SEQ ID NO: 26109 - protein, 41 aa, Artificial Sequence
  Non-cyclic GFR-binding peptide
  MOD_RES (2), (4), (37), (38): Xaa is C or S
  MOD_RES (15), (16), (17), (18), (19): Xaa is A or G
  MOD_RES (20), (21), (22), (23): Xaa is A or G or is absent
SXKXSKVIMSMEGIXXXXXXXXXMIQITINSLDQSVXXPSA

SEQ ID NO: 26110 - protein, 33 aa, Artificial Sequence
  Non-cyclic GFR-binding peptide
  MOD_RES (32), (33): Xaa is C or S
GEVVMESMEGIVVKDYEDMIQMTINSLETPVXX

SEQ ID NO: 26111 - protein, 37 aa, Artificial Sequence
  Non-cyclic GFR-binding peptide
  MOD_RES (37), (37): Xaa is C or S
ALHDELTNSLQEFIPKKRVIEYYLVTLPELQVQTPRX

SEQ ID NO: 26112 - protein, 43 aa, Artificial Sequence
  Non-cyclic GFR-binding peptide
  MOD_RES (1), (3), (37), (38): Xaa is C or S
  MOD_RES (15), (16), (17), (18), (19): Xaa is A or G
  MOD_RES (20), (21), (22), (23): Xaa is A or G or is absent
XGXSRVVMNVQVEKXXXXXXXXXVKAVKVSRLKTPAXXPKPVY

SEQ ID NO: 26113 - protein, 35 aa, Artificial Sequence
  Non-cyclic GFR-binding peptide
  MOD_RES (31), (32): Xaa is C or S
RVVMNVTAKKIVNSSDDIKRVQVPRLKTPAXXPKP

SEQ ID NO: 26114 - protein, 35 aa, Artificial Sequence
  Non-cyclic GFR-binding peptide
  MOD_RES (2), (4): Xaa is C or S
HXGXARVVMNVQVEKIVNSSDDVKAVKVSRLQTPA

SEQ ID NO: 26115 - protein, 45 aa, Artificial Sequence
  Non-cyclic GFR-binding peptide
  MOD_RES (2), (4), (41): Xaa is C or S
  MOD_RES (17), (18), (19), (20), (21): Xaa is A or G
  MOD_RES (22), (23), (24), (25): Xaa is A or G or is absent
EXKXALHDELTNSLQEXXXXXXXXXYYVVPLPELQVQTPRXQVNR

SEQ ID NO: 26116 - protein, 39 aa, Artificial Sequence
  Non-cyclic GFR-binding peptide
  MOD_RES (1), (3), (36), (37): Xaa is C or S
  MOD_RES (14), (15), (16), (17), (18): Xaa is A or G
  MOD_RES (19), (20), (21), (22): Xaa is A or G or is absent
XKXSKVVMSMEGIXXXXXXXXXMIQITINSLDQPVXXPS

SEQ ID NO: 26117 - protein, 34 aa, Artificial Sequence
  Non-cyclic GFR-binding peptide
  MOD_RES (1), (3): Xaa is C or S
XGXGEVVMDVTAKKVVKENEDIKRMQVPRLETPV

SEQ ID NO: 26118 - protein, 35 aa, Artificial Sequence
  Non-cyclic GFR-binding peptide
  MOD_RES (1), (35): Xaa is C or S
  MOD_RES (13), (14), (15), (16), (17): Xaa is A or G
  MOD_RES (18), (19), (20), (21): Xaa is A or G or is absent
XARVVMNVTAKKXXXXXXXXXIKRVQVPRLQTPAX

SEQ ID NO: 26119 - protein, 40 aa, Artificial Sequence
  Non-cyclic GFR-binding peptide
  MOD_RES (2), (4), (37), (38): Xaa is C or S
  MOD_RES (15), (16), (17), (18), (19): Xaa is A or G
  MOD_RES (20), (21), (22), (23): Xaa is A or G or is absent
SXKXSKVIMSMEGIXXXXXXXXXMIQITINSLDQSVXXPS

SEQ ID NO: 26120 - protein, 43 aa, Artificial Sequence
  Non-cyclic GFR-binding peptide
  MOD_RES (1), (3), (40): Xaa is C or S
  MOD_RES (16), (17), (18), (19), (20): Xaa is A or G
  MOD_RES (21), (22), (23), (24): Xaa is A or G or is absent
XKXALHDELTNSLQEXXXXXXXXXYYLVTLPELQVQTPRXQVN

SEQ ID NO: 26121 - protein, 40 aa, Artificial Sequence
  Non-cyclic GFR-binding peptide
  MOD_RES (2), (36): Xaa is C or S
  MOD_RES (14), (15), (16), (17), (18): Xaa is A or G
  MOD_RES (19), (20), (21), (22): Xaa is A or G or is absent
GXSRVVMNSMEGIXXXXXXXXXMIQVTINSLKTPAXTPKT

SEQ ID NO: 26122 - protein, 42 aa, Artificial Sequence
  Non-cyclic GFR-binding peptide
  MOD_RES (2), (4), (37), (38): Xaa is C or S
  MOD_RES (15), (16), (17), (18), (19): Xaa is A or G
  MOD_RES (20), (21), (22), (23): Xaa is A or G or is absent
SXKXSKVVMSMEGIXXXXXXXXXMIQITINSLDQPVXXPSAS

SEQ ID NO: 26123 - protein, 43 aa, Artificial Sequence
  Non-cyclic GFR-binding peptide
  MOD_RES (1), (3), (37): Xaa is C or S
  MOD_RES (15), (16), (17), (18), (19): Xaa is A or G
  MOD_RES (20), (21), (22), (23): Xaa is A or G or is absent
XEXKNHQLFNSLQEXXXXXXXXXYYVMPLPEEETPVXELGEDN

SEQ ID NO: 26124 - protein, 39 aa, Artificial Sequence
  Non-cyclic GFR-binding peptide
  MOD_RES (2), (4), (35), (36): Xaa is C or S
SXKXSKVIMVTAKKIKPTKGIIKRIQVPRLDQSVXXPSA

SEQ ID NO: 26125 - protein, 33 aa, Artificial Sequence
  Non-cyclic GFR-binding peptide
  MOD_RES (32), (32): Xaa is C or S
SRVVMNVTAKKIVNSSDDIKRVQVPRLKTPAXT

SEQ ID NO: 26126 - protein, 31 aa, Artificial Sequence
  Non-cyclic GFR-binding peptide
  MOD_RES (31), (31): Xaa is C or S
EVVMEVQVEKVVKDYEDVKAMKVSRLETPVX

SEQ ID NO: 26127 - protein, 38 aa, Artificial Sequence
  Non-cyclic GFR-binding peptide
  MOD_RES (2), (4), (37), (38): Xaa is C or S
  MOD_RES (15), (16), (17), (18), (19): Xaa is A or G
  MOD_RES (20), (21), (22), (23): Xaa is A or G or is absent
SXKXSKVIMVQVEKXXXXXXXXXVKAIKVSRLDQSVXX

SEQ ID NO: 26128 - protein, 39 aa, Artificial Sequence
  Non-cyclic GFR-binding peptide
  MOD_RES (33), (34): Xaa is C or S
  MOD_RES (11), (12), (13), (14), (15): Xaa is A or G
  MOD_RES (16), (17), (18), (19): Xaa is A or G or is absent
RVVMNVTAKKXXXXXXXXXIKRVQVPRLKTPAXXPKPVY

SEQ ID NO: 26129 - protein, 35 aa, Artificial Sequence
  Non-cyclic GFR-binding peptide
  MOD_RES (35), (35): Xaa is C or S
HDELTNSLQEFIPKKRVIEYYVVPLPELQVQTPRX

SEQ ID NO: 26130 - protein, 34 aa, Artificial Sequence
  Non-cyclic GFR-binding peptide
  MOD_RES (31), (32): Xaa is C or S
SKVIMVQVEKIKPTKGIVKAIKVSRLDQSVXXPS

SEQ ID NO: 26131 - protein, 44 aa, Artificial Sequence
  Non-cyclic GFR-binding peptide
  MOD_RES (1), (3), (40): Xaa is C or S
  MOD_RES (16), (17), (18), (19), (20): Xaa is A or G
  MOD_RES (21), (22), (23), (24): Xaa is A or G or is absent
XKXALHDELTNSLQEXXXXXXXXXYYLVTLPELQVQTPRXQVNR

SEQ ID NO: 26132 - protein, 40 aa, Artificial Sequence
  Non-cyclic GFR-binding peptide
  MOD_RES (1), (3), (37), (38): Xaa is C or S
  MOD_RES (15), (16), (17), (18), (19): Xaa is A or G
  MOD_RES (20), (21), (22), (23): Xaa is A or G or is absent
XGXSRVVMNSMEGIXXXXXXXXXMIQVTINSLKTPAXXPK

SEQ ID NO: 26133 - protein, 41 aa, Artificial Sequence
  Non-cyclic GFR-binding peptide
  MOD_RES (2), (36): Xaa is C or S
  MOD_RES (14), (15), (16), (17), (18): Xaa is A or G
  MOD_RES (19), (20), (21), (22): Xaa is A or G or is absent
GXSRVVMNVQVEKXXXXXXXXXVKAVKVSRLKTPAXTPKTV

SEQ ID NO: 26134 - protein, 38 aa, Artificial Sequence
  Non-cyclic GFR-binding peptide
  MOD_RES (1), (3): Xaa is C or S
XAXELHEELRNSLQELKPKKRVYEYYLVTLPEHHVRSP

SEQ ID NO: 26135 - protein, 35 aa, Artificial Sequence
  Non-cyclic GFR-binding peptide
  MOD_RES (34), (34): Xaa is C or S
  MOD_RES (12), (13), (14), (15), (16): Xaa is A or G
  MOD_RES (17), (18), (19), (20): Xaa is A or G or is absent
SRVVMNSMEGIXXXXXXXXXMIQVTINSLKTPAXT

SEQ ID NO: 26136 - protein, 41 aa, Artificial Sequence
  Non-cyclic GFR-binding peptide
  MOD_RES (1), (3), (36), (37): Xaa is C or S
  MOD_RES (14), (15), (16), (17), (18): Xaa is A or G
  MOD_RES (19), (20), (21), (22): Xaa is A or G or is absent
XKXSKVVMVQVEKXXXXXXXXXVKAIKVSRLDQPVXXPSAS

SEQ ID NO: 26137 - protein, 38 aa, Artificial Sequence
  Non-cyclic GFR-binding peptide
  MOD_RES (2), (4), (38): Xaa is C or S
  MOD_RES (16), (17), (18), (19), (20): Xaa is A or G
  MOD_RES (21), (22), (23), (24): Xaa is A or G or is absent
HXGXARVVMNSMEGIXXXXXXXXXMIQVTINSLQTPAX

SEQ ID NO: 26138 - protein, 36 aa, Artificial Sequence
  Non-cyclic GFR-binding peptide
  MOD_RES (2), (4), (36): Xaa is C or S
HXGXARVVMNVQVEKIVNSSDDVKAVKVSRLQTPAX

SEQ ID NO: 26139 - protein, 39 aa, Artificial Sequence
  Non-cyclic GFR-binding peptide
  MOD_RES (36), (36): Xaa is C or S
LHEELRNSLQELKPKKRVYEYYLVTLPEHHVRSPQXKVS

SEQ ID NO: 26140 - protein, 39 aa, Artificial Sequence
  Non-cyclic GFR-binding peptide
  MOD_RES (33), (33): Xaa is C or S
  MOD_RES (11), (12), (13), (14), (15): Xaa is A or G
  MOD_RES (16), (17), (18), (19): Xaa is A or G or is absent
RVVMNSMEGIXXXXXXXXXMIQVTINSLKTPAXTPKTVH

SEQ ID NO: 26141 - protein, 35 aa, Artificial Sequence
  Non-cyclic GFR-binding peptide
  MOD_RES (1), (33), (34): Xaa is C or S
XSRVVMNSMEGIIVNSSDDMIQVTINSLKTPAXXP

SEQ ID NO: 26142 - protein, 39 aa, Artificial Sequence
  Non-cyclic GFR-binding peptide
  MOD_RES (37), (37): Xaa is C or S
ALHDELTNSLQEFIPKKRVIEYYVVPLPELQVQTPRXQV

SEQ ID NO: 26143 - protein, 40 aa, Artificial Sequence
  Non-cyclic GFR-binding peptide
  MOD_RES (2), (4), (36), (37): Xaa is C or S
HXGXARVVMNSMEGIIVNSSDDMIQVTINSLQTPAXXPKP

SEQ ID NO: 26144 - protein, 37 aa, Artificial Sequence
  Non-cyclic GFR-binding peptide
  MOD_RES (2), (35), (36): Xaa is C or S
  MOD_RES (13), (14), (15), (16), (17): Xaa is A or G
  MOD_RES (18), (19), (20), (21): Xaa is A or G or is absent
KXSKVIMVQVEKXXXXXXXXXVKAIKVSRLDQSVXXP

SEQ ID NO: 26145 - protein, 42 aa, Artificial Sequence
  Non-cyclic GFR-binding peptide
  MOD_RES (2), (4), (41): Xaa is C or S
  MOD_RES (17), (18), (19), (20), (21): Xaa is A or G
  MOD_RES (22), (23), (24), (25): Xaa is A or G or is absent
EXKXALHDELTNSLQEXXXXXXXXXYYVVPLPELQVQTPRXQ

SEQ ID NO: 26146 - protein, 35 aa, Artificial Sequence
  Non-cyclic GFR-binding peptide
  MOD_RES (1), (3), (34), (35): Xaa is C or S
XKXSKVIMVTAKKIKPTKGIIKRIQVPRLDQSVXX

SEQ ID NO: 26147 - protein, 35 aa, Artificial Sequence
  Non-cyclic GFR-binding peptide
  MOD_RES (32), (33): Xaa is C or S
ARVVMNVTAKKIVNSSDDIKRVQVPRLQTPAXXPK

SEQ ID NO: 26148 - protein, 36 aa, Artificial Sequence
  Non-cyclic GFR-binding peptide
ELHEELRNSLQELKPKKRVYEYYVVPLPEHHVRSPQ

SEQ ID NO: 26149 - protein, 37 aa, Artificial Sequence
  Non-cyclic GFR-binding peptide
  MOD_RES (2), (36), (37): Xaa is C or S
  MOD_RES (14), (15), (16), (17), (18): Xaa is A or G
  MOD_RES (19), (20), (21), (22): Xaa is A or G or is absent
GXGEVVMDVQVEKXXXXXXXXXVKAMKVSRLETPVXX

SEQ ID NO: 26150 - protein, 41 aa, Artificial Sequence
  Non-cyclic GFR-binding peptide
  MOD_RES (1), (38): Xaa is C or S
  MOD_RES (14), (15), (16), (17), (18): Xaa is A or G
  MOD_RES (19), (20), (21), (22): Xaa is A or G or is absent
XELHEELRNSLQEXXXXXXXXXYYVVPLPEHHVRSPQXKVS

SEQ ID NO: 26151 - protein, 37 aa, Artificial Sequence
  Non-cyclic GFR-binding peptide
  MOD_RES (33), (34): Xaa is C or S
  MOD_RES (11), (12), (13), (14), (15): Xaa is A or G
  MOD_RES (16), (17), (18), (19): Xaa is A or G or is absent
EVVMEVTAKKXXXXXXXXXIKRMQVPRLETPVXXAKP

SEQ ID NO: 26152 - protein, 39 aa, Artificial Sequence
  Non-cyclic GFR-binding peptide
  MOD_RES (1), (3): Xaa is C or S
XAXELHEELRNSLQELKPKKRVYEYYVVPLPEHHVRSPQ

SEQ ID NO: 26153 - protein, 35 aa, Artificial Sequence
  Non-cyclic GFR-binding peptide
  MOD_RES (1), (3), (34), (35): Xaa is C or S
XKXSRVIMVTAKKVKPKRGVIKRIQVPRLAQPVXX

SEQ ID NO: 26154 - protein, 40 aa, Artificial Sequence
  Non-cyclic GFR-binding peptide
  MOD_RES (1), (35): Xaa is C or S
  MOD_RES (13), (14), (15), (16), (17): Xaa is A or G
  MOD_RES (18), (19), (20), (21): Xaa is A or G or is absent
XSRVVMNSMEGIXXXXXXXXXMIQVTINSLKTPAXTPKTV

SEQ ID NO: 26155 - protein, 35 aa, Artificial Sequence
  Non-cyclic GFR-binding peptide
  MOD_RES (1), (33), (34): Xaa is C or S
XGEVVMESMEGIVVKDYEDMIQMTINSLETPVXXA

SEQ ID NO: 26156 - protein, 38 aa, Artificial Sequence
  Non-cyclic GFR-binding peptide
  MOD_RES (1), (3), (34), (35): Xaa is C or S
XKXSRVIMVTAKKVKPKRGVIKRIQVPRLAQPVXXPAA

SEQ ID NO: 26157 - protein, 39 aa, Artificial Sequence
  Non-cyclic GFR-binding peptide
  MOD_RES (2), (4), (36), (37): Xaa is C or S
RXGXGEVVMDVQVEKVVKENEDVKAMKVSRLETPVXXAK

SEQ ID NO: 26158 - protein, 42 aa, Artificial Sequence
  Non-cyclic GFR-binding peptide
  MOD_RES (2), (4), (41): Xaa is C or S
AXAXELHEELRNSLQELKPKKRVYEYYLVTLPEHHVRSPQXK

SEQ ID NO: 26159 - protein, 34 aa, Artificial Sequence
  Non-cyclic GFR-binding peptide
  MOD_RES (34), (34): Xaa is C or S
  MOD_RES (12), (13), (14), (15), (16): Xaa is A or G
  MOD_RES (17), (18), (19), (20): Xaa is A or G or is absent
ARVVMNSMEGIXXXXXXXXXMIQVTINSLQTPAX

SEQ ID NO: 26160 - protein, 34 aa, Artificial Sequence
  Non-cyclic GFR-binding peptide
  MOD_RES (1), (3), (34): Xaa is C or S
XKXSRVIMVTAKKVKPKRGVIKRIQVPRLAQPVX

SEQ ID NO: 26161 - protein, 39 aa, Artificial Sequence
  Non-cyclic GFR-binding peptide
  MOD_RES (34), (35): Xaa is C or S
  MOD_RES (12), (13), (14), (15), (16): Xaa is A or G
  MOD_RES (17), (18), (19), (20): Xaa is A or G or is absent
ARVVMNVQVEKXXXXXXXXXVKAVKVSRLQTPAXXPKPV

SEQ ID NO: 26162 - protein, 37 aa, Artificial Sequence
  Non-cyclic GFR-binding peptide
  MOD_RES (32), (32): Xaa is C or S
SRVVMNVQVEKIVNSSDDVKAVKVSRLKTPAXTPKTV

SEQ ID NO: 26163 - protein, 38 aa, Artificial Sequence
  Non-cyclic GFR-binding peptide
  MOD_RES (2), (2): Xaa is C or S
  MOD_RES (15), (16), (17), (18), (19): Xaa is A or G
  MOD_RES (20), (21), (22), (23): Xaa is A or G or is absent
AXELHEELRNSLQEXXXXXXXXXYYLVTLPEHHVRSPQ

SEQ ID NO: 26164 - protein, 39 aa, Artificial Sequence
  Non-cyclic GFR-binding peptide
  MOD_RES (1), (33), (34): Xaa is C or S
XARVVMNVQVEKIVNSSDDVKAVKVSRLQTPAXXPKPVT

SEQ ID NO: 26165 - protein, 40 aa, Artificial Sequence
  Non-cyclic GFR-binding peptide
  MOD_RES (1), (34), (35): Xaa is C or S
  MOD_RES (12), (13), (14), (15), (16): Xaa is A or G
  MOD_RES (17), (18), (19), (20): Xaa is A or G or is absent
XSKVVMSMEGIXXXXXXXXXMIQITINSLDQPVXXPSASA

SEQ ID NO: 26166 - protein, 32 aa, Artificial Sequence
  Non-cyclic GFR-binding peptide
  MOD_RES (1), (1): Xaa is C or S
XSRVVMNVQVEKIVNSSDDVKAVKVSRLKTPA

SEQ ID NO: 26167 - protein, 43 aa, Artificial Sequence
  Non-cyclic GFR-binding peptide
  MOD_RES (2), (4), (38), (39): Xaa is C or S
  MOD_RES (16), (17), (18), (19), (20): Xaa is A or G
  MOD_RES (21), (22), (23), (24): Xaa is A or G or is absent
HXGXARVVMNVTAKKXXXXXXXXXIKRVQVPRLQTPAXXPKPV

SEQ ID NO: 26168 - protein, 39 aa, Artificial Sequence
  Non-cyclic GFR-binding peptide
  MOD_RES (1), (33), (34): Xaa is C or S
XGEVVMEVQVEKVVKDYEDVKAMKVSRLETPVXXAKPIS

SEQ ID NO: 26169 - protein, 39 aa, Artificial Sequence
  Non-cyclic GFR-binding peptide
  MOD_RES (33), (33): Xaa is C or S
NHQLFNSLQEHQGQHPKIRYYLMTLPEEETPVXELGEDN

SEQ ID NO: 26170 - protein, 39 aa, Artificial Sequence
  Non-cyclic GFR-binding peptide
  MOD_RES (33), (34): Xaa is C or S
  MOD_RES (11), (12), (13), (14), (15): Xaa is A or G
  MOD_RES (16), (17), (18), (19): Xaa is A or G or is absent
SRVIMVQVEKXXXXXXXXXVKAIKVSRLAQPVXXPAASA

SEQ ID NO: 26171 - protein, 34 aa, Artificial Sequence
  Non-cyclic GFR-binding peptide
  MOD_RES (1), (1): Xaa is C or S
  MOD_RES (13), (14), (15), (16), (17): Xaa is A or G
  MOD_RES (18), (19), (20), (21): Xaa is A or G or is absent
XGEVVMEVTAKKXXXXXXXXXIKRMQVPRLETPV

SEQ ID NO: 26172 - protein, 31 aa, Artificial Sequence
  Non-cyclic GFR-binding peptide
ARVVMNVQVEKIVNSSDDVKAVKVSRLQTPA

SEQ ID NO: 26173 - protein, 34 aa, Artificial Sequence
  Non-cyclic GFR-binding peptide
  MOD_RES (33), (34): Xaa is C or S
  MOD_RES (11), (12), (13), (14), (15): Xaa is A or G
  MOD_RES (16), (17), (18), (19): Xaa is A or G or is absent
RVVMNVQVEKXXXXXXXXXVKAVKVSRLQTPAXX

SEQ ID NO: 26174 - protein, 36 aa, Artificial Sequence
  Non-cyclic GFR-binding peptide
  MOD_RES (2), (34), (35): Xaa is C or S
GXGEVVMDVQVEKVVKENEDVKAMKVSRLETPVXXA

SEQ ID NO: 26175 - protein, 38 aa, Artificial Sequence
  Non-cyclic GFR-binding peptide
  MOD_RES (34), (34): Xaa is C or S
  MOD_RES (12), (13), (14), (15), (16): Xaa is A or G
  MOD_RES (17), (18), (19), (20): Xaa is A or G or is absent
SRVVMNVQVEKXXXXXXXXXVKAVKVSRLKTPAXTPKT

SEQ ID NO: 26176 - protein, 43 aa, Artificial Sequence
  Non-cyclic GFR-binding peptide
  MOD_RES (2), (4), (38), (39): Xaa is C or S
  MOD_RES (16), (17), (18), (19), (20): Xaa is A or G
  MOD_RES (21), (22), (23), (24): Xaa is A or G or is absent
HXGXARVVMNVQVEKXXXXXXXXXVKAVKVSRLQTPAXXPKPV

SEQ ID NO: 26177 - protein, 43 aa, Artificial Sequence
  Non-cyclic GFR-binding peptide
  MOD_RES (1), (3), (37), (38): Xaa is C or S
  MOD_RES (15), (16), (17), (18), (19): Xaa is A or G
  MOD_RES (20), (21), (22), (23): Xaa is A or G or is absent
XGXGEVVMESMEGIXXXXXXXXXMIQMTINSLETPVXXAKPIS

SEQ ID NO: 26178 - protein, 43 aa, Artificial Sequence
  Non-cyclic GFR-binding peptide
  MOD_RES (1), (3), (37), (38): Xaa is C or S
  MOD_RES (15), (16), (17), (18), (19): Xaa is A or G
  MOD_RES (20), (21), (22), (23): Xaa is A or G or is absent
XGXGEVVMEVQVEKXXXXXXXXXVKAMKVSRLETPVXXAKPIS

SEQ ID NO: 26179 - protein, 37 aa, Artificial Sequence
  Non-cyclic GFR-binding peptide
  MOD_RES (2), (4): Xaa is C or S
  MOD_RES (16), (17), (18), (19), (20): Xaa is A or G
  MOD_RES (21), (22), (23), (24): Xaa is A or G or is absent
RXEXKNHQLFNSLQEXXXXXXXXXYYVMPLPEEETPV

SEQ ID NO: 26180 - protein, 35 aa, Artificial Sequence
  Non-cyclic GFR-binding peptide
  MOD_RES (33), (34): Xaa is C or S
  MOD_RES (11), (12), (13), (14), (15): Xaa is A or G
  MOD_RES (16), (17), (18), (19): Xaa is A or G or is absent
RVVMNSMEGIXXXXXXXXXMIQVTINSLQTPAXXP

SEQ ID NO: 26181 - protein, 34 aa, Artificial Sequence
  Non-cyclic GFR-binding peptide
  MOD_RES (33), (33): Xaa is C or S
  MOD_RES (11), (12), (13), (14), (15): Xaa is A or G
  MOD_RES (16), (17), (18), (19): Xaa is A or G or is absent
RVVMNVTAKKXXXXXXXXXIKRVQVPRLKTPAXT

SEQ ID NO: 26182 - protein, 40 aa, Artificial Sequence
  Non-cyclic GFR-binding peptide
  MOD_RES (2), (4), (35), (36): Xaa is C or S
SXKXSKVIMVQVEKIKPTKGIVKAIKVSRLDQSVXXPSAS

SEQ ID NO: 26183 - protein, 41 aa, Artificial Sequence
  Non-cyclic GFR-binding peptide
  MOD_RES (2), (4), (37), (38): Xaa is C or S
  MOD_RES (15), (16), (17), (18), (19): Xaa is A or G
  MOD_RES (20), (21), (22), (23): Xaa is A or G or is absent
SXKXSKVVMSMEGIXXXXXXXXXMIQITINSLDQPVXXPSA

SEQ ID NO: 26184 - protein, 36 aa, Artificial Sequence
  Non-cyclic GFR-binding peptide
  MOD_RES (31), (32): Xaa is C or S
RVVMNVTAKKIVNSSDDIKRVQVPRLQTPAXXPKPV

SEQ ID NO: 26185 - protein, 32 aa, Artificial Sequence
  Non-cyclic GFR-binding peptide
  MOD_RES (31), (32): Xaa is C or S
EVVMDSMEGIVVKENEDMIQMTINSLETPVXX

SEQ ID NO: 26186 - protein, 36 aa, Artificial Sequence
  Non-cyclic GFR-binding peptide
  MOD_RES (33), (33): Xaa is C or S
  MOD_RES (11), (12), (13), (14), (15): Xaa is A or G
  MOD_RES (16), (17), (18), (19): Xaa is A or G or is absent
NHQLFNSLQEXXXXXXXXXYYLMTLPEEETPVXELG

SEQ ID NO: 26187 - protein, 43 aa, Artificial Sequence
  Non-cyclic GFR-binding peptide
  MOD_RES (2), (39): Xaa is C or S
AXELHEELRNSLQELKPKKRVYEYYLVTLPEHHVRSPQXKVSS

SEQ ID NO: 26188 - protein, 37 aa, Artificial Sequence
  Non-cyclic GFR-binding peptide
  MOD_RES (2), (4), (37): Xaa is C or S
  MOD_RES (15), (16), (17), (18), (19): Xaa is A or G
  MOD_RES (20), (21), (22), (23): Xaa is A or G or is absent
SXKXSKVVMSMEGIXXXXXXXXXMIQITINSLDQPVX

SEQ ID NO: 26189 - protein, 41 aa, Artificial Sequence
  Non-cyclic GFR-binding peptide
  MOD_RES (1), (3), (40): Xaa is C or S
XAXELHEELRNSLQELKPKKRVYEYYVVPLPEHHVRSPQXK

SEQ ID NO: 26190 - protein, 36 aa, Artificial Sequence
  Non-cyclic GFR-binding peptide
  MOD_RES (32), (33): Xaa is C or S
SRVVMNVTAKKIVNSSDDIKRVQVPRLKTPAXXPKP

SEQ ID NO: 26191 - protein, 33 aa, Artificial Sequence
  Non-cyclic GFR-binding peptide
  MOD_RES (12), (13), (14), (15), (16): Xaa is A or G
  MOD_RES (17), (18), (19), (20): Xaa is A or G or is absent
ARVVMNSMEGIXXXXXXXXXMIQVTINSLQTPA

SEQ ID NO: 26192 - protein, 36 aa, Artificial Sequence
  Non-cyclic GFR-binding peptide
  MOD_RES (1), (32), (33): Xaa is C or S
XSKVIMVTAKKIKPTKGIIKRIQVPRLDQSVXXPSA

SEQ ID NO: 26193 - protein, 41 aa, Artificial Sequence
  Non-cyclic GFR-binding peptide
  MOD_RES (1), (35): Xaa is C or S
  MOD_RES (13), (14), (15), (16), (17): Xaa is A or G
  MOD_RES (18), (19), (20), (21): Xaa is A or G or is absent
XKNHQLFNSLQEXXXXXXXXXYYLMTLPEEETPVXELGEDN

SEQ ID NO: 26194 - protein, 36 aa, Artificial Sequence
  Non-cyclic GFR-binding peptide
  MOD_RES (2), (36): Xaa is C or S
  MOD_RES (14), (15), (16), (17), (18): Xaa is A or G
  MOD_RES (19), (20), (21), (22): Xaa is A or G or is absent
GXSRVVMNSMEGIXXXXXXXXXMIQVTINSLKTPAX

SEQ ID NO: 26195 - protein, 42 aa, Artificial Sequence
  Non-cyclic GFR-binding peptide
  MOD_RES (1), (38): Xaa is C or S
XELHEELRNSLQELKPKKRVYEYYLVTLPEHHVRSPQXKVSS

SEQ ID NO: 26196 - protein, 37 aa, Artificial Sequence
  Non-cyclic GFR-binding peptide
  MOD_RES (2), (36), (37): Xaa is C or S
  MOD_RES (14), (15), (16), (17), (18): Xaa is A or G
  MOD_RES (19), (20), (21), (22): Xaa is A or G or is absent
GXARVVMNVQVEKXXXXXXXXXVKAVKVSRLQTPAXX

SEQ ID NO: 26197 - protein, 34 aa, Artificial Sequence
  Non-cyclic GFR-binding peptide
  MOD_RES (31), (32): Xaa is C or S
RVVMNVTAKKIVNSSDDIKRVQVPRLQTPAXXPK

SEQ ID NO: 26198 - protein, 35 aa, Artificial Sequence
  Non-cyclic GFR-binding peptide
  MOD_RES (33), (33): Xaa is C or S
  MOD_RES (11), (12), (13), (14), (15): Xaa is A or G
  MOD_RES (16), (17), (18), (19): Xaa is A or G or is absent
RVVMNVTAKKXXXXXXXXXIKRVQVPRLKTPAXTP

SEQ ID NO: 26199 - protein, 39 aa, Artificial Sequence
  Non-cyclic GFR-binding peptide
  MOD_RES (33), (34): Xaa is C or S
  MOD_RES (11), (12), (13), (14), (15): Xaa is A or G
  MOD_RES (16), (17), (18), (19): Xaa is A or G or is absent
EVVMESMEGIXXXXXXXXXMIQMTINSLETPVXXAKPIS

SEQ ID NO: 26200 - protein, 35 aa, Artificial Sequence
  Non-cyclic GFR-binding peptide
  MOD_RES (32), (33): Xaa is C or S
SRVVMNVTAKKIVNSSDDIKRVQVPRLKTPAXXPK

SEQ ID NO: 26201 - protein, 33 aa, Artificial Sequence
  Non-cyclic GFR-binding peptide
  MOD_RES (31), (32): Xaa is C or S
RVVMNVTAKKIVNSSDDIKRVQVPRLKTPAXXP

SEQ ID NO: 26202 - protein, 35 aa, Artificial Sequence
  Non-cyclic GFR-binding peptide
  MOD_RES (1), (1): Xaa is C or S
XELHEELRNSLQELKPKKRVYEYYLVTLPEHHVRS

SEQ ID NO: 26203 - protein, 33 aa, Artificial Sequence
  Non-cyclic GFR-binding peptide
  MOD_RES (1), (1): Xaa is C or S
  MOD_RES (12), (13), (14), (15), (16): Xaa is A or G
  MOD_RES (17), (18), (19), (20): Xaa is A or G or is absent
XSRVIMSMEGIXXXXXXXXXMIQITINSLAQPV

SEQ ID NO: 26204 - protein, 38 aa, Artificial Sequence
  Non-cyclic GFR-binding peptide
  MOD_RES (1), (38): Xaa is C or S
  MOD_RES (14), (15), (16), (17), (18): Xaa is A or G
  MOD_RES (19), (20), (21), (22): Xaa is A or G or is absent
XELHEELRNSLQEXXXXXXXXXYYVVPLPEHHVRSPQX

SEQ ID NO: 26205 - protein, 34 aa, Artificial Sequence
  Non-cyclic GFR-binding peptide
  MOD_RES (1), (1): Xaa is C or S
  MOD_RES (13), (14), (15), (16), (17): Xaa is A or G
  MOD_RES (18), (19), (20), (21): Xaa is A or G or is absent
XSRVVMNVTAKKXXXXXXXXXIKRVQVPRLKTPA

SEQ ID NO: 26206 - protein, 43 aa, Artificial Sequence
  Non-cyclic GFR-binding peptide
  MOD_RES (2), (4), (37), (38): Xaa is C or S
  MOD_RES (15), (16), (17), (18), (19): Xaa is A or G
  MOD_RES (20), (21), (22), (23): Xaa is A or G or is absent
SXKXSRVIMVQVEKXXXXXXXXXVKAIKVSRLAQPVXXPAASA

SEQ ID NO: 26207 - protein, 35 aa, Artificial Sequence
  Non-cyclic GFR-binding peptide
  MOD_RES (34), (35): Xaa is C or S
  MOD_RES (12), (13), (14), (15), (16): Xaa is A or G
  MOD_RES (17), (18), (19), (20): Xaa is A or G or is absent
GEVVMESMEGIXXXXXXXXXMIQMTINSLETPVXX

SEQ ID NO: 26208 - protein, 36 aa, Artificial Sequence
  Non-cyclic GFR-binding peptide
  MOD_RES (1), (3), (35), (36): Xaa is C or S
XGXARVVMNVQVEKIVNSSDDVKAVKVSRLQTPAXX

SEQ ID NO: 26209 - protein, 42 aa, Artificial Sequence
  Non-cyclic GFR-binding peptide
  MOD_RES (2), (4), (36), (37): Xaa is C or S
HXGXARVVMNVQVEKIVNSSDDVKAVKVSRLQTPAXXPKPVT

SEQ ID NO: 26210 - protein, 31 aa, Artificial Sequence
  Non-cyclic GFR-binding peptide
  MOD_RES (31), (31): Xaa is C or S
RVVMNVTAKKIVNSSDDIKRVQVPRLKTPAX

SEQ ID NO: 26211 - protein, 33 aa, Artificial Sequence
  Non-cyclic GFR-binding peptide
  MOD_RES (1), (3): Xaa is C or S
XKXSRVIMVQVEKVKPKRGVVKAIKVSRLAQPV

SEQ ID NO: 26212 - protein, 39 aa, Artificial Sequence
  Non-cyclic GFR-binding peptide
  MOD_RES (34), (35): Xaa is C or S
  MOD_RES (12), (13), (14), (15), (16): Xaa is A or G
  MOD_RES (17), (18), (19), (20): Xaa is A or G or is absent
GEVVMDVTAKKXXXXXXXXXIKRMQVPRLETPVXXAKPI

SEQ ID NO: 26213 - protein, 37 aa, Artificial Sequence
  Non-cyclic GFR-binding peptide
  MOD_RES (31), (32): Xaa is C or S
EVVMDVTAKKVVKENEDIKRMQVPRLETPVXXAKPIK

SEQ ID NO: 26214 - protein, 39 aa, Artificial Sequence
  Non-cyclic GFR-binding peptide
  MOD_RES (2), (4), (36), (37): Xaa is C or S
HXGXARVVMNVTAKKIVNSSDDIKRVQVPRLQTPAXXPK

SEQ ID NO: 26215 - protein, 37 aa, Artificial Sequence
  Non-cyclic GFR-binding peptide
  MOD_RES (31), (32): Xaa is C or S
RVVMNSMEGIIVNSSDDMIQVTINSLKTPAXXPKPVY

SEQ ID NO: 26216 - protein, 31 aa, Artificial Sequence
  Non-cyclic GFR-binding peptide
  MOD_RES (1), (1): Xaa is C or S
XSKVIMVQVEKIKPTKGIVKAIKVSRLDQSV

SEQ ID NO: 26217 - protein, 37 aa, Artificial Sequence
  Non-cyclic GFR-binding peptide
  MOD_RES (1), (32), (33): Xaa is C or S
XSKVIMVQVEKIKPTKGIVKAIKVSRLDQSVXXPSAS

SEQ ID NO: 26218 - protein, 38 aa, Artificial Sequence
  Non-cyclic GFR-binding peptide
  MOD_RES (1), (33): Xaa is C or S
XSRVVMNVTAKKIVNSSDDIKRVQVPRLKTPAXTPKTV

SEQ ID NO: 26219 - protein, 41 aa, Artificial Sequence
  Non-cyclic GFR-binding peptide
  MOD_RES (2), (4), (35), (36): Xaa is C or S
SXKXSKVIMVTAKKIKPTKGIIKRIQVPRLDQSVXXPSASA

SEQ ID NO: 26220 - protein, 37 aa, Artificial Sequence
  Non-cyclic GFR-binding peptide
  MOD_RES (1), (3), (35), (36): Xaa is C or S
XGXSRVVMNVQVEKIVNSSDDVKAVKVSRLKTPAXXP

SEQ ID NO: 26221 - protein, 33 aa, Artificial Sequence
  Non-cyclic GFR-binding peptide
  MOD_RES (1), (3): Xaa is C or S
XKXSKVVMSMEGIVKPTRGVMIQITINSLDQPV

SEQ ID NO: 26222 - protein, 35 aa, Artificial Sequence
  Non-cyclic GFR-binding peptide
  MOD_RES (35), (35): Xaa is C or S
HEELRNSLQELKPKKRVYEYYLVTLPEHHVRSPQX

SEQ ID NO: 26223 - protein, 43 aa, Artificial Sequence
  Non-cyclic GFR-binding peptide
  MOD_RES (1), (3), (40): Xaa is C or S
  MOD_RES (16), (17), (18), (19), (20): Xaa is A or G
  MOD_RES (21), (22), (23), (24): Xaa is A or G or is absent
XAXELHEELRNSLQEXXXXXXXXXYYLVTLPEHHVRSPQXKVS

SEQ ID NO: 26224 - protein, 37 aa, Artificial Sequence
  Non-cyclic GFR-binding peptide
  MOD_RES (33), (33): Xaa is C or S
  MOD_RES (11), (12), (13), (14), (15): Xaa is A or G
  MOD_RES (16), (17), (18), (19): Xaa is A or G or is absent
RVVMNSMEGIXXXXXXXXXMIQVTINSLKTPAXTPKT

SEQ ID NO: 26225 - protein, 37 aa, Artificial Sequence
  Non-cyclic GFR-binding peptide
  MOD_RES (36), (36): Xaa is C or S
  MOD_RES (12), (13), (14), (15), (16): Xaa is A or G
  MOD_RES (17), (18), (19), (20): Xaa is A or G or is absent
LHEELRNSLQEXXXXXXXXXYYLVTLPEHHVRSPQXK

SEQ ID NO: 26226 - protein, 35 aa, Artificial Sequence
  Non-cyclic GFR-binding peptide
  MOD_RES (2), (35): Xaa is C or S
  MOD_RES (13), (14), (15), (16), (17): Xaa is A or G
  MOD_RES (18), (19), (20), (21): Xaa is A or G or is absent
KXSRVIMVTAKKXXXXXXXXXIKRIQVPRLAQPVX

SEQ ID NO: 26227 - protein, 38 aa, Artificial Sequence
  Non-cyclic GFR-binding peptide
  MOD_RES (2), (36): Xaa is C or S
  MOD_RES (14), (15), (16), (17), (18): Xaa is A or G
  MOD_RES (19), (20), (21), (22): Xaa is A or G or is absent
GXSRVVMNVQVEKXXXXXXXXXVKAVKVSRLKTPAXTP

SEQ ID NO: 26228 - protein, 40 aa, Artificial Sequence
  Non-cyclic GFR-binding peptide
  MOD_RES (2), (4), (38), (39): Xaa is C or S
  MOD_RES (16), (17), (18), (19), (20): Xaa is A or G
  MOD_RES (21), (22), (23), (24): Xaa is A or G or is absent
HXGXSRVVMNSMEGIXXXXXXXXXMIQVTINSLKTPAXXP

SEQ ID NO: 26229 - protein, 31 aa, Artificial Sequence
  Non-cyclic GFR-binding peptide
  MOD_RES (31), (31): Xaa is C or S
SRVIMSMEGIVKPKRGVMIQITINSLAQPVX

SEQ ID NO: 26230 - protein, 43 aa, Artificial Sequence
  Non-cyclic GFR-binding peptide
  MOD_RES (2), (4), (38), (39): Xaa is C or S
  MOD_RES (16), (17), (18), (19), (20): Xaa is A or G
  MOD_RES (21), (22), (23), (24): Xaa is A or G or is absent
HXGXSRVVMNSMEGIXXXXXXXXXMIQVTINSLKTPAXXPKPV

SEQ ID NO: 26231 - protein, 40 aa, Artificial Sequence
  Non-cyclic GFR-binding peptide
  MOD_RES (2), (4), (37), (38): Xaa is C or S
  MOD_RES (15), (16), (17), (18), (19): Xaa is A or G
  MOD_RES (20), (21), (22), (23): Xaa is A or G or is absent
SXKXSKVVMSMEGIXXXXXXXXXMIQITINSLDQPVXXPS

SEQ ID NO: 26232 - protein, 38 aa, Artificial Sequence
  Non-cyclic GFR-binding peptide
  MOD_RES (1), (34), (35): Xaa is C or S
  MOD_RES (12), (13), (14), (15), (16): Xaa is A or G
  MOD_RES (17), (18), (19), (20): Xaa is A or G or is absent
XSKVIMVQVEKXXXXXXXXXVKAIKVSRLDQSVXXPSA

SEQ ID NO: 26233 - protein, 33 aa, Artificial Sequence
  Non-cyclic GFR-binding peptide
  MOD_RES (1), (32), (33): Xaa is C or S
XSKVVMVTAKKVKPTRGVIKRIQVPRLDQPVXX

SEQ ID NO: 26234 - protein, 32 aa, Artificial Sequence
  Non-cyclic GFR-binding peptide
  MOD_RES (2), (2): Xaa is C or S
KXSKVVMVTAKKVKPTRGVIKRIQVPRLDQPV

SEQ ID NO: 26235 - protein, 39 aa, Artificial Sequence
  Non-cyclic GFR-binding peptide
  MOD_RES (1), (3), (37), (38): Xaa is C or S
  MOD_RES (15), (16), (17), (18), (19): Xaa is A or G
  MOD_RES (20), (21), (22), (23): Xaa is A or G or is absent
XGXGEVVMDVQVEKXXXXXXXXXVKAMKVSRLETPVXXA

SEQ ID NO: 26236 - protein, 39 aa, Artificial Sequence
  Non-cyclic GFR-binding peptide
  MOD_RES (37), (37): Xaa is C or S
ELHEELRNSLQELKPKKRVYEYYLVTLPEHHVRSPQXKV

SEQ ID NO: 26237 - protein, 40 aa, Artificial Sequence
  Non-cyclic GFR-binding peptide
  MOD_RES (2), (34), (35): Xaa is C or S
GXARVVMNVTAKKIVNSSDDIKRVQVPRLQTPAXXPKPVT

SEQ ID NO: 26238 - protein, 37 aa, Artificial Sequence
  Non-cyclic GFR-binding peptide
  MOD_RES (1), (3), (34), (35): Xaa is C or S
XKXSRVIMVQVEKVKPKRGVVKAIKVSRLAQPVXXPA

SEQ ID NO: 26239 - protein, 37 aa, Artificial Sequence
  Non-cyclic GFR-binding peptide
  MOD_RES (1), (33): Xaa is C or S
XSRVVMNSMEGIIVNSSDDMIQVTINSLKTPAXTPKT

SEQ ID NO: 26240 - protein, 30 aa, Artificial Sequence
  Non-cyclic GFR-binding peptide
EVVMDVTAKKVVKENEDIKRMQVPRLETPV

SEQ ID NO: 26241 - protein, 38 aa, Artificial Sequence
  Non-cyclic GFR-binding peptide
  MOD_RES (2), (4): Xaa is C or S
AXAXELHEELRNSLQELKPKKRVYEYYVVPLPEHHVRS

SEQ ID NO: 26242 - protein, 42 aa, Artificial Sequence
  Non-cyclic GFR-binding peptide
  MOD_RES (1), (38): Xaa is C or S
  MOD_RES (14), (15), (16), (17), (18): Xaa is A or G
  MOD_RES (19), (20), (21), (22): Xaa is A or G or is absent
XALHDELTNSLQEXXXXXXXXXYYLVTLPELQVQTPRXQVNR

SEQ ID NO: 26243 - protein, 40 aa, Artificial Sequence
  Non-cyclic GFR-binding peptide
  MOD_RES (2), (4), (37), (38): Xaa is C or S
  MOD_RES (15), (16), (17), (18), (19): Xaa is A or G
  MOD_RES (20), (21), (22), (23): Xaa is A or G or is absent
SXKXSKVVMVTAKKXXXXXXXXXIKRIQVPRLDQPVXXPS

SEQ ID NO: 26244 - protein, 34 aa, Artificial Sequence
  Non-cyclic GFR-binding peptide
  MOD_RES (1), (33), (34): Xaa is C or S
XSRVVMNSMEGIIVNSSDDMIQVTINSLKTPAXX

SEQ ID NO: 26245 - protein, 39 aa, Artificial Sequence
  Non-cyclic GFR-binding peptide
  MOD_RES (1), (35), (36): Xaa is C or S
  MOD_RES (13), (14), (15), (16), (17): Xaa is A or G
  MOD_RES (18), (19), (20), (21): Xaa is A or G or is absent
XARVVMNSMEGIXXXXXXXXXMIQVTINSLQTPAXXPKP

SEQ ID NO: 26246 - protein, 39 aa, Artificial Sequence
  Non-cyclic GFR-binding peptide
  MOD_RES (1), (34), (35): Xaa is C or S
  MOD_RES (12), (13), (14), (15), (16): Xaa is A or G
  MOD_RES (17), (18), (19), (20): Xaa is A or G or is absent
XSKVIMVTAKKXXXXXXXXXIKRIQVPRLDQSVXXPSAS

SEQ ID NO: 26247 - protein, 40 aa, Artificial Sequence
  Non-cyclic GFR-binding peptide
  MOD_RES (1), (3), (40): Xaa is C or S
XKXALHDELTNSLQEFIPKKRVIEYYLVTLPELQVQTPRX

SEQ ID NO: 26248 - protein, 37 aa, Artificial Sequence
  Non-cyclic GFR-binding peptide
  MOD_RES (31), (32): Xaa is C or S
RVVMNSMEGIIVNSSDDMIQVTINSLQTPAXXPKPVT

SEQ ID NO: 26249 - protein, 36 aa, Artificial Sequence
  Non-cyclic GFR-binding peptide
  MOD_RES (1), (1): Xaa is C or S
XALHDELTNSLQEFIPKKRVIEYYLVTLPELQVQTP

SEQ ID NO: 26250 - protein, 32 aa, Artificial Sequence
  Non-cyclic GFR-binding peptide
  MOD_RES (1), (32): Xaa is C or S
XSKVVMVQVEKVKPTRGVVKAIKVSRLDQPVX

SEQ ID NO: 26251 - protein, 33 aa, Artificial Sequence
  Non-cyclic GFR-binding peptide
  MOD_RES (12), (13), (14), (15), (16): Xaa is A or G
  MOD_RES (17), (18), (19), (20): Xaa is A or G or is absent
GEVVMDSMEGIXXXXXXXXXMIQMTINSLETPV

SEQ ID NO: 26252 - protein, 37 aa, Artificial Sequence
  Non-cyclic GFR-binding peptide
  MOD_RES (2), (34), (35): Xaa is C or S
GXGEVVMEVTAKKVVKDYEDIKRMQVPRLETPVXXAK

SEQ ID NO: 26253 - protein, 36 aa, Artificial Sequence
  Non-cyclic GFR-binding peptide
  MOD_RES (34), (34): Xaa is C or S
  MOD_RES (12), (13), (14), (15), (16): Xaa is A or G
  MOD_RES (17), (18), (19), (20): Xaa is A or G or is absent
KNHQLFNSLQEXXXXXXXXXYYLMTLPEEETPVXEL

SEQ ID NO: 26254 - protein, 38 aa, Artificial Sequence
  Non-cyclic GFR-binding peptide
  MOD_RES (2), (35), (36): Xaa is C or S
  MOD_RES (13), (14), (15), (16), (17): Xaa is A or G
  MOD_RES (18), (19), (20), (21): Xaa is A or G or is absent
KXSRVIMVTAKKXXXXXXXXXIKRIQVPRLAQPVXXPA

SEQ ID NO: 26255 - protein, 39 aa, Artificial Sequence
  Non-cyclic GFR-binding peptide
  MOD_RES (2), (36): Xaa is C or S
  MOD_RES (14), (15), (16), (17), (18): Xaa is A or G
  MOD_RES (19), (20), (21), (22): Xaa is A or G or is absent
GXSRVVMNSMEGIXXXXXXXXXMIQVTINSLKTPAXTPK

SEQ ID NO: 26256 - protein, 38 aa, Artificial Sequence
  Non-cyclic GFR-binding peptide
  MOD_RES (2), (36): Xaa is C or S
EXKNHQLFNSLQEHQGQHPKIRYYLMTLPEEETPVXEL

SEQ ID NO: 26257 - protein, 39 aa, Artificial Sequence
  Non-cyclic GFR-binding peptide
  MOD_RES (2), (4), (38), (39): Xaa is C or S
  MOD_RES (16), (17), (18), (19), (20): Xaa is A or G
  MOD_RES (21), (22), (23), (24): Xaa is A or G or is absent
HXGXSRVVMNVTAKKXXXXXXXXXIKRVQVPRLKTPAXX

SEQ ID NO: 26258 - protein, 35 aa, Artificial Sequence
  Non-cyclic GFR-binding peptide
LHEELRNSLQELKPKKRVYEYYLVTLPEHHVRSPQ

SEQ ID NO: 26259 - protein, 43 aa, Artificial Sequence
  Non-cyclic GFR-binding peptide
  MOD_RES (2), (4), (38), (39): Xaa is C or S
  MOD_RES (16), (17), (18), (19), (20): Xaa is A or G
  MOD_RES (21), (22), (23), (24): Xaa is A or G or is absent
RXGXGEVVMDVTAKKXXXXXXXXXIKRMQVPRLETPVXXAKPI

SEQ ID NO: 26260 - protein, 39 aa, Artificial Sequence
  Non-cyclic GFR-binding peptide
  MOD_RES (1), (3), (34), (35): Xaa is C or S
XKXSKVIMVQVEKIKPTKGIVKAIKVSRLDQSVXXPSAS

SEQ ID NO: 26261 - protein, 41 aa, Artificial Sequence
  Non-cyclic GFR-binding peptide
  MOD_RES (1), (3), (37): Xaa is C or S
XEXKNHQLFNSLQEHQGQHPKIRYYLMTLPEEETPVXELGE

SEQ ID NO: 26262 - protein, 35 aa, Artificial Sequence
  Non-cyclic GFR-binding peptide
  MOD_RES (32), (33): Xaa is C or S
GEVVMDVQVEKVVKENEDVKAMKVSRLETPVXXAK

SEQ ID NO: 26263 - protein, 43 aa, Artificial Sequence
  Non-cyclic GFR-binding peptide
  MOD_RES (2), (4), (41): Xaa is C or S
EXKXALHDELTNSLQEFIPKKRVIEYYLVTLPELQVQTPRXQV

SEQ ID NO: 26264 - protein, 32 aa, Artificial Sequence
  Non-cyclic GFR-binding peptide
  MOD_RES (11), (12), (13), (14), (15): Xaa is A or G
  MOD_RES (16), (17), (18), (19): Xaa is A or G or is absent
EVVMDVTAKKXXXXXXXXXIKRMQVPRLETPV

SEQ ID NO: 26265 - protein, 36 aa, Artificial Sequence
  Non-cyclic GFR-binding peptide
  MOD_RES (2), (36): Xaa is C or S
EXKNHQLFNSLQEHQGQHPKIRYYVMPLPEEETPVX

SEQ ID NO: 26266 - protein, 40 aa, Artificial Sequence
  Non-cyclic GFR-binding peptide
  MOD_RES (1), (35), (36): Xaa is C or S
  MOD_RES (13), (14), (15), (16), (17): Xaa is A or G
  MOD_RES (18), (19), (20), (21): Xaa is A or G or is absent
XGEVVMDVTAKKXXXXXXXXXIKRMQVPRLETPVXXAKPI

SEQ ID NO: 26267 - protein, 36 aa, Artificial Sequence
  Non-cyclic GFR-binding peptide
  MOD_RES (33), (33): Xaa is C or S
NHQLFNSLQEHQGQHPKIRYYVMPLPEEETPVXELG

SEQ ID NO: 26268 - protein, 39 aa, Artificial Sequence
  Non-cyclic GFR-binding peptide
  MOD_RES (33), (34): Xaa is C or S
  MOD_RES (11), (12), (13), (14), (15): Xaa is A or G
  MOD_RES (16), (17), (18), (19): Xaa is A or G or is absent
SKVIMVQVEKXXXXXXXXXVKAIKVSRLDQSVXXPSASA

SEQ ID NO: 26269 - protein, 39 aa, Artificial Sequence
  Non-cyclic GFR-binding peptide
  MOD_RES (2), (34), (35): Xaa is C or S
GXGEVVMESMEGIVVKDYEDMIQMTINSLETPVXXAKPI

SEQ ID NO: 26270 - protein, 38 aa, Artificial Sequence
  Non-cyclic GFR-binding peptide
  MOD_RES (33), (34): Xaa is C or S
  MOD_RES (11), (12), (13), (14), (15): Xaa is A or G
  MOD_RES (16), (17), (18), (19): Xaa is A or G or is absent
SKVIMVQVEKXXXXXXXXXVKAIKVSRLDQSVXXPSAS

SEQ ID NO: 26271 - protein, 37 aa, Artificial Sequence
  Non-cyclic GFR-binding peptide
  MOD_RES (2), (2): Xaa is C or S
KXALHDELTNSLQEFIPKKRVIEYYVVPLPELQVQTP

SEQ ID NO: 26272 - protein, 38 aa, Artificial Sequence
  Non-cyclic GFR-binding peptide
  MOD_RES (2), (4), (35), (36): Xaa is C or S
SXKXSKVIMVQVEKIKPTKGIVKAIKVSRLDQSVXXPS

SEQ ID NO: 26273 - protein, 39 aa, Artificial Sequence
  Non-cyclic GFR-binding peptide
  MOD_RES (2), (39): Xaa is C or S
  MOD_RES (15), (16), (17), (18), (19): Xaa is A or G
  MOD_RES (20), (21), (22), (23): Xaa is A or G or is absent
KXALHDELTNSLQEXXXXXXXXXYYVVPLPELQVQTPRX

SEQ ID NO: 26274 - protein, 38 aa, Artificial Sequence
  Non-cyclic GFR-binding peptide
  MOD_RES (1), (3), (35): Xaa is C or S
XGXSRVVMNSMEGIIVNSSDDMIQVTINSLKTPAXTPK

SEQ ID NO: 26275 - protein, 36 aa, Artificial Sequence
  Non-cyclic GFR-binding peptide
  MOD_RES (2), (2): Xaa is C or S
AXELHEELRNSLQELKPKKRVYEYYVVPLPEHHVRS

SEQ ID NO: 26276 - protein, 38 aa, Artificial Sequence
  Non-cyclic GFR-binding peptide
  MOD_RES (1), (33), (34): Xaa is C or S
XGEVVMESMEGIVVKDYEDMIQMTINSLETPVXXAKPI

SEQ ID NO: 26277 - protein, 40 aa, Artificial Sequence
  Non-cyclic GFR-binding peptide
  MOD_RES (34), (35): Xaa is C or S
  MOD_RES (12), (13), (14), (15), (16): Xaa is A or G
  MOD_RES (17), (18), (19), (20): Xaa is A or G or is absent
SRVVMNSMEGIXXXXXXXXXMIQVTINSLKTPAXXPKPVY

SEQ ID NO: 26278 - protein, 40 aa, Artificial Sequence
  Non-cyclic GFR-binding peptide
  MOD_RES (2), (4), (38), (39): Xaa is C or S
  MOD_RES (16), (17), (18), (19), (20): Xaa is A or G
  MOD_RES (21), (22), (23), (24): Xaa is A or G or is absent
HXGXARVVMNVTAKKXXXXXXXXXIKRVQVPRLQTPAXXP

SEQ ID NO: 26279 - protein, 32 aa, Artificial Sequence
  Non-cyclic GFR-binding peptide
HDELTNSLQEFIPKKRVIEYYVVPLPELQVQT

SEQ ID NO: 26280 - protein, 36 aa, Artificial Sequence
  Non-cyclic GFR-binding peptide
  MOD_RES (1), (3), (36): Xaa is C or S
  MOD_RES (14), (15), (16), (17), (18): Xaa is A or G
  MOD_RES (19), (20), (21), (22): Xaa is A or G or is absent
XKXSKVVMSMEGIXXXXXXXXXMIQITINSLDQPVX

SEQ ID NO: 26281 - protein, 38 aa, Artificial Sequence
  Non-cyclic GFR-binding peptide
  MOD_RES (33), (34): Xaa is C or S
  MOD_RES (11), (12), (13), (14), (15): Xaa is A or G
  MOD_RES (16), (17), (18), (19): Xaa is A or G or is absent
SKVIMVTAKKXXXXXXXXXIKRIQVPRLDQSVXXPSAS

SEQ ID NO: 26282 - protein, 32 aa, Artificial Sequence
  Non-cyclic GFR-binding peptide
  MOD_RES (31), (32): Xaa is C or S
RVVMNVQVEKIVNSSDDVKAVKVSRLQTPAXX

SEQ ID NO: 26283 - protein, 41 aa, Artificial Sequence
  Non-cyclic GFR-binding peptide
  MOD_RES (1), (38): Xaa is C or S
XELHEELRNSLQELKPKKRVYEYYLVTLPEHHVRSPQXKVS

SEQ ID NO: 26284 - protein, 35 aa, Artificial Sequence
  Non-cyclic GFR-binding peptide
  MOD_RES (31), (32): Xaa is C or S
SKVIMVQVEKIKPTKGIVKAIKVSRLDQSVXXPSA

SEQ ID NO: 26285 - protein, 33 aa, Artificial Sequence
  Non-cyclic GFR-binding peptide
  MOD_RES (32), (33): Xaa is C or S
SRVVMNVQVEKIVNSSDDVKAVKVSRLKTPAXX

SEQ ID NO: 26286 - protein, 41 aa, Artificial Sequence
  Non-cyclic GFR-binding peptide
  MOD_RES (2), (36): Xaa is C or S
EXKNHQLFNSLQEHQGQHPKIRYYVMPLPEEETPVXELGED

SEQ ID NO: 26287 - protein, 34 aa, Artificial Sequence
  Non-cyclic GFR-binding peptide
  MOD_RES (2), (34): Xaa is C or S
GXARVVMNSMEGIIVNSSDDMIQVTINSLQTPAX

SEQ ID NO: 26288 - protein, 36 aa, Artificial Sequence
  Non-cyclic GFR-binding peptide
  MOD_RES (1), (34), (35): Xaa is C or S
  MOD_RES (12), (13), (14), (15), (16): Xaa is A or G
  MOD_RES (17), (18), (19), (20): Xaa is A or G or is absent
XSKVVMVQVEKXXXXXXXXXVKAIKVSRLDQPVXXP

SEQ ID NO: 26289 - protein, 38 aa, Artificial Sequence
  Non-cyclic GFR-binding peptide
  MOD_RES (1), (32), (33): Xaa is C or S
XSKVVMVQVEKVKPTRGVVKAIKVSRLDQPVXXPSASA

SEQ ID NO: 26290 - protein, 41 aa, Artificial Sequence
  Non-cyclic GFR-binding peptide
  MOD_RES (1), (35), (36): Xaa is C or S
  MOD_RES (13), (14), (15), (16), (17): Xaa is A or G
  MOD_RES (18), (19), (20), (21): Xaa is A or G or is absent
XSRVVMNVQVEKXXXXXXXXXVKAVKVSRLKTPAXXPKPVY

SEQ ID NO: 26291 - protein, 35 aa, Artificial Sequence
  Non-cyclic GFR-binding peptide
  MOD_RES (2), (34), (35): Xaa is C or S
GXGEVVMDVQVEKVVKENEDVKAMKVSRLETPVXX

SEQ ID NO: 26292 - protein, 39 aa, Artificial Sequence
  Non-cyclic GFR-binding peptide
  MOD_RES (34), (35): Xaa is C or S
  MOD_RES (12), (13), (14), (15), (16): Xaa is A or G
  MOD_RES (17), (18), (19), (20): Xaa is A or G or is absent
ARVVMNVTAKKXXXXXXXXXIKRVQVPRLQTPAXXPKPV

SEQ ID NO: 26293 - protein, 40 aa, Artificial Sequence
  Non-cyclic GFR-binding peptide
  MOD_RES (1), (35), (36): Xaa is C or S
  MOD_RES (13), (14), (15), (16), (17): Xaa is A or G
  MOD_RES (18), (19), (20), (21): Xaa is A or G or is absent
XGEVVMESMEGIXXXXXXXXXMIQMTINSLETPVXXAKPI

SEQ ID NO: 26294 - protein, 34 aa, Artificial Sequence
  Non-cyclic GFR-binding peptide
  MOD_RES (2), (4): Xaa is C or S
SXKXSRVIMVTAKKVKPKRGVIKRIQVPRLAQPV

SEQ ID NO: 26295 - protein, 38 aa, Artificial Sequence
  Non-cyclic GFR-binding peptide
  MOD_RES (33), (34): Xaa is C or S
  MOD_RES (11), (12), (13), (14), (15): Xaa is A or G
  MOD_RES (16), (17), (18), (19): Xaa is A or G or is absent
EVVMDVQVEKXXXXXXXXXVKAMKVSRLETPVXXAKPI

SEQ ID NO: 26296 - protein, 42 aa, Artificial Sequence
  Non-cyclic GFR-binding peptide
  MOD_RES (2), (39): Xaa is C or S
  MOD_RES (15), (16), (17), (18), (19): Xaa is A or G
  MOD_RES (20), (21), (22), (23): Xaa is A or G or is absent
KXALHDELTNSLQEXXXXXXXXXYYLVTLPELQVQTPRXQVN

SEQ ID NO: 26297 - protein, 34 aa, Artificial Sequence
  Non-cyclic GFR-binding peptide
  MOD_RES (1), (34): Xaa is C or S
  MOD_RES (12), (13), (14), (15), (16): Xaa is A or G
  MOD_RES (17), (18), (19), (20): Xaa is A or G or is absent
XSRVIMVQVEKXXXXXXXXXVKAIKVSRLAQPVX

SEQ ID NO: 26298 - protein, 33 aa, Artificial Sequence
  Non-cyclic GFR-binding peptide
  MOD_RES (31), (32): Xaa is C or S
EVVMEVTAKKVVKDYEDIKRMQVPRLETPVXXA

SEQ ID NO: 26299 - protein, 35 aa, Artificial Sequence
  Non-cyclic GFR-binding peptide
  MOD_RES (31), (32): Xaa is C or S
EVVMEVQVEKVVKDYEDVKAMKVSRLETPVXXAKP

SEQ ID NO: 26300 - protein, 33 aa, Artificial Sequence
  Non-cyclic GFR-binding peptide
  MOD_RES (32), (33): Xaa is C or S
GEVVMDVQVEKVVKENEDVKAMKVSRLETPVXX

SEQ ID NO: 26301 - protein, 40 aa, Artificial Sequence
  Non-cyclic GFR-binding peptide
  MOD_RES (1), (3), (37), (38): Xaa is C or S
  MOD_RES (15), (16), (17), (18), (19): Xaa is A or G
  MOD_RES (20), (21), (22), (23): Xaa is A or G or is absent
XGXGEVVMEVQVEKXXXXXXXXXVKAMKVSRLETPVXXAK

SEQ ID NO: 26302 - protein, 33 aa, Artificial Sequence
  Non-cyclic GFR-binding peptide
  MOD_RES (1), (3): Xaa is C or S
XKXSKVIMSMEGIIKPTKGIMIQITINSLDQSV

SEQ ID NO: 26303 - protein, 36 aa, Artificial Sequence
  Non-cyclic GFR-binding peptide
  MOD_RES (1), (3), (36): Xaa is C or S
  MOD_RES (14), (15), (16), (17), (18): Xaa is A or G
  MOD_RES (19), (20), (21), (22): Xaa is A or G or is absent
XKXSKVIMVQVEKXXXXXXXXXVKAIKVSRLDQSVX

SEQ ID NO: 26304 - protein, 40 aa, Artificial Sequence
  Non-cyclic GFR-binding peptide
  MOD_RES (1), (3), (34), (35): Xaa is C or S
XKXSKVIMVTAKKIKPTKGIIKRIQVPRLDQSVXXPSASA

SEQ ID NO: 26305 - protein, 41 aa, Artificial Sequence
  Non-cyclic GFR-binding peptide
  MOD_RES (2), (4), (36), (37): Xaa is C or S
HXGXARVVMNVQVEKIVNSSDDVKAVKVSRLQTPAXXPKPV

SEQ ID NO: 26306 - protein, 39 aa, Artificial Sequence
  Non-cyclic GFR-binding peptide
  MOD_RES (1), (3): Xaa is C or S
XKXALHDELTNSLQEFIPKKRVIEYYVVPLPELQVQTPR

SEQ ID NO: 26307 - protein, 37 aa, Artificial Sequence
  Non-cyclic GFR-binding peptide
  MOD_RES (1), (3): Xaa is C or S
  MOD_RES (16), (17), (18), (19), (20): Xaa is A or G
  MOD_RES (21), (22), (23), (24): Xaa is A or G or is absent
XAXELHEELRNSLQEXXXXXXXXXYYLVTLPEHHVRS

SEQ ID NO: 26308 - protein, 34 aa, Artificial Sequence
  Non-cyclic GFR-binding peptide
  MOD_RES (33), (34): Xaa is C or S
  MOD_RES (11), (12), (13), (14), (15): Xaa is A or G
  MOD_RES (16), (17), (18), (19): Xaa is A or G or is absent
RVVMNVTAKKXXXXXXXXXIKRVQVPRLKTPAXX

SEQ ID NO: 26309 - protein, 35 aa, Artificial Sequence
  Non-cyclic GFR-binding peptide
  MOD_RES (1), (3), (35): Xaa is C or S
XGXSRVVMNSMEGIIVNSSDDMIQVTINSLKTPAX

SEQ ID NO: 26310 - protein, 39 aa, Artificial Sequence
  Non-cyclic GFR-binding peptide
  MOD_RES (33), (33): Xaa is C or S
  MOD_RES (11), (12), (13), (14), (15): Xaa is A or G
  MOD_RES (16), (17), (18), (19): Xaa is A or G or is absent
NHQLFNSLQEXXXXXXXXXYYLMTLPEEETPVXELGEDN

SEQ ID NO: 26311 - protein, 35 aa, Artificial Sequence
  Non-cyclic GFR-binding peptide
  MOD_RES (35), (35): Xaa is C or S
HEELRNSLQELKPKKRVYEYYVVPLPEHHVRSPQX

SEQ ID NO: 26312 - protein, 38 aa, Artificial Sequence
  Non-cyclic GFR-binding peptide
  MOD_RES (2), (4), (36), (37): Xaa is C or S
RXGXGEVVMDSMEGIVVKENEDMIQMTINSLETPVXXA

SEQ ID NO: 26313 - protein, 39 aa, Artificial Sequence
  Non-cyclic GFR-binding peptide
  MOD_RES (37), (37): Xaa is C or S
  MOD_RES (13), (14), (15), (16), (17): Xaa is A or G
  MOD_RES (18), (19), (20), (21): Xaa is A or G or is absent
ALHDELTNSLQEXXXXXXXXXYYVVPLPELQVQTPRXQV

SEQ ID NO: 26314 - protein, 38 aa, Artificial Sequence
  Non-cyclic GFR-binding peptide
  MOD_RES (2), (34), (35): Xaa is C or S
GXGEVVMEVTAKKVVKDYEDIKRMQVPRLETPVXXAKP

SEQ ID NO: 26315 - protein, 42 aa, Artificial Sequence
  Non-cyclic GFR-binding peptide
  MOD_RES (2), (4), (36), (37): Xaa is C or S
HXGXARVVMNSMEGIIVNSSDDMIQVTINSLQTPAXXPKPVT

SEQ ID NO: 26316 - protein, 38 aa, Artificial Sequence
  Non-cyclic GFR-binding peptide
  MOD_RES (2), (4), (38): Xaa is C or S
  MOD_RES (16), (17), (18), (19), (20): Xaa is A or G
  MOD_RES (21), (22), (23), (24): Xaa is A or G or is absent
HXGXARVVMNVTAKKXXXXXXXXXIKRVQVPRLQTPAX

SEQ ID NO: 26317 - protein, 36 aa, Artificial Sequence
  Non-cyclic GFR-binding peptide
  MOD_RES (2), (4), (36): Xaa is C or S
HXGXARVVMNSMEGIIVNSSDDMIQVTINSLQTPAX

SEQ ID NO: 26318 - protein, 37 aa, Artificial Sequence
  Non-cyclic GFR-binding peptide
  MOD_RES (1), (3), (35), (36): Xaa is C or S
XGXARVVMNSMEGIIVNSSDDMIQVTINSLQTPAXXP

SEQ ID NO: 26319 - protein, 40 aa, Artificial Sequence
  Non-cyclic GFR-binding peptide
  MOD_RES (34), (35): Xaa is C or S
  MOD_RES (12), (13), (14), (15), (16): Xaa is A or G
  MOD_RES (17), (18), (19), (20): Xaa is A or G or is absent
SRVVMNVTAKKXXXXXXXXXIKRVQVPRLKTPAXXPKPVY

SEQ ID NO: 26320 - protein, 34 aa, Artificial Sequence
  Non-cyclic GFR-binding peptide
  MOD_RES (12), (13), (14), (15), (16): Xaa is A or G
  MOD_RES (17), (18), (19), (20): Xaa is A or G or is absent
LHDELTNSLQEXXXXXXXXXYYLVTLPELQVQTP

SEQ ID NO: 26321 - protein, 38 aa, Artificial Sequence
  Non-cyclic GFR-binding peptide
  MOD_RES (2), (4), (38): Xaa is C or S
  MOD_RES (16), (17), (18), (19), (20): Xaa is A or G
  MOD_RES (21), (22), (23), (24): Xaa is A or G or is absent
HXGXARVVMNVQVEKXXXXXXXXXVKAVKVSRLQTPAX

SEQ ID NO: 26322 - protein, 36 aa, Artificial Sequence
  Non-cyclic GFR-binding peptide
  MOD_RES (36), (36): Xaa is C or S
LHEELRNSLQELKPKKRVYEYYLVTLPEHHVRSPQX

SEQ ID NO: 26323 - protein, 35 aa, Artificial Sequence
  Non-cyclic GFR-binding peptide
  MOD_RES (1), (3): Xaa is C or S
  MOD_RES (14), (15), (16), (17), (18): Xaa is A or G
  MOD_RES (19), (20), (21), (22): Xaa is A or G or is absent
XKXSKVVMSMEGIXXXXXXXXXMIQITINSLDQPV

SEQ ID NO: 26324 - protein, 35 aa, Artificial Sequence
  Non-cyclic GFR-binding peptide
  MOD_RES (1), (1): Xaa is C or S
  MOD_RES (14), (15), (16), (17), (18): Xaa is A or G
  MOD_RES (19), (20), (21), (22): Xaa is A or G or is absent
XELHEELRNSLQEXXXXXXXXXYYVVPLPEHHVRS

SEQ ID NO: 26325 - protein, 37 aa, Artificial Sequence
  Non-cyclic GFR-binding peptide
  MOD_RES (1), (3), (37): Xaa is C or S
  MOD_RES (15), (16), (17), (18), (19): Xaa is A or G
  MOD_RES (20), (21), (22), (23): Xaa is A or G or is absent
XGXARVVMNVTAKKXXXXXXXXXIKRVQVPRLQTPAX

SEQ ID NO: 26326 - protein, 41 aa, Artificial Sequence
  Non-cyclic GFR-binding peptide
  MOD_RES (2), (36), (37): Xaa is C or S
  MOD_RES (14), (15), (16), (17), (18): Xaa is A or G
  MOD_RES (19), (20), (21), (22): Xaa is A or G or is absent
GXGEVVMEVQVEKXXXXXXXXXVKAMKVSRLETPVXXAKPI

SEQ ID NO: 26327 - protein, 38 aa, Artificial Sequence
  Non-cyclic GFR-binding peptide
  MOD_RES (2), (4): Xaa is C or S
EXKXALHDELTNSLQEFIPKKRVIEYYVVPLPELQVQT

SEQ ID NO: 26328 - protein, 38 aa, Artificial Sequence
  Non-cyclic GFR-binding peptide
  MOD_RES (34), (35): Xaa is C or S
  MOD_RES (12), (13), (14), (15), (16): Xaa is A or G
  MOD_RES (17), (18), (19), (20): Xaa is A or G or is absent
GEVVMDVTAKKXXXXXXXXXIKRMQVPRLETPVXXAKP

SEQ ID NO: 26329 - protein, 38 aa, Artificial Sequence
  Non-cyclic GFR-binding peptide
  MOD_RES (2), (33), (34): Xaa is C or S
KXSRVIMVQVEKVKPKRGVVKAIKVSRLAQPVXXPAAS

SEQ ID NO: 26330 - protein, 31 aa, Artificial Sequence
  Non-cyclic GFR-binding peptide
  MOD_RES (31), (31): Xaa is C or S
EVVMEVTAKKVVKDYEDIKRMQVPRLETPVX

SEQ ID NO: 26331 - protein, 35 aa, Artificial Sequence
  Non-cyclic GFR-binding peptide
  MOD_RES (33), (34): Xaa is C or S
  MOD_RES (11), (12), (13), (14), (15): Xaa is A or G
  MOD_RES (16), (17), (18), (19): Xaa is A or G or is absent
SRVIMVTAKKXXXXXXXXXIKRIQVPRLAQPVXXP

SEQ ID NO: 26332 - protein, 37 aa, Artificial Sequence
  Non-cyclic GFR-binding peptide
  MOD_RES (2), (4), (36), (37): Xaa is C or S
RXGXGEVVMDSMEGIVVKENEDMIQMTINSLETPVXX

SEQ ID NO: 26333 - protein, 32 aa, Artificial Sequence
  Non-cyclic GFR-binding peptide
  MOD_RES (32), (32): Xaa is C or S
ARVVMNVQVEKIVNSSDDVKAVKVSRLQTPAX

SEQ ID NO: 26334 - protein, 39 aa, Artificial Sequence
  Non-cyclic GFR-binding peptide
  MOD_RES (2), (39): Xaa is C or S
  MOD_RES (15), (16), (17), (18), (19): Xaa is A or G
  MOD_RES (20), (21), (22), (23): Xaa is A or G or is absent
KXALHDELTNSLQEXXXXXXXXXYYLVTLPELQVQTPRX

SEQ ID NO: 26335 - protein, 38 aa, Artificial Sequence
  Non-cyclic GFR-binding peptide
  MOD_RES (2), (2): Xaa is C or S
  MOD_RES (15), (16), (17), (18), (19): Xaa is A or G
  MOD_RES (20), (21), (22), (23): Xaa is A or G or is absent
AXELHEELRNSLQEXXXXXXXXXYYVVPLPEHHVRSPQ

SEQ ID NO: 26336 - protein, 42 aa, Artificial Sequence
  Non-cyclic GFR-binding peptide
  MOD_RES (2), (36): Xaa is C or S
EXKNHQLFNSLQEHQGQHPKIRYYLMTLPEEETPVXELGEDN

SEQ ID NO: 26337 - protein, 41 aa, Artificial Sequence
  Non-cyclic GFR-binding peptide
  MOD_RES (2), (4), (35), (36): Xaa is C or S
SXKXSKVVMSMEGIVKPTRGVMIQITINSLDQPVXXPSASA

SEQ ID NO: 26338 - protein, 35 aa, Artificial Sequence
  Non-cyclic GFR-binding peptide
  MOD_RES (32), (32): Xaa is C or S
SRVVMNVTAKKIVNSSDDIKRVQVPRLKTPAXTPK

SEQ ID NO: 26339 - protein, 38 aa, Artificial Sequence
  Non-cyclic GFR-binding peptide
  MOD_RES (2), (4), (36), (37): Xaa is C or S
HXGXARVVMNVTAKKIVNSSDDIKRVQVPRLQTPAXXP

SEQ ID NO: 26340 - protein, 35 aa, Artificial Sequence
  Non-cyclic GFR-binding peptide
  MOD_RES (2), (4), (35): Xaa is C or S
SXKXSRVIMVQVEKVKPKRGVVKAIKVSRLAQPVX

SEQ ID NO: 26341 - protein, 40 aa, Artificial Sequence
  Non-cyclic GFR-binding peptide
  MOD_RES (2), (36): Xaa is C or S
EXKNHQLFNSLQEHQGQHPKIRYYLMTLPEEETPVXELGE

SEQ ID NO: 26342 - protein, 35 aa, Artificial Sequence
  Non-cyclic GFR-binding peptide
  MOD_RES (1), (3): Xaa is C or S
  MOD_RES (14), (15), (16), (17), (18): Xaa is A or G
  MOD_RES (19), (20), (21), (22): Xaa is A or G or is absent
XKXSRVIMSMEGIXXXXXXXXXMIQITINSLAQPV

SEQ ID NO: 26343 - protein, 32 aa, Artificial Sequence
  Non-cyclic GFR-binding peptide
  MOD_RES (1), (32): Xaa is C or S
XSKVVMSMEGIVKPTRGVMIQITINSLDQPVX

SEQ ID NO: 26344 - protein, 37 aa, Artificial Sequence
  Non-cyclic GFR-binding peptide
  MOD_RES (1), (3), (37): Xaa is C or S
  MOD_RES (15), (16), (17), (18), (19): Xaa is A or G
  MOD_RES (20), (21), (22), (23): Xaa is A or G or is absent
XGXGEVVMESMEGIXXXXXXXXXMIQMTINSLETPVX

SEQ ID NO: 26345 - protein, 38 aa, Artificial Sequence
  Non-cyclic GFR-binding peptide
  MOD_RES (34), (35): Xaa is C or S
  MOD_RES (12), (13), (14), (15), (16): Xaa is A or G
  MOD_RES (17), (18), (19), (20): Xaa is A or G or is absent
ARVVMNSMEGIXXXXXXXXXMIQVTINSLQTPAXXPKP

SEQ ID NO: 26346 - protein, 38 aa, Artificial Sequence
  Non-cyclic GFR-binding peptide
  MOD_RES (1), (35), (36): Xaa is C or S
  MOD_RES (13), (14), (15), (16), (17): Xaa is A or G
  MOD_RES (18), (19), (20), (21): Xaa is A or G or is absent
XGEVVMESMEGIXXXXXXXXXMIQMTINSLETPVXXAK

SEQ ID NO: 26347 - protein, 38 aa, Artificial Sequence
  Non-cyclic GFR-binding peptide
  MOD_RES (32), (33): Xaa is C or S
GEVVMDSMEGIVVKENEDMIQMTINSLETPVXXAKPIK

SEQ ID NO: 26348 - protein, 42 aa, Artificial Sequence
  Non-cyclic GFR-binding peptide
  MOD_RES (2), (36): Xaa is C or S
  MOD_RES (14), (15), (16), (17), (18): Xaa is A or G
  MOD_RES (19), (20), (21), (22): Xaa is A or G or is absent
EXKNHQLFNSLQEXXXXXXXXXYYLMTLPEEETPVXELGEDN

SEQ ID NO: 26349 - protein, 38 aa, Artificial Sequence
  Non-cyclic GFR-binding peptide
  MOD_RES (1), (34), (35): Xaa is C or S
  MOD_RES (12), (13), (14), (15), (16): Xaa is A or G
  MOD_RES (17), (18), (19), (20): Xaa is A or G or is absent
XSRVIMSMEGIXXXXXXXXXMIQITINSLAQPVXXPAA

SEQ ID NO: 26350 - protein, 37 aa, Artificial Sequence
  Non-cyclic GFR-binding peptide
  MOD_RES (1), (1): Xaa is C or S
  MOD_RES (14), (15), (16), (17), (18): Xaa is A or G
  MOD_RES (19), (20), (21), (22): Xaa is A or G or is absent
XALHDELTNSLQEXXXXXXXXXYYLVTLPELQVQTPR

SEQ ID NO: 26351 - protein, 37 aa, Artificial Sequence
  Non-cyclic GFR-binding peptide
  MOD_RES (33), (34): Xaa is C or S
  MOD_RES (11), (12), (13), (14), (15): Xaa is A or G
  MOD_RES (16), (17), (18), (19): Xaa is A or G or is absent
EVVMEVQVEKXXXXXXXXXVKAMKVSRLETPVXXAKP

SEQ ID NO: 26352 - protein, 39 aa, Artificial Sequence
  Non-cyclic GFR-binding peptide
  MOD_RES (33), (33): Xaa is C or S
NHQLFNSLQEHQGQHPKIRYYVMPLPEEETPVXELGEDN

SEQ ID NO: 26353 - protein, 37 aa, Artificial Sequence
  Non-cyclic GFR-binding peptide
  MOD_RES (1), (3), (37): Xaa is C or S
XEXKNHQLFNSLQEHQGQHPKIRYYLMTLPEEETPVX

SEQ ID NO: 26354 - protein, 40 aa, Artificial Sequence
  Non-cyclic GFR-binding peptide
  MOD_RES (2), (4), (35), (36): Xaa is C or S
SXKXSKVIMSMEGIIKPTKGIMIQITINSLDQSVXXPSAS

SEQ ID NO: 26355 - protein, 33 aa, Artificial Sequence
  Non-cyclic GFR-binding peptide
  MOD_RES (31), (32): Xaa is C or S
RVVMNVQVEKIVNSSDDVKAVKVSRLQTPAXXP

SEQ ID NO: 26356 - protein, 39 aa, Artificial Sequence
  Non-cyclic GFR-binding peptide
  MOD_RES (1), (3), (37), (38): Xaa is C or S
  MOD_RES (15), (16), (17), (18), (19): Xaa is A or G
  MOD_RES (20), (21), (22), (23): Xaa is A or G or is absent
XGXARVVMNVQVEKXXXXXXXXXVKAVKVSRLQTPAXXP

SEQ ID NO: 26357 - protein, 36 aa, Artificial Sequence
  Non-cyclic GFR-binding peptide
  MOD_RES (33), (33): Xaa is C or S
  MOD_RES (11), (12), (13), (14), (15): Xaa is A or G
  MOD_RES (16), (17), (18), (19): Xaa is A or G or is absent
NHQLFNSLQEXXXXXXXXXYYVMPLPEEETPVXELG

SEQ ID NO: 26358 - protein, 37 aa, Artificial Sequence
  Non-cyclic GFR-binding peptide
  MOD_RES (1), (3), (37): Xaa is C or S
  MOD_RES (15), (16), (17), (18), (19): Xaa is A or G
  MOD_RES (20), (21), (22), (23): Xaa is A or G or is absent
XGXARVVMNSMEGIXXXXXXXXXMIQVTINSLQTPAX

SEQ ID NO: 26359 - protein, 41 aa, Artificial Sequence
  Non-cyclic GFR-binding peptide
  MOD_RES (2), (4), (37), (38): Xaa is C or S
  MOD_RES (15), (16), (17), (18), (19): Xaa is A or G
  MOD_RES (20), (21), (22), (23): Xaa is A or G or is absent
SXKXSKVVMVQVEKXXXXXXXXXVKAIKVSRLDQPVXXPSA

SEQ ID NO: 26360 - protein, 32 aa, Artificial Sequence
  Non-cyclic GFR-binding peptide
  MOD_RES (31), (32): Xaa is C or S
SKVVMSMEGIVKPTRGVMIQITINSLDQPVXX

SEQ ID NO: 26361 - protein, 43 aa, Artificial Sequence
  Non-cyclic GFR-binding peptide
  MOD_RES (2), (4), (38): Xaa is C or S
RXEXKNHQLFNSLQEHQGQHPKIRYYVMPLPEEETPVXELGED

SEQ ID NO: 26362 - protein, 33 aa, Artificial Sequence
  Non-cyclic GFR-binding peptide
  MOD_RES (31), (31): Xaa is C or S
RVVMNVTAKKIVNSSDDIKRVQVPRLKTPAXTP

SEQ ID NO: 26363 - protein, 35 aa, Artificial Sequence
  Non-cyclic GFR-binding peptide
  MOD_RES (31), (31): Xaa is C or S
RVVMNSMEGIIVNSSDDMIQVTINSLKTPAXTPKT

SEQ ID NO: 26364 - protein, 37 aa, Artificial Sequence
  Non-cyclic GFR-binding peptide
  MOD_RES (33), (33): Xaa is C or S
  MOD_RES (11), (12), (13), (14), (15): Xaa is A or G
  MOD_RES (16), (17), (18), (19): Xaa is A or G or is absent
NHQLFNSLQEXXXXXXXXXYYVMPLPEEETPVXELGE

SEQ ID NO: 26365 - protein, 37 aa, Artificial Sequence
  Non-cyclic GFR-binding peptide
  MOD_RES (1), (3), (36), (37): Xaa is C or S
  MOD_RES (14), (15), (16), (17), (18): Xaa is A or G
  MOD_RES (19), (20), (21), (22): Xaa is A or G or is absent
XKXSKVIMVTAKKXXXXXXXXXIKRIQVPRLDQSVXX

SEQ ID NO: 26366 - protein, 44 aa, Artificial Sequence
  Non-cyclic GFR-binding peptide
  MOD_RES (2), (4), (38), (39): Xaa is C or S
  MOD_RES (16), (17), (18), (19), (20): Xaa is A or G
  MOD_RES (21), (22), (23), (24): Xaa is A or G or is absent
RXGXGEVVMEVQVEKXXXXXXXXXVKAMKVSRLETPVXXAKPIS

SEQ ID NO: 26367 - protein, 36 aa, Artificial Sequence
  Non-cyclic GFR-binding peptide
  MOD_RES (2), (34), (35): Xaa is C or S
GXGEVVMDVTAKKVVKENEDIKRMQVPRLETPVXXA

SEQ ID NO: 26368 - protein, 35 aa, Artificial Sequence
  Non-cyclic GFR-binding peptide
  MOD_RES (1), (34), (35): Xaa is C or S
  MOD_RES (12), (13), (14), (15), (16): Xaa is A or G
  MOD_RES (17), (18), (19), (20): Xaa is A or G or is absent
XSRVIMVTAKKXXXXXXXXXIKRIQVPRLAQPVXX

SEQ ID NO: 26369 - protein, 41 aa, Artificial Sequence
  Non-cyclic GFR-binding peptide
  MOD_RES (1), (35), (36): Xaa is C or S
  MOD_RES (13), (14), (15), (16), (17): Xaa is A or G
  MOD_RES (18), (19), (20), (21): Xaa is A or G or is absent
XGEVVMEVTAKKXXXXXXXXXIKRMQVPRLETPVXXAKPIS

SEQ ID NO: 26370 - protein, 41 aa, Artificial Sequence
  Non-cyclic GFR-binding peptide
  MOD_RES (1), (3), (40): Xaa is C or S
  MOD_RES (16), (17), (18), (19), (20): Xaa is A or G
  MOD_RES (21), (22), (23), (24): Xaa is A or G or is absent
XKXALHDELTNSLQEXXXXXXXXXYYVVPLPELQVQTPRXQ

SEQ ID NO: 26371 - protein, 34 aa, Artificial Sequence
  Non-cyclic GFR-binding peptide
  MOD_RES (33), (33): Xaa is C or S
  MOD_RES (11), (12), (13), (14), (15): Xaa is A or G
  MOD_RES (16), (17), (18), (19): Xaa is A or G or is absent
RVVMNVQVEKXXXXXXXXXVKAVKVSRLKTPAXT

SEQ ID NO: 26372 - protein, 38 aa, Artificial Sequence
  Non-cyclic GFR-binding peptide
  MOD_RES (2), (4), (36), (37): Xaa is C or S
RXGXGEVVMDVQVEKVVKENEDVKAMKVSRLETPVXXA

SEQ ID NO: 26373 - protein, 36 aa, Artificial Sequence
  Non-cyclic GFR-binding peptide
  MOD_RES (1), (34), (35): Xaa is C or S
  MOD_RES (12), (13), (14), (15), (16): Xaa is A or G
  MOD_RES (17), (18), (19), (20): Xaa is A or G or is absent
XSKVIMSMEGIXXXXXXXXXMIQITINSLDQSVXXP

SEQ ID NO: 26374 - protein, 40 aa, Artificial Sequence
  Non-cyclic GFR-binding peptide
  MOD_RES (1), (3), (35), (36): Xaa is C or S
XGXARVVMNVQVEKIVNSSDDVKAVKVSRLQTPAXXPKPV

SEQ ID NO: 26375 - protein, 37 aa, Artificial Sequence
  Non-cyclic GFR-binding peptide
  MOD_RES (35), (35): Xaa is C or S
  MOD_RES (11), (12), (13), (14), (15): Xaa is A or G
  MOD_RES (16), (17), (18), (19): Xaa is A or G or is absent
HEELRNSLQEXXXXXXXXXYYVVPLPEHHVRSPQXKV

SEQ ID NO: 26376 - protein, 36 aa, Artificial Sequence
  Non-cyclic GFR-binding peptide
  MOD_RES (2), (34), (35): Xaa is C or S
GXSRVVMNVTAKKIVNSSDDIKRVQVPRLKTPAXXP

SEQ ID NO: 26377 - protein, 33 aa, Artificial Sequence
  Non-cyclic GFR-binding peptide
  MOD_RES (31), (32): Xaa is C or S
EVVMEVQVEKVVKDYEDVKAMKVSRLETPVXXA

SEQ ID NO: 26378 - protein, 32 aa, Artificial Sequence
  Non-cyclic GFR-binding peptide
  MOD_RES (31), (32): Xaa is C or S
SKVIMSMEGIIKPTKGIMIQITINSLDQSVXX

SEQ ID NO: 26379 - protein, 43 aa, Artificial Sequence
  Non-cyclic GFR-binding peptide
  MOD_RES (1), (3), (37), (38): Xaa is C or S
  MOD_RES (15), (16), (17), (18), (19): Xaa is A or G
  MOD_RES (20), (21), (22), (23): Xaa is A or G or is absent
XGXGEVVMEVTAKKXXXXXXXXXIKRMQVPRLETPVXXAKPIS

SEQ ID NO: 26380 - protein, 39 aa, Artificial Sequence
  Non-cyclic GFR-binding peptide
  MOD_RES (2), (36): Xaa is C or S
EXKNHQLFNSLQEHQGQHPKIRYYVMPLPEEETPVXELG

SEQ ID NO: 26381 - protein, 37 aa, Artificial Sequence
  Non-cyclic GFR-binding peptide
  MOD_RES (1), (34), (35): Xaa is C or S
  MOD_RES (12), (13), (14), (15), (16): Xaa is A or G
  MOD_RES (17), (18), (19), (20): Xaa is A or G or is absent
XSRVIMSMEGIXXXXXXXXXMIQITINSLAQPVXXPA

SEQ ID NO: 26382 - protein, 36 aa, Artificial Sequence
  Non-cyclic GFR-binding peptide
  MOD_RES (32), (33): Xaa is C or S
GEVVMEVTAKKVVKDYEDIKRMQVPRLETPVXXAKP

SEQ ID NO: 26383 - protein, 39 aa, Artificial Sequence
  Non-cyclic GFR-binding peptide
  MOD_RES (2), (36): Xaa is C or S
  MOD_RES (14), (15), (16), (17), (18): Xaa is A or G
  MOD_RES (19), (20), (21), (22): Xaa is A or G or is absent
GXSRVVMNVTAKKXXXXXXXXXIKRVQVPRLKTPAXTPK

SEQ ID NO: 26384 - protein, 38 aa, Artificial Sequence
  Non-cyclic GFR-binding peptide
  MOD_RES (1), (33), (34): Xaa is C or S
XSRVVMNVQVEKIVNSSDDVKAVKVSRLKTPAXXPKPV

SEQ ID NO: 26385 - protein, 32 aa, Artificial Sequence
  Non-cyclic GFR-binding peptide
  MOD_RES (1), (1): Xaa is C or S
XSRVVMNSMEGIIVNSSDDMIQVTINSLKTPA

SEQ ID NO: 26386 - protein, 36 aa, Artificial Sequence
  Non-cyclic GFR-binding peptide
  MOD_RES (2), (35), (36): Xaa is C or S
  MOD_RES (13), (14), (15), (16), (17): Xaa is A or G
  MOD_RES (18), (19), (20), (21): Xaa is A or G or is absent
KXSRVIMVTAKKXXXXXXXXXIKRIQVPRLAQPVXX

SEQ ID NO: 26387 - protein, 37 aa, Artificial Sequence
  Non-cyclic GFR-binding peptide
  MOD_RES (33), (33): Xaa is C or S
NHQLFNSLQEHQGQHPKIRYYLMTLPEEETPVXELGE

SEQ ID NO: 26388 - protein, 35 aa, Artificial Sequence
  Non-cyclic GFR-binding peptide
  MOD_RES (1), (3), (35): Xaa is C or S
XGXGEVVMDVQVEKVVKENEDVKAMKVSRLETPVX

SEQ ID NO: 26389 - protein, 35 aa, Artificial Sequence
  Non-cyclic GFR-binding peptide
  MOD_RES (1), (32), (33): Xaa is C or S
XSKVIMVTAKKIKPTKGIIKRIQVPRLDQSVXXPS

SEQ ID NO: 26390 - protein, 38 aa, Artificial Sequence
  Non-cyclic GFR-binding peptide
  MOD_RES (37), (37): Xaa is C or S
  MOD_RES (13), (14), (15), (16), (17): Xaa is A or G
  MOD_RES (18), (19), (20), (21): Xaa is A or G or is absent
ELHEELRNSLQEXXXXXXXXXYYLVTLPEHHVRSPQXK

SEQ ID NO: 26391 - protein, 39 aa, Artificial Sequence
  Non-cyclic GFR-binding peptide
  MOD_RES (1), (33), (34): Xaa is C or S
XGEVVMESMEGIVVKDYEDMIQMTINSLETPVXXAKPIS

SEQ ID NO: 26392 - protein, 40 aa, Artificial Sequence
  Non-cyclic GFR-binding peptide
  MOD_RES (34), (35): Xaa is C or S
  MOD_RES (12), (13), (14), (15), (16): Xaa is A or G
  MOD_RES (17), (18), (19), (20): Xaa is A or G or is absent
SRVVMNVQVEKXXXXXXXXXVKAVKVSRLKTPAXXPKPVY

SEQ ID NO: 26393 - protein, 43 aa, Artificial Sequence
  Non-cyclic GFR-binding peptide
  MOD_RES (2), (39): Xaa is C or S
KXALHDELTNSLQEFIPKKRVIEYYVVPLPELQVQTPRXQVNR

SEQ ID NO: 26394 - protein, 41 aa, Artificial Sequence
  Non-cyclic GFR-binding peptide
  MOD_RES (2), (4), (38): Xaa is C or S
RXEXKNHQLFNSLQEHQGQHPKIRYYLMTLPEEETPVXELG

SEQ ID NO: 26395 - protein, 39 aa, Artificial Sequence
  Non-cyclic GFR-binding peptide
  MOD_RES (33), (34): Xaa is C or S
  MOD_RES (11), (12), (13), (14), (15): Xaa is A or G
  MOD_RES (16), (17), (18), (19): Xaa is A or G or is absent
SKVVMVTAKKXXXXXXXXXIKRIQVPRLDQPVXXPSASA

SEQ ID NO: 26396 - protein, 39 aa, Artificial Sequence
  Non-cyclic GFR-binding peptide
  MOD_RES (1), (3), (34), (35): Xaa is C or S
XKXSKVIMVTAKKIKPTKGIIKRIQVPRLDQSVXXPSAS

SEQ ID NO: 26397 - protein, 33 aa, Artificial Sequence
  Non-cyclic GFR-binding peptide
KNHQLFNSLQEHQGQHPKIRYYLMTLPEEETPV

SEQ ID NO: 26398 - protein, 41 aa, Artificial Sequence
  Non-cyclic GFR-binding peptide
  MOD_RES (1), (3), (35), (36): Xaa is C or S
XGXARVVMNVQVEKIVNSSDDVKAVKVSRLQTPAXXPKPVT

SEQ ID NO: 26399 - protein, 43 aa, Artificial Sequence
  Non-cyclic GFR-binding peptide
  MOD_RES (1), (3), (37), (38): Xaa is C or S
  MOD_RES (15), (16), (17), (18), (19): Xaa is A or G
  MOD_RES (20), (21), (22), (23): Xaa is A or G or is absent
XGXARVVMNVQVEKXXXXXXXXXVKAVKVSRLQTPAXXPKPVT

SEQ ID NO: 26400 - protein, 38 aa, Artificial Sequence
  Non-cyclic GFR-binding peptide
  MOD_RES (1), (3), (36), (37): Xaa is C or S
  MOD_RES (14), (15), (16), (17), (18): Xaa is A or G
  MOD_RES (19), (20), (21), (22): Xaa is A or G or is absent
XKXSKVVMSMEGIXXXXXXXXXMIQITINSLDQPVXXP

SEQ ID NO: 26401 - protein, 39 aa, Artificial Sequence
  Non-cyclic GFR-binding peptide
  MOD_RES (2), (4): Xaa is C or S
AXAXELHEELRNSLQELKPKKRVYEYYVVPLPEHHVRSP

SEQ ID NO: 26402 - protein, 35 aa, Artificial Sequence
  Non-cyclic GFR-binding peptide
  MOD_RES (1), (3), (35): Xaa is C or S
XGXARVVMNVTAKKIVNSSDDIKRVQVPRLQTPAX

SEQ ID NO: 26403 - protein, 37 aa, Artificial Sequence
  Non-cyclic GFR-binding peptide
  MOD_RES (2), (35), (36): Xaa is C or S
  MOD_RES (13), (14), (15), (16), (17): Xaa is A or G
  MOD_RES (18), (19), (20), (21): Xaa is A or G or is absent
KXSKVVMSMEGIXXXXXXXXXMIQITINSLDQPVXXP

SEQ ID NO: 26404 - protein, 32 aa, Artificial Sequence
  Non-cyclic GFR-binding peptide
  MOD_RES (32), (32): Xaa is C or S
SRVVMNVQVEKIVNSSDDVKAVKVSRLKTPAX

SEQ ID NO: 26405 - protein, 37 aa, Artificial Sequence
  Non-cyclic GFR-binding peptide
  MOD_RES (35), (35): Xaa is C or S
  MOD_RES (11), (12), (13), (14), (15): Xaa is A or G
  MOD_RES (16), (17), (18), (19): Xaa is A or G or is absent
HEELRNSLQEXXXXXXXXXYYLVTLPEHHVRSPQXKV

SEQ ID NO: 26406 - protein, 40 aa, Artificial Sequence
  Non-cyclic GFR-binding peptide
  MOD_RES (2), (36), (37): Xaa is C or S
  MOD_RES (14), (15), (16), (17), (18): Xaa is A or G
  MOD_RES (19), (20), (21), (22): Xaa is A or G or is absent
GXARVVMNVQVEKXXXXXXXXXVKAVKVSRLQTPAXXPKP

SEQ ID NO: 26407 - protein, 36 aa, Artificial Sequence
  Non-cyclic GFR-binding peptide
  MOD_RES (1), (3), (35), (36): Xaa is C or S
XGXSRVVMNVQVEKIVNSSDDVKAVKVSRLKTPAXX

SEQ ID NO: 26408 - protein, 34 aa, Artificial Sequence
  Non-cyclic GFR-binding peptide
  MOD_RES (2), (34): Xaa is C or S
GXSRVVMNSMEGIIVNSSDDMIQVTINSLKTPAX

SEQ ID NO: 26409 - protein, 42 aa, Artificial Sequence
  Non-cyclic GFR-binding peptide
  MOD_RES (2), (36), (37): Xaa is C or S
  MOD_RES (14), (15), (16), (17), (18): Xaa is A or G
  MOD_RES (19), (20), (21), (22): Xaa is A or G or is absent
GXARVVMNVQVEKXXXXXXXXXVKAVKVSRLQTPAXXPKPVT

SEQ ID NO: 26410 - protein, 39 aa, Artificial Sequence
  Non-cyclic GFR-binding peptide
  MOD_RES (1), (38): Xaa is C or S
XALHDELTNSLQEFIPKKRVIEYYVVPLPELQVQTPRXQ

SEQ ID NO: 26411 - protein, 31 aa, Artificial Sequence
  Non-cyclic GFR-binding peptide
  MOD_RES (1), (1): Xaa is C or S
XSKVIMSMEGIIKPTKGIMIQITINSLDQSV

SEQ ID NO: 26412 - protein, 37 aa, Artificial Sequence
  Non-cyclic GFR-binding peptide
  MOD_RES (1), (35), (36): Xaa is C or S
  MOD_RES (13), (14), (15), (16), (17): Xaa is A or G
  MOD_RES (18), (19), (20), (21): Xaa is A or G or is absent
XGEVVMEVQVEKXXXXXXXXXVKAMKVSRLETPVXXA

SEQ ID NO: 26413 - protein, 44 aa, Artificial Sequence
  Non-cyclic GFR-binding peptide
  MOD_RES (2), (4), (41): Xaa is C or S
EXKXALHDELTNSLQEFIPKKRVIEYYVVPLPELQVQTPRXQVN

SEQ ID NO: 26414 - protein, 36 aa, Artificial Sequence
  Non-cyclic GFR-binding peptide
  MOD_RES (1), (3), (36): Xaa is C or S
  MOD_RES (14), (15), (16), (17), (18): Xaa is A or G
  MOD_RES (19), (20), (21), (22): Xaa is A or G or is absent
XKXSRVIMVTAKKXXXXXXXXXIKRIQVPRLAQPVX

SEQ ID NO: 26415 - protein, 32 aa, Artificial Sequence
  Non-cyclic GFR-binding peptide
  MOD_RES (31), (31): Xaa is C or S
RVVMNVQVEKIVNSSDDVKAVKVSRLKTPAXT

SEQ ID NO: 26416 - protein, 39 aa, Artificial Sequence
  Non-cyclic GFR-binding peptide
  MOD_RES (1), (3), (34), (35): Xaa is C or S
XKXSKVVMVTAKKVKPTRGVIKRIQVPRLDQPVXXPSAS

SEQ ID NO: 26417 - protein, 45 aa, Artificial Sequence
  Non-cyclic GFR-binding peptide
  MOD_RES (2), (4), (41): Xaa is C or S
  MOD_RES (17), (18), (19), (20), (21): Xaa is A or G
  MOD_RES (22), (23), (24), (25): Xaa is A or G or is absent
AXAXELHEELRNSLQEXXXXXXXXXYYVVPLPEHHVRSPQXKVSS

SEQ ID NO: 26418 - protein, 38 aa, Artificial Sequence
  Non-cyclic GFR-binding peptide
  MOD_RES (1), (34), (35): Xaa is C or S
  MOD_RES (12), (13), (14), (15), (16): Xaa is A or G
  MOD_RES (17), (18), (19), (20): Xaa is A or G or is absent
XSKVVMSMEGIXXXXXXXXXMIQITINSLDQPVXXPSA

SEQ ID NO: 26419 - protein, 36 aa, Artificial Sequence
  Non-cyclic GFR-binding peptide
  MOD_RES (1), (35): Xaa is C or S
  MOD_RES (13), (14), (15), (16), (17): Xaa is A or G
  MOD_RES (18), (19), (20), (21): Xaa is A or G or is absent
XKNHQLFNSLQEXXXXXXXXXYYVMPLPEEETPVXE

SEQ ID NO: 26420 - protein, 37 aa, Artificial Sequence
  Non-cyclic GFR-binding peptide
  MOD_RES (1), (3), (34), (35): Xaa is C or S
XKXSRVIMVTAKKVKPKRGVIKRIQVPRLAQPVXXPA

SEQ ID NO: 26421 - protein, 40 aa, Artificial Sequence
  Non-cyclic GFR-binding peptide
  MOD_RES (2), (4), (36), (37): Xaa is C or S
HXGXSRVVMNVQVEKIVNSSDDVKAVKVSRLKTPAXXPKP

SEQ ID NO: 26422 - protein, 39 aa, Artificial Sequence
  Non-cyclic GFR-binding peptide
  MOD_RES (36), (36): Xaa is C or S
  MOD_RES (12), (13), (14), (15), (16): Xaa is A or G
  MOD_RES (17), (18), (19), (20): Xaa is A or G or is absent
LHEELRNSLQEXXXXXXXXXYYLVTLPEHHVRSPQXKVS

SEQ ID NO: 26423 - protein, 37 aa, Artificial Sequence
  Non-cyclic GFR-binding peptide
  MOD_RES (33), (33): Xaa is C or S
NHQLFNSLQEHQGQHPKIRYYVMPLPEEETPVXELGE

SEQ ID NO: 26424 - protein, 37 aa, Artificial Sequence
  Non-cyclic GFR-binding peptide
  MOD_RES (1), (3): Xaa is C or S
  MOD_RES (16), (17), (18), (19), (20): Xaa is A or G
  MOD_RES (21), (22), (23), (24): Xaa is A or G or is absent
XKXALHDELTNSLQEXXXXXXXXXYYLVTLPELQVQT

SEQ ID NO: 26425 - protein, 37 aa, Artificial Sequence
  Non-cyclic GFR-binding peptide
  MOD_RES (1), (33), (34): Xaa is C or S
XSRVVMNSMEGIIVNSSDDMIQVTINSLKTPAXXPKP

SEQ ID NO: 26426 - protein, 35 aa, Artificial Sequence
  Non-cyclic GFR-binding peptide
  MOD_RES (2), (34), (35): Xaa is C or S
GXGEVVMDVTAKKVVKENEDIKRMQVPRLETPVXX

SEQ ID NO: 26427 - protein, 38 aa, Artificial Sequence
  Non-cyclic GFR-binding peptide
  MOD_RES (1), (3), (37): Xaa is C or S
  MOD_RES (15), (16), (17), (18), (19): Xaa is A or G
  MOD_RES (20), (21), (22), (23): Xaa is A or G or is absent
XGXSRVVMNVQVEKXXXXXXXXXVKAVKVSRLKTPAXT

SEQ ID NO: 26428 - protein, 34 aa, Artificial Sequence
  Non-cyclic GFR-binding peptide
  MOD_RES (31), (31): Xaa is C or S
RVVMNVTAKKIVNSSDDIKRVQVPRLKTPAXTPK

SEQ ID NO: 26429 - protein, 35 aa, Artificial Sequence
  Non-cyclic GFR-binding peptide
  MOD_RES (34), (34): Xaa is C or S
  MOD_RES (12), (13), (14), (15), (16): Xaa is A or G
  MOD_RES (17), (18), (19), (20): Xaa is A or G or is absent
KNHQLFNSLQEXXXXXXXXXYYVMPLPEEETPVXE

SEQ ID NO: 26430 - protein, 37 aa, Artificial Sequence
  Non-cyclic GFR-binding peptide
  MOD_RES (2), (4), (35), (36): Xaa is C or S
SXKXSKVVMVQVEKVKPTRGVVKAIKVSRLDQPVXXP

SEQ ID NO: 26431 - protein, 36 aa, Artificial Sequence
  Non-cyclic GFR-binding peptide
  MOD_RES (32), (33): Xaa is C or S
GEVVMDVTAKKVVKENEDIKRMQVPRLETPVXXAKP

SEQ ID NO: 26432 - protein, 38 aa, Artificial Sequence
  Non-cyclic GFR-binding peptide
  MOD_RES (1), (3): Xaa is C or S
XKXALHDELTNSLQEFIPKKRVIEYYVVPLPELQVQTP

SEQ ID NO: 26433 - protein, 36 aa, Artificial Sequence
  Non-cyclic GFR-binding peptide
  MOD_RES (32), (32): Xaa is C or S
SRVVMNSMEGIIVNSSDDMIQVTINSLKTPAXTPKT

SEQ ID NO: 26434 - protein, 39 aa, Artificial Sequence
  Non-cyclic GFR-binding peptide
  MOD_RES (1), (3), (37), (38): Xaa is C or S
  MOD_RES (15), (16), (17), (18), (19): Xaa is A or G
  MOD_RES (20), (21), (22), (23): Xaa is A or G or is absent
XGXGEVVMDVTAKKXXXXXXXXXIKRMQVPRLETPVXXA

SEQ ID NO: 26435 - protein, 43 aa, Artificial Sequence
  Non-cyclic GFR-binding peptide
  MOD_RES (2), (4), (41): Xaa is C or S
  MOD_RES (17), (18), (19), (20), (21): Xaa is A or G
  MOD_RES (22), (23), (24), (25): Xaa is A or G or is absent
AXAXELHEELRNSLQEXXXXXXXXXYYLVTLPEHHVRSPQXKV

SEQ ID NO: 26436 - protein, 36 aa, Artificial Sequence
  Non-cyclic GFR-binding peptide
  MOD_RES (1), (33), (34): Xaa is C or S
XSRVVMNVQVEKIVNSSDDVKAVKVSRLKTPAXXPK

SEQ ID NO: 26437 - protein, 43 aa, Artificial Sequence
  Non-cyclic GFR-binding peptide
  MOD_RES (1), (3), (37), (38): Xaa is C or S
  MOD_RES (15), (16), (17), (18), (19): Xaa is A or G
  MOD_RES (20), (21), (22), (23): Xaa is A or G or is absent
XGXSRVVMNVTAKKXXXXXXXXXIKRVQVPRLKTPAXXPKPVY

SEQ ID NO: 26438 - protein, 33 aa, Artificial Sequence
  Non-cyclic GFR-binding peptide
  MOD_RES (11), (12), (13), (14), (15): Xaa is A or G
  MOD_RES (16), (17), (18), (19): Xaa is A or G or is absent
HDELTNSLQEXXXXXXXXXYYVVPLPELQVQTP

SEQ ID NO: 26439 - protein, 37 aa, Artificial Sequence
  Non-cyclic GFR-binding peptide
  MOD_RES (1), (35): Xaa is C or S
  MOD_RES (13), (14), (15), (16), (17): Xaa is A or G
  MOD_RES (18), (19), (20), (21): Xaa is A or G or is absent
XKNHQLFNSLQEXXXXXXXXXYYLMTLPEEETPVXEL

SEQ ID NO: 26440 - protein, 34 aa, Artificial Sequence
  Non-cyclic GFR-binding peptide
  MOD_RES (2), (2): Xaa is C or S
  MOD_RES (13), (14), (15), (16), (17): Xaa is A or G
  MOD_RES (18), (19), (20), (21): Xaa is A or G or is absent
KXSKVIMSMEGIXXXXXXXXXMIQITINSLDQSV

SEQ ID NO: 26441 - protein, 35 aa, Artificial Sequence
  Non-cyclic GFR-binding peptide
  MOD_RES (33), (34): Xaa is C or S
  MOD_RES (11), (12), (13), (14), (15): Xaa is A or G
  MOD_RES (16), (17), (18), (19): Xaa is A or G or is absent
SKVIMSMEGIXXXXXXXXXMIQITINSLDQSVXXP

SEQ ID NO: 26442 - protein, 34 aa, Artificial Sequence
  Non-cyclic GFR-binding peptide
  MOD_RES (34), (34): Xaa is C or S
KNHQLFNSLQEHQGQHPKIRYYVMPLPEEETPVX

SEQ ID NO: 26443 - protein, 32 aa, Artificial Sequence
  Non-cyclic GFR-binding peptide
HDELTNSLQEFIPKKRVIEYYLVTLPELQVQT

SEQ ID NO: 26444 - protein, 38 aa, Artificial Sequence
  Non-cyclic GFR-binding peptide
  MOD_RES (2), (4), (37), (38): Xaa is C or S
  MOD_RES (15), (16), (17), (18), (19): Xaa is A or G
  MOD_RES (20), (21), (22), (23): Xaa is A or G or is absent
SXKXSKVIMVTAKKXXXXXXXXXIKRIQVPRLDQSVXX

SEQ ID NO: 26445 - protein, 30 aa, Artificial Sequence
  Non-cyclic GFR-binding peptide
EVVMDVQVEKVVKENEDVKAMKVSRLETPV

SEQ ID NO: 26446 - protein, 38 aa, Artificial Sequence
  Non-cyclic GFR-binding peptide
  MOD_RES (1), (35), (36): Xaa is C or S
  MOD_RES (13), (14), (15), (16), (17): Xaa is A or G
  MOD_RES (18), (19), (20), (21): Xaa is A or G or is absent
XGEVVMDVTAKKXXXXXXXXXIKRMQVPRLETPVXXAK

SEQ ID NO: 26447 - protein, 33 aa, Artificial Sequence
  Non-cyclic GFR-binding peptide
  MOD_RES (11), (12), (13), (14), (15): Xaa is A or G
  MOD_RES (16), (17), (18), (19): Xaa is A or G or is absent
HDELTNSLQEXXXXXXXXXYYLVTLPELQVQTP

SEQ ID NO: 26448 - protein, 36 aa, Artificial Sequence
  Non-cyclic GFR-binding peptide
  MOD_RES (2), (36): Xaa is C or S
  MOD_RES (14), (15), (16), (17), (18): Xaa is A or G
  MOD_RES (19), (20), (21), (22): Xaa is A or G or is absent
GXSRVVMNVTAKKXXXXXXXXXIKRVQVPRLKTPAX

SEQ ID NO: 26449 - protein, 35 aa, Artificial Sequence
  Non-cyclic GFR-binding peptide
  MOD_RES (2), (33), (34): Xaa is C or S
KXSRVIMVQVEKVKPKRGVVKAIKVSRLAQPVXXP

SEQ ID NO: 26450 - protein, 38 aa, Artificial Sequence
  Non-cyclic GFR-binding peptide
  MOD_RES (1), (3), (34), (35): Xaa is C or S
XKXSRVIMVQVEKVKPKRGVVKAIKVSRLAQPVXXPAA

SEQ ID NO: 26451 - protein, 41 aa, Artificial Sequence
  Non-cyclic GFR-binding peptide
  MOD_RES (1), (3), (35), (36): Xaa is C or S
XGXSRVVMNVQVEKIVNSSDDVKAVKVSRLKTPAXXPKPVY

SEQ ID NO: 26452 - protein, 37 aa, Artificial Sequence
  Non-cyclic GFR-binding peptide
  MOD_RES (34), (35): Xaa is C or S
  MOD_RES (12), (13), (14), (15), (16): Xaa is A or G
  MOD_RES (17), (18), (19), (20): Xaa is A or G or is absent
GEVVMDVQVEKXXXXXXXXXVKAMKVSRLETPVXXAK

SEQ ID NO: 26453 - protein, 37 aa, Artificial Sequence
  Non-cyclic GFR-binding peptide
  MOD_RES (2), (2): Xaa is C or S
KXALHDELTNSLQEFIPKKRVIEYYLVTLPELQVQTP

SEQ ID NO: 26454 - protein, 35 aa, Artificial Sequence
  Non-cyclic GFR-binding peptide
  MOD_RES (1), (35): Xaa is C or S
  MOD_RES (13), (14), (15), (16), (17): Xaa is A or G
  MOD_RES (18), (19), (20), (21): Xaa is A or G or is absent
XKNHQLFNSLQEXXXXXXXXXYYVMPLPEEETPVX

SEQ ID NO: 26455 - protein, 34 aa, Artificial Sequence
  Non-cyclic GFR-binding peptide
  MOD_RES (1), (33), (34): Xaa is C or S
XSRVVMNVTAKKIVNSSDDIKRVQVPRLKTPAXX

SEQ ID NO: 26456 - protein, 40 aa, Artificial Sequence
  Non-cyclic GFR-binding peptide
  MOD_RES (34), (35): Xaa is C or S
  MOD_RES (12), (13), (14), (15), (16): Xaa is A or G
  MOD_RES (17), (18), (19), (20): Xaa is A or G or is absent
GEVVMEVQVEKXXXXXXXXXVKAMKVSRLETPVXXAKPIS

SEQ ID NO: 26457 - protein, 42 aa, Artificial Sequence
  Non-cyclic GFR-binding peptide
  MOD_RES (1), (38): Xaa is C or S
  MOD_RES (14), (15), (16), (17), (18): Xaa is A or G
  MOD_RES (19), (20), (21), (22): Xaa is A or G or is absent
XALHDELTNSLQEXXXXXXXXXYYVVPLPELQVQTPRXQVNR

SEQ ID NO: 26458 - protein, 35 aa, Artificial Sequence
  Non-cyclic GFR-binding peptide
  MOD_RES (2), (2): Xaa is C or S
  MOD_RES (14), (15), (16), (17), (18): Xaa is A or G
  MOD_RES (19), (20), (21), (22): Xaa is A or G or is absent
GXGEVVMEVQVEKXXXXXXXXXVKAMKVSRLETPV

SEQ ID NO: 26459 - protein, 37 aa, Artificial Sequence
  Non-cyclic GFR-binding peptide
  MOD_RES (1), (3), (37): Xaa is C or S
  MOD_RES (15), (16), (17), (18), (19): Xaa is A or G
  MOD_RES (20), (21), (22), (23): Xaa is A or G or is absent
XGXSRVVMNVQVEKXXXXXXXXXVKAVKVSRLKTPAX

SEQ ID NO: 26460 - protein, 40 aa, Artificial Sequence
  Non-cyclic GFR-binding peptide
  MOD_RES (1), (38): Xaa is C or S
  MOD_RES (14), (15), (16), (17), (18): Xaa is A or G
  MOD_RES (19), (20), (21), (22): Xaa is A or G or is absent
XELHEELRNSLQEXXXXXXXXXYYVVPLPEHHVRSPQXKV

SEQ ID NO: 26461 - protein, 36 aa, Artificial Sequence
  Non-cyclic GFR-binding peptide
  MOD_RES (32), (32): Xaa is C or S
SRVVMNVQVEKIVNSSDDVKAVKVSRLKTPAXTPKT

SEQ ID NO: 26462 - protein, 40 aa, Artificial Sequence
  Non-cyclic GFR-binding peptide
  MOD_RES (1), (3), (35), (36): Xaa is C or S
XGXGEVVMDVQVEKVVKENEDVKAMKVSRLETPVXXAKPI

SEQ ID NO: 26463 - protein, 36 aa, Artificial Sequence
  Non-cyclic GFR-binding peptide
  MOD_RES (33), (34): Xaa is C or S
  MOD_RES (11), (12), (13), (14), (15): Xaa is A or G
  MOD_RES (16), (17), (18), (19): Xaa is A or G or is absent
SKVIMSMEGIXXXXXXXXXMIQITINSLDQSVXXPS

SEQ ID NO: 26464 - protein, 38 aa, Artificial Sequence
  Non-cyclic GFR-binding peptide
  MOD_RES (1), (3), (35), (36): Xaa is C or S
XGXSRVVMNVQVEKIVNSSDDVKAVKVSRLKTPAXXPK

SEQ ID NO: 26465 - protein, 38 aa, Artificial Sequence
  Non-cyclic GFR-binding peptide
  MOD_RES (2), (2): Xaa is C or S
AXELHEELRNSLQELKPKKRVYEYYVVPLPEHHVRSPQ

SEQ ID NO: 26466 - protein, 38 aa, Artificial Sequence
  Non-cyclic GFR-binding peptide
  MOD_RES (2), (34), (35): Xaa is C or S
GXGEVVMEVQVEKVVKDYEDVKAMKVSRLETPVXXAKP

SEQ ID NO: 26467 - protein, 40 aa, Artificial Sequence
  Non-cyclic GFR-binding peptide
  MOD_RES (1), (35), (36): Xaa is C or S
  MOD_RES (13), (14), (15), (16), (17): Xaa is A or G
  MOD_RES (18), (19), (20), (21): Xaa is A or G or is absent
XGEVVMEVTAKKXXXXXXXXXIKRMQVPRLETPVXXAKPI

SEQ ID NO: 26468 - protein, 39 aa, Artificial Sequence
  Non-cyclic GFR-binding peptide
  MOD_RES (2), (34), (35): Xaa is C or S
GXGEVVMDVQVEKVVKENEDVKAMKVSRLETPVXXAKPI

SEQ ID NO: 26469 - protein, 40 aa, Artificial Sequence
  Non-cyclic GFR-binding peptide
  MOD_RES (2), (4), (35), (36): Xaa is C or S
SXKXSKVVMVQVEKVKPTRGVVKAIKVSRLDQPVXXPSAS

SEQ ID NO: 26470 - protein, 44 aa, Artificial Sequence
  Non-cyclic GFR-binding peptide
  MOD_RES (2), (4), (38): Xaa is C or S
  MOD_RES (16), (17), (18), (19), (20): Xaa is A or G
  MOD_RES (21), (22), (23), (24): Xaa is A or G or is absent
RXEXKNHQLFNSLQEXXXXXXXXXYYVMPLPEEETPVXELGEDN

SEQ ID NO: 26471 - protein, 36 aa, Artificial Sequence
  Non-cyclic GFR-binding peptide
  MOD_RES (1), (3), (35), (36): Xaa is C or S
XGXGEVVMDSMEGIVVKENEDMIQMTINSLETPVXX

SEQ ID NO: 26472 - protein, 38 aa, Artificial Sequence
  Non-cyclic GFR-binding peptide
  MOD_RES (2), (35), (36): Xaa is C or S
  MOD_RES (13), (14), (15), (16), (17): Xaa is A or G
  MOD_RES (18), (19), (20), (21): Xaa is A or G or is absent
KXSKVVMSMEGIXXXXXXXXXMIQITINSLDQPVXXPS

SEQ ID NO: 26473 - protein, 40 aa, Artificial Sequence
  Non-cyclic GFR-binding peptide
  MOD_RES (2), (34): Xaa is C or S
GXSRVVMNVTAKKIVNSSDDIKRVQVPRLKTPAXTPKTVH

SEQ ID NO: 26474 - protein, 32 aa, Artificial Sequence
  Non-cyclic GFR-binding peptide
  MOD_RES (31), (32): Xaa is C or S
RVVMNSMEGIIVNSSDDMIQVTINSLQTPAXX

SEQ ID NO: 26475 - protein, 39 aa, Artificial Sequence
  Non-cyclic GFR-binding peptide
  MOD_RES (2), (39): Xaa is C or S
KXALHDELTNSLQEFIPKKRVIEYYLVTLPELQVQTPRX

SEQ ID NO: 26476 - protein, 39 aa, Artificial Sequence
  Non-cyclic GFR-binding peptide
  MOD_RES (2), (4), (36), (37): Xaa is C or S
HXGXARVVMNSMEGIIVNSSDDMIQVTINSLQTPAXXPK

SEQ ID NO: 26477 - protein, 37 aa, Artificial Sequence
  Non-cyclic GFR-binding peptide
  MOD_RES (1), (33), (34): Xaa is C or S
XGEVVMEVTAKKVVKDYEDIKRMQVPRLETPVXXAKP

SEQ ID NO: 26478 - protein, 36 aa, Artificial Sequence
  Non-cyclic GFR-binding peptide
  MOD_RES (33), (33): Xaa is C or S
  MOD_RES (11), (12), (13), (14), (15): Xaa is A or G
  MOD_RES (16), (17), (18), (19): Xaa is A or G or is absent
RVVMNSMEGIXXXXXXXXXMIQVTINSLKTPAXTPK

SEQ ID NO: 26479 - protein, 37 aa, Artificial Sequence
  Non-cyclic GFR-binding peptide
  MOD_RES (2), (36): Xaa is C or S
  MOD_RES (14), (15), (16), (17), (18): Xaa is A or G
  MOD_RES (19), (20), (21), (22): Xaa is A or G or is absent
GXSRVVMNVTAKKXXXXXXXXXIKRVQVPRLKTPAXT

SEQ ID NO: 26480 - protein, 38 aa, Artificial Sequence
  Non-cyclic GFR-binding peptide
  MOD_RES (2), (34): Xaa is C or S
GXSRVVMNSMEGIIVNSSDDMIQVTINSLKTPAXTPKT

SEQ ID NO: 26481 - protein, 38 aa, Artificial Sequence
  Non-cyclic GFR-binding peptide
  MOD_RES (2), (4), (35), (36): Xaa is C or S
SXKXSRVIMSMEGIVKPKRGVMIQITINSLAQPVXXPA

SEQ ID NO: 26482 - protein, 37 aa, Artificial Sequence
  Non-cyclic GFR-binding peptide
  MOD_RES (2), (36), (37): Xaa is C or S
  MOD_RES (14), (15), (16), (17), (18): Xaa is A or G
  MOD_RES (19), (20), (21), (22): Xaa is A or G or is absent
GXSRVVMNSMEGIXXXXXXXXXMIQVTINSLKTPAXX

SEQ ID NO: 26483 - protein, 39 aa, Artificial Sequence
  Non-cyclic GFR-binding peptide
  MOD_RES (1), (3), (36), (37): Xaa is C or S
  MOD_RES (14), (15), (16), (17), (18): Xaa is A or G
  MOD_RES (19), (20), (21), (22): Xaa is A or G or is absent
XKXSRVIMVTAKKXXXXXXXXXIKRIQVPRLAQPVXXPA

SEQ ID NO: 26484 - protein, 38 aa, Artificial Sequence
  Non-cyclic GFR-binding peptide
  MOD_RES (2), (34), (35): Xaa is C or S
GXGEVVMDVTAKKVVKENEDIKRMQVPRLETPVXXAKP

SEQ ID NO: 26485 - protein, 39 aa, Artificial Sequence
  Non-cyclic GFR-binding peptide
  MOD_RES (2), (4): Xaa is C or S
  MOD_RES (17), (18), (19), (20), (21): Xaa is A or G
  MOD_RES (22), (23), (24), (25): Xaa is A or G or is absent
EXKXALHDELTNSLQEXXXXXXXXXYYLVTLPELQVQTP

SEQ ID NO: 26486 - protein, 43 aa, Artificial Sequence
  Non-cyclic GFR-binding peptide
  MOD_RES (2), (4), (38), (39): Xaa is C or S
  MOD_RES (16), (17), (18), (19), (20): Xaa is A or G
  MOD_RES (21), (22), (23), (24): Xaa is A or G or is absent
RXGXGEVVMESMEGIXXXXXXXXXMIQMTINSLETPVXXAKPI

SEQ ID NO: 26487 - protein, 42 aa, Artificial Sequence
  Non-cyclic GFR-binding peptide
  MOD_RES (2), (4), (36), (37): Xaa is C or S
HXGXSRVVMNVQVEKIVNSSDDVKAVKVSRLKTPAXXPKPVY

SEQ ID NO: 26488 - protein, 35 aa, Artificial Sequence
  Non-cyclic GFR-binding peptide
  MOD_RES (31), (32): Xaa is C or S
SKVIMSMEGIIKPTKGIMIQITINSLDQSVXXPSA

SEQ ID NO: 26489 - protein, 43 aa, Artificial Sequence
  Non-cyclic GFR-binding peptide
  MOD_RES (2), (4), (41): Xaa is C or S
AXAXELHEELRNSLQELKPKKRVYEYYLVTLPEHHVRSPQXKV

SEQ ID NO: 26490 - protein, 34 aa, Artificial Sequence
  Non-cyclic GFR-binding peptide
  MOD_RES (31), (32): Xaa is C or S
RVVMNVQVEKIVNSSDDVKAVKVSRLQTPAXXPK

SEQ ID NO: 26491 - protein, 35 aa, Artificial Sequence
  Non-cyclic GFR-binding peptide
  MOD_RES (1), (3), (34), (35): Xaa is C or S
XKXSKVIMVQVEKIKPTKGIVKAIKVSRLDQSVXX

SEQ ID NO: 26492 - protein, 40 aa, Artificial Sequence
  Non-cyclic GFR-binding peptide
  MOD_RES (2), (39): Xaa is C or S
  MOD_RES (15), (16), (17), (18), (19): Xaa is A or G
  MOD_RES (20), (21), (22), (23): Xaa is A or G or is absent
AXELHEELRNSLQEXXXXXXXXXYYLVTLPEHHVRSPQXK

SEQ ID NO: 26493 - protein, 42 aa, Artificial Sequence
  Non-cyclic GFR-binding peptide
  MOD_RES (2), (4), (37), (38): Xaa is C or S
  MOD_RES (15), (16), (17), (18), (19): Xaa is A or G
  MOD_RES (20), (21), (22), (23): Xaa is A or G or is absent
SXKXSRVIMVQVEKXXXXXXXXXVKAIKVSRLAQPVXXPAAS

SEQ ID NO: 26494 - protein, 37 aa, Artificial Sequence
  Non-cyclic GFR-binding peptide
  MOD_RES (1), (33), (34): Xaa is C or S
XGEVVMEVQVEKVVKDYEDVKAMKVSRLETPVXXAKP

SEQ ID NO: 26495 - protein, 34 aa, Artificial Sequence
  Non-cyclic GFR-binding peptide
  MOD_RES (32), (33): Xaa is C or S
SRVVMNVTAKKIVNSSDDIKRVQVPRLKTPAXXP

SEQ ID NO: 26496 - protein, 43 aa, Artificial Sequence
  Non-cyclic GFR-binding peptide
  MOD_RES (1), (3), (37), (38): Xaa is C or S
  MOD_RES (15), (16), (17), (18), (19): Xaa is A or G
  MOD_RES (20), (21), (22), (23): Xaa is A or G or is absent
XGXGEVVMDSMEGIXXXXXXXXXMIQMTINSLETPVXXAKPIK

SEQ ID NO: 26497 - protein, 41 aa, Artificial Sequence
  Non-cyclic GFR-binding peptide
  MOD_RES (1), (3), (37): Xaa is C or S
  MOD_RES (15), (16), (17), (18), (19): Xaa is A or G
  MOD_RES (20), (21), (22), (23): Xaa is A or G or is absent
XGXSRVVMNSMEGIXXXXXXXXXMIQVTINSLKTPAXTPKT

SEQ ID NO: 26498 - protein, 36 aa, Artificial Sequence
  Non-cyclic GFR-binding peptide
  MOD_RES (31), (32): Xaa is C or S
RVVMNVQVEKIVNSSDDVKAVKVSRLQTPAXXPKPV

SEQ ID NO: 26499 - protein, 42 aa, Artificial Sequence
  Non-cyclic GFR-binding peptide
  MOD_RES (1), (38): Xaa is C or S
XALHDELTNSLQEFIPKKRVIEYYVVPLPELQVQTPRXQVNR

SEQ ID NO: 26500 - protein, 33 aa, Artificial Sequence
  Non-cyclic GFR-binding peptide
  MOD_RES (33), (33): Xaa is C or S
NHQLFNSLQEHQGQHPKIRYYVMPLPEEETPVX

SEQ ID NO: 26501 - protein, 37 aa, Artificial Sequence
  Non-cyclic GFR-binding peptide
  MOD_RES (2), (36), (37): Xaa is C or S
  MOD_RES (14), (15), (16), (17), (18): Xaa is A or G
  MOD_RES (19), (20), (21), (22): Xaa is A or G or is absent
GXGEVVMEVQVEKXXXXXXXXXVKAMKVSRLETPVXX

SEQ ID NO: 26502 - protein, 33 aa, Artificial Sequence
  Non-cyclic GFR-binding peptide
LHDELTNSLQEFIPKKRVIEYYLVTLPELQVQT

SEQ ID NO: 26503 - protein, 35 aa, Artificial Sequence
  Non-cyclic GFR-binding peptide
  MOD_RES (33), (34): Xaa is C or S
  MOD_RES (11), (12), (13), (14), (15): Xaa is A or G
  MOD_RES (16), (17), (18), (19): Xaa is A or G or is absent
SRVIMVQVEKXXXXXXXXXVKAIKVSRLAQPVXXP

SEQ ID NO: 26504 - protein, 40 aa, Artificial Sequence
  Non-cyclic GFR-binding peptide
  MOD_RES (37), (37): Xaa is C or S
  MOD_RES (13), (14), (15), (16), (17): Xaa is A or G
  MOD_RES (18), (19), (20), (21): Xaa is A or G or is absent
ELHEELRNSLQEXXXXXXXXXYYLVTLPEHHVRSPQXKVS

SEQ ID NO: 26505 - protein, 39 aa, Artificial Sequence
  Non-cyclic GFR-binding peptide
  MOD_RES (2), (4), (38): Xaa is C or S
  MOD_RES (16), (17), (18), (19), (20): Xaa is A or G
  MOD_RES (21), (22), (23), (24): Xaa is A or G or is absent
HXGXSRVVMNVQVEKXXXXXXXXXVKAVKVSRLKTPAXT

SEQ ID NO: 26506 - protein, 39 aa, Artificial Sequence
  Non-cyclic GFR-binding peptide
  MOD_RES (1), (3), (35), (36): Xaa is C or S
XGXARVVMNVQVEKIVNSSDDVKAVKVSRLQTPAXXPKP

SEQ ID NO: 26507 - protein, 39 aa, Artificial Sequence
  Non-cyclic GFR-binding peptide
  MOD_RES (2), (4): Xaa is C or S
EXKXALHDELTNSLQEFIPKKRVIEYYVVPLPELQVQTP

SEQ ID NO: 26508 - protein, 34 aa, Artificial Sequence
  Non-cyclic GFR-binding peptide
  MOD_RES (2), (33), (34): Xaa is C or S
KXSKVVMVTAKKVKPTRGVIKRIQVPRLDQPVXX

SEQ ID NO: 26509 - protein, 35 aa, Artificial Sequence
  Non-cyclic GFR-binding peptide
  MOD_RES (1), (32), (33): Xaa is C or S
XSKVVMSMEGIVKPTRGVMIQITINSLDQPVXXPS

SEQ ID NO: 26510 - protein, 41 aa, Artificial Sequence
  Non-cyclic GFR-binding peptide
  MOD_RES (1), (3), (37), (38): Xaa is C or S
  MOD_RES (15), (16), (17), (18), (19): Xaa is A or G
  MOD_RES (20), (21), (22), (23): Xaa is A or G or is absent
XGXGEVVMDVTAKKXXXXXXXXXIKRMQVPRLETPVXXAKP

SEQ ID NO: 26511 - protein, 41 aa, Artificial Sequence
  Non-cyclic GFR-binding peptide
  MOD_RES (2), (4), (38), (39): Xaa is C or S
  MOD_RES (16), (17), (18), (19), (20): Xaa is A or G
  MOD_RES (21), (22), (23), (24): Xaa is A or G or is absent
RXGXGEVVMDVTAKKXXXXXXXXXIKRMQVPRLETPVXXAK

SEQ ID NO: 26512 - protein, 37 aa, Artificial Sequence
  Non-cyclic GFR-binding peptide
  MOD_RES (1), (33), (34): Xaa is C or S
XSRVVMNVQVEKIVNSSDDVKAVKVSRLKTPAXXPKP

SEQ ID NO: 26513 - protein, 34 aa, Artificial Sequence
  Non-cyclic GFR-binding peptide
  MOD_RES (1), (33), (34): Xaa is C or S
XSRVVMNVQVEKIVNSSDDVKAVKVSRLKTPAXX

SEQ ID NO: 26514 - protein, 32 aa, Artificial Sequence
  Non-cyclic GFR-binding peptide
  MOD_RES (32), (32): Xaa is C or S
GEVVMDSMEGIVVKENEDMIQMTINSLETPVX

SEQ ID NO: 26515 - protein, 38 aa, Artificial Sequence
  Non-cyclic GFR-binding peptide
  MOD_RES (1), (35), (36): Xaa is C or S
  MOD_RES (13), (14), (15), (16), (17): Xaa is A or G
  MOD_RES (18), (19), (20), (21): Xaa is A or G or is absent
XGEVVMEVTAKKXXXXXXXXXIKRMQVPRLETPVXXAK

SEQ ID NO: 26516 - protein, 36 aa, Artificial Sequence
  Non-cyclic GFR-binding peptide
  MOD_RES (32), (33): Xaa is C or S
SRVVMNVQVEKIVNSSDDVKAVKVSRLKTPAXXPKP

SEQ ID NO: 26517 - protein, 39 aa, Artificial Sequence
  Non-cyclic GFR-binding peptide
  MOD_RES (1), (35), (36): Xaa is C or S
  MOD_RES (13), (14), (15), (16), (17): Xaa is A or G
  MOD_RES (18), (19), (20), (21): Xaa is A or G or is absent
XGEVVMDSMEGIXXXXXXXXXMIQMTINSLETPVXXAKP

SEQ ID NO: 26518 - protein, 44 aa, Artificial Sequence
  Non-cyclic GFR-binding peptide
  MOD_RES (2), (4), (41): Xaa is C or S
EXKXALHDELTNSLQEFIPKKRVIEYYLVTLPELQVQTPRXQVN

SEQ ID NO: 26519 - protein, 33 aa, Artificial Sequence
  Non-cyclic GFR-binding peptide
  MOD_RES (31), (32): Xaa is C or S
RVVMNVTAKKIVNSSDDIKRVQVPRLQTPAXXP

SEQ ID NO: 26520 - protein, 38 aa, Artificial Sequence
  Non-cyclic GFR-binding peptide
  MOD_RES (33), (33): Xaa is C or S
  MOD_RES (11), (12), (13), (14), (15): Xaa is A or G
  MOD_RES (16), (17), (18), (19): Xaa is A or G or is absent
RVVMNVTAKKXXXXXXXXXIKRVQVPRLKTPAXTPKTV

SEQ ID NO: 26521 - protein, 34 aa, Artificial Sequence
  Non-cyclic GFR-binding peptide
  MOD_RES (1), (33), (34): Xaa is C or S
XGEVVMDSMEGIVVKENEDMIQMTINSLETPVXX

SEQ ID NO: 26522 - protein, 38 aa, Artificial Sequence
  Non-cyclic GFR-binding peptide
  MOD_RES (34), (35): Xaa is C or S
  MOD_RES (12), (13), (14), (15), (16): Xaa is A or G
  MOD_RES (17), (18), (19), (20): Xaa is A or G or is absent
ARVVMNVQVEKXXXXXXXXXVKAVKVSRLQTPAXXPKP

SEQ ID NO: 26523 - protein, 39 aa, Artificial Sequence
  Non-cyclic GFR-binding peptide
  MOD_RES (2), (4): Xaa is C or S
  MOD_RES (17), (18), (19), (20), (21): Xaa is A or G
  MOD_RES (22), (23), (24), (25): Xaa is A or G or is absent
AXAXELHEELRNSLQEXXXXXXXXXYYLVTLPEHHVRSP

SEQ ID NO: 26524 - protein, 35 aa, Artificial Sequence
  Non-cyclic GFR-binding peptide
  MOD_RES (1), (3), (35): Xaa is C or S
XGXGEVVMEVTAKKVVKDYEDIKRMQVPRLETPVX

SEQ ID NO: 26525 - protein, 39 aa, Artificial Sequence
  Non-cyclic GFR-binding peptide
  MOD_RES (1), (3), (37), (38): Xaa is C or S
  MOD_RES (15), (16), (17), (18), (19): Xaa is A or G
  MOD_RES (20), (21), (22), (23): Xaa is A or G or is absent
XGXSRVVMNVQVEKXXXXXXXXXVKAVKVSRLKTPAXXP

SEQ ID NO: 26526 - protein, 42 aa, Artificial Sequence
  Non-cyclic GFR-binding peptide
  MOD_RES (1), (3), (37), (38): Xaa is C or S
  MOD_RES (15), (16), (17), (18), (19): Xaa is A or G
  MOD_RES (20), (21), (22), (23): Xaa is A or G or is absent
XGXARVVMNSMEGIXXXXXXXXXMIQVTINSLQTPAXXPKPV

SEQ ID NO: 26527 - protein, 39 aa, Artificial Sequence
  Non-cyclic GFR-binding peptide
  MOD_RES (36), (36): Xaa is C or S
LHDELTNSLQEFIPKKRVIEYYVVPLPELQVQTPRXQVN

SEQ ID NO: 26528 - protein, 36 aa, Artificial Sequence
  Non-cyclic GFR-binding peptide
  MOD_RES (2), (34), (35): Xaa is C or S
GXGEVVMESMEGIVVKDYEDMIQMTINSLETPVXXA

SEQ ID NO: 26529 - protein, 37 aa, Artificial Sequence
  Non-cyclic GFR-binding peptide
  MOD_RES (33), (34): Xaa is C or S
  MOD_RES (11), (12), (13), (14), (15): Xaa is A or G
  MOD_RES (16), (17), (18), (19): Xaa is A or G or is absent
SKVIMVTAKKXXXXXXXXXIKRIQVPRLDQSVXXPSA

SEQ ID NO: 26530 - protein, 36 aa, Artificial Sequence
  Non-cyclic GFR-binding peptide
  MOD_RES (34), (35): Xaa is C or S
  MOD_RES (12), (13), (14), (15), (16): Xaa is A or G
  MOD_RES (17), (18), (19), (20): Xaa is A or G or is absent
ARVVMNSMEGIXXXXXXXXXMIQVTINSLQTPAXXP

SEQ ID NO: 26531 - protein, 35 aa, Artificial Sequence
  Non-cyclic GFR-binding peptide
  MOD_RES (1), (3), (34), (35): Xaa is C or S
XKXSKVVMVTAKKVKPTRGVIKRIQVPRLDQPVXX

SEQ ID NO: 26532 - protein, 34 aa, Artificial Sequence
  Non-cyclic GFR-binding peptide
  MOD_RES (31), (32): Xaa is C or S
SKVIMVTAKKIKPTKGIIKRIQVPRLDQSVXXPS

SEQ ID NO: 26533 - protein, 39 aa, Artificial Sequence
  Non-cyclic GFR-binding peptide
  MOD_RES (1), (3), (36), (37): Xaa is C or S
  MOD_RES (14), (15), (16), (17), (18): Xaa is A or G
  MOD_RES (19), (20), (21), (22): Xaa is A or G or is absent
XKXSKVIMVTAKKXXXXXXXXXIKRIQVPRLDQSVXXPS

SEQ ID NO: 26534 - protein, 40 aa, Artificial Sequence
  Non-cyclic GFR-binding peptide
  MOD_RES (2), (35), (36): Xaa is C or S
  MOD_RES (13), (14), (15), (16), (17): Xaa is A or G
  MOD_RES (18), (19), (20), (21): Xaa is A or G or is absent
KXSKVVMSMEGIXXXXXXXXXMIQITINSLDQPVXXPSAS

SEQ ID NO: 26535 - protein, 38 aa, Artificial Sequence
  Non-cyclic GFR-binding peptide
  MOD_RES (1), (34), (35): Xaa is C or S
  MOD_RES (12), (13), (14), (15), (16): Xaa is A or G
  MOD_RES (17), (18), (19), (20): Xaa is A or G or is absent
XSKVIMVTAKKXXXXXXXXXIKRIQVPRLDQSVXXPSA

SEQ ID NO: 26536 - protein, 36 aa, Artificial Sequence
  Non-cyclic GFR-binding peptide
  MOD_RES (1), (3), (35), (36): Xaa is C or S
XGXARVVMNSMEGIIVNSSDDMIQVTINSLQTPAXX

SEQ ID NO: 26537 - protein, 42 aa, Artificial Sequence
  Non-cyclic GFR-binding peptide
  MOD_RES (2), (39): Xaa is C or S
AXELHEELRNSLQELKPKKRVYEYYLVTLPEHHVRSPQXKVS

SEQ ID NO: 26538 - protein, 39 aa, Artificial Sequence
  Non-cyclic GFR-binding peptide
  MOD_RES (34), (34): Xaa is C or S
  MOD_RES (12), (13), (14), (15), (16): Xaa is A or G
  MOD_RES (17), (18), (19), (20): Xaa is A or G or is absent
KNHQLFNSLQEXXXXXXXXXYYVMPLPEEETPVXELGED

SEQ ID NO: 26539 - protein, 35 aa, Artificial Sequence
  Non-cyclic GFR-binding peptide
  MOD_RES (34), (35): Xaa is C or S
  MOD_RES (12), (13), (14), (15), (16): Xaa is A or G
  MOD_RES (17), (18), (19), (20): Xaa is A or G or is absent
ARVVMNVQVEKXXXXXXXXXVKAVKVSRLQTPAXX

SEQ ID NO: 26540 - protein, 40 aa, Artificial Sequence
  Non-cyclic GFR-binding peptide
  MOD_RES (2), (4), (36), (37): Xaa is C or S
HXGXARVVMNVQVEKIVNSSDDVKAVKVSRLQTPAXXPKP

SEQ ID NO: 26541 - protein, 34 aa, Artificial Sequence
  Non-cyclic GFR-binding peptide
  MOD_RES (2), (34): Xaa is C or S
GXARVVMNVQVEKIVNSSDDVKAVKVSRLQTPAX

SEQ ID NO: 26542 - protein, 37 aa, Artificial Sequence
  Non-cyclic GFR-binding peptide
  MOD_RES (1), (3), (35): Xaa is C or S
XGXSRVVMNVTAKKIVNSSDDIKRVQVPRLKTPAXTP

SEQ ID NO: 26543 - protein, 35 aa, Artificial Sequence
  Non-cyclic GFR-binding peptide
  MOD_RES (1), (1): Xaa is C or S
  MOD_RES (14), (15), (16), (17), (18): Xaa is A or G
  MOD_RES (19), (20), (21), (22): Xaa is A or G or is absent
XELHEELRNSLQEXXXXXXXXXYYLVTLPEHHVRS

SEQ ID NO: 26544 - protein, 41 aa, Artificial Sequence
  Non-cyclic GFR-binding peptide
  MOD_RES (1), (3), (35), (36): Xaa is C or S
XGXARVVMNVTAKKIVNSSDDIKRVQVPRLQTPAXXPKPVT

SEQ ID NO: 26545 - protein, 36 aa, Artificial Sequence
  Non-cyclic GFR-binding peptide
  MOD_RES (31), (32): Xaa is C or S
EVVMDSMEGIVVKENEDMIQMTINSLETPVXXAKPI

SEQ ID NO: 26546 - protein, 40 aa, Artificial Sequence
  Non-cyclic GFR-binding peptide
  MOD_RES (2), (4), (38), (39): Xaa is C or S
  MOD_RES (16), (17), (18), (19), (20): Xaa is A or G
  MOD_RES (21), (22), (23), (24): Xaa is A or G or is absent
RXGXGEVVMDVTAKKXXXXXXXXXIKRMQVPRLETPVXXA

SEQ ID NO: 26547 - protein, 41 aa, Artificial Sequence
  Non-cyclic GFR-binding peptide
  MOD_RES (2), (39): Xaa is C or S
  MOD_RES (15), (16), (17), (18), (19): Xaa is A or G
  MOD_RES (20), (21), (22), (23): Xaa is A or G or is absent
AXELHEELRNSLQEXXXXXXXXXYYVVPLPEHHVRSPQXKV

SEQ ID NO: 26548 - protein, 37 aa, Artificial Sequence
  Non-cyclic GFR-binding peptide
  MOD_RES (2), (35), (36): Xaa is C or S
  MOD_RES (13), (14), (15), (16), (17): Xaa is A or G
  MOD_RES (18), (19), (20), (21): Xaa is A or G or is absent
KXSKVIMVTAKKXXXXXXXXXIKRIQVPRLDQSVXXP

SEQ ID NO: 26549 - protein, 34 aa, Artificial Sequence
  Non-cyclic GFR-binding peptide
  MOD_RES (1), (3), (34): Xaa is C or S
XKXSRVIMSMEGIVKPKRGVMIQITINSLAQPVX

SEQ ID NO: 26550 - protein, 39 aa, Artificial Sequence
  Non-cyclic GFR-binding peptide
  MOD_RES (2), (34), (35): Xaa is C or S
GXARVVMNSMEGIIVNSSDDMIQVTINSLQTPAXXPKPV

SEQ ID NO: 26551 - protein, 42 aa, Artificial Sequence
  Non-cyclic GFR-binding peptide
  MOD_RES (1), (3), (36), (37): Xaa is C or S
  MOD_RES (14), (15), (16), (17), (18): Xaa is A or G
  MOD_RES (19), (20), (21), (22): Xaa is A or G or is absent
XKXSKVIMVTAKKXXXXXXXXXIKRIQVPRLDQSVXXPSASA

SEQ ID NO: 26552 - protein, 36 aa, Artificial Sequence
  Non-cyclic GFR-binding peptide
  MOD_RES (1), (34), (35): Xaa is C or S
  MOD_RES (12), (13), (14), (15), (16): Xaa is A or G
  MOD_RES (17), (18), (19), (20): Xaa is A or G or is absent
XSRVIMSMEGIXXXXXXXXXMIQITINSLAQPVXXP

SEQ ID NO: 26553 - protein, 44 aa, Artificial Sequence
  Non-cyclic GFR-binding peptide
  MOD_RES (2), (4), (41): Xaa is C or S
AXAXELHEELRNSLQELKPKKRVYEYYLVTLPEHHVRSPQXKVS

SEQ ID NO: 26554 - protein, 40 aa, Artificial Sequence
  Non-cyclic GFR-binding peptide
  MOD_RES (1), (3), (37), (38): Xaa is C or S
  MOD_RES (15), (16), (17), (18), (19): Xaa is A or G
  MOD_RES (20), (21), (22), (23): Xaa is A or G or is absent
XGXGEVVMDSMEGIXXXXXXXXXMIQMTINSLETPVXXAK

SEQ ID NO: 26555 - protein, 33 aa, Artificial Sequence
  Non-cyclic GFR-binding peptide
  MOD_RES (33), (33): Xaa is C or S
  MOD_RES (11), (12), (13), (14), (15): Xaa is A or G
  MOD_RES (16), (17), (18), (19): Xaa is A or G or is absent
EVVMDSMEGIXXXXXXXXXMIQMTINSLETPVX

SEQ ID NO: 26556 - protein, 40 aa, Artificial Sequence
  Non-cyclic GFR-binding peptide
  MOD_RES (1), (3), (35), (36): Xaa is C or S
XGXGEVVMEVQVEKVVKDYEDVKAMKVSRLETPVXXAKPI

SEQ ID NO: 26557 - protein, 34 aa, Artificial Sequence
  Non-cyclic GFR-binding peptide
  MOD_RES (13), (14), (15), (16), (17): Xaa is A or G
  MOD_RES (18), (19), (20), (21): Xaa is A or G or is absent
ELHEELRNSLQEXXXXXXXXXYYLVTLPEHHVRS

SEQ ID NO: 26558 - protein, 42 aa, Artificial Sequence
  Non-cyclic GFR-binding peptide
  MOD_RES (2), (36), (37): Xaa is C or S
  MOD_RES (14), (15), (16), (17), (18): Xaa is A or G
  MOD_RES (19), (20), (21), (22): Xaa is A or G or is absent
GXGEVVMDVTAKKXXXXXXXXXIKRMQVPRLETPVXXAKPIK

SEQ ID NO: 26559 - protein, 35 aa, Artificial Sequence
  Non-cyclic GFR-binding peptide
  MOD_RES (1), (35): Xaa is C or S
  MOD_RES (13), (14), (15), (16), (17): Xaa is A or G
  MOD_RES (18), (19), (20), (21): Xaa is A or G or is absent
XSRVVMNVQVEKXXXXXXXXXVKAVKVSRLKTPAX

SEQ ID NO: 26560 - protein, 35 aa, Artificial Sequence
  Non-cyclic GFR-binding peptide
  MOD_RES (2), (33), (34): Xaa is C or S
KXSRVIMVTAKKVKPKRGVIKRIQVPRLAQPVXXP

SEQ ID NO: 26561 - protein, 35 aa, Artificial Sequence
  Non-cyclic GFR-binding peptide
  MOD_RES (13), (14), (15), (16), (17): Xaa is A or G
  MOD_RES (18), (19), (20), (21): Xaa is A or G or is absent
ELHEELRNSLQEXXXXXXXXXYYVVPLPEHHVRSP

SEQ ID NO: 26562 - protein, 39 aa, Artificial Sequence
  Non-cyclic GFR-binding peptide
  MOD_RES (1), (3): Xaa is C or S
XAXELHEELRNSLQELKPKKRVYEYYLVTLPEHHVRSPQ

SEQ ID NO: 26563 - protein, 42 aa, Artificial Sequence
  Non-cyclic GFR-binding peptide
  MOD_RES (1), (3), (36), (37): Xaa is C or S
  MOD_RES (14), (15), (16), (17), (18): Xaa is A or G
  MOD_RES (19), (20), (21), (22): Xaa is A or G or is absent
XKXSRVIMVTAKKXXXXXXXXXIKRIQVPRLAQPVXXPAASA

SEQ ID NO: 26564 - protein, 36 aa, Artificial Sequence
  Non-cyclic GFR-binding peptide
  MOD_RES (1), (33): Xaa is C or S
XSRVVMNVTAKKIVNSSDDIKRVQVPRLKTPAXTPK

SEQ ID NO: 26565 - protein, 41 aa, Artificial Sequence
  Non-cyclic GFR-binding peptide
  MOD_RES (2), (4), (36), (37): Xaa is C or S
RXGXGEVVMDSMEGIVVKENEDMIQMTINSLETPVXXAKPI

SEQ ID NO: 26566 - protein, 39 aa, Artificial Sequence
  Non-cyclic GFR-binding peptide
  MOD_RES (2), (4): Xaa is C or S
  MOD_RES (17), (18), (19), (20), (21): Xaa is A or G
  MOD_RES (22), (23), (24), (25): Xaa is A or G or is absent
EXKXALHDELTNSLQEXXXXXXXXXYYVVPLPELQVQTP

SEQ ID NO: 26567 - protein, 35 aa, Artificial Sequence
  Non-cyclic GFR-binding peptide
  MOD_RES (1), (3), (35): Xaa is C or S
XGXGEVVMDVTAKKVVKENEDIKRMQVPRLETPVX

SEQ ID NO: 26568 - protein, 42 aa, Artificial Sequence
  Non-cyclic GFR-binding peptide
  MOD_RES (2), (4), (38): Xaa is C or S
  MOD_RES (16), (17), (18), (19), (20): Xaa is A or G
  MOD_RES (21), (22), (23), (24): Xaa is A or G or is absent
HXGXSRVVMNSMEGIXXXXXXXXXMIQVTINSLKTPAXTPKT

SEQ ID NO: 26569 - protein, 35 aa, Artificial Sequence
  Non-cyclic GFR-binding peptide
  MOD_RES (33), (33): Xaa is C or S
  MOD_RES (11), (12), (13), (14), (15): Xaa is A or G
  MOD_RES (16), (17), (18), (19): Xaa is A or G or is absent
RVVMNVQVEKXXXXXXXXXVKAVKVSRLKTPAXTP

SEQ ID NO: 26570 - protein, 39 aa, Artificial Sequence
  Non-cyclic GFR-binding peptide
  MOD_RES (1), (35): Xaa is C or S
  MOD_RES (13), (14), (15), (16), (17): Xaa is A or G
  MOD_RES (18), (19), (20), (21): Xaa is A or G or is absent
XKNHQLFNSLQEXXXXXXXXXYYLMTLPEEETPVXELGE

SEQ ID NO: 26571 - protein, 37 aa, Artificial Sequence
  Non-cyclic GFR-binding peptide
  MOD_RES (1), (3), (37): Xaa is C or S
  MOD_RES (15), (16), (17), (18), (19): Xaa is A or G
  MOD_RES (20), (21), (22), (23): Xaa is A or G or is absent
XGXGEVVMEVQVEKXXXXXXXXXVKAMKVSRLETPVX

SEQ ID NO: 26572 - protein, 35 aa, Artificial Sequence
  Non-cyclic GFR-binding peptide
  MOD_RES (31), (32): Xaa is C or S
SRVIMVQVEKVKPKRGVVKAIKVSRLAQPVXXPAA

SEQ ID NO: 26573 - protein, 42 aa, Artificial Sequence
  Non-cyclic GFR-binding peptide
  MOD_RES (2), (36), (37): Xaa is C or S
  MOD_RES (14), (15), (16), (17), (18): Xaa is A or G
  MOD_RES (19), (20), (21), (22): Xaa is A or G or is absent
GXGEVVMESMEGIXXXXXXXXXMIQMTINSLETPVXXAKPIS

SEQ ID NO: 26574 - protein, 35 aa, Artificial Sequence
  Non-cyclic GFR-binding peptide
  MOD_RES (2), (34), (35): Xaa is C or S
GXSRVVMNSMEGIIVNSSDDMIQVTINSLKTPAXX

SEQ ID NO: 26575 - protein, 39 aa, Artificial Sequence
  Non-cyclic GFR-binding peptide
  MOD_RES (2), (4), (35), (36): Xaa is C or S
SXKXSRVIMVQVEKVKPKRGVVKAIKVSRLAQPVXXPAA

SEQ ID NO: 26576 - protein, 40 aa, Artificial Sequence
  Non-cyclic GFR-binding peptide
  MOD_RES (1), (3), (36), (37): Xaa is C or S
  MOD_RES (14), (15), (16), (17), (18): Xaa is A or G
  MOD_RES (19), (20), (21), (22): Xaa is A or G or is absent
XKXSRVIMVQVEKXXXXXXXXXVKAIKVSRLAQPVXXPAA

SEQ ID NO: 26577 - protein, 37 aa, Artificial Sequence
  Non-cyclic GFR-binding peptide
  MOD_RES (33), (34): Xaa is C or S
  MOD_RES (11), (12), (13), (14), (15): Xaa is A or G
  MOD_RES (16), (17), (18), (19): Xaa is A or G or is absent
RVVMNVTAKKXXXXXXXXXIKRVQVPRLQTPAXXPKP

SEQ ID NO: 26578 - protein, 35 aa, Artificial Sequence
  Non-cyclic GFR-binding peptide
  MOD_RES (1), (33): Xaa is C or S
XSRVVMNVQVEKIVNSSDDVKAVKVSRLKTPAXTP

SEQ ID NO: 26579 - protein, 32 aa, Artificial Sequence
  Non-cyclic GFR-binding peptide
  MOD_RES (11), (12), (13), (14), (15): Xaa is A or G
  MOD_RES (16), (17), (18), (19): Xaa is A or G or is absent
EVVMEVQVEKXXXXXXXXXVKAMKVSRLETPV

SEQ ID NO: 26580 - protein, 35 aa, Artificial Sequence
  Non-cyclic GFR-binding peptide
  MOD_RES (2), (35): Xaa is C or S
  MOD_RES (13), (14), (15), (16), (17): Xaa is A or G
  MOD_RES (18), (19), (20), (21): Xaa is A or G or is absent
KXSKVVMVTAKKXXXXXXXXXIKRIQVPRLDQPVX

SEQ ID NO: 26581 - protein, 36 aa, Artificial Sequence
  Non-cyclic GFR-binding peptide
  MOD_RES (2), (34): Xaa is C or S
GXSRVVMNVTAKKIVNSSDDIKRVQVPRLKTPAXTP

SEQ ID NO: 26582 - protein, 34 aa, Artificial Sequence
  Non-cyclic GFR-binding peptide
  MOD_RES (1), (1): Xaa is C or S
  MOD_RES (13), (14), (15), (16), (17): Xaa is A or G
  MOD_RES (18), (19), (20), (21): Xaa is A or G or is absent
XGEVVMDVTAKKXXXXXXXXXIKRMQVPRLETPV

SEQ ID NO: 26583 - protein, 36 aa, Artificial Sequence
  Non-cyclic GFR-binding peptide
  MOD_RES (2), (36): Xaa is C or S
  MOD_RES (14), (15), (16), (17), (18): Xaa is A or G
  MOD_RES (19), (20), (21), (22): Xaa is A or G or is absent
GXARVVMNSMEGIXXXXXXXXXMIQVTINSLQTPAX

SEQ ID NO: 26584 - protein, 34 aa, Artificial Sequence
  Non-cyclic GFR-binding peptide
  MOD_RES (1), (34): Xaa is C or S
  MOD_RES (12), (13), (14), (15), (16): Xaa is A or G
  MOD_RES (17), (18), (19), (20): Xaa is A or G or is absent
XSKVIMVTAKKXXXXXXXXXIKRIQVPRLDQSVX

SEQ ID NO: 26585 - protein, 37 aa, Artificial Sequence
  Non-cyclic GFR-binding peptide
  MOD_RES (2), (36), (37): Xaa is C or S
  MOD_RES (14), (15), (16), (17), (18): Xaa is A or G
  MOD_RES (19), (20), (21), (22): Xaa is A or G or is absent
GXGEVVMEVTAKKXXXXXXXXXIKRMQVPRLETPVXX

SEQ ID NO: 26586 - protein, 33 aa, Artificial Sequence
  Non-cyclic GFR-binding peptide
  MOD_RES (1), (33): Xaa is C or S
XARVVMNVTAKKIVNSSDDIKRVQVPRLQTPAX

SEQ ID NO: 26587 - protein, 35 aa, Artificial Sequence
  Non-cyclic GFR-binding peptide
  MOD_RES (1), (33), (34): Xaa is C or S
XGEVVMDSMEGIVVKENEDMIQMTINSLETPVXXA

SEQ ID NO: 26588 - protein, 42 aa, Artificial Sequence
  Non-cyclic GFR-binding peptide
  MOD_RES (1), (3), (40): Xaa is C or S
  MOD_RES (16), (17), (18), (19), (20): Xaa is A or G
  MOD_RES (21), (22), (23), (24): Xaa is A or G or is absent
XAXELHEELRNSLQEXXXXXXXXXYYVVPLPEHHVRSPQXKV

SEQ ID NO: 26589 - protein, 37 aa, Artificial Sequence
  Non-cyclic GFR-binding peptide
  MOD_RES (32), (33): Xaa is C or S
ARVVMNVQVEKIVNSSDDVKAVKVSRLQTPAXXPKPV

SEQ ID NO: 26590 - protein, 36 aa, Artificial Sequence
  Non-cyclic GFR-binding peptide
  MOD_RES (36), (36): Xaa is C or S
  MOD_RES (12), (13), (14), (15), (16): Xaa is A or G
  MOD_RES (17), (18), (19), (20): Xaa is A or G or is absent
LHEELRNSLQEXXXXXXXXXYYVVPLPEHHVRSPQX

SEQ ID NO: 26591 - protein, 36 aa, Artificial Sequence
  Non-cyclic GFR-binding peptide
  MOD_RES (2), (34), (35): Xaa is C or S
GXARVVMNVQVEKIVNSSDDVKAVKVSRLQTPAXXP

SEQ ID NO: 26592 - protein, 38 aa, Artificial Sequence
  Non-cyclic GFR-binding peptide
  MOD_RES (2), (4), (38): Xaa is C or S
  MOD_RES (16), (17), (18), (19), (20): Xaa is A or G
  MOD_RES (21), (22), (23), (24): Xaa is A or G or is absent
HXGXSRVVMNVQVEKXXXXXXXXXVKAVKVSRLKTPAX

SEQ ID NO: 26593 - protein, 42 aa, Artificial Sequence
  Non-cyclic GFR-binding peptide
  MOD_RES (2), (4), (37), (38): Xaa is C or S
  MOD_RES (15), (16), (17), (18), (19): Xaa is A or G
  MOD_RES (20), (21), (22), (23): Xaa is A or G or is absent
SXKXSRVIMVTAKKXXXXXXXXXIKRIQVPRLAQPVXXPAAS

SEQ ID NO: 26594 - protein, 36 aa, Artificial Sequence
  Non-cyclic GFR-binding peptide
ALHDELTNSLQEFIPKKRVIEYYVVPLPELQVQTPR

SEQ ID NO: 26595 - protein, 33 aa, Artificial Sequence
  Non-cyclic GFR-binding peptide
  MOD_RES (1), (33): Xaa is C or S
XGEVVMDVQVEKVVKENEDVKAMKVSRLETPVX

SEQ ID NO: 26596 - protein, 40 aa, Artificial Sequence
  Non-cyclic GFR-binding peptide
  MOD_RES (1), (3), (36), (37): Xaa is C or S
  MOD_RES (14), (15), (16), (17), (18): Xaa is A or G
  MOD_RES (19), (20), (21), (22): Xaa is A or G or is absent
XKXSKVIMVQVEKXXXXXXXXXVKAIKVSRLDQSVXXPSA

SEQ ID NO: 26597 - protein, 37 aa, Artificial Sequence
  Non-cyclic GFR-binding peptide
  MOD_RES (2), (34), (35): Xaa is C or S
GXSRVVMNVTAKKIVNSSDDIKRVQVPRLKTPAXXPK

SEQ ID NO: 26598 - protein, 43 aa, Artificial Sequence
  Non-cyclic GFR-binding peptide
  MOD_RES (2), (4), (37), (38): Xaa is C or S
  MOD_RES (15), (16), (17), (18), (19): Xaa is A or G
  MOD_RES (20), (21), (22), (23): Xaa is A or G or is absent
SXKXSKVIMVTAKKXXXXXXXXXIKRIQVPRLDQSVXXPSASA

SEQ ID NO: 26599 - protein, 39 aa, Artificial Sequence
  Non-cyclic GFR-binding peptide
  MOD_RES (1), (38): Xaa is C or S
XELHEELRNSLQELKPKKRVYEYYVVPLPEHHVRSPQXK

SEQ ID NO: 26600 - protein, 38 aa, Artificial Sequence
  Non-cyclic GFR-binding peptide
  MOD_RES (1), (3), (37): Xaa is C or S
  MOD_RES (15), (16), (17), (18), (19): Xaa is A or G
  MOD_RES (20), (21), (22), (23): Xaa is A or G or is absent
XEXKNHQLFNSLQEXXXXXXXXXYYVMPLPEEETPVXE

SEQ ID NO: 26601 - protein, 41 aa, Artificial Sequence
  Non-cyclic GFR-binding peptide
  MOD_RES (2), (4), (36), (37): Xaa is C or S
HXGXSRVVMNVQVEKIVNSSDDVKAVKVSRLKTPAXXPKPV

SEQ ID NO: 26602 - protein, 35 aa, Artificial Sequence
  Non-cyclic GFR-binding peptide
  MOD_RES (1), (3), (35): Xaa is C or S
XGXARVVMNVQVEKIVNSSDDVKAVKVSRLQTPAX

SEQ ID NO: 26603 - protein, 32 aa, Artificial Sequence
  Non-cyclic GFR-binding peptide
  MOD_RES (11), (12), (13), (14), (15): Xaa is A or G
  MOD_RES (16), (17), (18), (19): Xaa is A or G or is absent
SRVIMVQVEKXXXXXXXXXVKAIKVSRLAQPV

SEQ ID NO: 26604 - protein, 42 aa, Artificial Sequence
  Non-cyclic GFR-binding peptide
  MOD_RES (1), (3), (37), (38): Xaa is C or S
  MOD_RES (15), (16), (17), (18), (19): Xaa is A or G
  MOD_RES (20), (21), (22), (23): Xaa is A or G or is absent
XGXGEVVMDVTAKKXXXXXXXXXIKRMQVPRLETPVXXAKPI

SEQ ID NO: 26605 - protein, 40 aa, Artificial Sequence
  Non-cyclic GFR-binding peptide
  MOD_RES (2), (4), (38): Xaa is C or S
  MOD_RES (16), (17), (18), (19), (20): Xaa is A or G
  MOD_RES (21), (22), (23), (24): Xaa is A or G or is absent
RXEXKNHQLFNSLQEXXXXXXXXXYYVMPLPEEETPVXEL

SEQ ID NO: 26606 - protein, 39 aa, Artificial Sequence
  Non-cyclic GFR-binding peptide
  MOD_RES (1), (3), (36), (37): Xaa is C or S
  MOD_RES (14), (15), (16), (17), (18): Xaa is A or G
  MOD_RES (19), (20), (21), (22): Xaa is A or G or is absent
XKXSKVVMVTAKKXXXXXXXXXIKRIQVPRLDQPVXXPS

SEQ ID NO: 26607 - protein, 38 aa, Artificial Sequence
  Non-cyclic GFR-binding peptide
  MOD_RES (2), (4), (35), (36): Xaa is C or S
SXKXSKVIMSMEGIIKPTKGIMIQITINSLDQSVXXPS

SEQ ID NO: 26608 - protein, 41 aa, Artificial Sequence
  Non-cyclic GFR-binding peptide
  MOD_RES (37), (37): Xaa is C or S
  MOD_RES (13), (14), (15), (16), (17): Xaa is A or G
  MOD_RES (18), (19), (20), (21): Xaa is A or G or is absent
ALHDELTNSLQEXXXXXXXXXYYLVTLPELQVQTPRXQVNR

SEQ ID NO: 26609 - protein, 39 aa, Artificial Sequence
  Non-cyclic GFR-binding peptide
  MOD_RES (1), (3), (37), (38): Xaa is C or S
  MOD_RES (15), (16), (17), (18), (19): Xaa is A or G
  MOD_RES (20), (21), (22), (23): Xaa is A or G or is absent
XGXSRVVMNVTAKKXXXXXXXXXIKRVQVPRLKTPAXXP

SEQ ID NO: 26610 - protein, 34 aa, Artificial Sequence
  Non-cyclic GFR-binding peptide
  MOD_RES (1), (1): Xaa is C or S
XKNHQLFNSLQEHQGQHPKIRYYLMTLPEEETPV

SEQ ID NO: 26611 - protein, 41 aa, Artificial Sequence
  Non-cyclic GFR-binding peptide
  MOD_RES (1), (3), (37), (38): Xaa is C or S
  MOD_RES (15), (16), (17), (18), (19): Xaa is A or G
  MOD_RES (20), (21), (22), (23): Xaa is A or G or is absent
XGXGEVVMDVQVEKXXXXXXXXXVKAMKVSRLETPVXXAKP

SEQ ID NO: 26612 - protein, 32 aa, Artificial Sequence
  Non-cyclic GFR-binding peptide
  MOD_RES (1), (1): Xaa is C or S
XARVVMNSMEGIIVNSSDDMIQVTINSLQTPA

SEQ ID NO: 26613 - protein, 39 aa, Artificial Sequence
  Non-cyclic GFR-binding peptide
  MOD_RES (1), (33), (34): Xaa is C or S
XSRVVMNSMEGIIVNSSDDMIQVTINSLKTPAXXPKPVY

SEQ ID NO: 26614 - protein, 38 aa, Artificial Sequence
  Non-cyclic GFR-binding peptide
  MOD_RES (2), (4), (36), (37): Xaa is C or S
HXGXSRVVMNSMEGIIVNSSDDMIQVTINSLKTPAXXP

SEQ ID NO: 26615 - protein, 39 aa, Artificial Sequence
  Non-cyclic GFR-binding peptide
  MOD_RES (2), (36), (37): Xaa is C or S
  MOD_RES (14), (15), (16), (17), (18): Xaa is A or G
  MOD_RES (19), (20), (21), (22): Xaa is A or G or is absent
GXGEVVMDVTAKKXXXXXXXXXIKRMQVPRLETPVXXAK

SEQ ID NO: 26616 - protein, 34 aa, Artificial Sequence
  Non-cyclic GFR-binding peptide
ALHDELTNSLQEFIPKKRVIEYYLVTLPELQVQT

SEQ ID NO: 26617 - protein, 40 aa, Artificial Sequence
  Non-cyclic GFR-binding peptide
  MOD_RES (34), (34): Xaa is C or S
  MOD_RES (12), (13), (14), (15), (16): Xaa is A or G
  MOD_RES (17), (18), (19), (20): Xaa is A or G or is absent
KNHQLFNSLQEXXXXXXXXXYYVMPLPEEETPVXELGEDN

SEQ ID NO: 26618 - protein, 36 aa, Artificial Sequence
  Non-cyclic GFR-binding peptide
  MOD_RES (2), (4): Xaa is C or S
  MOD_RES (15), (16), (17), (18), (19): Xaa is A or G
  MOD_RES (20), (21), (22), (23): Xaa is A or G or is absent
SXKXSKVVMVTAKKXXXXXXXXXIKRIQVPRLDQPV

SEQ ID NO: 26619 - protein, 41 aa, Artificial Sequence
  Non-cyclic GFR-binding peptide
  MOD_RES (2), (36): Xaa is C or S
  MOD_RES (14), (15), (16), (17), (18): Xaa is A or G
  MOD_RES (19), (20), (21), (22): Xaa is A or G or is absent
EXKNHQLFNSLQEXXXXXXXXXYYVMPLPEEETPVXELGED

SEQ ID NO: 26620 - protein, 33 aa, Artificial Sequence
  Non-cyclic GFR-binding peptide
  MOD_RES (32), (33): Xaa is C or S
SRVVMNSMEGIIVNSSDDMIQVTINSLKTPAXX

SEQ ID NO: 26621 - protein, 39 aa, Artificial Sequence
  Non-cyclic GFR-binding peptide
  MOD_RES (2), (35), (36): Xaa is C or S
  MOD_RES (13), (14), (15), (16), (17): Xaa is A or G
  MOD_RES (18), (19), (20), (21): Xaa is A or G or is absent
KXSKVIMVQVEKXXXXXXXXXVKAIKVSRLDQSVXXPSA

SEQ ID NO: 26622 - protein, 40 aa, Artificial Sequence
  Non-cyclic GFR-binding peptide
  MOD_RES (1), (34), (35): Xaa is C or S
  MOD_RES (12), (13), (14), (15), (16): Xaa is A or G
  MOD_RES (17), (18), (19), (20): Xaa is A or G or is absent
XSRVIMVQVEKXXXXXXXXXVKAIKVSRLAQPVXXPAASA

SEQ ID NO: 26623 - protein, 35 aa, Artificial Sequence
  Non-cyclic GFR-binding peptide
LHDELTNSLQEFIPKKRVIEYYVVPLPELQVQTPR

SEQ ID NO: 26624 - protein, 33 aa, Artificial Sequence
  Non-cyclic GFR-binding peptide
  MOD_RES (33), (33): Xaa is C or S
NHQLFNSLQEHQGQHPKIRYYLMTLPEEETPVX

SEQ ID NO: 26625 - protein, 36 aa, Artificial Sequence
  Non-cyclic GFR-binding peptide
  MOD_RES (1), (32), (33): Xaa is C or S
XSKVVMVQVEKVKPTRGVVKAIKVSRLDQPVXXPSA

SEQ ID NO: 26626 - protein, 34 aa, Artificial Sequence
  Non-cyclic GFR-binding peptide
  MOD_RES (31), (32): Xaa is C or S
RVVMNSMEGIIVNSSDDMIQVTINSLQTPAXXPK

SEQ ID NO: 26627 - protein, 40 aa, Artificial Sequence
  Non-cyclic GFR-binding peptide
  MOD_RES (36), (36): Xaa is C or S
LHEELRNSLQELKPKKRVYEYYLVTLPEHHVRSPQXKVSS

SEQ ID NO: 26628 - protein, 37 aa, Artificial Sequence
  Non-cyclic GFR-binding peptide
  MOD_RES (1), (33): Xaa is C or S
XSRVVMNVTAKKIVNSSDDIKRVQVPRLKTPAXTPKT

SEQ ID NO: 26629 - protein, 35 aa, Artificial Sequence
  Non-cyclic GFR-binding peptide
  MOD_RES (1), (35): Xaa is C or S
XKNHQLFNSLQEHQGQHPKIRYYLMTLPEEETPVX

SEQ ID NO: 26630 - protein, 35 aa, Artificial Sequence
  Non-cyclic GFR-binding peptide
  MOD_RES (33), (34): Xaa is C or S
  MOD_RES (11), (12), (13), (14), (15): Xaa is A or G
  MOD_RES (16), (17), (18), (19): Xaa is A or G or is absent
EVVMESMEGIXXXXXXXXXMIQMTINSLETPVXXA

SEQ ID NO: 26631 - protein, 38 aa, Artificial Sequence
  Non-cyclic GFR-binding peptide
  MOD_RES (33), (34): Xaa is C or S
  MOD_RES (11), (12), (13), (14), (15): Xaa is A or G
  MOD_RES (16), (17), (18), (19): Xaa is A or G or is absent
EVVMDSMEGIXXXXXXXXXMIQMTINSLETPVXXAKPI

SEQ ID NO: 26632 - protein, 35 aa, Artificial Sequence
  Non-cyclic GFR-binding peptide
  MOD_RES (1), (3): Xaa is C or S
  MOD_RES (14), (15), (16), (17), (18): Xaa is A or G
  MOD_RES (19), (20), (21), (22): Xaa is A or G or is absent
XKXSKVVMVTAKKXXXXXXXXXIKRIQVPRLDQPV

SEQ ID NO: 26633 - protein, 43 aa, Artificial Sequence
  Non-cyclic GFR-binding peptide
  MOD_RES (2), (4), (41): Xaa is C or S
EXKXALHDELTNSLQEFIPKKRVIEYYVVPLPELQVQTPRXQV

SEQ ID NO: 26634 - protein, 38 aa, Artificial Sequence
  Non-cyclic GFR-binding peptide
  MOD_RES (32), (33): Xaa is C or S
SRVVMNVQVEKIVNSSDDVKAVKVSRLKTPAXXPKPVY

SEQ ID NO: 26635 - protein, 33 aa, Artificial Sequence
  Non-cyclic GFR-binding peptide
  MOD_RES (33), (33): Xaa is C or S
  MOD_RES (11), (12), (13), (14), (15): Xaa is A or G
  MOD_RES (16), (17), (18), (19): Xaa is A or G or is absent
SKVVMSMEGIXXXXXXXXXMIQITINSLDQPVX

SEQ ID NO: 26636 - protein, 38 aa, Artificial Sequence
  Non-cyclic GFR-binding peptide
  MOD_RES (33), (33): Xaa is C or S
  MOD_RES (11), (12), (13), (14), (15): Xaa is A or G
  MOD_RES (16), (17), (18), (19): Xaa is A or G or is absent
RVVMNVQVEKXXXXXXXXXVKAVKVSRLKTPAXTPKTV

SEQ ID NO: 26637 - protein, 42 aa, Artificial Sequence
  Non-cyclic GFR-binding peptide
  MOD_RES (1), (3), (37): Xaa is C or S
  MOD_RES (15), (16), (17), (18), (19): Xaa is A or G
  MOD_RES (20), (21), (22), (23): Xaa is A or G or is absent
XGXSRVVMNVTAKKXXXXXXXXXIKRVQVPRLKTPAXTPKTV

SEQ ID NO: 26638 - protein, 35 aa, Artificial Sequence
  Non-cyclic GFR-binding peptide
  MOD_RES (1), (3): Xaa is C or S
  MOD_RES (14), (15), (16), (17), (18): Xaa is A or G
  MOD_RES (19), (20), (21), (22): Xaa is A or G or is absent
XKXSKVIMVQVEKXXXXXXXXXVKAIKVSRLDQSV

SEQ ID NO: 26639 - protein, 37 aa, Artificial Sequence
  Non-cyclic GFR-binding peptide
  MOD_RES (2), (34), (35): Xaa is C or S
GXGEVVMEVQVEKVVKDYEDVKAMKVSRLETPVXXAK

SEQ ID NO: 26640 - protein, 37 aa, Artificial Sequence
  Non-cyclic GFR-binding peptide
  MOD_RES (36), (36): Xaa is C or S
LHDELTNSLQEFIPKKRVIEYYVVPLPELQVQTPRXQ

SEQ ID NO: 26641 - protein, 32 aa, Artificial Sequence
  Non-cyclic GFR-binding peptide
NHQLFNSLQEHQGQHPKIRYYVMPLPEEETPV

SEQ ID NO: 26642 - protein, 34 aa, Artificial Sequence
  Non-cyclic GFR-binding peptide
  MOD_RES (1), (33), (34): Xaa is C or S
XARVVMNVTAKKIVNSSDDIKRVQVPRLQTPAXX

SEQ ID NO: 26643 - protein, 41 aa, Artificial Sequence
  Non-cyclic GFR-binding peptide
  MOD_RES (1), (38): Xaa is C or S
  MOD_RES (14), (15), (16), (17), (18): Xaa is A or G
  MOD_RES (19), (20), (21), (22): Xaa is A or G or is absent
XELHEELRNSLQEXXXXXXXXXYYLVTLPEHHVRSPQXKVS

SEQ ID NO: 26644 - protein, 35 aa, Artificial Sequence
  Non-cyclic GFR-binding peptide
  MOD_RES (1), (3): Xaa is C or S
  MOD_RES (14), (15), (16), (17), (18): Xaa is A or G
  MOD_RES (19), (20), (21), (22): Xaa is A or G or is absent
XKXSRVIMVTAKKXXXXXXXXXIKRIQVPRLAQPV

SEQ ID NO: 26645 - protein, 39 aa, Artificial Sequence
  Non-cyclic GFR-binding peptide
  MOD_RES (1), (38): Xaa is C or S
  MOD_RES (14), (15), (16), (17), (18): Xaa is A or G
  MOD_RES (19), (20), (21), (22): Xaa is A or G or is absent
XALHDELTNSLQEXXXXXXXXXYYVVPLPELQVQTPRXQ

SEQ ID NO: 26646 - protein, 32 aa, Artificial Sequence
  Non-cyclic GFR-binding peptide
  MOD_RES (31), (32): Xaa is C or S
SKVIMVTAKKIKPTKGIIKRIQVPRLDQSVXX

SEQ ID NO: 26647 - protein, 33 aa, Artificial Sequence
  Non-cyclic GFR-binding peptide
  MOD_RES (1), (3): Xaa is C or S
XKXSRVIMSMEGIVKPKRGVMIQITINSLAQPV

SEQ ID NO: 26648 - protein, 38 aa, Artificial Sequence
  Non-cyclic GFR-binding peptide
  MOD_RES (32), (33): Xaa is C or S
GEVVMEVQVEKVVKDYEDVKAMKVSRLETPVXXAKPIS

SEQ ID NO: 26649 - protein, 40 aa, Artificial Sequence
  Non-cyclic GFR-binding peptide
  MOD_RES (1), (3), (37), (38): Xaa is C or S
  MOD_RES (15), (16), (17), (18), (19): Xaa is A or G
  MOD_RES (20), (21), (22), (23): Xaa is A or G or is absent
XGXARVVMNVTAKKXXXXXXXXXIKRVQVPRLQTPAXXPK

SEQ ID NO: 26650 - protein, 38 aa, Artificial Sequence
  Non-cyclic GFR-binding peptide
  MOD_RES (32), (32): Xaa is C or S
SRVVMNVQVEKIVNSSDDVKAVKVSRLKTPAXTPKTVH

SEQ ID NO: 26651 - protein, 37 aa, Artificial Sequence
  Non-cyclic GFR-binding peptide
  MOD_RES (1), (35), (36): Xaa is C or S
  MOD_RES (13), (14), (15), (16), (17): Xaa is A or G
  MOD_RES (18), (19), (20), (21): Xaa is A or G or is absent
XSRVVMNVTAKKXXXXXXXXXIKRVQVPRLKTPAXXP

SEQ ID NO: 26652 - protein, 38 aa, Artificial Sequence
  Non-cyclic GFR-binding peptide
  MOD_RES (1), (3), (37): Xaa is C or S
XEXKNHQLFNSLQEHQGQHPKIRYYLMTLPEEETPVXE

SEQ ID NO: 26653 - protein, 40 aa, Artificial Sequence
  Non-cyclic GFR-binding peptide
  MOD_RES (1), (3), (37): Xaa is C or S
  MOD_RES (15), (16), (17), (18), (19): Xaa is A or G
  MOD_RES (20), (21), (22), (23): Xaa is A or G or is absent
XEXKNHQLFNSLQEXXXXXXXXXYYLMTLPEEETPVXELG

SEQ ID NO: 26654 - protein, 38 aa, Artificial Sequence
  Non-cyclic GFR-binding peptide
  MOD_RES (1), (3), (37), (38): Xaa is C or S
  MOD_RES (15), (16), (17), (18), (19): Xaa is A or G
  MOD_RES (20), (21), (22), (23): Xaa is A or G or is absent
XGXGEVVMESMEGIXXXXXXXXXMIQMTINSLETPVXX

SEQ ID NO: 26655 - protein, 36 aa, Artificial Sequence
  Non-cyclic GFR-binding peptide
  MOD_RES (1), (3): Xaa is C or S
XEXKNHQLFNSLQEHQGQHPKIRYYLMTLPEEETPV

SEQ ID NO: 26656 - protein, 38 aa, Artificial Sequence
  Non-cyclic GFR-binding peptide
  MOD_RES (2), (4): Xaa is C or S
AXAXELHEELRNSLQELKPKKRVYEYYLVTLPEHHVRS

SEQ ID NO: 26657 - protein, 31 aa, Artificial Sequence
  Non-cyclic GFR-binding peptide
  MOD_RES (1), (1): Xaa is C or S
XSKVVMVTAKKVKPTRGVIKRIQVPRLDQPV

SEQ ID NO: 26658 - protein, 41 aa, Artificial Sequence
  Non-cyclic GFR-binding peptide
  MOD_RES (2), (4), (36), (37): Xaa is C or S
RXGXGEVVMDVQVEKVVKENEDVKAMKVSRLETPVXXAKPI

SEQ ID NO: 26659 - protein, 39 aa, Artificial Sequence
  Non-cyclic GFR-binding peptide
  MOD_RES (33), (34): Xaa is C or S
  MOD_RES (11), (12), (13), (14), (15): Xaa is A or G
  MOD_RES (16), (17), (18), (19): Xaa is A or G or is absent
RVVMNSMEGIXXXXXXXXXMIQVTINSLKTPAXXPKPVY

SEQ ID NO: 26660 - protein, 43 aa, Artificial Sequence
  Non-cyclic GFR-binding peptide
  MOD_RES (1), (3), (37), (38): Xaa is C or S
  MOD_RES (15), (16), (17), (18), (19): Xaa is A or G
  MOD_RES (20), (21), (22), (23): Xaa is A or G or is absent
XGXARVVMNSMEGIXXXXXXXXXMIQVTINSLQTPAXXPKPVT

SEQ ID NO: 26661 - protein, 32 aa, Artificial Sequence
  Non-cyclic GFR-binding peptide
  MOD_RES (1), (32): Xaa is C or S
XSKVIMVTAKKIKPTKGIIKRIQVPRLDQSVX

SEQ ID NO: 26662 - protein, 34 aa, Artificial Sequence
  Non-cyclic GFR-binding peptide
  MOD_RES (1), (33): Xaa is C or S
XSRVVMNSMEGIIVNSSDDMIQVTINSLKTPAXT

SEQ ID NO: 26663 - protein, 35 aa, Artificial Sequence
  Non-cyclic GFR-binding peptide
  MOD_RES (2), (4): Xaa is C or S
HXGXARVVMNSMEGIIVNSSDDMIQVTINSLQTPA

SEQ ID NO: 26664 - protein, 44 aa, Artificial Sequence
  Non-cyclic GFR-binding peptide
  MOD_RES (2), (4), (38): Xaa is C or S
  MOD_RES (16), (17), (18), (19), (20): Xaa is A or G
  MOD_RES (21), (22), (23), (24): Xaa is A or G or is absent
HXGXSRVVMNVTAKKXXXXXXXXXIKRVQVPRLKTPAXTPKTVH

SEQ ID NO: 26665 - protein, 40 aa, Artificial Sequence
  Non-cyclic GFR-binding peptide
  MOD_RES (2), (34), (35): Xaa is C or S
GXGEVVMEVQVEKVVKDYEDVKAMKVSRLETPVXXAKPIS

SEQ ID NO: 26666 - protein, 31 aa, Artificial Sequence
  Non-cyclic GFR-binding peptide
  MOD_RES (31), (31): Xaa is C or S
EVVMDSMEGIVVKENEDMIQMTINSLETPVX

SEQ ID NO: 26667 - protein, 38 aa, Artificial Sequence
  Non-cyclic GFR-binding peptide
  MOD_RES (1), (38): Xaa is C or S
XALHDELTNSLQEFIPKKRVIEYYLVTLPELQVQTPRX

SEQ ID NO: 26668 - protein, 39 aa, Artificial Sequence
  Non-cyclic GFR-binding peptide
  MOD_RES (1), (34), (35): Xaa is C or S
  MOD_RES (12), (13), (14), (15), (16): Xaa is A or G
  MOD_RES (17), (18), (19), (20): Xaa is A or G or is absent
XSKVVMVQVEKXXXXXXXXXVKAIKVSRLDQPVXXPSAS

SEQ ID NO: 26669 - protein, 38 aa, Artificial Sequence
  Non-cyclic GFR-binding peptide
  MOD_RES (34), (35): Xaa is C or S
  MOD_RES (12), (13), (14), (15), (16): Xaa is A or G
  MOD_RES (17), (18), (19), (20): Xaa is A or G or is absent
SRVVMNVQVEKXXXXXXXXXVKAVKVSRLKTPAXXPKP

SEQ ID NO: 26670 - protein, 34 aa, Artificial Sequence
  Non-cyclic GFR-binding peptide
  MOD_RES (1), (33): Xaa is C or S
XSRVVMNVTAKKIVNSSDDIKRVQVPRLKTPAXT

SEQ ID NO: 26671 - protein, 37 aa, Artificial Sequence
  Non-cyclic GFR-binding peptide
  MOD_RES (31), (32): Xaa is C or S
RVVMNVTAKKIVNSSDDIKRVQVPRLQTPAXXPKPVT

SEQ ID NO: 26672 - protein, 42 aa, Artificial Sequence
  Non-cyclic GFR-binding peptide
  MOD_RES (2), (4), (38), (39): Xaa is C or S
  MOD_RES (16), (17), (18), (19), (20): Xaa is A or G
  MOD_RES (21), (22), (23), (24): Xaa is A or G or is absent
HXGXSRVVMNVTAKKXXXXXXXXXIKRVQVPRLKTPAXXPKP

SEQ ID NO: 26673 - protein, 42 aa, Artificial Sequence
  Non-cyclic GFR-binding peptide
  MOD_RES (2), (4), (38): Xaa is C or S
  MOD_RES (16), (17), (18), (19), (20): Xaa is A or G
  MOD_RES (21), (22), (23), (24): Xaa is A or G or is absent
HXGXSRVVMNVQVEKXXXXXXXXXVKAVKVSRLKTPAXTPKT

SEQ ID NO: 26674 - protein, 37 aa, Artificial Sequence
  Non-cyclic GFR-binding peptide
  MOD_RES (2), (4), (36), (37): Xaa is C or S
HXGXARVVMNSMEGIIVNSSDDMIQVTINSLQTPAXX

SEQ ID NO: 26675 - protein, 38 aa, Artificial Sequence
  Non-cyclic GFR-binding peptide
  MOD_RES (1), (38): Xaa is C or S
  MOD_RES (14), (15), (16), (17), (18): Xaa is A or G
  MOD_RES (19), (20), (21), (22): Xaa is A or G or is absent
XALHDELTNSLQEXXXXXXXXXYYVVPLPELQVQTPRX

SEQ ID NO: 26676 - protein, 44 aa, Artificial Sequence
  Non-cyclic GFR-binding peptide
  MOD_RES (2), (4), (38): Xaa is C or S
  MOD_RES (16), (17), (18), (19), (20): Xaa is A or G
  MOD_RES (21), (22), (23), (24): Xaa is A or G or is absent
RXEXKNHQLFNSLQEXXXXXXXXXYYLMTLPEEETPVXELGEDN

SEQ ID NO: 26677 - protein, 39 aa, Artificial Sequence
  Non-cyclic GFR-binding peptide
  MOD_RES (1), (3): Xaa is C or S
  MOD_RES (16), (17), (18), (19), (20): Xaa is A or G
  MOD_RES (21), (22), (23), (24): Xaa is A or G or is absent
XAXELHEELRNSLQEXXXXXXXXXYYVVPLPEHHVRSPQ

SEQ ID NO: 26678 - protein, 40 aa, Artificial Sequence
  Non-cyclic GFR-binding peptide
  MOD_RES (2), (4), (35), (36): Xaa is C or S
SXKXSKVIMVTAKKIKPTKGIIKRIQVPRLDQSVXXPSAS

SEQ ID NO: 26679 - protein, 36 aa, Artificial Sequence
  Non-cyclic GFR-binding peptide
  MOD_RES (34), (35): Xaa is C or S
  MOD_RES (12), (13), (14), (15), (16): Xaa is A or G
  MOD_RES (17), (18), (19), (20): Xaa is A or G or is absent
SRVVMNSMEGIXXXXXXXXXMIQVTINSLKTPAXXP

SEQ ID NO: 26680 - protein, 35 aa, Artificial Sequence
  Non-cyclic GFR-binding peptide
  MOD_RES (2), (4), (35): Xaa is C or S
SXKXSKVIMVQVEKIKPTKGIVKAIKVSRLDQSVX

SEQ ID NO: 26681 - protein, 37 aa, Artificial Sequence
  Non-cyclic GFR-binding peptide
  MOD_RES (2), (2): Xaa is C or S
AXELHEELRNSLQELKPKKRVYEYYVVPLPEHHVRSP

SEQ ID NO: 26682 - protein, 41 aa, Artificial Sequence
  Non-cyclic GFR-binding peptide
  MOD_RES (2), (4), (36), (37): Xaa is C or S
RXGXGEVVMEVTAKKVVKDYEDIKRMQVPRLETPVXXAKPI

SEQ ID NO: 26683 - protein, 39 aa, Artificial Sequence
  Non-cyclic GFR-binding peptide
  MOD_RES (2), (36): Xaa is C or S
  MOD_RES (14), (15), (16), (17), (18): Xaa is A or G
  MOD_RES (19), (20), (21), (22): Xaa is A or G or is absent
GXSRVVMNVQVEKXXXXXXXXXVKAVKVSRLKTPAXTPK

SEQ ID NO: 26684 - protein, 34 aa, Artificial Sequence
  Non-cyclic GFR-binding peptide
  MOD_RES (1), (33): Xaa is C or S
XSRVVMNVQVEKIVNSSDDVKAVKVSRLKTPAXT

SEQ ID NO: 26685 - protein, 37 aa, Artificial Sequence
  Non-cyclic GFR-binding peptide
  MOD_RES (32), (33): Xaa is C or S
ARVVMNVTAKKIVNSSDDIKRVQVPRLQTPAXXPKPV

SEQ ID NO: 26686 - protein, 34 aa, Artificial Sequence
  Non-cyclic GFR-binding peptide
  MOD_RES (2), (4): Xaa is C or S
SXKXSKVIMVTAKKIKPTKGIIKRIQVPRLDQSV

SEQ ID NO: 26687 - protein, 34 aa, Artificial Sequence
  Non-cyclic GFR-binding peptide
  MOD_RES (1), (34): Xaa is C or S
  MOD_RES (12), (13), (14), (15), (16): Xaa is A or G
  MOD_RES (17), (18), (19), (20): Xaa is A or G or is absent
XSRVIMSMEGIXXXXXXXXXMIQITINSLAQPVX

SEQ ID NO: 26688 - protein, 37 aa, Artificial Sequence
  Non-cyclic GFR-binding peptide
  MOD_RES (35), (35): Xaa is C or S
  MOD_RES (11), (12), (13), (14), (15): Xaa is A or G
  MOD_RES (16), (17), (18), (19): Xaa is A or G or is absent
HDELTNSLQEXXXXXXXXXYYVVPLPELQVQTPRXQV

SEQ ID NO: 26689 - protein, 39 aa, Artificial Sequence
  Non-cyclic GFR-binding peptide
  MOD_RES (35), (35): Xaa is C or S
HEELRNSLQELKPKKRVYEYYLVTLPEHHVRSPQXKVSS

SEQ ID NO: 26690 - protein, 39 aa, Artificial Sequence
  Non-cyclic GFR-binding peptide
  MOD_RES (33), (34): Xaa is C or S
  MOD_RES (11), (12), (13), (14), (15): Xaa is A or G
  MOD_RES (16), (17), (18), (19): Xaa is A or G or is absent
SKVIMSMEGIXXXXXXXXXMIQITINSLDQSVXXPSASA

SEQ ID NO: 26691 - protein, 39 aa, Artificial Sequence
  Non-cyclic GFR-binding peptide
  MOD_RES (1), (33), (34): Xaa is C or S
XGEVVMDVQVEKVVKENEDVKAMKVSRLETPVXXAKPIK

SEQ ID NO: 26692 - protein, 35 aa, Artificial Sequence
  Non-cyclic GFR-binding peptide
  MOD_RES (2), (2): Xaa is C or S
  MOD_RES (14), (15), (16), (17), (18): Xaa is A or G
  MOD_RES (19), (20), (21), (22): Xaa is A or G or is absent
GXGEVVMDSMEGIXXXXXXXXXMIQMTINSLETPV

SEQ ID NO: 26693 - protein, 34 aa, Artificial Sequence
  Non-cyclic GFR-binding peptide
  MOD_RES (1), (1): Xaa is C or S
  MOD_RES (13), (14), (15), (16), (17): Xaa is A or G
  MOD_RES (18), (19), (20), (21): Xaa is A or G or is absent
XGEVVMESMEGIXXXXXXXXXMIQMTINSLETPV

SEQ ID NO: 26694 - protein, 39 aa, Artificial Sequence
  Non-cyclic GFR-binding peptide
  MOD_RES (2), (36), (37): Xaa is C or S
  MOD_RES (14), (15), (16), (17), (18): Xaa is A or G
  MOD_RES (19), (20), (21), (22): Xaa is A or G or is absent
GXARVVMNVTAKKXXXXXXXXXIKRVQVPRLQTPAXXPK

SEQ ID NO: 26695 - protein, 39 aa, Artificial Sequence
  Non-cyclic GFR-binding peptide
  MOD_RES (2), (33), (34): Xaa is C or S
KXSRVIMVTAKKVKPKRGVIKRIQVPRLAQPVXXPAASA

SEQ ID NO: 26696 - protein, 34 aa, Artificial Sequence
  Non-cyclic GFR-binding peptide
  MOD_RES (2), (33), (34): Xaa is C or S
KXSRVIMSMEGIVKPKRGVMIQITINSLAQPVXX

SEQ ID NO: 26697 - protein, 37 aa, Artificial Sequence
  Non-cyclic GFR-binding peptide
  MOD_RES (31), (32): Xaa is C or S
SKVIMVTAKKIKPTKGIIKRIQVPRLDQSVXXPSASA

SEQ ID NO: 26698 - protein, 35 aa, Artificial Sequence
  Non-cyclic GFR-binding peptide
  MOD_RES (1), (34), (35): Xaa is C or S
  MOD_RES (12), (13), (14), (15), (16): Xaa is A or G
  MOD_RES (17), (18), (19), (20): Xaa is A or G or is absent
XSKVIMSMEGIXXXXXXXXXMIQITINSLDQSVXX

SEQ ID NO: 26699 - protein, 40 aa, Artificial Sequence
  Non-cyclic GFR-binding peptide
  MOD_RES (2), (4), (36), (37): Xaa is C or S
RXGXGEVVMEVQVEKVVKDYEDVKAMKVSRLETPVXXAKP

SEQ ID NO: 26700 - protein, 40 aa, Artificial Sequence
  Non-cyclic GFR-binding peptide
  MOD_RES (1), (3), (35), (36): Xaa is C or S
XGXSRVVMNSMEGIIVNSSDDMIQVTINSLKTPAXXPKPV

SEQ ID NO: 26701 - protein, 41 aa, Artificial Sequence
  Non-cyclic GFR-binding peptide
  MOD_RES (1), (35), (36): Xaa is C or S
  MOD_RES (13), (14), (15), (16), (17): Xaa is A or G
  MOD_RES (18), (19), (20), (21): Xaa is A or G or is absent
XGEVVMESMEGIXXXXXXXXXMIQMTINSLETPVXXAKPIS

SEQ ID NO: 26702 - protein, 37 aa, Artificial Sequence
  Non-cyclic GFR-binding peptide
  MOD_RES (1), (3), (35), (36): Xaa is C or S
XGXGEVVMEVQVEKVVKDYEDVKAMKVSRLETPVXXA

SEQ ID NO: 26703 - protein, 38 aa, Artificial Sequence
  Non-cyclic GFR-binding peptide
  MOD_RES (2), (4), (38): Xaa is C or S
  MOD_RES (16), (17), (18), (19), (20): Xaa is A or G
  MOD_RES (21), (22), (23), (24): Xaa is A or G or is absent
HXGXSRVVMNSMEGIXXXXXXXXXMIQVTINSLKTPAX

SEQ ID NO: 26704 - protein, 40 aa, Artificial Sequence
  Non-cyclic GFR-binding peptide
  MOD_RES (34), (34): Xaa is C or S
KNHQLFNSLQEHQGQHPKIRYYLMTLPEEETPVXELGEDN

SEQ ID NO: 26705 - protein, 37 aa, Artificial Sequence
  Non-cyclic GFR-binding peptide
  MOD_RES (1), (3), (36), (37): Xaa is C or S
  MOD_RES (14), (15), (16), (17), (18): Xaa is A or G
  MOD_RES (19), (20), (21), (22): Xaa is A or G or is absent
XKXSKVVMVTAKKXXXXXXXXXIKRIQVPRLDQPVXX

SEQ ID NO: 26706 - protein, 37 aa, Artificial Sequence
  Non-cyclic GFR-binding peptide
  MOD_RES (2), (4), (37): Xaa is C or S
  MOD_RES (15), (16), (17), (18), (19): Xaa is A or G
  MOD_RES (20), (21), (22), (23): Xaa is A or G or is absent
SXKXSRVIMSMEGIXXXXXXXXXMIQITINSLAQPVX

SEQ ID NO: 26707 - protein, 30 aa, Artificial Sequence
  Non-cyclic GFR-binding peptide
SKVVMVQVEKVKPTRGVVKAIKVSRLDQPV

SEQ ID NO: 26708 - protein, 36 aa, Artificial Sequence
  Non-cyclic GFR-binding peptide
  MOD_RES (1), (1): Xaa is C or S
  MOD_RES (14), (15), (16), (17), (18): Xaa is A or G
  MOD_RES (19), (20), (21), (22): Xaa is A or G or is absent
XELHEELRNSLQEXXXXXXXXXYYLVTLPEHHVRSP

SEQ ID NO: 26709 - protein, 38 aa, Artificial Sequence
  Non-cyclic GFR-binding peptide
  MOD_RES (32), (33): Xaa is C or S
ARVVMNVTAKKIVNSSDDIKRVQVPRLQTPAXXPKPVT

SEQ ID NO: 26710 - protein, 33 aa, Artificial Sequence
  Non-cyclic GFR-binding peptide
  MOD_RES (31), (31): Xaa is C or S
RVVMNVQVEKIVNSSDDVKAVKVSRLKTPAXTP

SEQ ID NO: 26711 - protein, 36 aa, Artificial Sequence
  Non-cyclic GFR-binding peptide
  MOD_RES (1), (3): Xaa is C or S
  MOD_RES (15), (16), (17), (18), (19): Xaa is A or G
  MOD_RES (20), (21), (22), (23): Xaa is A or G or is absent
XGXGEVVMEVTAKKXXXXXXXXXIKRMQVPRLETPV

SEQ ID NO: 26712 - protein, 40 aa, Artificial Sequence
  Non-cyclic GFR-binding peptide
  MOD_RES (34), (35): Xaa is C or S
  MOD_RES (12), (13), (14), (15), (16): Xaa is A or G
  MOD_RES (17), (18), (19), (20): Xaa is A or G or is absent
ARVVMNSMEGIXXXXXXXXXMIQVTINSLQTPAXXPKPVT

SEQ ID NO: 26713 - protein, 38 aa, Artificial Sequence
  Non-cyclic GFR-binding peptide
  MOD_RES (1), (3), (35), (36): Xaa is C or S
XGXGEVVMESMEGIVVKDYEDMIQMTINSLETPVXXAK

SEQ ID NO: 26714 - protein, 33 aa, Artificial Sequence
  Non-cyclic GFR-binding peptide
  MOD_RES (2), (33): Xaa is C or S
KXSRVIMSMEGIVKPKRGVMIQITINSLAQPVX

SEQ ID NO: 26715 - protein, 40 aa, Artificial Sequence
  Non-cyclic GFR-binding peptide
  MOD_RES (2), (4), (36), (37): Xaa is C or S
RXGXGEVVMDVTAKKVVKENEDIKRMQVPRLETPVXXAKP

SEQ ID NO: 26716 - protein, 39 aa, Artificial Sequence
  Non-cyclic GFR-binding peptide
  MOD_RES (2), (4), (35), (36): Xaa is C or S
SXKXSRVIMVTAKKVKPKRGVIKRIQVPRLAQPVXXPAA

SEQ ID NO: 26717 - protein, 39 aa, Artificial Sequence
  Non-cyclic GFR-binding peptide
  MOD_RES (1), (3): Xaa is C or S
XKXALHDELTNSLQEFIPKKRVIEYYLVTLPELQVQTPR

SEQ ID NO: 26718 - protein, 34 aa, Artificial Sequence
  Non-cyclic GFR-binding peptide
  MOD_RES (33), (34): Xaa is C or S
  MOD_RES (11), (12), (13), (14), (15): Xaa is A or G
  MOD_RES (16), (17), (18), (19): Xaa is A or G or is absent
SKVVMSMEGIXXXXXXXXXMIQITINSLDQPVXX

SEQ ID NO: 26719 - protein, 43 aa, Artificial Sequence
  Non-cyclic GFR-binding peptide
  MOD_RES (2), (4), (38): Xaa is C or S
RXEXKNHQLFNSLQEHQGQHPKIRYYLMTLPEEETPVXELGED

SEQ ID NO: 26720 - protein, 41 aa, Artificial Sequence
  Non-cyclic GFR-binding peptide
  MOD_RES (2), (4), (35), (36): Xaa is C or S
SXKXSKVIMSMEGIIKPTKGIMIQITINSLDQSVXXPSASA

SEQ ID NO: 26721 - protein, 36 aa, Artificial Sequence
  Non-cyclic GFR-binding peptide
  MOD_RES (2), (4), (35), (36): Xaa is C or S
SXKXSKVIMSMEGIIKPTKGIMIQITINSLDQSVXX

SEQ ID NO: 26722 - protein, 42 aa, Artificial Sequence
  Non-cyclic GFR-binding peptide
  MOD_RES (2), (36): Xaa is C or S
  MOD_RES (14), (15), (16), (17), (18): Xaa is A or G
  MOD_RES (19), (20), (21), (22): Xaa is A or G or is absent
GXSRVVMNSMEGIXXXXXXXXXMIQVTINSLKTPAXTPKTVH

SEQ ID NO: 26723 - protein, 36 aa, Artificial Sequence
  Non-cyclic GFR-binding peptide
  MOD_RES (13), (14), (15), (16), (17): Xaa is A or G
  MOD_RES (18), (19), (20), (21): Xaa is A or G or is absent
ELHEELRNSLQEXXXXXXXXXYYVVPLPEHHVRSPQ

SEQ ID NO: 26724 - protein, 44 aa, Artificial Sequence
  Non-cyclic GFR-binding peptide
  MOD_RES (2), (4), (41): Xaa is C or S
  MOD_RES (17), (18), (19), (20), (21): Xaa is A or G
  MOD_RES (22), (23), (24), (25): Xaa is A or G or is absent
EXKXALHDELTNSLQEXXXXXXXXXYYVVPLPELQVQTPRXQVN

SEQ ID NO: 26725 - protein, 42 aa, Artificial Sequence
  Non-cyclic GFR-binding peptide
  MOD_RES (2), (36), (37): Xaa is C or S
  MOD_RES (14), (15), (16), (17), (18): Xaa is A or G
  MOD_RES (19), (20), (21), (22): Xaa is A or G or is absent
GXSRVVMNSMEGIXXXXXXXXXMIQVTINSLKTPAXXPKPVY

SEQ ID NO: 26726 - protein, 37 aa, Artificial Sequence
  Non-cyclic GFR-binding peptide
  MOD_RES (2), (2): Xaa is C or S
  MOD_RES (15), (16), (17), (18), (19): Xaa is A or G
  MOD_RES (20), (21), (22), (23): Xaa is A or G or is absent
KXALHDELTNSLQEXXXXXXXXXYYLVTLPELQVQTP

SEQ ID NO: 26727 - protein, 38 aa, Artificial Sequence
  Non-cyclic GFR-binding peptide
  MOD_RES (37), (37): Xaa is C or S
ELHEELRNSLQELKPKKRVYEYYLVTLPEHHVRSPQXK

SEQ ID NO: 26728 - protein, 40 aa, Artificial Sequence
  Non-cyclic GFR-binding peptide
  MOD_RES (1), (3), (36), (37): Xaa is C or S
  MOD_RES (14), (15), (16), (17), (18): Xaa is A or G
  MOD_RES (19), (20), (21), (22): Xaa is A or G or is absent
XKXSRVIMVTAKKXXXXXXXXXIKRIQVPRLAQPVXXPAA

SEQ ID NO: 26729 - protein, 33 aa, Artificial Sequence
  Non-cyclic GFR-binding peptide
  MOD_RES (1), (33): Xaa is C or S
XGEVVMDVTAKKVVKENEDIKRMQVPRLETPVX

SEQ ID NO: 26730 - protein, 42 aa, Artificial Sequence
  Non-cyclic GFR-binding peptide
  MOD_RES (2), (39): Xaa is C or S
KXALHDELTNSLQEFIPKKRVIEYYVVPLPELQVQTPRXQVN

SEQ ID NO: 26731 - protein, 38 aa, Artificial Sequence
  Non-cyclic GFR-binding peptide
  MOD_RES (1), (3), (37), (38): Xaa is C or S
  MOD_RES (15), (16), (17), (18), (19): Xaa is A or G
  MOD_RES (20), (21), (22), (23): Xaa is A or G or is absent
XGXSRVVMNSMEGIXXXXXXXXXMIQVTINSLKTPAXX

SEQ ID NO: 26732 - protein, 34 aa, Artificial Sequence
  Non-cyclic GFR-binding peptide
  MOD_RES (34), (34): Xaa is C or S
  MOD_RES (12), (13), (14), (15), (16): Xaa is A or G
  MOD_RES (17), (18), (19), (20): Xaa is A or G or is absent
GEVVMDVTAKKXXXXXXXXXIKRMQVPRLETPVX

SEQ ID NO: 26733 - protein, 41 aa, Artificial Sequence
  Non-cyclic GFR-binding peptide
  MOD_RES (1), (3), (37), (38): Xaa is C or S
  MOD_RES (15), (16), (17), (18), (19): Xaa is A or G
  MOD_RES (20), (21), (22), (23): Xaa is A or G or is absent
XGXGEVVMEVTAKKXXXXXXXXXIKRMQVPRLETPVXXAKP

SEQ ID NO: 26734 - protein, 36 aa, Artificial Sequence
  Non-cyclic GFR-binding peptide
  MOD_RES (1), (35), (36): Xaa is C or S
  MOD_RES (13), (14), (15), (16), (17): Xaa is A or G
  MOD_RES (18), (19), (20), (21): Xaa is A or G or is absent
XSRVVMNVTAKKXXXXXXXXXIKRVQVPRLKTPAXX

SEQ ID NO: 26735 - protein, 35 aa, Artificial Sequence
  Non-cyclic GFR-binding peptide
  MOD_RES (12), (13), (14), (15), (16): Xaa is A or G
  MOD_RES (17), (18), (19), (20): Xaa is A or G or is absent
LHEELRNSLQEXXXXXXXXXYYLVTLPEHHVRSPQ

SEQ ID NO: 26736 - protein, 36 aa, Artificial Sequence
  Non-cyclic GFR-binding peptide
  MOD_RES (2), (4), (36): Xaa is C or S
HXGXSRVVMNVTAKKIVNSSDDIKRVQVPRLKTPAX

SEQ ID NO: 26737 - protein, 38 aa, Artificial Sequence
  Non-cyclic GFR-binding peptide
  MOD_RES (1), (34), (35): Xaa is C or S
  MOD_RES (12), (13), (14), (15), (16): Xaa is A or G
  MOD_RES (17), (18), (19), (20): Xaa is A or G or is absent
XSKVVMVTAKKXXXXXXXXXIKRIQVPRLDQPVXXPSA

SEQ ID NO: 26738 - protein, 35 aa, Artificial Sequence
  Non-cyclic GFR-binding peptide
  MOD_RES (2), (2): Xaa is C or S
  MOD_RES (14), (15), (16), (17), (18): Xaa is A or G
  MOD_RES (19), (20), (21), (22): Xaa is A or G or is absent
GXARVVMNVQVEKXXXXXXXXXVKAVKVSRLQTPA

SEQ ID NO: 26739 - protein, 33 aa, Artificial Sequence
  Non-cyclic GFR-binding peptide
  MOD_RES (12), (13), (14), (15), (16): Xaa is A or G
  MOD_RES (17), (18), (19), (20): Xaa is A or G or is absent
GEVVMESMEGIXXXXXXXXXMIQMTINSLETPV

SEQ ID NO: 26740 - protein, 35 aa, Artificial Sequence
  Non-cyclic GFR-binding peptide
  MOD_RES (2), (35): Xaa is C or S
  MOD_RES (13), (14), (15), (16), (17): Xaa is A or G
  MOD_RES (18), (19), (20), (21): Xaa is A or G or is absent
KXSKVIMVQVEKXXXXXXXXXVKAIKVSRLDQSVX

SEQ ID NO: 26741 - protein, 39 aa, Artificial Sequence
  Non-cyclic GFR-binding peptide
  MOD_RES (33), (33): Xaa is C or S
  MOD_RES (11), (12), (13), (14), (15): Xaa is A or G
  MOD_RES (16), (17), (18), (19): Xaa is A or G or is absent
RVVMNVTAKKXXXXXXXXXIKRVQVPRLKTPAXTPKTVH

SEQ ID NO: 26742 - protein, 39 aa, Artificial Sequence
  Non-cyclic GFR-binding peptide
  MOD_RES (33), (33): Xaa is C or S
  MOD_RES (11), (12), (13), (14), (15): Xaa is A or G
  MOD_RES (16), (17), (18), (19): Xaa is A or G or is absent
RVVMNVQVEKXXXXXXXXXVKAVKVSRLKTPAXTPKTVH

SEQ ID NO: 26743 - protein, 36 aa, Artificial Sequence
  Non-cyclic GFR-binding peptide
  MOD_RES (2), (36): Xaa is C or S
  MOD_RES (14), (15), (16), (17), (18): Xaa is A or G
  MOD_RES (19), (20), (21), (22): Xaa is A or G or is absent
EXKNHQLFNSLQEXXXXXXXXXYYVMPLPEEETPVX

SEQ ID NO: 26744 - protein, 38 aa, Artificial Sequence
  Non-cyclic GFR-binding peptide
  MOD_RES (36), (36): Xaa is C or S
  MOD_RES (12), (13), (14), (15), (16): Xaa is A or G
  MOD_RES (17), (18), (19), (20): Xaa is A or G or is absent
LHDELTNSLQEXXXXXXXXXYYLVTLPELQVQTPRXQV

SEQ ID NO: 26745 - protein, 35 aa, Artificial Sequence
  Non-cyclic GFR-binding peptide
  MOD_RES (32), (33): Xaa is C or S
GEVVMDVTAKKVVKENEDIKRMQVPRLETPVXXAK

SEQ ID NO: 26746 - protein, 40 aa, Artificial Sequence
  Non-cyclic GFR-binding peptide
  MOD_RES (34), (34): Xaa is C or S
  MOD_RES (12), (13), (14), (15), (16): Xaa is A or G
  MOD_RES (17), (18), (19), (20): Xaa is A or G or is absent
KNHQLFNSLQEXXXXXXXXXYYLMTLPEEETPVXELGEDN

SEQ ID NO: 26747 - protein, 41 aa, Artificial Sequence
  Non-cyclic GFR-binding peptide
  MOD_RES (1), (38): Xaa is C or S
XALHDELTNSLQEFIPKKRVIEYYLVTLPELQVQTPRXQVN

SEQ ID NO: 26748 - protein, 38 aa, Artificial Sequence
  Non-cyclic GFR-binding peptide
  MOD_RES (1), (33), (34): Xaa is C or S
XARVVMNVTAKKIVNSSDDIKRVQVPRLQTPAXXPKPV

SEQ ID NO: 26749 - protein, 33 aa, Artificial Sequence
  Non-cyclic GFR-binding peptide
  MOD_RES (2), (2): Xaa is C or S
GXGEVVMDSMEGIVVKENEDMIQMTINSLETPV

SEQ ID NO: 26750 - protein, 41 aa, Artificial Sequence
  Non-cyclic GFR-binding peptide
  MOD_RES (2), (36), (37): Xaa is C or S
  MOD_RES (14), (15), (16), (17), (18): Xaa is A or G
  MOD_RES (19), (20), (21), (22): Xaa is A or G or is absent
GXGEVVMDVTAKKXXXXXXXXXIKRMQVPRLETPVXXAKPI

SEQ ID NO: 26751 - protein, 36 aa, Artificial Sequence
  Non-cyclic GFR-binding peptide
  MOD_RES (1), (3): Xaa is C or S
XEXKNHQLFNSLQEHQGQHPKIRYYVMPLPEEETPV

SEQ ID NO: 26752 - protein, 40 aa, Artificial Sequence
  Non-cyclic GFR-binding peptide
  MOD_RES (1), (34), (35): Xaa is C or S
  MOD_RES (12), (13), (14), (15), (16): Xaa is A or G
  MOD_RES (17), (18), (19), (20): Xaa is A or G or is absent
XSRVIMSMEGIXXXXXXXXXMIQITINSLAQPVXXPAASA

SEQ ID NO: 26753 - protein, 38 aa, Artificial Sequence
  Non-cyclic GFR-binding peptide
  MOD_RES (35), (35): Xaa is C or S
HEELRNSLQELKPKKRVYEYYLVTLPEHHVRSPQXKVS

SEQ ID NO: 26754 - protein, 36 aa, Artificial Sequence
  Non-cyclic GFR-binding peptide
  MOD_RES (1), (3), (35): Xaa is C or S
XGXSRVVMNVTAKKIVNSSDDIKRVQVPRLKTPAXT

SEQ ID NO: 26755 - protein, 37 aa, Artificial Sequence
  Non-cyclic GFR-binding peptide
  MOD_RES (1), (32), (33): Xaa is C or S
XSRVIMSMEGIVKPKRGVMIQITINSLAQPVXXPAAS

SEQ ID NO: 26756 - protein, 37 aa, Artificial Sequence
  Non-cyclic GFR-binding peptide
  MOD_RES (34), (35): Xaa is C or S
  MOD_RES (12), (13), (14), (15), (16): Xaa is A or G
  MOD_RES (17), (18), (19), (20): Xaa is A or G or is absent
GEVVMEVTAKKXXXXXXXXXIKRMQVPRLETPVXXAK

SEQ ID NO: 26757 - protein, 40 aa, Artificial Sequence
  Non-cyclic GFR-binding peptide
  MOD_RES (1), (3), (36), (37): Xaa is C or S
  MOD_RES (14), (15), (16), (17), (18): Xaa is A or G
  MOD_RES (19), (20), (21), (22): Xaa is A or G or is absent
XKXSKVIMVTAKKXXXXXXXXXIKRIQVPRLDQSVXXPSA

SEQ ID NO: 26758 - protein, 38 aa, Artificial Sequence
  Non-cyclic GFR-binding peptide
  MOD_RES (35), (35): Xaa is C or S
HEELRNSLQELKPKKRVYEYYVVPLPEHHVRSPQXKVS

SEQ ID NO: 26759 - protein, 40 aa, Artificial Sequence
  Non-cyclic GFR-binding peptide
  MOD_RES (2), (34), (35): Xaa is C or S
GXARVVMNVQVEKIVNSSDDVKAVKVSRLQTPAXXPKPVT

SEQ ID NO: 26760 - protein, 37 aa, Artificial Sequence
  Non-cyclic GFR-binding peptide
  MOD_RES (1), (3), (37): Xaa is C or S
  MOD_RES (15), (16), (17), (18), (19): Xaa is A or G
  MOD_RES (20), (21), (22), (23): Xaa is A or G or is absent
XEXKNHQLFNSLQEXXXXXXXXXYYVMPLPEEETPVX

SEQ ID NO: 26761 - protein, 36 aa, Artificial Sequence
  Non-cyclic GFR-binding peptide
  MOD_RES (2), (35), (36): Xaa is C or S
  MOD_RES (13), (14), (15), (16), (17): Xaa is A or G
  MOD_RES (18), (19), (20), (21): Xaa is A or G or is absent
KXSKVVMVQVEKXXXXXXXXXVKAIKVSRLDQPVXX

SEQ ID NO: 26762 - protein, 33 aa, Artificial Sequence
  Non-cyclic GFR-binding peptide
  MOD_RES (2), (33): Xaa is C or S
KXSRVIMVQVEKVKPKRGVVKAIKVSRLAQPVX

SEQ ID NO: 26763 - protein, 40 aa, Artificial Sequence
  Non-cyclic GFR-binding peptide
  MOD_RES (37), (37): Xaa is C or S
  MOD_RES (13), (14), (15), (16), (17): Xaa is A or G
  MOD_RES (18), (19), (20), (21): Xaa is A or G or is absent
ALHDELTNSLQEXXXXXXXXXYYLVTLPELQVQTPRXQVN

SEQ ID NO: 26764 - protein, 38 aa, Artificial Sequence
  Non-cyclic GFR-binding peptide
  MOD_RES (2), (4), (36), (37): Xaa is C or S
HXGXSRVVMNVQVEKIVNSSDDVKAVKVSRLKTPAXXP

SEQ ID NO: 26765 - protein, 39 aa, Artificial Sequence
  Non-cyclic GFR-binding peptide
  MOD_RES (35), (35): Xaa is C or S
  MOD_RES (11), (12), (13), (14), (15): Xaa is A or G
  MOD_RES (16), (17), (18), (19): Xaa is A or G or is absent
HEELRNSLQEXXXXXXXXXYYVVPLPEHHVRSPQXKVSS

SEQ ID NO: 26766 - protein, 34 aa, Artificial Sequence
  Non-cyclic GFR-binding peptide
  MOD_RES (33), (34): Xaa is C or S
  MOD_RES (11), (12), (13), (14), (15): Xaa is A or G
  MOD_RES (16), (17), (18), (19): Xaa is A or G or is absent
EVVMDVTAKKXXXXXXXXXIKRMQVPRLETPVXX

SEQ ID NO: 26767 - protein, 40 aa, Artificial Sequence
  Non-cyclic GFR-binding peptide
  MOD_RES (1), (3), (34), (35): Xaa is C or S
XKXSRVIMVQVEKVKPKRGVVKAIKVSRLAQPVXXPAASA

SEQ ID NO: 26768 - protein, 36 aa, Artificial Sequence
  Non-cyclic GFR-binding peptide
  MOD_RES (13), (14), (15), (16), (17): Xaa is A or G
  MOD_RES (18), (19), (20), (21): Xaa is A or G or is absent
ALHDELTNSLQEXXXXXXXXXYYVVPLPELQVQTPR

SEQ ID NO: 26769 - protein, 38 aa, Artificial Sequence
  Non-cyclic GFR-binding peptide
  MOD_RES (2), (4): Xaa is C or S
  MOD_RES (17), (18), (19), (20), (21): Xaa is A or G
  MOD_RES (22), (23), (24), (25): Xaa is A or G or is absent
EXKXALHDELTNSLQEXXXXXXXXXYYVVPLPELQVQT

SEQ ID NO: 26770 - protein, 41 aa, Artificial Sequence
  Non-cyclic GFR-binding peptide
  MOD_RES (37), (37): Xaa is C or S
ALHDELTNSLQEFIPKKRVIEYYLVTLPELQVQTPRXQVNR

SEQ ID NO: 26771 - protein, 37 aa, Artificial Sequence
  Non-cyclic GFR-binding peptide
  MOD_RES (33), (34): Xaa is C or S
  MOD_RES (11), (12), (13), (14), (15): Xaa is A or G
  MOD_RES (16), (17), (18), (19): Xaa is A or G or is absent
SRVIMVQVEKXXXXXXXXXVKAIKVSRLAQPVXXPAA

SEQ ID NO: 26772 - protein, 32 aa, Artificial Sequence
  Non-cyclic GFR-binding peptide
  MOD_RES (31), (32): Xaa is C or S
SKVVMVTAKKVKPTRGVIKRIQVPRLDQPVXX

SEQ ID NO: 26773 - protein, 36 aa, Artificial Sequence
  Non-cyclic GFR-binding peptide
  MOD_RES (1), (34), (35): Xaa is C or S
  MOD_RES (12), (13), (14), (15), (16): Xaa is A or G
  MOD_RES (17), (18), (19), (20): Xaa is A or G or is absent
XSKVIMVTAKKXXXXXXXXXIKRIQVPRLDQSVXXP

SEQ ID NO: 26774 - protein, 31 aa, Artificial Sequence
  Non-cyclic GFR-binding peptide
  MOD_RES (31), (31): Xaa is C or S
SKVVMVTAKKVKPTRGVIKRIQVPRLDQPVX

SEQ ID NO: 26775 - protein, 36 aa, Artificial Sequence
  Non-cyclic GFR-binding peptide
  MOD_RES (1), (33), (34): Xaa is C or S
XGEVVMEVQVEKVVKDYEDVKAMKVSRLETPVXXAK

SEQ ID NO: 26776 - protein, 42 aa, Artificial Sequence
  Non-cyclic GFR-binding peptide
  MOD_RES (2), (4), (38), (39): Xaa is C or S
  MOD_RES (16), (17), (18), (19), (20): Xaa is A or G
  MOD_RES (21), (22), (23), (24): Xaa is A or G or is absent
RXGXGEVVMDVTAKKXXXXXXXXXIKRMQVPRLETPVXXAKP

SEQ ID NO: 26777 - protein, 38 aa, Artificial Sequence
  Non-cyclic GFR-binding peptide
  MOD_RES (34), (35): Xaa is C or S
  MOD_RES (12), (13), (14), (15), (16): Xaa is A or G
  MOD_RES (17), (18), (19), (20): Xaa is A or G or is absent
SRVVMNVTAKKXXXXXXXXXIKRVQVPRLKTPAXXPKP

SEQ ID NO: 26778 - protein, 37 aa, Artificial Sequence
  Non-cyclic GFR-binding peptide
  MOD_RES (2), (34), (35): Xaa is C or S
GXARVVMNVTAKKIVNSSDDIKRVQVPRLQTPAXXPK

SEQ ID NO: 26779 - protein, 36 aa, Artificial Sequence
  Non-cyclic GFR-binding peptide
  MOD_RES (1), (3): Xaa is C or S
  MOD_RES (15), (16), (17), (18), (19): Xaa is A or G
  MOD_RES (20), (21), (22), (23): Xaa is A or G or is absent
XGXSRVVMNSMEGIXXXXXXXXXMIQVTINSLKTPA

SEQ ID NO: 26780 - protein, 41 aa, Artificial Sequence
  Non-cyclic GFR-binding peptide
  MOD_RES (2), (35), (36): Xaa is C or S
  MOD_RES (13), (14), (15), (16), (17): Xaa is A or G
  MOD_RES (18), (19), (20), (21): Xaa is A or G or is absent
KXSKVIMVTAKKXXXXXXXXXIKRIQVPRLDQSVXXPSASA

SEQ ID NO: 26781 - protein, 41 aa, Artificial Sequence
  Non-cyclic GFR-binding peptide
  MOD_RES (1), (3), (35): Xaa is C or S
XGXSRVVMNSMEGIIVNSSDDMIQVTINSLKTPAXTPKTVH

SEQ ID NO: 26782 - protein, 37 aa, Artificial Sequence
  Non-cyclic GFR-binding peptide
  MOD_RES (1), (3), (35), (36): Xaa is C or S
XGXGEVVMDVQVEKVVKENEDVKAMKVSRLETPVXXA

SEQ ID NO: 26783 - protein, 34 aa, Artificial Sequence
  Non-cyclic GFR-binding peptide
  MOD_RES (1), (3): Xaa is C or S
XGXARVVMNVTAKKIVNSSDDIKRVQVPRLQTPA

SEQ ID NO: 26784 - protein, 36 aa, Artificial Sequence
  Non-cyclic GFR-binding peptide
  MOD_RES (2), (33), (34): Xaa is C or S
KXSKVVMSMEGIVKPTRGVMIQITINSLDQPVXXPS

SEQ ID NO: 26785 - protein, 38 aa, Artificial Sequence
  Non-cyclic GFR-binding peptide
  MOD_RES (37), (37): Xaa is C or S
  MOD_RES (13), (14), (15), (16), (17): Xaa is A or G
  MOD_RES (18), (19), (20), (21): Xaa is A or G or is absent
ALHDELTNSLQEXXXXXXXXXYYLVTLPELQVQTPRXQ

SEQ ID NO: 26786 - protein, 40 aa, Artificial Sequence
  Non-cyclic GFR-binding peptide
  MOD_RES (1), (3), (37): Xaa is C or S
  MOD_RES (15), (16), (17), (18), (19): Xaa is A or G
  MOD_RES (20), (21), (22), (23): Xaa is A or G or is absent
XEXKNHQLFNSLQEXXXXXXXXXYYVMPLPEEETPVXELG

SEQ ID NO: 26787 - protein, 41 aa, Artificial Sequence
  Non-cyclic GFR-binding peptide
  MOD_RES (1), (3), (37), (38): Xaa is C or S
  MOD_RES (15), (16), (17), (18), (19): Xaa is A or G
  MOD_RES (20), (21), (22), (23): Xaa is A or G or is absent
XGXARVVMNVTAKKXXXXXXXXXIKRVQVPRLQTPAXXPKP

SEQ ID NO: 26788 - protein, 41 aa, Artificial Sequence
  Non-cyclic GFR-binding peptide
  MOD_RES (1), (3), (37), (38): Xaa is C or S
  MOD_RES (15), (16), (17), (18), (19): Xaa is A or G
  MOD_RES (20), (21), (22), (23): Xaa is A or G or is absent
XGXGEVVMEVQVEKXXXXXXXXXVKAMKVSRLETPVXXAKP

SEQ ID NO: 26789 - protein, 39 aa, Artificial Sequence
  Non-cyclic GFR-binding peptide
  MOD_RES (2), (4): Xaa is C or S
AXAXELHEELRNSLQELKPKKRVYEYYLVTLPEHHVRSP

SEQ ID NO: 26790 - protein, 33 aa, Artificial Sequence
  Non-cyclic GFR-binding peptide
  MOD_RES (33), (33): Xaa is C or S
  MOD_RES (11), (12), (13), (14), (15): Xaa is A or G
  MOD_RES (16), (17), (18), (19): Xaa is A or G or is absent
SRVIMVQVEKXXXXXXXXXVKAIKVSRLAQPVX

SEQ ID NO: 26791 - protein, 40 aa, Artificial Sequence
  Non-cyclic GFR-binding peptide
  MOD_RES (37), (37): Xaa is C or S
  MOD_RES (13), (14), (15), (16), (17): Xaa is A or G
  MOD_RES (18), (19), (20), (21): Xaa is A or G or is absent
ALHDELTNSLQEXXXXXXXXXYYVVPLPELQVQTPRXQVN

SEQ ID NO: 26792 - protein, 37 aa, Artificial Sequence
  Non-cyclic GFR-binding peptide
  MOD_RES (1), (3), (37): Xaa is C or S
  MOD_RES (15), (16), (17), (18), (19): Xaa is A or G
  MOD_RES (20), (21), (22), (23): Xaa is A or G or is absent
XGXGEVVMDVTAKKXXXXXXXXXIKRMQVPRLETPVX

SEQ ID NO: 26793 - protein, 35 aa, Artificial Sequence
  Non-cyclic GFR-binding peptide
  MOD_RES (32), (33): Xaa is C or S
ARVVMNSMEGIIVNSSDDMIQVTINSLQTPAXXPK

SEQ ID NO: 26794 - protein, 37 aa, Artificial Sequence
  Non-cyclic GFR-binding peptide
  MOD_RES (1), (3), (36), (37): Xaa is C or S
  MOD_RES (14), (15), (16), (17), (18): Xaa is A or G
  MOD_RES (19), (20), (21), (22): Xaa is A or G or is absent
XKXSKVVMVQVEKXXXXXXXXXVKAIKVSRLDQPVXX

SEQ ID NO: 26795 - protein, 32 aa, Artificial Sequence
  Non-cyclic GFR-binding peptide
  MOD_RES (11), (12), (13), (14), (15): Xaa is A or G
  MOD_RES (16), (17), (18), (19): Xaa is A or G or is absent
SKVVMSMEGIXXXXXXXXXMIQITINSLDQPV

SEQ ID NO: 26796 - protein, 38 aa, Artificial Sequence
  Non-cyclic GFR-binding peptide
  MOD_RES (1), (3), (36), (37): Xaa is C or S
  MOD_RES (14), (15), (16), (17), (18): Xaa is A or G
  MOD_RES (19), (20), (21), (22): Xaa is A or G or is absent
XKXSKVIMVTAKKXXXXXXXXXIKRIQVPRLDQSVXXP

SEQ ID NO: 26797 - protein, 37 aa, Artificial Sequence
  Non-cyclic GFR-binding peptide
  MOD_RES (1), (34), (35): Xaa is C or S
  MOD_RES (12), (13), (14), (15), (16): Xaa is A or G
  MOD_RES (17), (18), (19), (20): Xaa is A or G or is absent
XSKVVMVQVEKXXXXXXXXXVKAIKVSRLDQPVXXPS

SEQ ID NO: 26798 - protein, 40 aa, Artificial Sequence
  Non-cyclic GFR-binding peptide
  MOD_RES (1), (34), (35): Xaa is C or S
  MOD_RES (12), (13), (14), (15), (16): Xaa is A or G
  MOD_RES (17), (18), (19), (20): Xaa is A or G or is absent
XSKVIMSMEGIXXXXXXXXXMIQITINSLDQSVXXPSASA

SEQ ID NO: 26799 - protein, 40 aa, Artificial Sequence
  Non-cyclic GFR-binding peptide
  MOD_RES (1), (35), (36): Xaa is C or S
  MOD_RES (13), (14), (15), (16), (17): Xaa is A or G
  MOD_RES (18), (19), (20), (21): Xaa is A or G or is absent
XSRVVMNVQVEKXXXXXXXXXVKAVKVSRLKTPAXXPKPV

SEQ ID NO: 26800 - protein, 37 aa, Artificial Sequence
  Non-cyclic GFR-binding peptide
  MOD_RES (31), (32): Xaa is C or S
RVVMNVTAKKIVNSSDDIKRVQVPRLKTPAXXPKPVY

SEQ ID NO: 26801 - protein, 39 aa, Artificial Sequence
  Non-cyclic GFR-binding peptide
  MOD_RES (2), (35), (36): Xaa is C or S
  MOD_RES (13), (14), (15), (16), (17): Xaa is A or G
  MOD_RES (18), (19), (20), (21): Xaa is A or G or is absent
KXSKVVMSMEGIXXXXXXXXXMIQITINSLDQPVXXPSA

SEQ ID NO: 26802 - protein, 34 aa, Artificial Sequence
  Non-cyclic GFR-binding peptide
  MOD_RES (2), (2): Xaa is C or S
  MOD_RES (13), (14), (15), (16), (17): Xaa is A or G
  MOD_RES (18), (19), (20), (21): Xaa is A or G or is absent
KXSKVIMVQVEKXXXXXXXXXVKAIKVSRLDQSV

SEQ ID NO: 26803 - protein, 40 aa, Artificial Sequence
  Non-cyclic GFR-binding peptide
  MOD_RES (2), (4), (35), (36): Xaa is C or S
SXKXSRVIMVTAKKVKPKRGVIKRIQVPRLAQPVXXPAAS

SEQ ID NO: 26804 - protein, 40 aa, Artificial Sequence
  Non-cyclic GFR-binding peptide
  MOD_RES (2), (4): Xaa is C or S
AXAXELHEELRNSLQELKPKKRVYEYYLVTLPEHHVRSPQ

SEQ ID NO: 26805 - protein, 37 aa, Artificial Sequence
  Non-cyclic GFR-binding peptide
  MOD_RES (2), (34): Xaa is C or S
GXSRVVMNSMEGIIVNSSDDMIQVTINSLKTPAXTPK

SEQ ID NO: 26806 - protein, 42 aa, Artificial Sequence
  Non-cyclic GFR-binding peptide
  MOD_RES (2), (39): Xaa is C or S
  MOD_RES (15), (16), (17), (18), (19): Xaa is A or G
  MOD_RES (20), (21), (22), (23): Xaa is A or G or is absent
KXALHDELTNSLQEXXXXXXXXXYYVVPLPELQVQTPRXQVN

SEQ ID NO: 26807 - protein, 41 aa, Artificial Sequence
  Non-cyclic GFR-binding peptide
  MOD_RES (2), (4), (35), (36): Xaa is C or S
SXKXSKVIMVQVEKIKPTKGIVKAIKVSRLDQSVXXPSASA

SEQ ID NO: 26808 - protein, 33 aa, Artificial Sequence
  Non-cyclic GFR-binding peptide
  MOD_RES (12), (13), (14), (15), (16): Xaa is A or G
  MOD_RES (17), (18), (19), (20): Xaa is A or G or is absent
KNHQLFNSLQEXXXXXXXXXYYLMTLPEEETPV

SEQ ID NO: 26809 - protein, 37 aa, Artificial Sequence
  Non-cyclic GFR-binding peptide
  MOD_RES (33), (34): Xaa is C or S
  MOD_RES (11), (12), (13), (14), (15): Xaa is A or G
  MOD_RES (16), (17), (18), (19): Xaa is A or G or is absent
RVVMNSMEGIXXXXXXXXXMIQVTINSLKTPAXXPKP

SEQ ID NO: 26810 - protein, 40 aa, Artificial Sequence
  Non-cyclic GFR-binding peptide
  MOD_RES (2), (4), (38): Xaa is C or S
RXEXKNHQLFNSLQEHQGQHPKIRYYLMTLPEEETPVXEL

SEQ ID NO: 26811 - protein, 38 aa, Artificial Sequence
  Non-cyclic GFR-binding peptide
  MOD_RES (33), (34): Xaa is C or S
  MOD_RES (11), (12), (13), (14), (15): Xaa is A or G
  MOD_RES (16), (17), (18), (19): Xaa is A or G or is absent
RVVMNVTAKKXXXXXXXXXIKRVQVPRLKTPAXXPKPV

SEQ ID NO: 26812 - protein, 41 aa, Artificial Sequence
  Non-cyclic GFR-binding peptide
  MOD_RES (1), (3), (37), (38): Xaa is C or S
  MOD_RES (15), (16), (17), (18), (19): Xaa is A or G
  MOD_RES (20), (21), (22), (23): Xaa is A or G or is absent
XGXARVVMNSMEGIXXXXXXXXXMIQVTINSLQTPAXXPKP

SEQ ID NO: 26813 - protein, 31 aa, Artificial Sequence
  Non-cyclic GFR-binding peptide
  MOD_RES (1), (1): Xaa is C or S
XSKVIMVTAKKIKPTKGIIKRIQVPRLDQSV

SEQ ID NO: 26814 - protein, 37 aa, Artificial Sequence
  Non-cyclic GFR-binding peptide
  MOD_RES (1), (35), (36): Xaa is C or S
  MOD_RES (13), (14), (15), (16), (17): Xaa is A or G
  MOD_RES (18), (19), (20), (21): Xaa is A or G or is absent
XGEVVMESMEGIXXXXXXXXXMIQMTINSLETPVXXA

SEQ ID NO: 26815 - protein, 30 aa, Artificial Sequence
  Non-cyclic GFR-binding peptide
SKVIMVTAKKIKPTKGIIKRIQVPRLDQSV

SEQ ID NO: 26816 - protein, 39 aa, Artificial Sequence
  Non-cyclic GFR-binding peptide
  MOD_RES (1), (3), (36), (37): Xaa is C or S
  MOD_RES (14), (15), (16), (17), (18): Xaa is A or G
  MOD_RES (19), (20), (21), (22): Xaa is A or G or is absent
XKXSRVIMVQVEKXXXXXXXXXVKAIKVSRLAQPVXXPA

SEQ ID NO: 26817 - protein, 33 aa, Artificial Sequence
  Non-cyclic GFR-binding peptide
  MOD_RES (32), (33): Xaa is C or S
GEVVMEVTAKKVVKDYEDIKRMQVPRLETPVXX

SEQ ID NO: 26818 - protein, 38 aa, Artificial Sequence
  Non-cyclic GFR-binding peptide
  MOD_RES (1), (35): Xaa is C or S
XKNHQLFNSLQEHQGQHPKIRYYVMPLPEEETPVXELG

SEQ ID NO: 26819 - protein, 33 aa, Artificial Sequence
  Non-cyclic GFR-binding peptide
  MOD_RES (1), (33): Xaa is C or S
XGEVVMDSMEGIVVKENEDMIQMTINSLETPVX

SEQ ID NO: 26820 - protein, 39 aa, Artificial Sequence
  Non-cyclic GFR-binding peptide
  MOD_RES (1), (33), (34): Xaa is C or S
XARVVMNVTAKKIVNSSDDIKRVQVPRLQTPAXXPKPVT

SEQ ID NO: 26821 - protein, 42 aa, Artificial Sequence
  Non-cyclic GFR-binding peptide
  MOD_RES (2), (4), (36), (37): Xaa is C or S
RXGXGEVVMESMEGIVVKDYEDMIQMTINSLETPVXXAKPIS

SEQ ID NO: 26822 - protein, 37 aa, Artificial Sequence
  Non-cyclic GFR-binding peptide
  MOD_RES (31), (32): Xaa is C or S
RVVMNVQVEKIVNSSDDVKAVKVSRLQTPAXXPKPVT

SEQ ID NO: 26823 - protein, 40 aa, Artificial Sequence
  Non-cyclic GFR-binding peptide
  MOD_RES (1), (35), (36): Xaa is C or S
  MOD_RES (13), (14), (15), (16), (17): Xaa is A or G
  MOD_RES (18), (19), (20), (21): Xaa is A or G or is absent
XARVVMNSMEGIXXXXXXXXXMIQVTINSLQTPAXXPKPV

SEQ ID NO: 26824 - protein, 34 aa, Artificial Sequence
  Non-cyclic GFR-binding peptide
  MOD_RES (31), (32): Xaa is C or S
SKVVMVTAKKVKPTRGVIKRIQVPRLDQPVXXPS

SEQ ID NO: 26825 - protein, 41 aa, Artificial Sequence
  Non-cyclic GFR-binding peptide
  MOD_RES (37), (37): Xaa is C or S
ALHDELTNSLQEFIPKKRVIEYYVVPLPELQVQTPRXQVNR

SEQ ID NO: 26826 - protein, 39 aa, Artificial Sequence
  Non-cyclic GFR-binding peptide
  MOD_RES (1), (3), (36), (37): Xaa is C or S
  MOD_RES (14), (15), (16), (17), (18): Xaa is A or G
  MOD_RES (19), (20), (21), (22): Xaa is A or G or is absent
XKXSKVIMVQVEKXXXXXXXXXVKAIKVSRLDQSVXXPS

SEQ ID NO: 26827 - protein, 32 aa, Artificial Sequence
  Non-cyclic GFR-binding peptide
  MOD_RES (1), (1): Xaa is C or S
XSRVVMNVTAKKIVNSSDDIKRVQVPRLKTPA

SEQ ID NO: 26828 - protein, 32 aa, Artificial Sequence
  Non-cyclic GFR-binding peptide
NHQLFNSLQEHQGQHPKIRYYLMTLPEEETPV

SEQ ID NO: 26829 - protein, 36 aa, Artificial Sequence
  Non-cyclic GFR-binding peptide
  MOD_RES (32), (33): Xaa is C or S
GEVVMESMEGIVVKDYEDMIQMTINSLETPVXXAKP

SEQ ID NO: 26830 - protein, 38 aa, Artificial Sequence
  Non-cyclic GFR-binding peptide
  MOD_RES (2), (36): Xaa is C or S
  MOD_RES (14), (15), (16), (17), (18): Xaa is A or G
  MOD_RES (19), (20), (21), (22): Xaa is A or G or is absent
GXSRVVMNVTAKKXXXXXXXXXIKRVQVPRLKTPAXTP

SEQ ID NO: 26831 - protein, 39 aa, Artificial Sequence
  Non-cyclic GFR-binding peptide
  MOD_RES (2), (36), (37): Xaa is C or S
  MOD_RES (14), (15), (16), (17), (18): Xaa is A or G
  MOD_RES (19), (20), (21), (22): Xaa is A or G or is absent
GXGEVVMEVTAKKXXXXXXXXXIKRMQVPRLETPVXXAK

SEQ ID NO: 26832 - protein, 36 aa, Artificial Sequence
  Non-cyclic GFR-binding peptide
  MOD_RES (31), (31): Xaa is C or S
RVVMNSMEGIIVNSSDDMIQVTINSLKTPAXTPKTV

SEQ ID NO: 26833 - protein, 40 aa, Artificial Sequence
  Non-cyclic GFR-binding peptide
  MOD_RES (2), (4), (36): Xaa is C or S
HXGXSRVVMNSMEGIIVNSSDDMIQVTINSLKTPAXTPKT

SEQ ID NO: 26834 - protein, 39 aa, Artificial Sequence
  Non-cyclic GFR-binding peptide
  MOD_RES (1), (35): Xaa is C or S
XKNHQLFNSLQEHQGQHPKIRYYVMPLPEEETPVXELGE

SEQ ID NO: 26835 - protein, 40 aa, Artificial Sequence
  Non-cyclic GFR-binding peptide
  MOD_RES (2), (4): Xaa is C or S
  MOD_RES (17), (18), (19), (20), (21): Xaa is A or G
  MOD_RES (22), (23), (24), (25): Xaa is A or G or is absent
EXKXALHDELTNSLQEXXXXXXXXXYYVVPLPELQVQTPR

SEQ ID NO: 26836 - protein, 34 aa, Artificial Sequence
  Non-cyclic GFR-binding peptide
  MOD_RES (1), (32), (33): Xaa is C or S
XSKVIMVQVEKIKPTKGIVKAIKVSRLDQSVXXP

SEQ ID NO: 26837 - protein, 42 aa, Artificial Sequence
  Non-cyclic GFR-binding peptide
  MOD_RES (2), (4), (41): Xaa is C or S
EXKXALHDELTNSLQEFIPKKRVIEYYVVPLPELQVQTPRXQ

SEQ ID NO: 26838 - protein, 37 aa, Artificial Sequence
  Non-cyclic GFR-binding peptide
  MOD_RES (2), (36): Xaa is C or S
  MOD_RES (14), (15), (16), (17), (18): Xaa is A or G
  MOD_RES (19), (20), (21), (22): Xaa is A or G or is absent
EXKNHQLFNSLQEXXXXXXXXXYYLMTLPEEETPVXE

SEQ ID NO: 26839 - protein, 35 aa, Artificial Sequence
  Non-cyclic GFR-binding peptide
  MOD_RES (1), (35): Xaa is C or S
  MOD_RES (13), (14), (15), (16), (17): Xaa is A or G
  MOD_RES (18), (19), (20), (21): Xaa is A or G or is absent
XGEVVMDVTAKKXXXXXXXXXIKRMQVPRLETPVX

SEQ ID NO: 26840 - protein, 43 aa, Artificial Sequence
  Non-cyclic GFR-binding peptide
  MOD_RES (2), (4), (38): Xaa is C or S
  MOD_RES (16), (17), (18), (19), (20): Xaa is A or G
  MOD_RES (21), (22), (23), (24): Xaa is A or G or is absent
HXGXSRVVMNSMEGIXXXXXXXXXMIQVTINSLKTPAXTPKTV

SEQ ID NO: 26841 - protein, 38 aa, Artificial Sequence
  Non-cyclic GFR-binding peptide
  MOD_RES (2), (36), (37): Xaa is C or S
  MOD_RES (14), (15), (16), (17), (18): Xaa is A or G
  MOD_RES (19), (20), (21), (22): Xaa is A or G or is absent
GXGEVVMDVTAKKXXXXXXXXXIKRMQVPRLETPVXXA

SEQ ID NO: 26842 - protein, 36 aa, Artificial Sequence
  Non-cyclic GFR-binding peptide
  MOD_RES (1), (32), (33): Xaa is C or S
XSKVIMVQVEKIKPTKGIVKAIKVSRLDQSVXXPSA

SEQ ID NO: 26843 - protein, 34 aa, Artificial Sequence
  Non-cyclic GFR-binding peptide
  MOD_RES (13), (14), (15), (16), (17): Xaa is A or G
  MOD_RES (18), (19), (20), (21): Xaa is A or G or is absent
ALHDELTNSLQEXXXXXXXXXYYVVPLPELQVQT

SEQ ID NO: 26844 - protein, 36 aa, Artificial Sequence
  Non-cyclic GFR-binding peptide
  MOD_RES (2), (4), (35), (36): Xaa is C or S
SXKXSKVVMVTAKKVKPTRGVIKRIQVPRLDQPVXX

SEQ ID NO: 26845 - protein, 35 aa, Artificial Sequence
  Non-cyclic GFR-binding peptide
  MOD_RES (2), (4), (35): Xaa is C or S
SXKXSRVIMVTAKKVKPKRGVIKRIQVPRLAQPVX

SEQ ID NO: 26846 - protein, 39 aa, Artificial Sequence
  Non-cyclic GFR-binding peptide
  MOD_RES (2), (4), (38): Xaa is C or S
RXEXKNHQLFNSLQEHQGQHPKIRYYVMPLPEEETPVXE

SEQ ID NO: 26847 - protein, 41 aa, Artificial Sequence
  Non-cyclic GFR-binding peptide
  MOD_RES (2), (4), (38), (39): Xaa is C or S
  MOD_RES (16), (17), (18), (19), (20): Xaa is A or G
  MOD_RES (21), (22), (23), (24): Xaa is A or G or is absent
HXGXARVVMNVQVEKXXXXXXXXXVKAVKVSRLQTPAXXPK

SEQ ID NO: 26848 - protein, 39 aa, Artificial Sequence
  Non-cyclic GFR-binding peptide
  MOD_RES (33), (34): Xaa is C or S
  MOD_RES (11), (12), (13), (14), (15): Xaa is A or G
  MOD_RES (16), (17), (18), (19): Xaa is A or G or is absent
EVVMDVQVEKXXXXXXXXXVKAMKVSRLETPVXXAKPIK

SEQ ID NO: 26849 - protein, 33 aa, Artificial Sequence
  Non-cyclic GFR-binding peptide
LHDELTNSLQEFIPKKRVIEYYVVPLPELQVQT

SEQ ID NO: 26850 - protein, 38 aa, Artificial Sequence
  Non-cyclic GFR-binding peptide
  MOD_RES (1), (35): Xaa is C or S
  MOD_RES (13), (14), (15), (16), (17): Xaa is A or G
  MOD_RES (18), (19), (20), (21): Xaa is A or G or is absent
XSRVVMNVQVEKXXXXXXXXXVKAVKVSRLKTPAXTPK

SEQ ID NO: 26851 - protein, 39 aa, Artificial Sequence
  Non-cyclic GFR-binding peptide
  MOD_RES (1), (33), (34): Xaa is C or S
XGEVVMEVTAKKVVKDYEDIKRMQVPRLETPVXXAKPIS

SEQ ID NO: 26852 - protein, 38 aa, Artificial Sequence
  Non-cyclic GFR-binding peptide
  MOD_RES (1), (35): Xaa is C or S
  MOD_RES (13), (14), (15), (16), (17): Xaa is A or G
  MOD_RES (18), (19), (20), (21): Xaa is A or G or is absent
XKNHQLFNSLQEXXXXXXXXXYYVMPLPEEETPVXELG

SEQ ID NO: 26853 - protein, 34 aa, Artificial Sequence
  Non-cyclic GFR-binding peptide
  MOD_RES (31), (32): Xaa is C or S
RVVMNVQVEKIVNSSDDVKAVKVSRLKTPAXXPK

SEQ ID NO: 26854 - protein, 42 aa, Artificial Sequence
  Non-cyclic GFR-binding peptide
  MOD_RES (2), (4), (36), (37): Xaa is C or S
RXGXGEVVMDVTAKKVVKENEDIKRMQVPRLETPVXXAKPIK

SEQ ID NO: 26855 - protein, 41 aa, Artificial Sequence
  Non-cyclic GFR-binding peptide
  MOD_RES (2), (36), (37): Xaa is C or S
  MOD_RES (14), (15), (16), (17), (18): Xaa is A or G
  MOD_RES (19), (20), (21), (22): Xaa is A or G or is absent
GXARVVMNVTAKKXXXXXXXXXIKRVQVPRLQTPAXXPKPV

SEQ ID NO: 26856 - protein, 32 aa, Artificial Sequence
  Non-cyclic GFR-binding peptide
  MOD_RES (1), (1): Xaa is C or S
XGEVVMDSMEGIVVKENEDMIQMTINSLETPV

SEQ ID NO: 26857 - protein, 41 aa, Artificial Sequence
  Non-cyclic GFR-binding peptide
  MOD_RES (2), (36): Xaa is C or S
  MOD_RES (14), (15), (16), (17), (18): Xaa is A or G
  MOD_RES (19), (20), (21), (22): Xaa is A or G or is absent
GXSRVVMNVTAKKXXXXXXXXXIKRVQVPRLKTPAXTPKTV

SEQ ID NO: 26858 - protein, 37 aa, Artificial Sequence
  Non-cyclic GFR-binding peptide
  MOD_RES (2), (4), (35), (36): Xaa is C or S
SXKXSRVIMSMEGIVKPKRGVMIQITINSLAQPVXXP

SEQ ID NO: 26859 - protein, 34 aa, Artificial Sequence
  Non-cyclic GFR-binding peptide
  MOD_RES (32), (33): Xaa is C or S
GEVVMEVQVEKVVKDYEDVKAMKVSRLETPVXXA

SEQ ID NO: 26860 - protein, 40 aa, Artificial Sequence
  Non-cyclic GFR-binding peptide
  MOD_RES (1), (3), (37), (38): Xaa is C or S
  MOD_RES (15), (16), (17), (18), (19): Xaa is A or G
  MOD_RES (20), (21), (22), (23): Xaa is A or G or is absent
XGXARVVMNVQVEKXXXXXXXXXVKAVKVSRLQTPAXXPK

SEQ ID NO: 26861 - protein, 39 aa, Artificial Sequence
  Non-cyclic GFR-binding peptide
  MOD_RES (35), (35): Xaa is C or S
  MOD_RES (11), (12), (13), (14), (15): Xaa is A or G
  MOD_RES (16), (17), (18), (19): Xaa is A or G or is absent
HDELTNSLQEXXXXXXXXXYYLVTLPELQVQTPRXQVNR

SEQ ID NO: 26862 - protein, 37 aa, Artificial Sequence
  Non-cyclic GFR-binding peptide
  MOD_RES (2), (4), (37): Xaa is C or S
  MOD_RES (15), (16), (17), (18), (19): Xaa is A or G
  MOD_RES (20), (21), (22), (23): Xaa is A or G or is absent
SXKXSKVVMVQVEKXXXXXXXXXVKAIKVSRLDQPVX

SEQ ID NO: 26863 - protein, 40 aa, Artificial Sequence
  Non-cyclic GFR-binding peptide
  MOD_RES (1), (3), (34), (35): Xaa is C or S
XKXSRVIMVTAKKVKPKRGVIKRIQVPRLAQPVXXPAASA

SEQ ID NO: 26864 - protein, 37 aa, Artificial Sequence
  Non-cyclic GFR-binding peptide
  MOD_RES (1), (3), (36), (37): Xaa is C or S
  MOD_RES (14), (15), (16), (17), (18): Xaa is A or G
  MOD_RES (19), (20), (21), (22): Xaa is A or G or is absent
XKXSKVIMVQVEKXXXXXXXXXVKAIKVSRLDQSVXX

SEQ ID NO: 26865 - protein, 38 aa, Artificial Sequence
  Non-cyclic GFR-binding peptide
  MOD_RES (32), (33): Xaa is C or S
GEVVMDVTAKKVVKENEDIKRMQVPRLETPVXXAKPIK

SEQ ID NO: 26866 - protein, 36 aa, Artificial Sequence
  Non-cyclic GFR-binding peptide
ELHEELRNSLQELKPKKRVYEYYLVTLPEHHVRSPQ

SEQ ID NO: 26867 - protein, 33 aa, Artificial Sequence
  Non-cyclic GFR-binding peptide
  MOD_RES (33), (33): Xaa is C or S
  MOD_RES (11), (12), (13), (14), (15): Xaa is A or G
  MOD_RES (16), (17), (18), (19): Xaa is A or G or is absent
SKVIMVTAKKXXXXXXXXXIKRIQVPRLDQSVX

SEQ ID NO: 26868 - protein, 39 aa, Artificial Sequence
  Non-cyclic GFR-binding peptide
  MOD_RES (1), (3), (35), (36): Xaa is C or S
XGXARVVMNSMEGIIVNSSDDMIQVTINSLQTPAXXPKP

SEQ ID NO: 26869 - protein, 34 aa, Artificial Sequence
  Non-cyclic GFR-binding peptide
  MOD_RES (2), (34): Xaa is C or S
GXGEVVMDSMEGIVVKENEDMIQMTINSLETPVX

SEQ ID NO: 26870 - protein, 38 aa, Artificial Sequence
  Non-cyclic GFR-binding peptide
  MOD_RES (36), (36): Xaa is C or S
LHEELRNSLQELKPKKRVYEYYLVTLPEHHVRSPQXKV

SEQ ID NO: 26871 - protein, 33 aa, Artificial Sequence
  Non-cyclic GFR-binding peptide
  MOD_RES (2), (2): Xaa is C or S
GXSRVVMNSMEGIIVNSSDDMIQVTINSLKTPA

SEQ ID NO: 26872 - protein, 38 aa, Artificial Sequence
  Non-cyclic GFR-binding peptide
  MOD_RES (1), (3), (35), (36): Xaa is C or S
XGXARVVMNSMEGIIVNSSDDMIQVTINSLQTPAXXPK

SEQ ID NO: 26873 - protein, 40 aa, Artificial Sequence
  Non-cyclic GFR-binding peptide
  MOD_RES (34), (34): Xaa is C or S
  MOD_RES (12), (13), (14), (15), (16): Xaa is A or G
  MOD_RES (17), (18), (19), (20): Xaa is A or G or is absent
SRVVMNVTAKKXXXXXXXXXIKRVQVPRLKTPAXTPKTVH

SEQ ID NO: 26874 - protein, 41 aa, Artificial Sequence
  Non-cyclic GFR-binding peptide
  MOD_RES (1), (3), (35), (36): Xaa is C or S
XGXGEVVMEVTAKKVVKDYEDIKRMQVPRLETPVXXAKPIS

SEQ ID NO: 26875 - protein, 31 aa, Artificial Sequence
  Non-cyclic GFR-binding peptide
  MOD_RES (31), (31): Xaa is C or S
SKVVMVQVEKVKPTRGVVKAIKVSRLDQPVX

SEQ ID NO: 26876 - protein, 40 aa, Artificial Sequence
  Non-cyclic GFR-binding peptide
  MOD_RES (2), (4), (37), (38): Xaa is C or S
  MOD_RES (15), (16), (17), (18), (19): Xaa is A or G
  MOD_RES (20), (21), (22), (23): Xaa is A or G or is absent
SXKXSKVIMVQVEKXXXXXXXXXVKAIKVSRLDQSVXXPS

SEQ ID NO: 26877 - protein, 38 aa, Artificial Sequence
  Non-cyclic GFR-binding peptide
  MOD_RES (2), (35), (36): Xaa is C or S
  MOD_RES (13), (14), (15), (16), (17): Xaa is A or G
  MOD_RES (18), (19), (20), (21): Xaa is A or G or is absent
KXSRVIMVQVEKXXXXXXXXXVKAIKVSRLAQPVXXPA

SEQ ID NO: 26878 - protein, 38 aa, Artificial Sequence
  Non-cyclic GFR-binding peptide
  MOD_RES (2), (34), (35): Xaa is C or S
GXSRVVMNVQVEKIVNSSDDVKAVKVSRLKTPAXXPKP

SEQ ID NO: 26879 - protein, 38 aa, Artificial Sequence
  Non-cyclic GFR-binding peptide
  MOD_RES (2), (4), (38): Xaa is C or S
  MOD_RES (16), (17), (18), (19), (20): Xaa is A or G
  MOD_RES (21), (22), (23), (24): Xaa is A or G or is absent
RXGXGEVVMESMEGIXXXXXXXXXMIQMTINSLETPVX

SEQ ID NO: 26880 - protein, 33 aa, Artificial Sequence
  Non-cyclic GFR-binding peptide
  MOD_RES (31), (32): Xaa is C or S
EVVMESMEGIVVKDYEDMIQMTINSLETPVXXA

SEQ ID NO: 26881 - protein, 40 aa, Artificial Sequence
  Non-cyclic GFR-binding peptide
  MOD_RES (36), (36): Xaa is C or S
  MOD_RES (12), (13), (14), (15), (16): Xaa is A or G
  MOD_RES (17), (18), (19), (20): Xaa is A or G or is absent
LHEELRNSLQEXXXXXXXXXYYVVPLPEHHVRSPQXKVSS

SEQ ID NO: 26882 - protein, 35 aa, Artificial Sequence
  Non-cyclic GFR-binding peptide
  MOD_RES (1), (3): Xaa is C or S
  MOD_RES (14), (15), (16), (17), (18): Xaa is A or G
  MOD_RES (19), (20), (21), (22): Xaa is A or G or is absent
XKXSKVIMVTAKKXXXXXXXXXIKRIQVPRLDQSV

SEQ ID NO: 26883 - protein, 35 aa, Artificial Sequence
  Non-cyclic GFR-binding peptide
  MOD_RES (2), (35): Xaa is C or S
  MOD_RES (13), (14), (15), (16), (17): Xaa is A or G
  MOD_RES (18), (19), (20), (21): Xaa is A or G or is absent
KXSRVIMSMEGIXXXXXXXXXMIQITINSLAQPVX

SEQ ID NO: 26884 - protein, 39 aa, Artificial Sequence
  Non-cyclic GFR-binding peptide
  MOD_RES (35), (35): Xaa is C or S
HDELTNSLQEFIPKKRVIEYYLVTLPELQVQTPRXQVNR

SEQ ID NO: 26885 - protein, 37 aa, Artificial Sequence
  Non-cyclic GFR-binding peptide
  MOD_RES (2), (4), (36): Xaa is C or S
HXGXSRVVMNVTAKKIVNSSDDIKRVQVPRLKTPAXT

SEQ ID NO: 26886 - protein, 38 aa, Artificial Sequence
  Non-cyclic GFR-binding peptide
  MOD_RES (1), (33), (34): Xaa is C or S
XARVVMNVQVEKIVNSSDDVKAVKVSRLQTPAXXPKPV

SEQ ID NO: 26887 - protein, 39 aa, Artificial Sequence
  Non-cyclic GFR-binding peptide
  MOD_RES (2), (4), (35), (36): Xaa is C or S
SXKXSKVIMVQVEKIKPTKGIVKAIKVSRLDQSVXXPSA

SEQ ID NO: 26888 - protein, 39 aa, Artificial Sequence
  Non-cyclic GFR-binding peptide
  MOD_RES (1), (33), (34): Xaa is C or S
XSRVVMNVQVEKIVNSSDDVKAVKVSRLKTPAXXPKPVY

SEQ ID NO: 26889 - protein, 39 aa, Artificial Sequence
  Non-cyclic GFR-binding peptide
  MOD_RES (1), (3), (37): Xaa is C or S
XEXKNHQLFNSLQEHQGQHPKIRYYVMPLPEEETPVXEL

SEQ ID NO: 26890 - protein, 38 aa, Artificial Sequence
  Non-cyclic GFR-binding peptide
  MOD_RES (36), (36): Xaa is C or S
  MOD_RES (12), (13), (14), (15), (16): Xaa is A or G
  MOD_RES (17), (18), (19), (20): Xaa is A or G or is absent
LHDELTNSLQEXXXXXXXXXYYVVPLPELQVQTPRXQV

SEQ ID NO: 26891 - protein, 39 aa, Artificial Sequence
  Non-cyclic GFR-binding peptide
  MOD_RES (1), (34), (35): Xaa is C or S
  MOD_RES (12), (13), (14), (15), (16): Xaa is A or G
  MOD_RES (17), (18), (19), (20): Xaa is A or G or is absent
XSKVVMVTAKKXXXXXXXXXIKRIQVPRLDQPVXXPSAS

SEQ ID NO: 26892 - protein, 35 aa, Artificial Sequence
  Non-cyclic GFR-binding peptide
  MOD_RES (2), (34), (35): Xaa is C or S
GXARVVMNSMEGIIVNSSDDMIQVTINSLQTPAXX

SEQ ID NO: 26893 - protein, 32 aa, Artificial Sequence
  Non-cyclic GFR-binding peptide
  MOD_RES (11), (12), (13), (14), (15): Xaa is A or G
  MOD_RES (16), (17), (18), (19): Xaa is A or G or is absent
EVVMEVTAKKXXXXXXXXXIKRMQVPRLETPV

SEQ ID NO: 26894 - protein, 37 aa, Artificial Sequence
  Non-cyclic GFR-binding peptide
  MOD_RES (1), (35): Xaa is C or S
  MOD_RES (13), (14), (15), (16), (17): Xaa is A or G
  MOD_RES (18), (19), (20), (21): Xaa is A or G or is absent
XSRVVMNSMEGIXXXXXXXXXMIQVTINSLKTPAXTP

SEQ ID NO: 26895 - protein, 37 aa, Artificial Sequence
  Non-cyclic GFR-binding peptide
  MOD_RES (2), (4), (35), (36): Xaa is C or S
SXKXSKVVMVTAKKVKPTRGVIKRIQVPRLDQPVXXP

SEQ ID NO: 26896 - protein, 32 aa, Artificial Sequence
  Non-cyclic GFR-binding peptide
  MOD_RES (11), (12), (13), (14), (15): Xaa is A or G
  MOD_RES (16), (17), (18), (19): Xaa is A or G or is absent
RVVMNVQVEKXXXXXXXXXVKAVKVSRLKTPA

SEQ ID NO: 26897 - protein, 34 aa, Artificial Sequence
  Non-cyclic GFR-binding peptide
  MOD_RES (1), (33), (34): Xaa is C or S
XGEVVMDVQVEKVVKENEDVKAMKVSRLETPVXX

SEQ ID NO: 26898 - protein, 39 aa, Artificial Sequence
  Non-cyclic GFR-binding peptide
  MOD_RES (1), (35): Xaa is C or S
  MOD_RES (13), (14), (15), (16), (17): Xaa is A or G
  MOD_RES (18), (19), (20), (21): Xaa is A or G or is absent
XKNHQLFNSLQEXXXXXXXXXYYVMPLPEEETPVXELGE

SEQ ID NO: 26899 - protein, 36 aa, Artificial Sequence
  Non-cyclic GFR-binding peptide
  MOD_RES (1), (34), (35): Xaa is C or S
  MOD_RES (12), (13), (14), (15), (16): Xaa is A or G
  MOD_RES (17), (18), (19), (20): Xaa is A or G or is absent
XSKVIMVQVEKXXXXXXXXXVKAIKVSRLDQSVXXP

SEQ ID NO: 26900 - protein, 41 aa, Artificial Sequence
  Non-cyclic GFR-binding peptide
  MOD_RES (1), (3), (37), (38): Xaa is C or S
  MOD_RES (15), (16), (17), (18), (19): Xaa is A or G
  MOD_RES (20), (21), (22), (23): Xaa is A or G or is absent
XGXARVVMNVQVEKXXXXXXXXXVKAVKVSRLQTPAXXPKP

SEQ ID NO: 26901 - protein, 37 aa, Artificial Sequence
  Non-cyclic GFR-binding peptide
  MOD_RES (1), (3), (37): Xaa is C or S
  MOD_RES (15), (16), (17), (18), (19): Xaa is A or G
  MOD_RES (20), (21), (22), (23): Xaa is A or G or is absent
XGXGEVVMDVQVEKXXXXXXXXXVKAMKVSRLETPVX

SEQ ID NO: 26902 - protein, 39 aa, Artificial Sequence
  Non-cyclic GFR-binding peptide
  MOD_RES (34), (35): Xaa is C or S
  MOD_RES (12), (13), (14), (15), (16): Xaa is A or G
  MOD_RES (17), (18), (19), (20): Xaa is A or G or is absent
GEVVMEVQVEKXXXXXXXXXVKAMKVSRLETPVXXAKPI

SEQ ID NO: 26903 - protein, 37 aa, Artificial Sequence
  Non-cyclic GFR-binding peptide
  MOD_RES (35), (35): Xaa is C or S
HDELTNSLQEFIPKKRVIEYYVVPLPELQVQTPRXQV

SEQ ID NO: 26904 - protein, 37 aa, Artificial Sequence
  Non-cyclic GFR-binding peptide
  MOD_RES (1), (3), (36), (37): Xaa is C or S
  MOD_RES (14), (15), (16), (17), (18): Xaa is A or G
  MOD_RES (19), (20), (21), (22): Xaa is A or G or is absent
XKXSRVIMVTAKKXXXXXXXXXIKRIQVPRLAQPVXX

SEQ ID NO: 26905 - protein, 40 aa, Artificial Sequence
  Non-cyclic GFR-binding peptide
  MOD_RES (1), (3), (35), (36): Xaa is C or S
XGXGEVVMESMEGIVVKDYEDMIQMTINSLETPVXXAKPI

SEQ ID NO: 26906 - protein, 42 aa, Artificial Sequence
  Non-cyclic GFR-binding peptide
  MOD_RES (2), (4), (38): Xaa is C or S
RXEXKNHQLFNSLQEHQGQHPKIRYYLMTLPEEETPVXELGE

SEQ ID NO: 26907 - protein, 35 aa, Artificial Sequence
  Non-cyclic GFR-binding peptide
  MOD_RES (32), (32): Xaa is C or S
SRVVMNVQVEKIVNSSDDVKAVKVSRLKTPAXTPK

SEQ ID NO: 26908 - protein, 38 aa, Artificial Sequence
  Non-cyclic GFR-binding peptide
  MOD_RES (34), (34): Xaa is C or S
  MOD_RES (12), (13), (14), (15), (16): Xaa is A or G
  MOD_RES (17), (18), (19), (20): Xaa is A or G or is absent
SRVVMNSMEGIXXXXXXXXXMIQVTINSLKTPAXTPKT

SEQ ID NO: 26909 - protein, 40 aa, Artificial Sequence
  Non-cyclic GFR-binding peptide
  MOD_RES (2), (36), (37): Xaa is C or S
  MOD_RES (14), (15), (16), (17), (18): Xaa is A or G
  MOD_RES (19), (20), (21), (22): Xaa is A or G or is absent
GXSRVVMNSMEGIXXXXXXXXXMIQVTINSLKTPAXXPKP

SEQ ID NO: 26910 - protein, 41 aa, Artificial Sequence
  Non-cyclic GFR-binding peptide
  MOD_RES (1), (3), (40): Xaa is C or S
  MOD_RES (16), (17), (18), (19), (20): Xaa is A or G
  MOD_RES (21), (22), (23), (24): Xaa is A or G or is absent
XKXALHDELTNSLQEXXXXXXXXXYYLVTLPELQVQTPRXQ

SEQ ID NO: 26911 - protein, 43 aa, Artificial Sequence
  Non-cyclic GFR-binding peptide
  MOD_RES (2), (39): Xaa is C or S
AXELHEELRNSLQELKPKKRVYEYYVVPLPEHHVRSPQXKVSS

SEQ ID NO: 26912 - protein, 35 aa, Artificial Sequence
  Non-cyclic GFR-binding peptide
  MOD_RES (12), (13), (14), (15), (16): Xaa is A or G
  MOD_RES (17), (18), (19), (20): Xaa is A or G or is absent
LHEELRNSLQEXXXXXXXXXYYVVPLPEHHVRSPQ

SEQ ID NO: 26913 - protein, 31 aa, Artificial Sequence
  Non-cyclic GFR-binding peptide
  MOD_RES (31), (31): Xaa is C or S
RVVMNSMEGIIVNSSDDMIQVTINSLQTPAX

SEQ ID NO: 26914 - protein, 38 aa, Artificial Sequence
  Non-cyclic GFR-binding peptide
  MOD_RES (2), (4), (38): Xaa is C or S
  MOD_RES (16), (17), (18), (19), (20): Xaa is A or G
  MOD_RES (21), (22), (23), (24): Xaa is A or G or is absent
RXEXKNHQLFNSLQEXXXXXXXXXYYVMPLPEEETPVX

SEQ ID NO: 26915 - protein, 41 aa, Artificial Sequence
  Non-cyclic GFR-binding peptide
  MOD_RES (2), (4), (38), (39): Xaa is C or S
  MOD_RES (16), (17), (18), (19), (20): Xaa is A or G
  MOD_RES (21), (22), (23), (24): Xaa is A or G or is absent
RXGXGEVVMEVQVEKXXXXXXXXXVKAMKVSRLETPVXXAK

SEQ ID NO: 26916 - protein, 38 aa, Artificial Sequence
  Non-cyclic GFR-binding peptide
  MOD_RES (1), (33), (34): Xaa is C or S
XSRVVMNVTAKKIVNSSDDIKRVQVPRLKTPAXXPKPV

SEQ ID NO: 26917 - protein, 40 aa, Artificial Sequence
  Non-cyclic GFR-binding peptide
  MOD_RES (2), (4): Xaa is C or S
AXAXELHEELRNSLQELKPKKRVYEYYVVPLPEHHVRSPQ

SEQ ID NO: 26918 - protein, 33 aa, Artificial Sequence
  Non-cyclic GFR-binding peptide
  MOD_RES (2), (33): Xaa is C or S
KXSRVIMVTAKKVKPKRGVIKRIQVPRLAQPVX

SEQ ID NO: 26919 - protein, 35 aa, Artificial Sequence
  Non-cyclic GFR-binding peptide
  MOD_RES (32), (33): Xaa is C or S
GEVVMESMEGIVVKDYEDMIQMTINSLETPVXXAK

SEQ ID NO: 26920 - protein, 37 aa, Artificial Sequence
  Non-cyclic GFR-binding peptide
  MOD_RES (2), (35), (36): Xaa is C or S
  MOD_RES (13), (14), (15), (16), (17): Xaa is A or G
  MOD_RES (18), (19), (20), (21): Xaa is A or G or is absent
KXSRVIMVQVEKXXXXXXXXXVKAIKVSRLAQPVXXP

SEQ ID NO: 26921 - protein, 38 aa, Artificial Sequence
  Non-cyclic GFR-binding peptide
  MOD_RES (2), (36), (37): Xaa is C or S
  MOD_RES (14), (15), (16), (17), (18): Xaa is A or G
  MOD_RES (19), (20), (21), (22): Xaa is A or G or is absent
GXARVVMNVTAKKXXXXXXXXXIKRVQVPRLQTPAXXP

SEQ ID NO: 26922 - protein, 37 aa, Artificial Sequence
  Non-cyclic GFR-binding peptide
  MOD_RES (1), (1): Xaa is C or S
XELHEELRNSLQELKPKKRVYEYYVVPLPEHHVRSPQ

SEQ ID NO: 26923 - protein, 36 aa, Artificial Sequence
  Non-cyclic GFR-binding peptide
  MOD_RES (1), (3): Xaa is C or S
  MOD_RES (15), (16), (17), (18), (19): Xaa is A or G
  MOD_RES (20), (21), (22), (23): Xaa is A or G or is absent
XGXSRVVMNVTAKKXXXXXXXXXIKRVQVPRLKTPA

SEQ ID NO: 26924 - protein, 38 aa, Artificial Sequence
  Non-cyclic GFR-binding peptide
  MOD_RES (2), (4): Xaa is C or S
EXKXALHDELTNSLQEFIPKKRVIEYYLVTLPELQVQT

SEQ ID NO: 26925 - protein, 33 aa, Artificial Sequence
  Non-cyclic GFR-binding peptide
  MOD_RES (33), (33): Xaa is C or S
  MOD_RES (11), (12), (13), (14), (15): Xaa is A or G
  MOD_RES (16), (17), (18), (19): Xaa is A or G or is absent
EVVMEVQVEKXXXXXXXXXVKAMKVSRLETPVX

SEQ ID NO: 26926 - protein, 36 aa, Artificial Sequence
  Non-cyclic GFR-binding peptide
  MOD_RES (33), (34): Xaa is C or S
  MOD_RES (11), (12), (13), (14), (15): Xaa is A or G
  MOD_RES (16), (17), (18), (19): Xaa is A or G or is absent
EVVMESMEGIXXXXXXXXXMIQMTINSLETPVXXAK

SEQ ID NO: 26927 - protein, 39 aa, Artificial Sequence
  Non-cyclic GFR-binding peptide
  MOD_RES (35), (35): Xaa is C or S
HDELTNSLQEFIPKKRVIEYYVVPLPELQVQTPRXQVNR

SEQ ID NO: 26928 - protein, 39 aa, Artificial Sequence
  Non-cyclic GFR-binding peptide
  MOD_RES (1), (3), (35), (36): Xaa is C or S
XGXSRVVMNSMEGIIVNSSDDMIQVTINSLKTPAXXPKP

SEQ ID NO: 26929 - protein, 33 aa, Artificial Sequence
  Non-cyclic GFR-binding peptide
  MOD_RES (33), (33): Xaa is C or S
  MOD_RES (11), (12), (13), (14), (15): Xaa is A or G
  MOD_RES (16), (17), (18), (19): Xaa is A or G or is absent
EVVMEVTAKKXXXXXXXXXIKRMQVPRLETPVX

SEQ ID NO: 26930 - protein, 31 aa, Artificial Sequence
  Non-cyclic GFR-binding peptide
  MOD_RES (31), (31): Xaa is C or S
SKVIMVTAKKIKPTKGIIKRIQVPRLDQSVX

SEQ ID NO: 26931 - protein, 40 aa, Artificial Sequence
  Non-cyclic GFR-binding peptide
  MOD_RES (2), (36): Xaa is C or S
  MOD_RES (14), (15), (16), (17), (18): Xaa is A or G
  MOD_RES (19), (20), (21), (22): Xaa is A or G or is absent
GXSRVVMNVQVEKXXXXXXXXXVKAVKVSRLKTPAXTPKT

SEQ ID NO: 26932 - protein, 36 aa, Artificial Sequence
  Non-cyclic GFR-binding peptide
  MOD_RES (2), (35), (36): Xaa is C or S
  MOD_RES (13), (14), (15), (16), (17): Xaa is A or G
  MOD_RES (18), (19), (20), (21): Xaa is A or G or is absent
KXSKVIMVTAKKXXXXXXXXXIKRIQVPRLDQSVXX

SEQ ID NO: 26933 - protein, 37 aa, Artificial Sequence
  Non-cyclic GFR-binding peptide
  MOD_RES (33), (34): Xaa is C or S
  MOD_RES (11), (12), (13), (14), (15): Xaa is A or G
  MOD_RES (16), (17), (18), (19): Xaa is A or G or is absent
RVVMNVQVEKXXXXXXXXXVKAVKVSRLQTPAXXPKP

SEQ ID NO: 26934 - protein, 32 aa, Artificial Sequence
  Non-cyclic GFR-binding peptide
  MOD_RES (11), (12), (13), (14), (15): Xaa is A or G
  MOD_RES (16), (17), (18), (19): Xaa is A or G or is absent
SRVIMVTAKKXXXXXXXXXIKRIQVPRLAQPV

SEQ ID NO: 26935 - protein, 37 aa, Artificial Sequence
  Non-cyclic GFR-binding peptide
  MOD_RES (1), (3): Xaa is C or S
XAXELHEELRNSLQELKPKKRVYEYYVVPLPEHHVRS

SEQ ID NO: 26936 - protein, 36 aa, Artificial Sequence
  Non-cyclic GFR-binding peptide
  MOD_RES (1), (33), (34): Xaa is C or S
XGEVVMEVTAKKVVKDYEDIKRMQVPRLETPVXXAK

SEQ ID NO: 26937 - protein, 39 aa, Artificial Sequence
  Non-cyclic GFR-binding peptide
  MOD_RES (2), (36), (37): Xaa is C or S
  MOD_RES (14), (15), (16), (17), (18): Xaa is A or G
  MOD_RES (19), (20), (21), (22): Xaa is A or G or is absent
GXSRVVMNSMEGIXXXXXXXXXMIQVTINSLKTPAXXPK

SEQ ID NO: 26938 - protein, 41 aa, Artificial Sequence
  Non-cyclic GFR-binding peptide
  MOD_RES (1), (3), (36), (37): Xaa is C or S
  MOD_RES (14), (15), (16), (17), (18): Xaa is A or G
  MOD_RES (19), (20), (21), (22): Xaa is A or G or is absent
XKXSKVIMSMEGIXXXXXXXXXMIQITINSLDQSVXXPSAS

SEQ ID NO: 26939 - protein, 38 aa, Artificial Sequence
  Non-cyclic GFR-binding peptide
  MOD_RES (1), (34), (35): Xaa is C or S
  MOD_RES (12), (13), (14), (15), (16): Xaa is A or G
  MOD_RES (17), (18), (19), (20): Xaa is A or G or is absent
XSKVVMVQVEKXXXXXXXXXVKAIKVSRLDQPVXXPSA

SEQ ID NO: 26940 - protein, 40 aa, Artificial Sequence
  Non-cyclic GFR-binding peptide
  MOD_RES (2), (4), (36), (37): Xaa is C or S
RXGXGEVVMESMEGIVVKDYEDMIQMTINSLETPVXXAKP

SEQ ID NO: 26941 - protein, 34 aa, Artificial Sequence
  Non-cyclic GFR-binding peptide
  MOD_RES (1), (1): Xaa is C or S
  MOD_RES (13), (14), (15), (16), (17): Xaa is A or G
  MOD_RES (18), (19), (20), (21): Xaa is A or G or is absent
XSRVVMNVQVEKXXXXXXXXXVKAVKVSRLKTPA

SEQ ID NO: 26942 - protein, 37 aa, Artificial Sequence
  Non-cyclic GFR-binding peptide
  MOD_RES (2), (4): Xaa is C or S
  MOD_RES (16), (17), (18), (19), (20): Xaa is A or G
  MOD_RES (21), (22), (23), (24): Xaa is A or G or is absent
HXGXARVVMNSMEGIXXXXXXXXXMIQVTINSLQTPA

SEQ ID NO: 26943 - protein, 42 aa, Artificial Sequence
  Non-cyclic GFR-binding peptide
  MOD_RES (1), (3), (37): Xaa is C or S
  MOD_RES (15), (16), (17), (18), (19): Xaa is A or G
  MOD_RES (20), (21), (22), (23): Xaa is A or G or is absent
XGXSRVVMNSMEGIXXXXXXXXXMIQVTINSLKTPAXTPKTV

SEQ ID NO: 26944 - protein, 39 aa, Artificial Sequence
  Non-cyclic GFR-binding peptide
  MOD_RES (2), (34): Xaa is C or S
GXSRVVMNVQVEKIVNSSDDVKAVKVSRLKTPAXTPKTV

SEQ ID NO: 26945 - protein, 37 aa, Artificial Sequence
  Non-cyclic GFR-binding peptide
  MOD_RES (34), (35): Xaa is C or S
  MOD_RES (12), (13), (14), (15), (16): Xaa is A or G
  MOD_RES (17), (18), (19), (20): Xaa is A or G or is absent
SRVVMNVQVEKXXXXXXXXXVKAVKVSRLKTPAXXPK

SEQ ID NO: 26946 - protein, 41 aa, Artificial Sequence
  Non-cyclic GFR-binding peptide
  MOD_RES (2), (4), (36): Xaa is C or S
HXGXSRVVMNVQVEKIVNSSDDVKAVKVSRLKTPAXTPKTV

SEQ ID NO: 26947 - protein, 38 aa, Artificial Sequence
  Non-cyclic GFR-binding peptide
  MOD_RES (2), (35), (36): Xaa is C or S
  MOD_RES (13), (14), (15), (16), (17): Xaa is A or G
  MOD_RES (18), (19), (20), (21): Xaa is A or G or is absent
KXSKVIMVQVEKXXXXXXXXXVKAIKVSRLDQSVXXPS

SEQ ID NO: 26948 - protein, 40 aa, Artificial Sequence
  Non-cyclic GFR-binding peptide
  MOD_RES (34), (35): Xaa is C or S
  MOD_RES (12), (13), (14), (15), (16): Xaa is A or G
  MOD_RES (17), (18), (19), (20): Xaa is A or G or is absent
GEVVMDVQVEKXXXXXXXXXVKAMKVSRLETPVXXAKPIK

SEQ ID NO: 26949 - protein, 35 aa, Artificial Sequence
  Non-cyclic GFR-binding peptide
  MOD_RES (2), (4): Xaa is C or S
HXGXSRVVMNVQVEKIVNSSDDVKAVKVSRLKTPA

SEQ ID NO: 26950 - protein, 39 aa, Artificial Sequence
  Non-cyclic GFR-binding peptide
  MOD_RES (2), (39): Xaa is C or S
  MOD_RES (15), (16), (17), (18), (19): Xaa is A or G
  MOD_RES (20), (21), (22), (23): Xaa is A or G or is absent
AXELHEELRNSLQEXXXXXXXXXYYLVTLPEHHVRSPQX

SEQ ID NO: 26951 - protein, 37 aa, Artificial Sequence
  Non-cyclic GFR-binding peptide
  MOD_RES (31), (31): Xaa is C or S
RVVMNVQVEKIVNSSDDVKAVKVSRLKTPAXTPKTVH

SEQ ID NO: 26952 - protein, 37 aa, Artificial Sequence
  Non-cyclic GFR-binding peptide
  MOD_RES (1), (1): Xaa is C or S
XALHDELTNSLQEFIPKKRVIEYYVVPLPELQVQTPR

SEQ ID NO: 26953 - protein, 40 aa, Artificial Sequence
  Non-cyclic GFR-binding peptide
  MOD_RES (2), (36), (37): Xaa is C or S
  MOD_RES (14), (15), (16), (17), (18): Xaa is A or G
  MOD_RES (19), (20), (21), (22): Xaa is A or G or is absent
GXGEVVMEVTAKKXXXXXXXXXIKRMQVPRLETPVXXAKP

SEQ ID NO: 26954 - protein, 39 aa, Artificial Sequence
  Non-cyclic GFR-binding peptide
  MOD_RES (1), (35): Xaa is C or S
  MOD_RES (13), (14), (15), (16), (17): Xaa is A or G
  MOD_RES (18), (19), (20), (21): Xaa is A or G or is absent
XSRVVMNVQVEKXXXXXXXXXVKAVKVSRLKTPAXTPKT

SEQ ID NO: 26955 - protein, 38 aa, Artificial Sequence
  Non-cyclic GFR-binding peptide
  MOD_RES (37), (37): Xaa is C or S
ALHDELTNSLQEFIPKKRVIEYYLVTLPELQVQTPRXQ

SEQ ID NO: 26956 - protein, 37 aa, Artificial Sequence
  Non-cyclic GFR-binding peptide
  MOD_RES (33), (34): Xaa is C or S
  MOD_RES (11), (12), (13), (14), (15): Xaa is A or G
  MOD_RES (16), (17), (18), (19): Xaa is A or G or is absent
EVVMDSMEGIXXXXXXXXXMIQMTINSLETPVXXAKP

SEQ ID NO: 26957 - protein, 34 aa, Artificial Sequence
  Non-cyclic GFR-binding peptide
  MOD_RES (1), (32), (33): Xaa is C or S
XSRVIMSMEGIVKPKRGVMIQITINSLAQPVXXP

SEQ ID NO: 26958 - protein, 36 aa, Artificial Sequence
  Non-cyclic GFR-binding peptide
  MOD_RES (2), (36): Xaa is C or S
  MOD_RES (14), (15), (16), (17), (18): Xaa is A or G
  MOD_RES (19), (20), (21), (22): Xaa is A or G or is absent
GXSRVVMNVQVEKXXXXXXXXXVKAVKVSRLKTPAX

SEQ ID NO: 26959 - protein, 37 aa, Artificial Sequence
  Non-cyclic GFR-binding peptide
  MOD_RES (32), (33): Xaa is C or S
SRVVMNSMEGIIVNSSDDMIQVTINSLKTPAXXPKPV

SEQ ID NO: 26960 - protein, 35 aa, Artificial Sequence
  Non-cyclic GFR-binding peptide
  MOD_RES (31), (32): Xaa is C or S
RVVMNSMEGIIVNSSDDMIQVTINSLQTPAXXPKP

SEQ ID NO: 26961 - protein, 38 aa, Artificial Sequence
  Non-cyclic GFR-binding peptide
  MOD_RES (2), (2): Xaa is C or S
KXALHDELTNSLQEFIPKKRVIEYYVVPLPELQVQTPR

SEQ ID NO: 26962 - protein, 34 aa, Artificial Sequence
  Non-cyclic GFR-binding peptide
  MOD_RES (34), (34): Xaa is C or S
  MOD_RES (12), (13), (14), (15), (16): Xaa is A or G
  MOD_RES (17), (18), (19), (20): Xaa is A or G or is absent
SRVVMNSMEGIXXXXXXXXXMIQVTINSLKTPAX

SEQ ID NO: 26963 - protein, 37 aa, Artificial Sequence
  Non-cyclic GFR-binding peptide
  MOD_RES (2), (36), (37): Xaa is C or S
  MOD_RES (14), (15), (16), (17), (18): Xaa is A or G
  MOD_RES (19), (20), (21), (22): Xaa is A or G or is absent
GXARVVMNVTAKKXXXXXXXXXIKRVQVPRLQTPAXX

SEQ ID NO: 26964 - protein, 40 aa, Artificial Sequence
  Non-cyclic GFR-binding peptide
  MOD_RES (2), (34), (35): Xaa is C or S
GXGEVVMDVTAKKVVKENEDIKRMQVPRLETPVXXAKPIK

SEQ ID NO: 26965 - protein, 42 aa, Artificial Sequence
  Non-cyclic GFR-binding peptide
  MOD_RES (2), (36), (37): Xaa is C or S
  MOD_RES (14), (15), (16), (17), (18): Xaa is A or G
  MOD_RES (19), (20), (21), (22): Xaa is A or G or is absent
GXGEVVMDVQVEKXXXXXXXXXVKAMKVSRLETPVXXAKPIK

SEQ ID NO: 26966 - protein, 39 aa, Artificial Sequence
  Non-cyclic GFR-binding peptide
  MOD_RES (2), (4), (38), (39): Xaa is C or S
  MOD_RES (16), (17), (18), (19), (20): Xaa is A or G
  MOD_RES (21), (22), (23), (24): Xaa is A or G or is absent
RXGXGEVVMDVTAKKXXXXXXXXXIKRMQVPRLETPVXX

SEQ ID NO: 26967 - protein, 41 aa, Artificial Sequence
  Non-cyclic GFR-binding peptide
  MOD_RES (1), (3), (40): Xaa is C or S
XKXALHDELTNSLQEFIPKKRVIEYYLVTLPELQVQTPRXQ

SEQ ID NO: 26968 - protein, 33 aa, Artificial Sequence
  Non-cyclic GFR-binding peptide
  MOD_RES (32), (33): Xaa is C or S
ARVVMNVTAKKIVNSSDDIKRVQVPRLQTPAXX

SEQ ID NO: 26969 - protein, 37 aa, Artificial Sequence
  Non-cyclic GFR-binding peptide
  MOD_RES (2), (36), (37): Xaa is C or S
  MOD_RES (14), (15), (16), (17), (18): Xaa is A or G
  MOD_RES (19), (20), (21), (22): Xaa is A or G or is absent
GXGEVVMDVTAKKXXXXXXXXXIKRMQVPRLETPVXX

SEQ ID NO: 26970 - protein, 35 aa, Artificial Sequence
  Non-cyclic GFR-binding peptide
  MOD_RES (1), (33), (34): Xaa is C or S
XARVVMNVTAKKIVNSSDDIKRVQVPRLQTPAXXP

SEQ ID NO: 26971 - protein, 39 aa, Artificial Sequence
  Non-cyclic GFR-binding peptide
  MOD_RES (34), (35): Xaa is C or S
  MOD_RES (12), (13), (14), (15), (16): Xaa is A or G
  MOD_RES (17), (18), (19), (20): Xaa is A or G or is absent
GEVVMEVTAKKXXXXXXXXXIKRMQVPRLETPVXXAKPI

SEQ ID NO: 26972 - protein, 38 aa, Artificial Sequence
  Non-cyclic GFR-binding peptide
  MOD_RES (2), (4): Xaa is C or S
  MOD_RES (17), (18), (19), (20), (21): Xaa is A or G
  MOD_RES (22), (23), (24), (25): Xaa is A or G or is absent
EXKXALHDELTNSLQEXXXXXXXXXYYLVTLPELQVQT

SEQ ID NO: 26973 - protein, 33 aa, Artificial Sequence
  Non-cyclic GFR-binding peptide
  MOD_RES (1), (33): Xaa is C or S
XARVVMNSMEGIIVNSSDDMIQVTINSLQTPAX

SEQ ID NO: 26974 - protein, 35 aa, Artificial Sequence
  Non-cyclic GFR-binding peptide
  MOD_RES (1), (33), (34): Xaa is C or S
XGEVVMDVTAKKVVKENEDIKRMQVPRLETPVXXA

SEQ ID NO: 26975 - protein, 40 aa, Artificial Sequence
  Non-cyclic GFR-binding peptide
  MOD_RES (2), (35), (36): Xaa is C or S
  MOD_RES (13), (14), (15), (16), (17): Xaa is A or G
  MOD_RES (18), (19), (20), (21): Xaa is A or G or is absent
KXSRVIMVTAKKXXXXXXXXXIKRIQVPRLAQPVXXPAAS

SEQ ID NO: 26976 - protein, 44 aa, Artificial Sequence
  Non-cyclic GFR-binding peptide
  MOD_RES (1), (3), (40): Xaa is C or S
XAXELHEELRNSLQELKPKKRVYEYYVVPLPEHHVRSPQXKVSS

SEQ ID NO: 26977 - protein, 40 aa, Artificial Sequence
  Non-cyclic GFR-binding peptide
  MOD_RES (34), (34): Xaa is C or S
  MOD_RES (12), (13), (14), (15), (16): Xaa is A or G
  MOD_RES (17), (18), (19), (20): Xaa is A or G or is absent
SRVVMNVQVEKXXXXXXXXXVKAVKVSRLKTPAXTPKTVH

SEQ ID NO: 26978 - protein, 35 aa, Artificial Sequence
  Non-cyclic GFR-binding peptide
  MOD_RES (2), (2): Xaa is C or S
  MOD_RES (14), (15), (16), (17), (18): Xaa is A or G
  MOD_RES (19), (20), (21), (22): Xaa is A or G or is absent
EXKNHQLFNSLQEXXXXXXXXXYYLMTLPEEETPV

SEQ ID NO: 26979 - protein, 43 aa, Artificial Sequence
  Non-cyclic GFR-binding peptide
  MOD_RES (1), (3), (40): Xaa is C or S
XAXELHEELRNSLQELKPKKRVYEYYVVPLPEHHVRSPQXKVS

SEQ ID NO: 26980 - protein, 35 aa, Artificial Sequence
  Non-cyclic GFR-binding peptide
  MOD_RES (2), (34), (35): Xaa is C or S
GXGEVVMEVTAKKVVKDYEDIKRMQVPRLETPVXX

SEQ ID NO: 26981 - protein, 37 aa, Artificial Sequence
  Non-cyclic GFR-binding peptide
  MOD_RES (2), (4): Xaa is C or S
  MOD_RES (16), (17), (18), (19), (20): Xaa is A or G
  MOD_RES (21), (22), (23), (24): Xaa is A or G or is absent
RXGXGEVVMDVTAKKXXXXXXXXXIKRMQVPRLETPV

SEQ ID NO: 26982 - protein, 40 aa, Artificial Sequence
  Non-cyclic GFR-binding peptide
  MOD_RES (2), (39): Xaa is C or S
  MOD_RES (15), (16), (17), (18), (19): Xaa is A or G
  MOD_RES (20), (21), (22), (23): Xaa is A or G or is absent
KXALHDELTNSLQEXXXXXXXXXYYLVTLPELQVQTPRXQ

SEQ ID NO: 26983 - protein, 37 aa, Artificial Sequence
  Non-cyclic GFR-binding peptide
  MOD_RES (35), (35): Xaa is C or S
HDELTNSLQEFIPKKRVIEYYLVTLPELQVQTPRXQV

SEQ ID NO: 26984 - protein, 38 aa, Artificial Sequence
  Non-cyclic GFR-binding peptide
  MOD_RES (33), (34): Xaa is C or S
  MOD_RES (11), (12), (13), (14), (15): Xaa is A or G
  MOD_RES (16), (17), (18), (19): Xaa is A or G or is absent
RVVMNVQVEKXXXXXXXXXVKAVKVSRLKTPAXXPKPV

SEQ ID NO: 26985 - protein, 42 aa, Artificial Sequence
  Non-cyclic GFR-binding peptide
  MOD_RES (1), (3), (37), (38): Xaa is C or S
  MOD_RES (15), (16), (17), (18), (19): Xaa is A or G
  MOD_RES (20), (21), (22), (23): Xaa is A or G or is absent
XGXGEVVMDSMEGIXXXXXXXXXMIQMTINSLETPVXXAKPI

SEQ ID NO: 26986 - protein, 43 aa, Artificial Sequence
  Non-cyclic GFR-binding peptide
  MOD_RES (1), (3), (37): Xaa is C or S
XEXKNHQLFNSLQEHQGQHPKIRYYVMPLPEEETPVXELGEDN

SEQ ID NO: 26987 - protein, 42 aa, Artificial Sequence
  Non-cyclic GFR-binding peptide
  MOD_RES (2), (39): Xaa is C or S
  MOD_RES (15), (16), (17), (18), (19): Xaa is A or G
  MOD_RES (20), (21), (22), (23): Xaa is A or G or is absent
AXELHEELRNSLQEXXXXXXXXXYYVVPLPEHHVRSPQXKVS

SEQ ID NO: 26988 - protein, 40 aa, Artificial Sequence
  Non-cyclic GFR-binding peptide
  MOD_RES (37), (37): Xaa is C or S
ALHDELTNSLQEFIPKKRVIEYYLVTLPELQVQTPRXQVN

SEQ ID NO: 26989 - protein, 41 aa, Artificial Sequence
  Non-cyclic GFR-binding peptide
  MOD_RES (1), (35): Xaa is C or S
  MOD_RES (13), (14), (15), (16), (17): Xaa is A or G
  MOD_RES (18), (19), (20), (21): Xaa is A or G or is absent
XSRVVMNVTAKKXXXXXXXXXIKRVQVPRLKTPAXTPKTVH

SEQ ID NO: 26990 - protein, 42 aa, Artificial Sequence
  Non-cyclic GFR-binding peptide
  MOD_RES (1), (3), (36), (37): Xaa is C or S
  MOD_RES (14), (15), (16), (17), (18): Xaa is A or G
  MOD_RES (19), (20), (21), (22): Xaa is A or G or is absent
XKXSKVVMVTAKKXXXXXXXXXIKRIQVPRLDQPVXXPSASA

SEQ ID NO: 26991 - protein, 33 aa, Artificial Sequence
  Non-cyclic GFR-binding peptide
  MOD_RES (1), (32), (33): Xaa is C or S
XSKVVMVQVEKVKPTRGVVKAIKVSRLDQPVXX

SEQ ID NO: 26992 - protein, 38 aa, Artificial Sequence
  Non-cyclic GFR-binding peptide
  MOD_RES (2), (34), (35): Xaa is C or S
GXGEVVMDVQVEKVVKENEDVKAMKVSRLETPVXXAKP

SEQ ID NO: 26993 - protein, 35 aa, Artificial Sequence
  Non-cyclic GFR-binding peptide
  MOD_RES (1), (32), (33): Xaa is C or S
XSRVIMVTAKKVKPKRGVIKRIQVPRLAQPVXXPA

SEQ ID NO: 26994 - protein, 32 aa, Artificial Sequence
  Non-cyclic GFR-binding peptide
  MOD_RES (2), (2): Xaa is C or S
KXSRVIMVTAKKVKPKRGVIKRIQVPRLAQPV

SEQ ID NO: 26995 - protein, 38 aa, Artificial Sequence
  Non-cyclic GFR-binding peptide
  MOD_RES (2), (4), (35), (36): Xaa is C or S
SXKXSKVVMVTAKKVKPTRGVIKRIQVPRLDQPVXXPS

SEQ ID NO: 26996 - protein, 34 aa, Artificial Sequence
  Non-cyclic GFR-binding peptide
  MOD_RES (1), (33), (34): Xaa is C or S
XARVVMNVQVEKIVNSSDDVKAVKVSRLQTPAXX

SEQ ID NO: 26997 - protein, 33 aa, Artificial Sequence
  Non-cyclic GFR-binding peptide
  MOD_RES (31), (32): Xaa is C or S
SRVIMVTAKKVKPKRGVIKRIQVPRLAQPVXXP

SEQ ID NO: 26998 - protein, 39 aa, Artificial Sequence
  Non-cyclic GFR-binding peptide
  MOD_RES (2), (4), (36), (37): Xaa is C or S
HXGXSRVVMNVQVEKIVNSSDDVKAVKVSRLKTPAXXPK

SEQ ID NO: 26999 - protein, 41 aa, Artificial Sequence
  Non-cyclic GFR-binding peptide
  MOD_RES (1), (3), (36), (37): Xaa is C or S
  MOD_RES (14), (15), (16), (17), (18): Xaa is A or G
  MOD_RES (19), (20), (21), (22): Xaa is A or G or is absent
XKXSRVIMSMEGIXXXXXXXXXMIQITINSLAQPVXXPAAS

SEQ ID NO: 27000 - protein, 42 aa, Artificial Sequence
  Non-cyclic GFR-binding peptide
  MOD_RES (1), (3), (40): Xaa is C or S
XAXELHEELRNSLQELKPKKRVYEYYLVTLPEHHVRSPQXKV

SEQ ID NO: 27001 - protein, 40 aa, Artificial Sequence
  Non-cyclic GFR-binding peptide
  MOD_RES (1), (35): Xaa is C or S
  MOD_RES (13), (14), (15), (16), (17): Xaa is A or G
  MOD_RES (18), (19), (20), (21): Xaa is A or G or is absent
XSRVVMNVTAKKXXXXXXXXXIKRVQVPRLKTPAXTPKTV

SEQ ID NO: 27002 - protein, 36 aa, Artificial Sequence
  Non-cyclic GFR-binding peptide
  MOD_RES (32), (33): Xaa is C or S
GEVVMDVQVEKVVKENEDVKAMKVSRLETPVXXAKP

SEQ ID NO: 27003 - protein, 40 aa, Artificial Sequence
  Non-cyclic GFR-binding peptide
  MOD_RES (34), (35): Xaa is C or S
  MOD_RES (12), (13), (14), (15), (16): Xaa is A or G
  MOD_RES (17), (18), (19), (20): Xaa is A or G or is absent
GEVVMEVTAKKXXXXXXXXXIKRMQVPRLETPVXXAKPIS

SEQ ID NO: 27004 - protein, 44 aa, Artificial Sequence
  Non-cyclic GFR-binding peptide
  MOD_RES (2), (4), (41): Xaa is C or S
  MOD_RES (17), (18), (19), (20), (21): Xaa is A or G
  MOD_RES (22), (23), (24), (25): Xaa is A or G or is absent
EXKXALHDELTNSLQEXXXXXXXXXYYLVTLPELQVQTPRXQVN

SEQ ID NO: 27005 - protein, 38 aa, Artificial Sequence
  Non-cyclic GFR-binding peptide
  MOD_RES (1), (3), (35), (36): Xaa is C or S
XGXGEVVMDVQVEKVVKENEDVKAMKVSRLETPVXXAK

SEQ ID NO: 27006 - protein, 38 aa, Artificial Sequence
  Non-cyclic GFR-binding peptide
  MOD_RES (1), (3), (35), (36): Xaa is C or S
XGXGEVVMEVQVEKVVKDYEDVKAMKVSRLETPVXXAK

SEQ ID NO: 27007 - protein, 40 aa, Artificial Sequence
  Non-cyclic GFR-binding peptide
  MOD_RES (1), (3), (36), (37): Xaa is C or S
  MOD_RES (14), (15), (16), (17), (18): Xaa is A or G
  MOD_RES (19), (20), (21), (22): Xaa is A or G or is absent
XKXSKVVMVTAKKXXXXXXXXXIKRIQVPRLDQPVXXPSA

SEQ ID NO: 27008 - protein, 40 aa, Artificial Sequence
  Non-cyclic GFR-binding peptide
  MOD_RES (34), (34): Xaa is C or S
KNHQLFNSLQEHQGQHPKIRYYVMPLPEEETPVXELGEDN

SEQ ID NO: 27009 - protein, 33 aa, Artificial Sequence
  Non-cyclic GFR-binding peptide
  MOD_RES (2), (2): Xaa is C or S
GXARVVMNSMEGIIVNSSDDMIQVTINSLQTPA

SEQ ID NO: 27010 - protein, 42 aa, Artificial Sequence
  Non-cyclic GFR-binding peptide
  MOD_RES (2), (36), (37): Xaa is C or S
  MOD_RES (14), (15), (16), (17), (18): Xaa is A or G
  MOD_RES (19), (20), (21), (22): Xaa is A or G or is absent
GXARVVMNSMEGIXXXXXXXXXMIQVTINSLQTPAXXPKPVT

SEQ ID NO: 27011 - protein, 39 aa, Artificial Sequence
  Non-cyclic GFR-binding peptide
  MOD_RES (33), (34): Xaa is C or S
  MOD_RES (11), (12), (13), (14), (15): Xaa is A or G
  MOD_RES (16), (17), (18), (19): Xaa is A or G or is absent
RVVMNSMEGIXXXXXXXXXMIQVTINSLQTPAXXPKPVT

SEQ ID NO: 27012 - protein, 36 aa, Artificial Sequence
  Non-cyclic GFR-binding peptide
  MOD_RES (2), (4), (35), (36): Xaa is C or S
SXKXSRVIMSMEGIVKPKRGVMIQITINSLAQPVXX

SEQ ID NO: 27013 - protein, 34 aa, Artificial Sequence
  Non-cyclic GFR-binding peptide
  MOD_RES (34), (34): Xaa is C or S
  MOD_RES (12), (13), (14), (15), (16): Xaa is A or G
  MOD_RES (17), (18), (19), (20): Xaa is A or G or is absent
KNHQLFNSLQEXXXXXXXXXYYVMPLPEEETPVX

SEQ ID NO: 27014 - protein, 42 aa, Artificial Sequence
  Non-cyclic GFR-binding peptide
  MOD_RES (1), (3), (40): Xaa is C or S
  MOD_RES (16), (17), (18), (19), (20): Xaa is A or G
  MOD_RES (21), (22), (23), (24): Xaa is A or G or is absent
XKXALHDELTNSLQEXXXXXXXXXYYVVPLPELQVQTPRXQV

SEQ ID NO: 27015 - protein, 38 aa, Artificial Sequence
  Non-cyclic GFR-binding peptide
  MOD_RES (1), (35), (36): Xaa is C or S
  MOD_RES (13), (14), (15), (16), (17): Xaa is A or G
  MOD_RES (18), (19), (20), (21): Xaa is A or G or is absent
XSRVVMNVQVEKXXXXXXXXXVKAVKVSRLKTPAXXPK

SEQ ID NO: 27016 - protein, 44 aa, Artificial Sequence
  Non-cyclic GFR-binding peptide
  MOD_RES (2), (4), (38), (39): Xaa is C or S
  MOD_RES (16), (17), (18), (19), (20): Xaa is A or G
  MOD_RES (21), (22), (23), (24): Xaa is A or G or is absent
RXGXGEVVMDVTAKKXXXXXXXXXIKRMQVPRLETPVXXAKPIK

SEQ ID NO: 27017 - protein, 35 aa, Artificial Sequence
  Non-cyclic GFR-binding peptide
  MOD_RES (2), (2): Xaa is C or S
EXKNHQLFNSLQEHQGQHPKIRYYLMTLPEEETPV

SEQ ID NO: 27018 - protein, 36 aa, Artificial Sequence
  Non-cyclic GFR-binding peptide
  MOD_RES (1), (34), (35): Xaa is C or S
  MOD_RES (12), (13), (14), (15), (16): Xaa is A or G
  MOD_RES (17), (18), (19), (20): Xaa is A or G or is absent
XSKVVMSMEGIXXXXXXXXXMIQITINSLDQPVXXP

SEQ ID NO: 27019 - protein, 38 aa, Artificial Sequence
  Non-cyclic GFR-binding peptide
  MOD_RES (2), (34), (35): Xaa is C or S
GXARVVMNVTAKKIVNSSDDIKRVQVPRLQTPAXXPKP

SEQ ID NO: 27020 - protein, 34 aa, Artificial Sequence
  Non-cyclic GFR-binding peptide
ALHDELTNSLQEFIPKKRVIEYYVVPLPELQVQT

SEQ ID NO: 27021 - protein, 41 aa, Artificial Sequence
  Non-cyclic GFR-binding peptide
  MOD_RES (37), (37): Xaa is C or S
  MOD_RES (13), (14), (15), (16), (17): Xaa is A or G
  MOD_RES (18), (19), (20), (21): Xaa is A or G or is absent
ALHDELTNSLQEXXXXXXXXXYYVVPLPELQVQTPRXQVNR

SEQ ID NO: 27022 - protein, 36 aa, Artificial Sequence
  Non-cyclic GFR-binding peptide
  MOD_RES (1), (35), (36): Xaa is C or S
  MOD_RES (13), (14), (15), (16), (17): Xaa is A or G
  MOD_RES (18), (19), (20), (21): Xaa is A or G or is absent
XARVVMNVQVEKXXXXXXXXXVKAVKVSRLQTPAXX

SEQ ID NO: 27023 - protein, 43 aa, Artificial Sequence
  Non-cyclic GFR-binding peptide
  MOD_RES (1), (3), (37): Xaa is C or S
  MOD_RES (15), (16), (17), (18), (19): Xaa is A or G
  MOD_RES (20), (21), (22), (23): Xaa is A or G or is absent
XGXSRVVMNVTAKKXXXXXXXXXIKRVQVPRLKTPAXTPKTVH

SEQ ID NO: 27024 - protein, 36 aa, Artificial Sequence
  Non-cyclic GFR-binding peptide
  MOD_RES (1), (35), (36): Xaa is C or S
  MOD_RES (13), (14), (15), (16), (17): Xaa is A or G
  MOD_RES (18), (19), (20), (21): Xaa is A or G or is absent
XGEVVMEVQVEKXXXXXXXXXVKAMKVSRLETPVXX

SEQ ID NO: 27025 - protein, 43 aa, Artificial Sequence
  Non-cyclic GFR-binding peptide
  MOD_RES (2), (4), (37), (38): Xaa is C or S
  MOD_RES (15), (16), (17), (18), (19): Xaa is A or G
  MOD_RES (20), (21), (22), (23): Xaa is A or G or is absent
SXKXSKVIMVQVEKXXXXXXXXXVKAIKVSRLDQSVXXPSASA

SEQ ID NO: 27026 - protein, 37 aa, Artificial Sequence
  Non-cyclic GFR-binding peptide
  MOD_RES (31), (32): Xaa is C or S
SKVIMVQVEKIKPTKGIVKAIKVSRLDQSVXXPSASA

SEQ ID NO: 27027 - protein, 38 aa, Artificial Sequence
  Non-cyclic GFR-binding peptide
  MOD_RES (1), (3), (35), (36): Xaa is C or S
XGXSRVVMNSMEGIIVNSSDDMIQVTINSLKTPAXXPK

SEQ ID NO: 27028 - protein, 37 aa, Artificial Sequence
  Non-cyclic GFR-binding peptide
  MOD_RES (33), (34): Xaa is C or S
  MOD_RES (11), (12), (13), (14), (15): Xaa is A or G
  MOD_RES (16), (17), (18), (19): Xaa is A or G or is absent
SKVIMVQVEKXXXXXXXXXVKAIKVSRLDQSVXXPSA

SEQ ID NO: 27029 - protein, 43 aa, Artificial Sequence
  Non-cyclic GFR-binding peptide
  MOD_RES (2), (4), (38), (39): Xaa is C or S
  MOD_RES (16), (17), (18), (19), (20): Xaa is A or G
  MOD_RES (21), (22), (23), (24): Xaa is A or G or is absent
RXGXGEVVMEVQVEKXXXXXXXXXVKAMKVSRLETPVXXAKPI

SEQ ID NO: 27030 - protein, 42 aa, Artificial Sequence
  Non-cyclic GFR-binding peptide
  MOD_RES (1), (3), (36), (37): Xaa is C or S
  MOD_RES (14), (15), (16), (17), (18): Xaa is A or G
  MOD_RES (19), (20), (21), (22): Xaa is A or G or is absent
XKXSKVIMVQVEKXXXXXXXXXVKAIKVSRLDQSVXXPSASA

SEQ ID NO: 27031 - protein, 41 aa, Artificial Sequence
  Non-cyclic GFR-binding peptide
  MOD_RES (1), (35), (36): Xaa is C or S
  MOD_RES (13), (14), (15), (16), (17): Xaa is A or G
  MOD_RES (18), (19), (20), (21): Xaa is A or G or is absent
XARVVMNVTAKKXXXXXXXXXIKRVQVPRLQTPAXXPKPVT

SEQ ID NO: 27032 - protein, 37 aa, Artificial Sequence
  Non-cyclic GFR-binding peptide
  MOD_RES (34), (34): Xaa is C or S
KNHQLFNSLQEHQGQHPKIRYYLMTLPEEETPVXELG

SEQ ID NO: 27033 - protein, 33 aa, Artificial Sequence
  Non-cyclic GFR-binding peptide
  MOD_RES (12), (13), (14), (15), (16): Xaa is A or G
  MOD_RES (17), (18), (19), (20): Xaa is A or G or is absent
KNHQLFNSLQEXXXXXXXXXYYVMPLPEEETPV

SEQ ID NO: 27034 - protein, 40 aa, Artificial Sequence
  Non-cyclic GFR-binding peptide
  MOD_RES (2), (35), (36): Xaa is C or S
  MOD_RES (13), (14), (15), (16), (17): Xaa is A or G
  MOD_RES (18), (19), (20), (21): Xaa is A or G or is absent
KXSKVIMVTAKKXXXXXXXXXIKRIQVPRLDQSVXXPSAS

SEQ ID NO: 27035 - protein, 33 aa, Artificial Sequence
  Non-cyclic GFR-binding peptide
  MOD_RES (1), (33): Xaa is C or S
XARVVMNVQVEKIVNSSDDVKAVKVSRLQTPAX

SEQ ID NO: 27036 - protein, 30 aa, Artificial Sequence
  Non-cyclic GFR-binding peptide
SRVIMSMEGIVKPKRGVMIQITINSLAQPV

SEQ ID NO: 27037 - protein, 33 aa, Artificial Sequence
  Non-cyclic GFR-binding peptide
  MOD_RES (32), (32): Xaa is C or S
SRVVMNVQVEKIVNSSDDVKAVKVSRLKTPAXT

SEQ ID NO: 27038 - protein, 36 aa, Artificial Sequence
  Non-cyclic GFR-binding peptide
  MOD_RES (2), (33), (34): Xaa is C or S
KXSKVIMSMEGIIKPTKGIMIQITINSLDQSVXXPS

SEQ ID NO: 27039 - protein, 37 aa, Artificial Sequence
  Non-cyclic GFR-binding peptide
  MOD_RES (32), (33): Xaa is C or S
GEVVMDSMEGIVVKENEDMIQMTINSLETPVXXAKPI

SEQ ID NO: 27040 - protein, 37 aa, Artificial Sequence
  Non-cyclic GFR-binding peptide
  MOD_RES (31), (31): Xaa is C or S
RVVMNVTAKKIVNSSDDIKRVQVPRLKTPAXTPKTVH

SEQ ID NO: 27041 - protein, 42 aa, Artificial Sequence
  Non-cyclic GFR-binding peptide
  MOD_RES (1), (3), (37): Xaa is C or S
  MOD_RES (15), (16), (17), (18), (19): Xaa is A or G
  MOD_RES (20), (21), (22), (23): Xaa is A or G or is absent
XGXSRVVMNVQVEKXXXXXXXXXVKAVKVSRLKTPAXTPKTV

SEQ ID NO: 27042 - protein, 33 aa, Artificial Sequence
  Non-cyclic GFR-binding peptide
  MOD_RES (31), (32): Xaa is C or S
EVVMDVQVEKVVKENEDVKAMKVSRLETPVXXA

SEQ ID NO: 27043 - protein, 33 aa, Artificial Sequence
  Non-cyclic GFR-binding peptide
  MOD_RES (31), (32): Xaa is C or S
SRVIMVQVEKVKPKRGVVKAIKVSRLAQPVXXP

SEQ ID NO: 27044 - protein, 35 aa, Artificial Sequence
  Non-cyclic GFR-binding peptide
  MOD_RES (2), (4): Xaa is C or S
HXGXSRVVMNSMEGIIVNSSDDMIQVTINSLKTPA

SEQ ID NO: 27045 - protein, 38 aa, Artificial Sequence
  Non-cyclic GFR-binding peptide
  MOD_RES (1), (35): Xaa is C or S
XKNHQLFNSLQEHQGQHPKIRYYLMTLPEEETPVXELG

SEQ ID NO: 27046 - protein, 32 aa, Artificial Sequence
  Non-cyclic GFR-binding peptide
  MOD_RES (31), (32): Xaa is C or S
SKVIMVQVEKIKPTKGIVKAIKVSRLDQSVXX

SEQ ID NO: 27047 - protein, 36 aa, Artificial Sequence
  Non-cyclic GFR-binding peptide
  MOD_RES (35), (35): Xaa is C or S
HEELRNSLQELKPKKRVYEYYVVPLPEHHVRSPQXK

SEQ ID NO: 27048 - protein, 36 aa, Artificial Sequence
  Non-cyclic GFR-binding peptide
  MOD_RES (33), (34): Xaa is C or S
  MOD_RES (11), (12), (13), (14), (15): Xaa is A or G
  MOD_RES (16), (17), (18), (19): Xaa is A or G or is absent
SKVVMVTAKKXXXXXXXXXIKRIQVPRLDQPVXXPS

SEQ ID NO: 27049 - protein, 38 aa, Artificial Sequence
  Non-cyclic GFR-binding peptide
  MOD_RES (2), (2): Xaa is C or S
  MOD_RES (15), (16), (17), (18), (19): Xaa is A or G
  MOD_RES (20), (21), (22), (23): Xaa is A or G or is absent
KXALHDELTNSLQEXXXXXXXXXYYVVPLPELQVQTPR

SEQ ID NO: 27050 - protein, 38 aa, Artificial Sequence
  Non-cyclic GFR-binding peptide
  MOD_RES (1), (3): Xaa is C or S
XAXELHEELRNSLQELKPKKRVYEYYVVPLPEHHVRSP

SEQ ID NO: 27051 - protein, 36 aa, Artificial Sequence
  Non-cyclic GFR-binding peptide
ALHDELTNSLQEFIPKKRVIEYYLVTLPELQVQTPR

SEQ ID NO: 27052 - protein, 33 aa, Artificial Sequence
  Non-cyclic GFR-binding peptide
  MOD_RES (1), (33): Xaa is C or S
XSRVVMNVTAKKIVNSSDDIKRVQVPRLKTPAX

SEQ ID NO: 27053 - protein, 33 aa, Artificial Sequence
  Non-cyclic GFR-binding peptide
  MOD_RES (1), (1): Xaa is C or S
  MOD_RES (12), (13), (14), (15), (16): Xaa is A or G
  MOD_RES (17), (18), (19), (20): Xaa is A or G or is absent
XSKVIMSMEGIXXXXXXXXXMIQITINSLDQSV

SEQ ID NO: 27054 - protein, 38 aa, Artificial Sequence
  Non-cyclic GFR-binding peptide
  MOD_RES (36), (36): Xaa is C or S
  MOD_RES (12), (13), (14), (15), (16): Xaa is A or G
  MOD_RES (17), (18), (19), (20): Xaa is A or G or is absent
LHEELRNSLQEXXXXXXXXXYYLVTLPEHHVRSPQXKV

SEQ ID NO: 27055 - protein, 35 aa, Artificial Sequence
  Non-cyclic GFR-binding peptide
ELHEELRNSLQELKPKKRVYEYYLVTLPEHHVRSP

SEQ ID NO: 27056 - protein, 31 aa, Artificial Sequence
  Non-cyclic GFR-binding peptide
SRVVMNVTAKKIVNSSDDIKRVQVPRLKTPA

SEQ ID NO: 27057 - protein, 38 aa, Artificial Sequence
  Non-cyclic GFR-binding peptide
  MOD_RES (34), (35): Xaa is C or S
  MOD_RES (12), (13), (14), (15), (16): Xaa is A or G
  MOD_RES (17), (18), (19), (20): Xaa is A or G or is absent
GEVVMEVQVEKXXXXXXXXXVKAMKVSRLETPVXXAKP

SEQ ID NO: 27058 - protein, 38 aa, Artificial Sequence
  Non-cyclic GFR-binding peptide
  MOD_RES (1), (35): Xaa is C or S
  MOD_RES (13), (14), (15), (16), (17): Xaa is A or G
  MOD_RES (18), (19), (20), (21): Xaa is A or G or is absent
XKNHQLFNSLQEXXXXXXXXXYYLMTLPEEETPVXELG

SEQ ID NO: 27059 - protein, 42 aa, Artificial Sequence
  Non-cyclic GFR-binding peptide
  MOD_RES (2), (4), (36), (37): Xaa is C or S
RXGXGEVVMEVQVEKVVKDYEDVKAMKVSRLETPVXXAKPIS

SEQ ID NO: 27060 - protein, 38 aa, Artificial Sequence
  Non-cyclic GFR-binding peptide
  MOD_RES (2), (34), (35): Xaa is C or S
GXSRVVMNVTAKKIVNSSDDIKRVQVPRLKTPAXXPKP

SEQ ID NO: 27061 - protein, 38 aa, Artificial Sequence
  Non-cyclic GFR-binding peptide
  MOD_RES (2), (33), (34): Xaa is C or S
KXSRVIMVTAKKVKPKRGVIKRIQVPRLAQPVXXPAAS

SEQ ID NO: 27062 - protein, 41 aa, Artificial Sequence
  Non-cyclic GFR-binding peptide
  MOD_RES (1), (3), (40): Xaa is C or S
  MOD_RES (16), (17), (18), (19), (20): Xaa is A or G
  MOD_RES (21), (22), (23), (24): Xaa is A or G or is absent
XAXELHEELRNSLQEXXXXXXXXXYYLVTLPEHHVRSPQXK

SEQ ID NO: 27063 - protein, 36 aa, Artificial Sequence
  Non-cyclic GFR-binding peptide
  MOD_RES (34), (35): Xaa is C or S
  MOD_RES (12), (13), (14), (15), (16): Xaa is A or G
  MOD_RES (17), (18), (19), (20): Xaa is A or G or is absent
GEVVMESMEGIXXXXXXXXXMIQMTINSLETPVXXA

SEQ ID NO: 27064 - protein, 36 aa, Artificial Sequence
  Non-cyclic GFR-binding peptide
  MOD_RES (35), (35): Xaa is C or S
HEELRNSLQELKPKKRVYEYYLVTLPEHHVRSPQXK

SEQ ID NO: 27065 - protein, 40 aa, Artificial Sequence
  Non-cyclic GFR-binding peptide
  MOD_RES (36), (36): Xaa is C or S
LHEELRNSLQELKPKKRVYEYYVVPLPEHHVRSPQXKVSS

SEQ ID NO: 27066 - protein, 38 aa, Artificial Sequence
  Non-cyclic GFR-binding peptide
  MOD_RES (1), (35), (36): Xaa is C or S
  MOD_RES (13), (14), (15), (16), (17): Xaa is A or G
  MOD_RES (18), (19), (20), (21): Xaa is A or G or is absent
XGEVVMDVQVEKXXXXXXXXXVKAMKVSRLETPVXXAK

SEQ ID NO: 27067 - protein, 39 aa, Artificial Sequence
  Non-cyclic GFR-binding peptide
  MOD_RES (1), (3), (35), (36): Xaa is C or S
XGXGEVVMDVQVEKVVKENEDVKAMKVSRLETPVXXAKP

SEQ ID NO: 27068 - protein, 36 aa, Artificial Sequence
  Non-cyclic GFR-binding peptide
  MOD_RES (33), (34): Xaa is C or S
  MOD_RES (11), (12), (13), (14), (15): Xaa is A or G
  MOD_RES (16), (17), (18), (19): Xaa is A or G or is absent
SKVVMVQVEKXXXXXXXXXVKAIKVSRLDQPVXXPS

SEQ ID NO: 27069 - protein, 36 aa, Artificial Sequence
  Non-cyclic GFR-binding peptide
  MOD_RES (1), (3), (35), (36): Xaa is C or S
XGXGEVVMESMEGIVVKDYEDMIQMTINSLETPVXX

SEQ ID NO: 27070 - protein, 37 aa, Artificial Sequence
  Non-cyclic GFR-binding peptide
  MOD_RES (2), (4), (36), (37): Xaa is C or S
HXGXARVVMNVQVEKIVNSSDDVKAVKVSRLQTPAXX

SEQ ID NO: 27071 - protein, 37 aa, Artificial Sequence
  Non-cyclic GFR-binding peptide
  MOD_RES (33), (34): Xaa is C or S
  MOD_RES (11), (12), (13), (14), (15): Xaa is A or G
  MOD_RES (16), (17), (18), (19): Xaa is A or G or is absent
SKVVMSMEGIXXXXXXXXXMIQITINSLDQPVXXPSA

SEQ ID NO: 27072 - protein, 36 aa, Artificial Sequence
  Non-cyclic GFR-binding peptide
  MOD_RES (1), (33): Xaa is C or S
XSRVVMNVQVEKIVNSSDDVKAVKVSRLKTPAXTPK

SEQ ID NO: 27073 - protein, 38 aa, Artificial Sequence
  Non-cyclic GFR-binding peptide
  MOD_RES (1), (35), (36): Xaa is C or S
  MOD_RES (13), (14), (15), (16), (17): Xaa is A or G
  MOD_RES (18), (19), (20), (21): Xaa is A or G or is absent
XARVVMNSMEGIXXXXXXXXXMIQVTINSLQTPAXXPK

SEQ ID NO: 27074 - protein, 39 aa, Artificial Sequence
  Non-cyclic GFR-binding peptide
  MOD_RES (2), (39): Xaa is C or S
AXELHEELRNSLQELKPKKRVYEYYVVPLPEHHVRSPQX

SEQ ID NO: 27075 - protein, 36 aa, Artificial Sequence
  Non-cyclic GFR-binding peptide
  MOD_RES (1), (35), (36): Xaa is C or S
  MOD_RES (13), (14), (15), (16), (17): Xaa is A or G
  MOD_RES (18), (19), (20), (21): Xaa is A or G or is absent
XGEVVMDSMEGIXXXXXXXXXMIQMTINSLETPVXX

SEQ ID NO: 27076 - protein, 43 aa, Artificial Sequence
  Non-cyclic GFR-binding peptide
  MOD_RES (1), (3), (37): Xaa is C or S
  MOD_RES (15), (16), (17), (18), (19): Xaa is A or G
  MOD_RES (20), (21), (22), (23): Xaa is A or G or is absent
XGXSRVVMNSMEGIXXXXXXXXXMIQVTINSLKTPAXTPKTVH

SEQ ID NO: 27077 - protein, 33 aa, Artificial Sequence
  Non-cyclic GFR-binding peptide
  MOD_RES (12), (13), (14), (15), (16): Xaa is A or G
  MOD_RES (17), (18), (19), (20): Xaa is A or G or is absent
SRVVMNSMEGIXXXXXXXXXMIQVTINSLKTPA

SEQ ID NO: 27078 - protein, 41 aa, Artificial Sequence
  Non-cyclic GFR-binding peptide
  MOD_RES (2), (4), (36), (37): Xaa is C or S
HXGXSRVVMNSMEGIIVNSSDDMIQVTINSLKTPAXXPKPV

SEQ ID NO: 27079 - protein, 41 aa, Artificial Sequence
  Non-cyclic GFR-binding peptide
  MOD_RES (2), (36), (37): Xaa is C or S
  MOD_RES (14), (15), (16), (17), (18): Xaa is A or G
  MOD_RES (19), (20), (21), (22): Xaa is A or G or is absent
GXGEVVMEVTAKKXXXXXXXXXIKRMQVPRLETPVXXAKPI

SEQ ID NO: 27080 - protein, 35 aa, Artificial Sequence
  Non-cyclic GFR-binding peptide
  MOD_RES (1), (33): Xaa is C or S
XSRVVMNVTAKKIVNSSDDIKRVQVPRLKTPAXTP

SEQ ID NO: 27081 - protein, 37 aa, Artificial Sequence
  Non-cyclic GFR-binding peptide
  MOD_RES (36), (36): Xaa is C or S
LHDELTNSLQEFIPKKRVIEYYLVTLPELQVQTPRXQ

SEQ ID NO: 27082 - protein, 32 aa, Artificial Sequence
  Non-cyclic GFR-binding peptide
  MOD_RES (11), (12), (13), (14), (15): Xaa is A or G
  MOD_RES (16), (17), (18), (19): Xaa is A or G or is absent
RVVMNSMEGIXXXXXXXXXMIQVTINSLQTPA

SEQ ID NO: 27083 - protein, 37 aa, Artificial Sequence
  Non-cyclic GFR-binding peptide
  MOD_RES (1), (3), (35), (36): Xaa is C or S
XGXGEVVMESMEGIVVKDYEDMIQMTINSLETPVXXA

SEQ ID NO: 27084 - protein, 42 aa, Artificial Sequence
  Non-cyclic GFR-binding peptide
  MOD_RES (1), (3), (37), (38): Xaa is C or S
  MOD_RES (15), (16), (17), (18), (19): Xaa is A or G
  MOD_RES (20), (21), (22), (23): Xaa is A or G or is absent
XGXGEVVMDVQVEKXXXXXXXXXVKAMKVSRLETPVXXAKPI

SEQ ID NO: 27085 - protein, 41 aa, Artificial Sequence
  Non-cyclic GFR-binding peptide
  MOD_RES (1), (35), (36): Xaa is C or S
  MOD_RES (13), (14), (15), (16), (17): Xaa is A or G
  MOD_RES (18), (19), (20), (21): Xaa is A or G or is absent
XGEVVMDVTAKKXXXXXXXXXIKRMQVPRLETPVXXAKPIK

SEQ ID NO: 27086 - protein, 39 aa, Artificial Sequence
  Non-cyclic GFR-binding peptide
  MOD_RES (2), (4), (36): Xaa is C or S
HXGXSRVVMNVTAKKIVNSSDDIKRVQVPRLKTPAXTPK

SEQ ID NO: 27087 - protein, 37 aa, Artificial Sequence
  Non-cyclic GFR-binding peptide
  MOD_RES (1), (3), (37): Xaa is C or S
  MOD_RES (15), (16), (17), (18), (19): Xaa is A or G
  MOD_RES (20), (21), (22), (23): Xaa is A or G or is absent
XGXGEVVMDSMEGIXXXXXXXXXMIQMTINSLETPVX

SEQ ID NO: 27088 - protein, 37 aa, Artificial Sequence
  Non-cyclic GFR-binding peptide
  MOD_RES (1), (35), (36): Xaa is C or S
  MOD_RES (13), (14), (15), (16), (17): Xaa is A or G
  MOD_RES (18), (19), (20), (21): Xaa is A or G or is absent
XARVVMNVQVEKXXXXXXXXXVKAVKVSRLQTPAXXP

SEQ ID NO: 27089 - protein, 37 aa, Artificial Sequence
  Non-cyclic GFR-binding peptide
  MOD_RES (2), (4): Xaa is C or S
  MOD_RES (16), (17), (18), (19), (20): Xaa is A or G
  MOD_RES (21), (22), (23), (24): Xaa is A or G or is absent
HXGXARVVMNVQVEKXXXXXXXXXVKAVKVSRLQTPA

SEQ ID NO: 27090 - protein, 32 aa, Artificial Sequence
  Non-cyclic GFR-binding peptide
  MOD_RES (31), (31): Xaa is C or S
RVVMNSMEGIIVNSSDDMIQVTINSLKTPAXT

SEQ ID NO: 27091 - protein, 43 aa, Artificial Sequence
  Non-cyclic GFR-binding peptide
  MOD_RES (1), (3), (37): Xaa is C or S
XEXKNHQLFNSLQEHQGQHPKIRYYLMTLPEEETPVXELGEDN

SEQ ID NO: 27092 - protein, 39 aa, Artificial Sequence
  Non-cyclic GFR-binding peptide
  MOD_RES (2), (4): Xaa is C or S
EXKXALHDELTNSLQEFIPKKRVIEYYLVTLPELQVQTP

SEQ ID NO: 27093 - protein, 42 aa, Artificial Sequence
  Non-cyclic GFR-binding peptide
  MOD_RES (1), (3), (36), (37): Xaa is C or S
  MOD_RES (14), (15), (16), (17), (18): Xaa is A or G
  MOD_RES (19), (20), (21), (22): Xaa is A or G or is absent
XKXSRVIMVQVEKXXXXXXXXXVKAIKVSRLAQPVXXPAASA

SEQ ID NO: 27094 - protein, 38 aa, Artificial Sequence
  Non-cyclic GFR-binding peptide
  MOD_RES (33), (34): Xaa is C or S
  MOD_RES (11), (12), (13), (14), (15): Xaa is A or G
  MOD_RES (16), (17), (18), (19): Xaa is A or G or is absent
RVVMNSMEGIXXXXXXXXXMIQVTINSLQTPAXXPKPV

SEQ ID NO: 27095 - protein, 36 aa, Artificial Sequence
  Non-cyclic GFR-binding peptide
  MOD_RES (1), (1): Xaa is C or S
  MOD_RES (14), (15), (16), (17), (18): Xaa is A or G
  MOD_RES (19), (20), (21), (22): Xaa is A or G or is absent
XALHDELTNSLQEXXXXXXXXXYYVVPLPELQVQTP

SEQ ID NO: 27096 - protein, 37 aa, Artificial Sequence
  Non-cyclic GFR-binding peptide
  MOD_RES (1), (3), (35), (36): Xaa is C or S
XGXGEVVMDSMEGIVVKENEDMIQMTINSLETPVXXA

SEQ ID NO: 27097 - protein, 40 aa, Artificial Sequence
  Non-cyclic GFR-binding peptide
  MOD_RES (34), (35): Xaa is C or S
  MOD_RES (12), (13), (14), (15), (16): Xaa is A or G
  MOD_RES (17), (18), (19), (20): Xaa is A or G or is absent
GEVVMDVTAKKXXXXXXXXXIKRMQVPRLETPVXXAKPIK

SEQ ID NO: 27098 - protein, 41 aa, Artificial Sequence
  Non-cyclic GFR-binding peptide
  MOD_RES (37), (37): Xaa is C or S
  MOD_RES (13), (14), (15), (16), (17): Xaa is A or G
  MOD_RES (18), (19), (20), (21): Xaa is A or G or is absent
ELHEELRNSLQEXXXXXXXXXYYLVTLPEHHVRSPQXKVSS

SEQ ID NO: 27099 - protein, 39 aa, Artificial Sequence
  Non-cyclic GFR-binding peptide
  MOD_RES (34), (35): Xaa is C or S
  MOD_RES (12), (13), (14), (15), (16): Xaa is A or G
  MOD_RES (17), (18), (19), (20): Xaa is A or G or is absent
SRVVMNSMEGIXXXXXXXXXMIQVTINSLKTPAXXPKPV

SEQ ID NO: 27100 - protein, 35 aa, Artificial Sequence
  Non-cyclic GFR-binding peptide
  MOD_RES (31), (32): Xaa is C or S
SKVVMSMEGIVKPTRGVMIQITINSLDQPVXXPSA

SEQ ID NO: 27101 - protein, 41 aa, Artificial Sequence
  Non-cyclic GFR-binding peptide
  MOD_RES (2), (35), (36): Xaa is C or S
  MOD_RES (13), (14), (15), (16), (17): Xaa is A or G
  MOD_RES (18), (19), (20), (21): Xaa is A or G or is absent
KXSRVIMVTAKKXXXXXXXXXIKRIQVPRLAQPVXXPAASA

SEQ ID NO: 27102 - protein, 31 aa, Artificial Sequence
  Non-cyclic GFR-binding peptide
  MOD_RES (31), (31): Xaa is C or S
SKVIMVQVEKIKPTKGIVKAIKVSRLDQSVX

SEQ ID NO: 27103 - protein, 34 aa, Artificial Sequence
  Non-cyclic GFR-binding peptide
  MOD_RES (1), (33), (34): Xaa is C or S
XARVVMNSMEGIIVNSSDDMIQVTINSLQTPAXX

SEQ ID NO: 27104 - protein, 35 aa, Artificial Sequence
  Non-cyclic GFR-binding peptide
  MOD_RES (2), (34): Xaa is C or S
GXSRVVMNVQVEKIVNSSDDVKAVKVSRLKTPAXT

SEQ ID NO: 27105 - protein, 39 aa, Artificial Sequence
  Non-cyclic GFR-binding peptide
  MOD_RES (1), (3), (35), (36): Xaa is C or S
XGXGEVVMEVQVEKVVKDYEDVKAMKVSRLETPVXXAKP

SEQ ID NO: 27106 - protein, 38 aa, Artificial Sequence
  Non-cyclic GFR-binding peptide
  MOD_RES (36), (36): Xaa is C or S
LHEELRNSLQELKPKKRVYEYYVVPLPEHHVRSPQXKV

SEQ ID NO: 27107 - protein, 31 aa, Artificial Sequence
  Non-cyclic GFR-binding peptide
GEVVMDVTAKKVVKENEDIKRMQVPRLETPV

SEQ ID NO: 27108 - protein, 34 aa, Artificial Sequence
  Non-cyclic GFR-binding peptide
  MOD_RES (1), (34): Xaa is C or S
  MOD_RES (12), (13), (14), (15), (16): Xaa is A or G
  MOD_RES (17), (18), (19), (20): Xaa is A or G or is absent
XSKVIMVQVEKXXXXXXXXXVKAIKVSRLDQSVX

SEQ ID NO: 27109 - protein, 37 aa, Artificial Sequence
  Non-cyclic GFR-binding peptide
  MOD_RES (2), (34), (35): Xaa is C or S
GXGEVVMDVTAKKVVKENEDIKRMQVPRLETPVXXAK

SEQ ID NO: 27110 - protein, 41 aa, Artificial Sequence
  Non-cyclic GFR-binding peptide
  MOD_RES (2), (4), (36): Xaa is C or S
HXGXSRVVMNSMEGIIVNSSDDMIQVTINSLKTPAXTPKTV

SEQ ID NO: 27111 - protein, 39 aa, Artificial Sequence
  Non-cyclic GFR-binding peptide
  MOD_RES (2), (34): Xaa is C or S
GXSRVVMNVTAKKIVNSSDDIKRVQVPRLKTPAXTPKTV

SEQ ID NO: 27112 - protein, 35 aa, Artificial Sequence
  Non-cyclic GFR-binding peptide
  MOD_RES (2), (4): Xaa is C or S
RXGXGEVVMDSMEGIVVKENEDMIQMTINSLETPV

SEQ ID NO: 27113 - protein, 38 aa, Artificial Sequence
  Non-cyclic GFR-binding peptide
  MOD_RES (2), (4), (36), (37): Xaa is C or S
RXGXGEVVMEVTAKKVVKDYEDIKRMQVPRLETPVXXA

SEQ ID NO: 27114 - protein, 36 aa, Artificial Sequence
  Non-cyclic GFR-binding peptide
  MOD_RES (1), (33): Xaa is C or S
XSRVVMNSMEGIIVNSSDDMIQVTINSLKTPAXTPK

SEQ ID NO: 27115 - protein, 34 aa, Artificial Sequence
  Non-cyclic GFR-binding peptide
  MOD_RES (2), (4): Xaa is C or S
SXKXSKVVMVQVEKVKPTRGVVKAIKVSRLDQPV

SEQ ID NO: 27116 - protein, 41 aa, Artificial Sequence
  Non-cyclic GFR-binding peptide
  MOD_RES (2), (4), (38), (39): Xaa is C or S
  MOD_RES (16), (17), (18), (19), (20): Xaa is A or G
  MOD_RES (21), (22), (23), (24): Xaa is A or G or is absent
RXGXGEVVMESMEGIXXXXXXXXXMIQMTINSLETPVXXAK

SEQ ID NO: 27117 - protein, 37 aa, Artificial Sequence
  Non-cyclic GFR-binding peptide
  MOD_RES (2), (4): Xaa is C or S
  MOD_RES (16), (17), (18), (19), (20): Xaa is A or G
  MOD_RES (21), (22), (23), (24): Xaa is A or G or is absent
RXGXGEVVMEVQVEKXXXXXXXXXVKAMKVSRLETPV

SEQ ID NO: 27118 - protein, 39 aa, Artificial Sequence
  Non-cyclic GFR-binding peptide
  MOD_RES (2), (33), (34): Xaa is C or S
KXSKVIMVTAKKIKPTKGIIKRIQVPRLDQSVXXPSASA

SEQ ID NO: 27119 - protein, 37 aa, Artificial Sequence
  Non-cyclic GFR-binding peptide
  MOD_RES (31), (32): Xaa is C or S
SKVIMSMEGIIKPTKGIMIQITINSLDQSVXXPSASA

SEQ ID NO: 27120 - protein, 37 aa, Artificial Sequence
  Non-cyclic GFR-binding peptide
  MOD_RES (2), (4): Xaa is C or S
  MOD_RES (16), (17), (18), (19), (20): Xaa is A or G
  MOD_RES (21), (22), (23), (24): Xaa is A or G or is absent
RXGXGEVVMDSMEGIXXXXXXXXXMIQMTINSLETPV

SEQ ID NO: 27121 - protein, 38 aa, Artificial Sequence
  Non-cyclic GFR-binding peptide
  MOD_RES (33), (34): Xaa is C or S
  MOD_RES (11), (12), (13), (14), (15): Xaa is A or G
  MOD_RES (16), (17), (18), (19): Xaa is A or G or is absent
SKVIMSMEGIXXXXXXXXXMIQITINSLDQSVXXPSAS

SEQ ID NO: 27122 - protein, 32 aa, Artificial Sequence
  Non-cyclic GFR-binding peptide
  MOD_RES (11), (12), (13), (14), (15): Xaa is A or G
  MOD_RES (16), (17), (18), (19): Xaa is A or G or is absent
SKVVMVQVEKXXXXXXXXXVKAIKVSRLDQPV

SEQ ID NO: 27123 - protein, 36 aa, Artificial Sequence
  Non-cyclic GFR-binding peptide
  MOD_RES (33), (34): Xaa is C or S
  MOD_RES (11), (12), (13), (14), (15): Xaa is A or G
  MOD_RES (16), (17), (18), (19): Xaa is A or G or is absent
EVVMDVTAKKXXXXXXXXXIKRMQVPRLETPVXXAK

SEQ ID NO: 27124 - protein, 37 aa, Artificial Sequence
  Non-cyclic GFR-binding peptide
  MOD_RES (1), (3), (37): Xaa is C or S
XEXKNHQLFNSLQEHQGQHPKIRYYVMPLPEEETPVX

SEQ ID NO: 27125 - protein, 35 aa, Artificial Sequence
  Non-cyclic GFR-binding peptide
  MOD_RES (1), (1): Xaa is C or S
  MOD_RES (14), (15), (16), (17), (18): Xaa is A or G
  MOD_RES (19), (20), (21), (22): Xaa is A or G or is absent
XALHDELTNSLQEXXXXXXXXXYYLVTLPELQVQT

SEQ ID NO: 27126 - protein, 41 aa, Artificial Sequence
  Non-cyclic GFR-binding peptide
  MOD_RES (1), (3), (35): Xaa is C or S
XGXSRVVMNVTAKKIVNSSDDIKRVQVPRLKTPAXTPKTVH

SEQ ID NO: 27127 - protein, 36 aa, Artificial Sequence
  Non-cyclic GFR-binding peptide
  MOD_RES (31), (32): Xaa is C or S
RVVMNVTAKKIVNSSDDIKRVQVPRLKTPAXXPKPV

SEQ ID NO: 27128 - protein, 37 aa, Artificial Sequence
  Non-cyclic GFR-binding peptide
  MOD_RES (1), (35), (36): Xaa is C or S
  MOD_RES (13), (14), (15), (16), (17): Xaa is A or G
  MOD_RES (18), (19), (20), (21): Xaa is A or G or is absent
XARVVMNVTAKKXXXXXXXXXIKRVQVPRLQTPAXXP

SEQ ID NO: 27129 - protein, 40 aa, Artificial Sequence
  Non-cyclic GFR-binding peptide
  MOD_RES (36), (36): Xaa is C or S
LHDELTNSLQEFIPKKRVIEYYLVTLPELQVQTPRXQVNR

SEQ ID NO: 27130 - protein, 39 aa, Artificial Sequence
  Non-cyclic GFR-binding peptide
  MOD_RES (1), (35), (36): Xaa is C or S
  MOD_RES (13), (14), (15), (16), (17): Xaa is A or G
  MOD_RES (18), (19), (20), (21): Xaa is A or G or is absent
XGEVVMEVQVEKXXXXXXXXXVKAMKVSRLETPVXXAKP

SEQ ID NO: 27131 - protein, 40 aa, Artificial Sequence
  Non-cyclic GFR-binding peptide
  MOD_RES (2), (4), (38): Xaa is C or S
  MOD_RES (16), (17), (18), (19), (20): Xaa is A or G
  MOD_RES (21), (22), (23), (24): Xaa is A or G or is absent
HXGXSRVVMNVTAKKXXXXXXXXXIKRVQVPRLKTPAXTP

SEQ ID NO: 27132 - protein, 32 aa, Artificial Sequence
  Non-cyclic GFR-binding peptide
  MOD_RES (11), (12), (13), (14), (15): Xaa is A or G
  MOD_RES (16), (17), (18), (19): Xaa is A or G or is absent
HEELRNSLQEXXXXXXXXXYYLVTLPEHHVRS

SEQ ID NO: 27133 - protein, 37 aa, Artificial Sequence
  Non-cyclic GFR-binding peptide
  MOD_RES (1), (3): Xaa is C or S
XAXELHEELRNSLQELKPKKRVYEYYLVTLPEHHVRS

SEQ ID NO: 27134 - protein, 32 aa, Artificial Sequence
  Non-cyclic GFR-binding peptide
  MOD_RES (1), (32): Xaa is C or S
XSKVIMSMEGIIKPTKGIMIQITINSLDQSVX

SEQ ID NO: 27135 - protein, 34 aa, Artificial Sequence
  Non-cyclic GFR-binding peptide
  MOD_RES (32), (33): Xaa is C or S
SRVVMNSMEGIIVNSSDDMIQVTINSLKTPAXXP

SEQ ID NO: 27136 - protein, 32 aa, Artificial Sequence
  Non-cyclic GFR-binding peptide
  MOD_RES (1), (1): Xaa is C or S
XGEVVMDVTAKKVVKENEDIKRMQVPRLETPV

SEQ ID NO: 27137 - protein, 37 aa, Artificial Sequence
  Non-cyclic GFR-binding peptide
  MOD_RES (2), (36): Xaa is C or S
  MOD_RES (14), (15), (16), (17), (18): Xaa is A or G
  MOD_RES (19), (20), (21), (22): Xaa is A or G or is absent
GXSRVVMNSMEGIXXXXXXXXXMIQVTINSLKTPAXT

SEQ ID NO: 27138 - protein, 32 aa, Artificial Sequence
  Non-cyclic GFR-binding peptide
  MOD_RES (32), (32): Xaa is C or S
GEVVMDVTAKKVVKENEDIKRMQVPRLETPVX

SEQ ID NO: 27139 - protein, 36 aa, Artificial Sequence
  Non-cyclic GFR-binding peptide
  MOD_RES (36), (36): Xaa is C or S
  MOD_RES (12), (13), (14), (15), (16): Xaa is A or G
  MOD_RES (17), (18), (19), (20): Xaa is A or G or is absent
LHDELTNSLQEXXXXXXXXXYYVVPLPELQVQTPRX

SEQ ID NO: 27140 - protein, 40 aa, Artificial Sequence
  Non-cyclic GFR-binding peptide
  MOD_RES (1), (38): Xaa is C or S
  MOD_RES (14), (15), (16), (17), (18): Xaa is A or G
  MOD_RES (19), (20), (21), (22): Xaa is A or G or is absent
XALHDELTNSLQEXXXXXXXXXYYLVTLPELQVQTPRXQV

SEQ ID NO: 27141 - protein, 34 aa, Artificial Sequence
  Non-cyclic GFR-binding peptide
  MOD_RES (34), (34): Xaa is C or S
  MOD_RES (12), (13), (14), (15), (16): Xaa is A or G
  MOD_RES (17), (18), (19), (20): Xaa is A or G or is absent
GEVVMDVQVEKXXXXXXXXXVKAMKVSRLETPVX

SEQ ID NO: 27142 - protein, 34 aa, Artificial Sequence
  Non-cyclic GFR-binding peptide
  MOD_RES (32), (33): Xaa is C or S
ARVVMNVTAKKIVNSSDDIKRVQVPRLQTPAXXP

SEQ ID NO: 27143 - protein, 37 aa, Artificial Sequence
  Non-cyclic GFR-binding peptide
  MOD_RES (2), (4): Xaa is C or S
  MOD_RES (16), (17), (18), (19), (20): Xaa is A or G
  MOD_RES (21), (22), (23), (24): Xaa is A or G or is absent
RXGXGEVVMEVTAKKXXXXXXXXXIKRMQVPRLETPV

SEQ ID NO: 27144 - protein, 40 aa, Artificial Sequence
  Non-cyclic GFR-binding peptide
  MOD_RES (2), (4), (37), (38): Xaa is C or S
  MOD_RES (15), (16), (17), (18), (19): Xaa is A or G
  MOD_RES (20), (21), (22), (23): Xaa is A or G or is absent
SXKXSRVIMVQVEKXXXXXXXXXVKAIKVSRLAQPVXXPA

SEQ ID NO: 27145 - protein, 35 aa, Artificial Sequence
  Non-cyclic GFR-binding peptide
  MOD_RES (2), (4), (35): Xaa is C or S
SXKXSKVVMVTAKKVKPTRGVIKRIQVPRLDQPVX

SEQ ID NO: 27146 - protein, 34 aa, Artificial Sequence
  Non-cyclic GFR-binding peptide
  MOD_RES (1), (33), (34): Xaa is C or S
XGEVVMEVTAKKVVKDYEDIKRMQVPRLETPVXX

SEQ ID NO: 27147 - protein, 39 aa, Artificial Sequence
  Non-cyclic GFR-binding peptide
  MOD_RES (34), (34): Xaa is C or S
  MOD_RES (12), (13), (14), (15), (16): Xaa is A or G
  MOD_RES (17), (18), (19), (20): Xaa is A or G or is absent
SRVVMNVTAKKXXXXXXXXXIKRVQVPRLKTPAXTPKTV

SEQ ID NO: 27148 - protein, 40 aa, Artificial Sequence
  Non-cyclic GFR-binding peptide
  MOD_RES (1), (3), (40): Xaa is C or S
  MOD_RES (16), (17), (18), (19), (20): Xaa is A or G
  MOD_RES (21), (22), (23), (24): Xaa is A or G or is absent
XKXALHDELTNSLQEXXXXXXXXXYYLVTLPELQVQTPRX

SEQ ID NO: 27149 - protein, 36 aa, Artificial Sequence
  Non-cyclic GFR-binding peptide
  MOD_RES (35), (35): Xaa is C or S
HDELTNSLQEFIPKKRVIEYYVVPLPELQVQTPRXQ

SEQ ID NO: 27150 - protein, 40 aa, Artificial Sequence
  Non-cyclic GFR-binding peptide
  MOD_RES (2), (4), (38): Xaa is C or S
  MOD_RES (16), (17), (18), (19), (20): Xaa is A or G
  MOD_RES (21), (22), (23), (24): Xaa is A or G or is absent
HXGXSRVVMNVQVEKXXXXXXXXXVKAVKVSRLKTPAXTP

SEQ ID NO: 27151 - protein, 38 aa, Artificial Sequence
  Non-cyclic GFR-binding peptide
  MOD_RES (1), (3), (37), (38): Xaa is C or S
  MOD_RES (15), (16), (17), (18), (19): Xaa is A or G
  MOD_RES (20), (21), (22), (23): Xaa is A or G or is absent
XGXSRVVMNVQVEKXXXXXXXXXVKAVKVSRLKTPAXX

SEQ ID NO: 27152 - protein, 36 aa, Artificial Sequence
  Non-cyclic GFR-binding peptide
  MOD_RES (1), (33), (34): Xaa is C or S
XGEVVMESMEGIVVKDYEDMIQMTINSLETPVXXAK

SEQ ID NO: 27153 - protein, 39 aa, Artificial Sequence
  Non-cyclic GFR-binding peptide
  MOD_RES (2), (4), (35), (36): Xaa is C or S
SXKXSKVIMSMEGIIKPTKGIMIQITINSLDQSVXXPSA

SEQ ID NO: 27154 - protein, 37 aa, Artificial Sequence
  Non-cyclic GFR-binding peptide
  MOD_RES (1), (3): Xaa is C or S
XKXALHDELTNSLQEFIPKKRVIEYYLVTLPELQVQT

SEQ ID NO: 27155 - protein, 34 aa, Artificial Sequence
  Non-cyclic GFR-binding peptide
  MOD_RES (1), (34): Xaa is C or S
  MOD_RES (12), (13), (14), (15), (16): Xaa is A or G
  MOD_RES (17), (18), (19), (20): Xaa is A or G or is absent
XSKVIMSMEGIXXXXXXXXXMIQITINSLDQSVX

SEQ ID NO: 27156 - protein, 37 aa, Artificial Sequence
  Non-cyclic GFR-binding peptide
  MOD_RES (1), (3), (36), (37): Xaa is C or S
  MOD_RES (14), (15), (16), (17), (18): Xaa is A or G
  MOD_RES (19), (20), (21), (22): Xaa is A or G or is absent
XKXSRVIMVQVEKXXXXXXXXXVKAIKVSRLAQPVXX

SEQ ID NO: 27157 - protein, 33 aa, Artificial Sequence
  Non-cyclic GFR-binding peptide
  MOD_RES (1), (1): Xaa is C or S
  MOD_RES (12), (13), (14), (15), (16): Xaa is A or G
  MOD_RES (17), (18), (19), (20): Xaa is A or G or is absent
XSKVVMSMEGIXXXXXXXXXMIQITINSLDQPV

SEQ ID NO: 27158 - protein, 42 aa, Artificial Sequence
  Non-cyclic GFR-binding peptide
  MOD_RES (2), (36), (37): Xaa is C or S
  MOD_RES (14), (15), (16), (17), (18): Xaa is A or G
  MOD_RES (19), (20), (21), (22): Xaa is A or G or is absent
GXGEVVMEVQVEKXXXXXXXXXVKAMKVSRLETPVXXAKPIS

SEQ ID NO: 27159 - protein, 40 aa, Artificial Sequence
  Non-cyclic GFR-binding peptide
  MOD_RES (2), (35), (36): Xaa is C or S
  MOD_RES (13), (14), (15), (16), (17): Xaa is A or G
  MOD_RES (18), (19), (20), (21): Xaa is A or G or is absent
KXSRVIMSMEGIXXXXXXXXXMIQITINSLAQPVXXPAAS

SEQ ID NO: 27160 - protein, 36 aa, Artificial Sequence
  Non-cyclic GFR-binding peptide
  MOD_RES (2), (33), (34): Xaa is C or S
KXSKVIMVTAKKIKPTKGIIKRIQVPRLDQSVXXPS

SEQ ID NO: 27161 - protein, 42 aa, Artificial Sequence
  Non-cyclic GFR-binding peptide
  MOD_RES (2), (4), (36): Xaa is C or S
HXGXSRVVMNVTAKKIVNSSDDIKRVQVPRLKTPAXTPKTVH

SEQ ID NO: 27162 - protein, 44 aa, Artificial Sequence
  Non-cyclic GFR-binding peptide
  MOD_RES (1), (3), (40): Xaa is C or S
  MOD_RES (16), (17), (18), (19), (20): Xaa is A or G
  MOD_RES (21), (22), (23), (24): Xaa is A or G or is absent
XAXELHEELRNSLQEXXXXXXXXXYYVVPLPEHHVRSPQXKVSS

SEQ ID NO: 27163 - protein, 35 aa, Artificial Sequence
  Non-cyclic GFR-binding peptide
  MOD_RES (1), (3), (35): Xaa is C or S
XGXSRVVMNVQVEKIVNSSDDVKAVKVSRLKTPAX

SEQ ID NO: 27164 - protein, 37 aa, Artificial Sequence
  Non-cyclic GFR-binding peptide
  MOD_RES (2), (36), (37): Xaa is C or S
  MOD_RES (14), (15), (16), (17), (18): Xaa is A or G
  MOD_RES (19), (20), (21), (22): Xaa is A or G or is absent
GXSRVVMNVTAKKXXXXXXXXXIKRVQVPRLKTPAXX

SEQ ID NO: 27165 - protein, 38 aa, Artificial Sequence
  Non-cyclic GFR-binding peptide
  MOD_RES (2), (34), (35): Xaa is C or S
GXARVVMNVQVEKIVNSSDDVKAVKVSRLQTPAXXPKP

SEQ ID NO: 27166 - protein, 37 aa, Artificial Sequence
  Non-cyclic GFR-binding peptide
  MOD_RES (1), (3), (37): Xaa is C or S
  MOD_RES (15), (16), (17), (18), (19): Xaa is A or G
  MOD_RES (20), (21), (22), (23): Xaa is A or G or is absent
XEXKNHQLFNSLQEXXXXXXXXXYYLMTLPEEETPVX

SEQ ID NO: 27167 - protein, 40 aa, Artificial Sequence
  Non-cyclic GFR-binding peptide
  MOD_RES (2), (34), (35): Xaa is C or S
GXGEVVMESMEGIVVKDYEDMIQMTINSLETPVXXAKPIS

SEQ ID NO: 27168 - protein, 37 aa, Artificial Sequence
  Non-cyclic GFR-binding peptide
  MOD_RES (32), (33): Xaa is C or S
GEVVMDVTAKKVVKENEDIKRMQVPRLETPVXXAKPI

SEQ ID NO: 27169 - protein, 36 aa, Artificial Sequence
  Non-cyclic GFR-binding peptide
  MOD_RES (2), (4): Xaa is C or S
  MOD_RES (15), (16), (17), (18), (19): Xaa is A or G
  MOD_RES (20), (21), (22), (23): Xaa is A or G or is absent
SXKXSRVIMSMEGIXXXXXXXXXMIQITINSLAQPV

SEQ ID NO: 27170 - protein, 39 aa, Artificial Sequence
  Non-cyclic GFR-binding peptide
  MOD_RES (1), (3), (35): Xaa is C or S
XGXSRVVMNVQVEKIVNSSDDVKAVKVSRLKTPAXTPKT

SEQ ID NO: 27171 - protein, 33 aa, Artificial Sequence
  Non-cyclic GFR-binding peptide
  MOD_RES (33), (33): Xaa is C or S
  MOD_RES (11), (12), (13), (14), (15): Xaa is A or G
  MOD_RES (16), (17), (18), (19): Xaa is A or G or is absent
EVVMESMEGIXXXXXXXXXMIQMTINSLETPVX

SEQ ID NO: 27172 - protein, 35 aa, Artificial Sequence
  Non-cyclic GFR-binding peptide
  MOD_RES (1), (33), (34): Xaa is C or S
XSRVVMNVQVEKIVNSSDDVKAVKVSRLKTPAXXP

SEQ ID NO: 27173 - protein, 38 aa, Artificial Sequence
  Non-cyclic GFR-binding peptide
  MOD_RES (33), (34): Xaa is C or S
  MOD_RES (11), (12), (13), (14), (15): Xaa is A or G
  MOD_RES (16), (17), (18), (19): Xaa is A or G or is absent
RVVMNVTAKKXXXXXXXXXIKRVQVPRLQTPAXXPKPV

SEQ ID NO: 27174 - protein, 35 aa, Artificial Sequence
  Non-cyclic GFR-binding peptide
  MOD_RES (1), (1): Xaa is C or S
XALHDELTNSLQEFIPKKRVIEYYLVTLPELQVQT

SEQ ID NO: 27175 - protein, 40 aa, Artificial Sequence
  Non-cyclic GFR-binding peptide
  MOD_RES (1), (38): Xaa is C or S
XALHDELTNSLQEFIPKKRVIEYYLVTLPELQVQTPRXQV

SEQ ID NO: 27176 - protein, 38 aa, Artificial Sequence
  Non-cyclic GFR-binding peptide
  MOD_RES (32), (33): Xaa is C or S
ARVVMNSMEGIIVNSSDDMIQVTINSLQTPAXXPKPVT

SEQ ID NO: 27177 - protein, 38 aa, Artificial Sequence
  Non-cyclic GFR-binding peptide
  MOD_RES (34), (35): Xaa is C or S
  MOD_RES (12), (13), (14), (15), (16): Xaa is A or G
  MOD_RES (17), (18), (19), (20): Xaa is A or G or is absent
GEVVMEVTAKKXXXXXXXXXIKRMQVPRLETPVXXAKP

SEQ ID NO: 27178 - protein, 33 aa, Artificial Sequence
  Non-cyclic GFR-binding peptide
  MOD_RES (2), (33): Xaa is C or S
KXSKVVMSMEGIVKPTRGVMIQITINSLDQPVX

SEQ ID NO: 27179 - protein, 38 aa, Artificial Sequence
  Non-cyclic GFR-binding peptide
  MOD_RES (1), (3), (35): Xaa is C or S
XGXSRVVMNVQVEKIVNSSDDVKAVKVSRLKTPAXTPK

SEQ ID NO: 27180 - protein, 37 aa, Artificial Sequence
  Non-cyclic GFR-binding peptide
  MOD_RES (1), (32), (33): Xaa is C or S
XSKVVMVQVEKVKPTRGVVKAIKVSRLDQPVXXPSAS

SEQ ID NO: 27181 - protein, 35 aa, Artificial Sequence
  Non-cyclic GFR-binding peptide
  MOD_RES (33), (34): Xaa is C or S
  MOD_RES (11), (12), (13), (14), (15): Xaa is A or G
  MOD_RES (16), (17), (18), (19): Xaa is A or G or is absent
EVVMDVTAKKXXXXXXXXXIKRMQVPRLETPVXXA

SEQ ID NO: 27182 - protein, 35 aa, Artificial Sequence
  Non-cyclic GFR-binding peptide
  MOD_RES (33), (33): Xaa is C or S
  MOD_RES (11), (12), (13), (14), (15): Xaa is A or G
  MOD_RES (16), (17), (18), (19): Xaa is A or G or is absent
NHQLFNSLQEXXXXXXXXXYYLMTLPEEETPVXEL

SEQ ID NO: 27183 - protein, 32 aa, Artificial Sequence
  Non-cyclic GFR-binding peptide
  MOD_RES (1), (32): Xaa is C or S
XSKVIMVQVEKIKPTKGIVKAIKVSRLDQSVX

SEQ ID NO: 27184 - protein, 37 aa, Artificial Sequence
  Non-cyclic GFR-binding peptide
  MOD_RES (2), (4): Xaa is C or S
RXEXKNHQLFNSLQEHQGQHPKIRYYLMTLPEEETPV

SEQ ID NO: 27185 - protein, 34 aa, Artificial Sequence
  Non-cyclic GFR-binding peptide
  MOD_RES (31), (32): Xaa is C or S
RVVMNVTAKKIVNSSDDIKRVQVPRLKTPAXXPK

SEQ ID NO: 27186 - protein, 37 aa, Artificial Sequence
  Non-cyclic GFR-binding peptide
  MOD_RES (2), (4), (36), (37): Xaa is C or S
HXGXARVVMNVTAKKIVNSSDDIKRVQVPRLQTPAXX

SEQ ID NO: 27187 - protein, 33 aa, Artificial Sequence
  Non-cyclic GFR-binding peptide
  MOD_RES (33), (33): Xaa is C or S
  MOD_RES (11), (12), (13), (14), (15): Xaa is A or G
  MOD_RES (16), (17), (18), (19): Xaa is A or G or is absent
SRVIMSMEGIXXXXXXXXXMIQITINSLAQPVX

SEQ ID NO: 27188 - protein, 40 aa, Artificial Sequence
  Non-cyclic GFR-binding peptide
  MOD_RES (2), (36), (37): Xaa is C or S
  MOD_RES (14), (15), (16), (17), (18): Xaa is A or G
  MOD_RES (19), (20), (21), (22): Xaa is A or G or is absent
GXGEVVMDVQVEKXXXXXXXXXVKAMKVSRLETPVXXAKP

SEQ ID NO: 27189 - protein, 36 aa, Artificial Sequence
  Non-cyclic GFR-binding peptide
  MOD_RES (2), (4), (35), (36): Xaa is C or S
SXKXSKVVMSMEGIVKPTRGVMIQITINSLDQPVXX

SEQ ID NO: 27190 - protein, 42 aa, Artificial Sequence
  Non-cyclic GFR-binding peptide
  MOD_RES (1), (38): Xaa is C or S
XELHEELRNSLQELKPKKRVYEYYVVPLPEHHVRSPQXKVSS

SEQ ID NO: 27191 - protein, 42 aa, Artificial Sequence
  Non-cyclic GFR-binding peptide
  MOD_RES (2), (4), (38): Xaa is C or S
  MOD_RES (16), (17), (18), (19), (20): Xaa is A or G
  MOD_RES (21), (22), (23), (24): Xaa is A or G or is absent
RXEXKNHQLFNSLQEXXXXXXXXXYYVMPLPEEETPVXELGE

SEQ ID NO: 27192 - protein, 33 aa, Artificial Sequence
  Non-cyclic GFR-binding peptide
  MOD_RES (2), (2): Xaa is C or S
GXGEVVMEVTAKKVVKDYEDIKRMQVPRLETPV

SEQ ID NO: 27193 - protein, 43 aa, Artificial Sequence
  Non-cyclic GFR-binding peptide
  MOD_RES (1), (3), (40): Xaa is C or S
XAXELHEELRNSLQELKPKKRVYEYYLVTLPEHHVRSPQXKVS

SEQ ID NO: 27194 - protein, 40 aa, Artificial Sequence
  Non-cyclic GFR-binding peptide
  MOD_RES (1), (3), (36), (37): Xaa is C or S
  MOD_RES (14), (15), (16), (17), (18): Xaa is A or G
  MOD_RES (19), (20), (21), (22): Xaa is A or G or is absent
XKXSRVIMSMEGIXXXXXXXXXMIQITINSLAQPVXXPAA

SEQ ID NO: 27195 - protein, 41 aa, Artificial Sequence
  Non-cyclic GFR-binding peptide
  MOD_RES (1), (3), (37): Xaa is C or S
  MOD_RES (15), (16), (17), (18), (19): Xaa is A or G
  MOD_RES (20), (21), (22), (23): Xaa is A or G or is absent
XGXSRVVMNVQVEKXXXXXXXXXVKAVKVSRLKTPAXTPKT

SEQ ID NO: 27196 - protein, 38 aa, Artificial Sequence
  Non-cyclic GFR-binding peptide
  MOD_RES (1), (3): Xaa is C or S
  MOD_RES (16), (17), (18), (19), (20): Xaa is A or G
  MOD_RES (21), (22), (23), (24): Xaa is A or G or is absent
XKXALHDELTNSLQEXXXXXXXXXYYLVTLPELQVQTP

SEQ ID NO: 27197 - protein, 36 aa, Artificial Sequence
  Non-cyclic GFR-binding peptide
  MOD_RES (2), (34), (35): Xaa is C or S
GXARVVMNSMEGIIVNSSDDMIQVTINSLQTPAXXP

SEQ ID NO: 27198 - protein, 41 aa, Artificial Sequence
  Non-cyclic GFR-binding peptide
  MOD_RES (2), (4), (37), (38): Xaa is C or S
  MOD_RES (15), (16), (17), (18), (19): Xaa is A or G
  MOD_RES (20), (21), (22), (23): Xaa is A or G or is absent
SXKXSRVIMVQVEKXXXXXXXXXVKAIKVSRLAQPVXXPAA

SEQ ID NO: 27199 - protein, 34 aa, Artificial Sequence
  Non-cyclic GFR-binding peptide
  MOD_RES (33), (33): Xaa is C or S
NHQLFNSLQEHQGQHPKIRYYLMTLPEEETPVXE

SEQ ID NO: 27200 - protein, 42 aa, Artificial Sequence
  Non-cyclic GFR-binding peptide
  MOD_RES (2), (4), (36), (37): Xaa is C or S
RXGXGEVVMDSMEGIVVKENEDMIQMTINSLETPVXXAKPIK

SEQ ID NO: 27201 - protein, 37 aa, Artificial Sequence
  Non-cyclic GFR-binding peptide
  MOD_RES (2), (4), (35), (36): Xaa is C or S
SXKXSRVIMVTAKKVKPKRGVIKRIQVPRLAQPVXXP

SEQ ID NO: 27202 - protein, 34 aa, Artificial Sequence
  Non-cyclic GFR-binding peptide
  MOD_RES (34), (34): Xaa is C or S
  MOD_RES (12), (13), (14), (15), (16): Xaa is A or G
  MOD_RES (17), (18), (19), (20): Xaa is A or G or is absent
ARVVMNVTAKKXXXXXXXXXIKRVQVPRLQTPAX

SEQ ID NO: 27203 - protein, 39 aa, Artificial Sequence
  Non-cyclic GFR-binding peptide
  MOD_RES (36), (36): Xaa is C or S
LHEELRNSLQELKPKKRVYEYYVVPLPEHHVRSPQXKVS

SEQ ID NO: 27204 - protein, 36 aa, Artificial Sequence
  Non-cyclic GFR-binding peptide
  MOD_RES (1), (33), (34): Xaa is C or S
XARVVMNSMEGIIVNSSDDMIQVTINSLQTPAXXPK

SEQ ID NO: 27205 - protein, 42 aa, Artificial Sequence
  Non-cyclic GFR-binding peptide
  MOD_RES (2), (4), (38), (39): Xaa is C or S
  MOD_RES (16), (17), (18), (19), (20): Xaa is A or G
  MOD_RES (21), (22), (23), (24): Xaa is A or G or is absent
RXGXGEVVMESMEGIXXXXXXXXXMIQMTINSLETPVXXAKP

SEQ ID NO: 27206 - protein, 31 aa, Artificial Sequence
  Non-cyclic GFR-binding peptide
  MOD_RES (31), (31): Xaa is C or S
SKVVMSMEGIVKPTRGVMIQITINSLDQPVX

SEQ ID NO: 27207 - protein, 38 aa, Artificial Sequence
  Non-cyclic GFR-binding peptide
  MOD_RES (1), (34), (35): Xaa is C or S
  MOD_RES (12), (13), (14), (15), (16): Xaa is A or G
  MOD_RES (17), (18), (19), (20): Xaa is A or G or is absent
XSKVIMSMEGIXXXXXXXXXMIQITINSLDQSVXXPSA

SEQ ID NO: 27208 - protein, 37 aa, Artificial Sequence
  Non-cyclic GFR-binding peptide
  MOD_RES (1), (32), (33): Xaa is C or S
XSKVVMSMEGIVKPTRGVMIQITINSLDQPVXXPSAS

SEQ ID NO: 27209 - protein, 39 aa, Artificial Sequence
  Non-cyclic GFR-binding peptide
  MOD_RES (1), (35), (36): Xaa is C or S
  MOD_RES (13), (14), (15), (16), (17): Xaa is A or G
  MOD_RES (18), (19), (20), (21): Xaa is A or G or is absent
XSRVVMNSMEGIXXXXXXXXXMIQVTINSLKTPAXXPKP

SEQ ID NO: 27210 - protein, 35 aa, Artificial Sequence
  Non-cyclic GFR-binding peptide
  MOD_RES (33), (34): Xaa is C or S
  MOD_RES (11), (12), (13), (14), (15): Xaa is A or G
  MOD_RES (16), (17), (18), (19): Xaa is A or G or is absent
SKVIMVTAKKXXXXXXXXXIKRIQVPRLDQSVXXP

SEQ ID NO: 27211 - protein, 42 aa, Artificial Sequence
  Non-cyclic GFR-binding peptide
  MOD_RES (2), (36), (37): Xaa is C or S
  MOD_RES (14), (15), (16), (17), (18): Xaa is A or G
  MOD_RES (19), (20), (21), (22): Xaa is A or G or is absent
GXGEVVMDSMEGIXXXXXXXXXMIQMTINSLETPVXXAKPIK

SEQ ID NO: 27212 - protein, 41 aa, Artificial Sequence
  Non-cyclic GFR-binding peptide
  MOD_RES (1), (3), (35), (36): Xaa is C or S
XGXGEVVMDSMEGIVVKENEDMIQMTINSLETPVXXAKPIK

SEQ ID NO: 27213 - protein, 43 aa, Artificial Sequence
  Non-cyclic GFR-binding peptide
  MOD_RES (2), (4), (37), (38): Xaa is C or S
  MOD_RES (15), (16), (17), (18), (19): Xaa is A or G
  MOD_RES (20), (21), (22), (23): Xaa is A or G or is absent
SXKXSKVIMSMEGIXXXXXXXXXMIQITINSLDQSVXXPSASA

SEQ ID NO: 27214 - protein, 36 aa, Artificial Sequence
  Non-cyclic GFR-binding peptide
  MOD_RES (31), (32): Xaa is C or S
EVVMEVQVEKVVKDYEDVKAMKVSRLETPVXXAKPI

SEQ ID NO: 27215 - protein, 33 aa, Artificial Sequence
  Non-cyclic GFR-binding peptide
  MOD_RES (33), (33): Xaa is C or S
  MOD_RES (11), (12), (13), (14), (15): Xaa is A or G
  MOD_RES (16), (17), (18), (19): Xaa is A or G or is absent
SKVIMVQVEKXXXXXXXXXVKAIKVSRLDQSVX

SEQ ID NO: 27216 - protein, 39 aa, Artificial Sequence
  Non-cyclic GFR-binding peptide
  MOD_RES (1), (3), (35): Xaa is C or S
XGXSRVVMNVTAKKIVNSSDDIKRVQVPRLKTPAXTPKT

SEQ ID NO: 27217 - protein, 44 aa, Artificial Sequence
  Non-cyclic GFR-binding peptide
  MOD_RES (1), (3), (40): Xaa is C or S
XKXALHDELTNSLQEFIPKKRVIEYYLVTLPELQVQTPRXQVNR

SEQ ID NO: 27218 - protein, 35 aa, Artificial Sequence
  Non-cyclic GFR-binding peptide
  MOD_RES (31), (32): Xaa is C or S
RVVMNVTAKKIVNSSDDIKRVQVPRLQTPAXXPKP

SEQ ID NO: 27219 - protein, 38 aa, Artificial Sequence
  Non-cyclic GFR-binding peptide
  MOD_RES (1), (3), (36), (37): Xaa is C or S
  MOD_RES (14), (15), (16), (17), (18): Xaa is A or G
  MOD_RES (19), (20), (21), (22): Xaa is A or G or is absent
XKXSKVIMVQVEKXXXXXXXXXVKAIKVSRLDQSVXXP

SEQ ID NO: 27220 - protein, 36 aa, Artificial Sequence
  Non-cyclic GFR-binding peptide
  MOD_RES (2), (2): Xaa is C or S
  MOD_RES (15), (16), (17), (18), (19): Xaa is A or G
  MOD_RES (20), (21), (22), (23): Xaa is A or G or is absent
KXALHDELTNSLQEXXXXXXXXXYYLVTLPELQVQT

SEQ ID NO: 27221 - protein, 41 aa, Artificial Sequence
  Non-cyclic GFR-binding peptide
  MOD_RES (2), (35), (36): Xaa is C or S
  MOD_RES (13), (14), (15), (16), (17): Xaa is A or G
  MOD_RES (18), (19), (20), (21): Xaa is A or G or is absent
KXSKVVMVQVEKXXXXXXXXXVKAIKVSRLDQPVXXPSASA

SEQ ID NO: 27222 - protein, 39 aa, Artificial Sequence
  Non-cyclic GFR-binding peptide
  MOD_RES (2), (4), (36), (37): Xaa is C or S
RXGXGEVVMDVTAKKVVKENEDIKRMQVPRLETPVXXAK

SEQ ID NO: 27223 - protein, 37 aa, Artificial Sequence
  Non-cyclic GFR-binding peptide
  MOD_RES (2), (35), (36): Xaa is C or S
  MOD_RES (13), (14), (15), (16), (17): Xaa is A or G
  MOD_RES (18), (19), (20), (21): Xaa is A or G or is absent
KXSRVIMVTAKKXXXXXXXXXIKRIQVPRLAQPVXXP

SEQ ID NO: 27224 - protein, 35 aa, Artificial Sequence
  Non-cyclic GFR-binding peptide
  MOD_RES (34), (34): Xaa is C or S
  MOD_RES (12), (13), (14), (15), (16): Xaa is A or G
  MOD_RES (17), (18), (19), (20): Xaa is A or G or is absent
KNHQLFNSLQEXXXXXXXXXYYLMTLPEEETPVXE

SEQ ID NO: 27225 - protein, 37 aa, Artificial Sequence
  Non-cyclic GFR-binding peptide
  MOD_RES (2), (36): Xaa is C or S
  MOD_RES (14), (15), (16), (17), (18): Xaa is A or G
  MOD_RES (19), (20), (21), (22): Xaa is A or G or is absent
EXKNHQLFNSLQEXXXXXXXXXYYVMPLPEEETPVXE

SEQ ID NO: 27226 - protein, 40 aa, Artificial Sequence
  Non-cyclic GFR-binding peptide
  MOD_RES (34), (34): Xaa is C or S
  MOD_RES (12), (13), (14), (15), (16): Xaa is A or G
  MOD_RES (17), (18), (19), (20): Xaa is A or G or is absent
SRVVMNSMEGIXXXXXXXXXMIQVTINSLKTPAXTPKTVH

SEQ ID NO: 27227 - protein, 40 aa, Artificial Sequence
  Non-cyclic GFR-binding peptide
  MOD_RES (2), (39): Xaa is C or S
AXELHEELRNSLQELKPKKRVYEYYLVTLPEHHVRSPQXK

SEQ ID NO: 27228 - protein, 32 aa, Artificial Sequence
  Non-cyclic GFR-binding peptide
  MOD_RES (1), (32): Xaa is C or S
XSRVIMVQVEKVKPKRGVVKAIKVSRLAQPVX

SEQ ID NO: 27229 - protein, 34 aa, Artificial Sequence
  Non-cyclic GFR-binding peptide
LHEELRNSLQELKPKKRVYEYYVVPLPEHHVRSP

SEQ ID NO: 27230 - protein, 40 aa, Artificial Sequence
  Non-cyclic GFR-binding peptide
  MOD_RES (1), (34), (35): Xaa is C or S
  MOD_RES (12), (13), (14), (15), (16): Xaa is A or G
  MOD_RES (17), (18), (19), (20): Xaa is A or G or is absent
XSKVVMVQVEKXXXXXXXXXVKAIKVSRLDQPVXXPSASA

SEQ ID NO: 27231 - protein, 42 aa, Artificial Sequence
  Non-cyclic GFR-binding peptide
  MOD_RES (2), (4), (37), (38): Xaa is C or S
  MOD_RES (15), (16), (17), (18), (19): Xaa is A or G
  MOD_RES (20), (21), (22), (23): Xaa is A or G or is absent
SXKXSRVIMSMEGIXXXXXXXXXMIQITINSLAQPVXXPAAS

SEQ ID NO: 27232 - protein, 40 aa, Artificial Sequence
  Non-cyclic GFR-binding peptide
  MOD_RES (1), (35), (36): Xaa is C or S
  MOD_RES (13), (14), (15), (16), (17): Xaa is A or G
  MOD_RES (18), (19), (20), (21): Xaa is A or G or is absent
XARVVMNVQVEKXXXXXXXXXVKAVKVSRLQTPAXXPKPV

SEQ ID NO: 27233 - protein, 38 aa, Artificial Sequence
  Non-cyclic GFR-binding peptide
  MOD_RES (1), (32), (33): Xaa is C or S
XSRVIMVQVEKVKPKRGVVKAIKVSRLAQPVXXPAASA

SEQ ID NO: 27234 - protein, 42 aa, Artificial Sequence
  Non-cyclic GFR-binding peptide
  MOD_RES (2), (36): Xaa is C or S
  MOD_RES (14), (15), (16), (17), (18): Xaa is A or G
  MOD_RES (19), (20), (21), (22): Xaa is A or G or is absent
EXKNHQLFNSLQEXXXXXXXXXYYVMPLPEEETPVXELGEDN

SEQ ID NO: 27235 - protein, 36 aa, Artificial Sequence
  Non-cyclic GFR-binding peptide
  MOD_RES (1), (3), (36): Xaa is C or S
  MOD_RES (14), (15), (16), (17), (18): Xaa is A or G
  MOD_RES (19), (20), (21), (22): Xaa is A or G or is absent
XKXSRVIMVQVEKXXXXXXXXXVKAIKVSRLAQPVX

SEQ ID NO: 27236 - protein, 35 aa, Artificial Sequence
  Non-cyclic GFR-binding peptide
  MOD_RES (1), (35): Xaa is C or S
  MOD_RES (13), (14), (15), (16), (17): Xaa is A or G
  MOD_RES (18), (19), (20), (21): Xaa is A or G or is absent
XGEVVMDVQVEKXXXXXXXXXVKAMKVSRLETPVX

SEQ ID NO: 27237 - protein, 34 aa, Artificial Sequence
  Non-cyclic GFR-binding peptide
HDELTNSLQEFIPKKRVIEYYLVTLPELQVQTPR

SEQ ID NO: 27238 - protein, 32 aa, Artificial Sequence
  Non-cyclic GFR-binding peptide
  MOD_RES (31), (32): Xaa is C or S
EVVMEVTAKKVVKDYEDIKRMQVPRLETPVXX

SEQ ID NO: 27239 - protein, 40 aa, Artificial Sequence
  Non-cyclic GFR-binding peptide
  MOD_RES (2), (4): Xaa is C or S
  MOD_RES (17), (18), (19), (20), (21): Xaa is A or G
  MOD_RES (22), (23), (24), (25): Xaa is A or G or is absent
AXAXELHEELRNSLQEXXXXXXXXXYYVVPLPEHHVRSPQ

SEQ ID NO: 27240 - protein, 36 aa, Artificial Sequence
  Non-cyclic GFR-binding peptide
  MOD_RES (1), (33), (34): Xaa is C or S
XGEVVMDVTAKKVVKENEDIKRMQVPRLETPVXXAK

SEQ ID NO: 27241 - protein, 31 aa, Artificial Sequence
  Non-cyclic GFR-binding peptide
GEVVMDSMEGIVVKENEDMIQMTINSLETPV

SEQ ID NO: 27242 - protein, 33 aa, Artificial Sequence
  Non-cyclic GFR-binding peptide
  MOD_RES (12), (13), (14), (15), (16): Xaa is A or G
  MOD_RES (17), (18), (19), (20): Xaa is A or G or is absent
GEVVMDVTAKKXXXXXXXXXIKRMQVPRLETPV

SEQ ID NO: 27243 - protein, 41 aa, Artificial Sequence
  Non-cyclic GFR-binding peptide
  MOD_RES (2), (4), (38): Xaa is C or S
  MOD_RES (16), (17), (18), (19), (20): Xaa is A or G
  MOD_RES (21), (22), (23), (24): Xaa is A or G or is absent
RXEXKNHQLFNSLQEXXXXXXXXXYYLMTLPEEETPVXELG

SEQ ID NO: 27244 - protein, 41 aa, Artificial Sequence
  Non-cyclic GFR-binding peptide
  MOD_RES (2), (4), (37), (38): Xaa is C or S
  MOD_RES (15), (16), (17), (18), (19): Xaa is A or G
  MOD_RES (20), (21), (22), (23): Xaa is A or G or is absent
SXKXSRVIMVTAKKXXXXXXXXXIKRIQVPRLAQPVXXPAA

SEQ ID NO: 27245 - protein, 36 aa, Artificial Sequence
  Non-cyclic GFR-binding peptide
  MOD_RES (2), (33), (34): Xaa is C or S
KXSKVVMVTAKKVKPTRGVIKRIQVPRLDQPVXXPS

SEQ ID NO: 27246 - protein, 32 aa, Artificial Sequence
  Non-cyclic GFR-binding peptide
  MOD_RES (11), (12), (13), (14), (15): Xaa is A or G
  MOD_RES (16), (17), (18), (19): Xaa is A or G or is absent
RVVMNSMEGIXXXXXXXXXMIQVTINSLKTPA

SEQ ID NO: 27247 - protein, 33 aa, Artificial Sequence
  Non-cyclic GFR-binding peptide
  MOD_RES (33), (33): Xaa is C or S
  MOD_RES (11), (12), (13), (14), (15): Xaa is A or G
  MOD_RES (16), (17), (18), (19): Xaa is A or G or is absent
RVVMNVQVEKXXXXXXXXXVKAVKVSRLKTPAX

SEQ ID NO: 27248 - protein, 37 aa, Artificial Sequence
  Non-cyclic GFR-binding peptide
  MOD_RES (33), (33): Xaa is C or S
  MOD_RES (11), (12), (13), (14), (15): Xaa is A or G
  MOD_RES (16), (17), (18), (19): Xaa is A or G or is absent
RVVMNVTAKKXXXXXXXXXIKRVQVPRLKTPAXTPKT

SEQ ID NO: 27249 - protein, 37 aa, Artificial Sequence
  Non-cyclic GFR-binding peptide
  MOD_RES (33), (33): Xaa is C or S
  MOD_RES (11), (12), (13), (14), (15): Xaa is A or G
  MOD_RES (16), (17), (18), (19): Xaa is A or G or is absent
RVVMNVQVEKXXXXXXXXXVKAVKVSRLKTPAXTPKT

SEQ ID NO: 27250 - protein, 38 aa, Artificial Sequence
  Non-cyclic GFR-binding peptide
  MOD_RES (2), (4), (36), (37): Xaa is C or S
HXGXARVVMNSMEGIIVNSSDDMIQVTINSLQTPAXXP

SEQ ID NO: 27251 - protein, 36 aa, Artificial Sequence
  Non-cyclic GFR-binding peptide
  MOD_RES (2), (4): Xaa is C or S
  MOD_RES (15), (16), (17), (18), (19): Xaa is A or G
  MOD_RES (20), (21), (22), (23): Xaa is A or G or is absent
SXKXSKVVMSMEGIXXXXXXXXXMIQITINSLDQPV

SEQ ID NO: 27252 - protein, 31 aa, Artificial Sequence
  Non-cyclic GFR-binding peptide
GEVVMESMEGIVVKDYEDMIQMTINSLETPV

SEQ ID NO: 27253 - protein, 38 aa, Artificial Sequence
  Non-cyclic GFR-binding peptide
  MOD_RES (2), (4), (38): Xaa is C or S
  MOD_RES (16), (17), (18), (19), (20): Xaa is A or G
  MOD_RES (21), (22), (23), (24): Xaa is A or G or is absent
RXGXGEVVMEVTAKKXXXXXXXXXIKRMQVPRLETPVX

SEQ ID NO: 27254 - protein, 43 aa, Artificial Sequence
  Non-cyclic GFR-binding peptide
  MOD_RES (2), (4), (38): Xaa is C or S
  MOD_RES (16), (17), (18), (19), (20): Xaa is A or G
  MOD_RES (21), (22), (23), (24): Xaa is A or G or is absent
HXGXSRVVMNVTAKKXXXXXXXXXIKRVQVPRLKTPAXTPKTV

SEQ ID NO: 27255 - protein, 41 aa, Artificial Sequence
  Non-cyclic GFR-binding peptide
  MOD_RES (1), (3), (37): Xaa is C or S
  MOD_RES (15), (16), (17), (18), (19): Xaa is A or G
  MOD_RES (20), (21), (22), (23): Xaa is A or G or is absent
XGXSRVVMNVTAKKXXXXXXXXXIKRVQVPRLKTPAXTPKT

SEQ ID NO: 27256 - protein, 39 aa, Artificial Sequence
  Non-cyclic GFR-binding peptide
  MOD_RES (1), (33), (34): Xaa is C or S
XARVVMNSMEGIIVNSSDDMIQVTINSLQTPAXXPKPVT

SEQ ID NO: 27257 - protein, 43 aa, Artificial Sequence
  Non-cyclic GFR-binding peptide
  MOD_RES (2), (4), (37), (38): Xaa is C or S
  MOD_RES (15), (16), (17), (18), (19): Xaa is A or G
  MOD_RES (20), (21), (22), (23): Xaa is A or G or is absent
SXKXSKVVMVTAKKXXXXXXXXXIKRIQVPRLDQPVXXPSASA

SEQ ID NO: 27258 - protein, 36 aa, Artificial Sequence
  Non-cyclic GFR-binding peptide
  MOD_RES (36), (36): Xaa is C or S
LHDELTNSLQEFIPKKRVIEYYLVTLPELQVQTPRX

SEQ ID NO: 27259 - protein, 40 aa, Artificial Sequence
  Non-cyclic GFR-binding peptide
  MOD_RES (2), (4): Xaa is C or S
EXKXALHDELTNSLQEFIPKKRVIEYYLVTLPELQVQTPR

SEQ ID NO: 27260 - protein, 33 aa, Artificial Sequence
  Non-cyclic GFR-binding peptide
  MOD_RES (33), (33): Xaa is C or S
  MOD_RES (11), (12), (13), (14), (15): Xaa is A or G
  MOD_RES (16), (17), (18), (19): Xaa is A or G or is absent
RVVMNVTAKKXXXXXXXXXIKRVQVPRLKTPAX

SEQ ID NO: 27261 - protein, 37 aa, Artificial Sequence
  Non-cyclic GFR-binding peptide
  MOD_RES (2), (4), (36), (37): Xaa is C or S
RXGXGEVVMEVQVEKVVKDYEDVKAMKVSRLETPVXX

SEQ ID NO: 27262 - protein, 42 aa, Artificial Sequence
  Non-cyclic GFR-binding peptide
  MOD_RES (2), (39): Xaa is C or S
  MOD_RES (15), (16), (17), (18), (19): Xaa is A or G
  MOD_RES (20), (21), (22), (23): Xaa is A or G or is absent
AXELHEELRNSLQEXXXXXXXXXYYLVTLPEHHVRSPQXKVS

SEQ ID NO: 27263 - protein, 34 aa, Artificial Sequence
  Non-cyclic GFR-binding peptide
  MOD_RES (33), (34): Xaa is C or S
  MOD_RES (11), (12), (13), (14), (15): Xaa is A or G
  MOD_RES (16), (17), (18), (19): Xaa is A or G or is absent
RVVMNSMEGIXXXXXXXXXMIQVTINSLQTPAXX

SEQ ID NO: 27264 - protein, 32 aa, Artificial Sequence
  Non-cyclic GFR-binding peptide
  MOD_RES (31), (32): Xaa is C or S
SRVIMVTAKKVKPKRGVIKRIQVPRLAQPVXX

SEQ ID NO: 27265 - protein, 40 aa, Artificial Sequence
  Non-cyclic GFR-binding peptide
  MOD_RES (2), (39): Xaa is C or S
KXALHDELTNSLQEFIPKKRVIEYYLVTLPELQVQTPRXQ

SEQ ID NO: 27266 - protein, 41 aa, Artificial Sequence
  Non-cyclic GFR-binding peptide
  MOD_RES (2), (4), (38): Xaa is C or S
  MOD_RES (16), (17), (18), (19), (20): Xaa is A or G
  MOD_RES (21), (22), (23), (24): Xaa is A or G or is absent
HXGXSRVVMNSMEGIXXXXXXXXXMIQVTINSLKTPAXTPK

SEQ ID NO: 27267 - protein, 40 aa, Artificial Sequence
  Non-cyclic GFR-binding peptide
  MOD_RES (2), (34), (35): Xaa is C or S
GXSRVVMNVTAKKIVNSSDDIKRVQVPRLKTPAXXPKPVY

SEQ ID NO: 27268 - protein, 38 aa, Artificial Sequence
  Non-cyclic GFR-binding peptide
  MOD_RES (2), (4), (36), (37): Xaa is C or S
RXGXGEVVMESMEGIVVKDYEDMIQMTINSLETPVXXA

SEQ ID NO: 27269 - protein, 37 aa, Artificial Sequence
  Non-cyclic GFR-binding peptide
  MOD_RES (1), (1): Xaa is C or S
  MOD_RES (14), (15), (16), (17), (18): Xaa is A or G
  MOD_RES (19), (20), (21), (22): Xaa is A or G or is absent
XELHEELRNSLQEXXXXXXXXXYYVVPLPEHHVRSPQ

SEQ ID NO: 27270 - protein, 38 aa, Artificial Sequence
  Non-cyclic GFR-binding peptide
  MOD_RES (2), (4), (38): Xaa is C or S
  MOD_RES (16), (17), (18), (19), (20): Xaa is A or G
  MOD_RES (21), (22), (23), (24): Xaa is A or G or is absent
RXGXGEVVMDVQVEKXXXXXXXXXVKAMKVSRLETPVX

SEQ ID NO: 27271 - protein, 39 aa, Artificial Sequence
  Non-cyclic GFR-binding peptide
  MOD_RES (33), (34): Xaa is C or S
  MOD_RES (11), (12), (13), (14), (15): Xaa is A or G
  MOD_RES (16), (17), (18), (19): Xaa is A or G or is absent
SRVIMSMEGIXXXXXXXXXMIQITINSLAQPVXXPAASA

SEQ ID NO: 27272 - protein, 35 aa, Artificial Sequence
  Non-cyclic GFR-binding peptide
  MOD_RES (2), (4), (35): Xaa is C or S
SXKXSKVVMVQVEKVKPTRGVVKAIKVSRLDQPVX

SEQ ID NO: 27273 - protein, 37 aa, Artificial Sequence
  Non-cyclic GFR-binding peptide
  MOD_RES (2), (33), (34): Xaa is C or S
KXSRVIMVTAKKVKPKRGVIKRIQVPRLAQPVXXPAA

SEQ ID NO: 27274 - protein, 36 aa, Artificial Sequence
  Non-cyclic GFR-binding peptide
  MOD_RES (2), (36): Xaa is C or S
  MOD_RES (14), (15), (16), (17), (18): Xaa is A or G
  MOD_RES (19), (20), (21), (22): Xaa is A or G or is absent
GXARVVMNVQVEKXXXXXXXXXVKAVKVSRLQTPAX

SEQ ID NO: 27275 - protein, 40 aa, Artificial Sequence
  Non-cyclic GFR-binding peptide
  MOD_RES (2), (36), (37): Xaa is C or S
  MOD_RES (14), (15), (16), (17), (18): Xaa is A or G
  MOD_RES (19), (20), (21), (22): Xaa is A or G or is absent
GXARVVMNVTAKKXXXXXXXXXIKRVQVPRLQTPAXXPKP

SEQ ID NO: 27276 - protein, 34 aa, Artificial Sequence
  Non-cyclic GFR-binding peptide
  MOD_RES (1), (1): Xaa is C or S
  MOD_RES (13), (14), (15), (16), (17): Xaa is A or G
  MOD_RES (18), (19), (20), (21): Xaa is A or G or is absent
XGEVVMDSMEGIXXXXXXXXXMIQMTINSLETPV

SEQ ID NO: 27277 - protein, 34 aa, Artificial Sequence
  Non-cyclic GFR-binding peptide
  MOD_RES (31), (32): Xaa is C or S
EVVMDVQVEKVVKENEDVKAMKVSRLETPVXXAK

SEQ ID NO: 27278 - protein, 41 aa, Artificial Sequence
  Non-cyclic GFR-binding peptide
  MOD_RES (2), (4), (38), (39): Xaa is C or S
  MOD_RES (16), (17), (18), (19), (20): Xaa is A or G
  MOD_RES (21), (22), (23), (24): Xaa is A or G or is absent
HXGXSRVVMNVTAKKXXXXXXXXXIKRVQVPRLKTPAXXPK

SEQ ID NO: 27279 - protein, 38 aa, Artificial Sequence
  Non-cyclic GFR-binding peptide
  MOD_RES (2), (33), (34): Xaa is C or S
KXSRVIMSMEGIVKPKRGVMIQITINSLAQPVXXPAAS

SEQ ID NO: 27280 - protein, 34 aa, Artificial Sequence
  Non-cyclic GFR-binding peptide
  MOD_RES (11), (12), (13), (14), (15): Xaa is A or G
  MOD_RES (16), (17), (18), (19): Xaa is A or G or is absent
HEELRNSLQEXXXXXXXXXYYVVPLPEHHVRSPQ

SEQ ID NO: 27281 - protein, 36 aa, Artificial Sequence
  Non-cyclic GFR-binding peptide
  MOD_RES (2), (4), (36): Xaa is C or S
HXGXSRVVMNSMEGIIVNSSDDMIQVTINSLKTPAX

SEQ ID NO: 27282 - protein, 43 aa, Artificial Sequence
  Non-cyclic GFR-binding peptide
  MOD_RES (1), (3), (40): Xaa is C or S
XKXALHDELTNSLQEFIPKKRVIEYYVVPLPELQVQTPRXQVN

SEQ ID NO: 27283 - protein, 42 aa, Artificial Sequence
  Non-cyclic GFR-binding peptide
  MOD_RES (2), (36), (37): Xaa is C or S
  MOD_RES (14), (15), (16), (17), (18): Xaa is A or G
  MOD_RES (19), (20), (21), (22): Xaa is A or G or is absent
GXARVVMNVTAKKXXXXXXXXXIKRVQVPRLQTPAXXPKPVT

SEQ ID NO: 27284 - protein, 35 aa, Artificial Sequence
  Non-cyclic GFR-binding peptide
ALHDELTNSLQEFIPKKRVIEYYLVTLPELQVQTP

SEQ ID NO: 27285 - protein, 38 aa, Artificial Sequence
  Non-cyclic GFR-binding peptide
  MOD_RES (1), (33), (34): Xaa is C or S
XARVVMNSMEGIIVNSSDDMIQVTINSLQTPAXXPKPV

SEQ ID NO: 27286 - protein, 35 aa, Artificial Sequence
  Non-cyclic GFR-binding peptide
  MOD_RES (2), (34): Xaa is C or S
GXSRVVMNSMEGIIVNSSDDMIQVTINSLKTPAXT

SEQ ID NO: 27287 - protein, 39 aa, Artificial Sequence
  Non-cyclic GFR-binding peptide
  MOD_RES (1), (3), (35), (36): Xaa is C or S
XGXGEVVMEVTAKKVVKDYEDIKRMQVPRLETPVXXAKP

SEQ ID NO: 27288 - protein, 35 aa, Artificial Sequence
  Non-cyclic GFR-binding peptide
  MOD_RES (1), (3): Xaa is C or S
  MOD_RES (14), (15), (16), (17), (18): Xaa is A or G
  MOD_RES (19), (20), (21), (22): Xaa is A or G or is absent
XKXSKVIMSMEGIXXXXXXXXXMIQITINSLDQSV

SEQ ID NO: 27289 - protein, 37 aa, Artificial Sequence
  Non-cyclic GFR-binding peptide
  MOD_RES (37), (37): Xaa is C or S
  MOD_RES (13), (14), (15), (16), (17): Xaa is A or G
  MOD_RES (18), (19), (20), (21): Xaa is A or G or is absent
ALHDELTNSLQEXXXXXXXXXYYVVPLPELQVQTPRX

SEQ ID NO: 27290 - protein, 36 aa, Artificial Sequence
  Non-cyclic GFR-binding peptide
  MOD_RES (1), (35): Xaa is C or S
  MOD_RES (13), (14), (15), (16), (17): Xaa is A or G
  MOD_RES (18), (19), (20), (21): Xaa is A or G or is absent
XSRVVMNVTAKKXXXXXXXXXIKRVQVPRLKTPAXT

SEQ ID NO: 27291 - protein, 34 aa, Artificial Sequence
  Non-cyclic GFR-binding peptide
  MOD_RES (1), (1): Xaa is C or S
  MOD_RES (13), (14), (15), (16), (17): Xaa is A or G
  MOD_RES (18), (19), (20), (21): Xaa is A or G or is absent
XKNHQLFNSLQEXXXXXXXXXYYLMTLPEEETPV

SEQ ID NO: 27292 - protein, 37 aa, Artificial Sequence
  Non-cyclic GFR-binding peptide
  MOD_RES (2), (34), (35): Xaa is C or S
GXGEVVMDVQVEKVVKENEDVKAMKVSRLETPVXXAK

SEQ ID NO: 27293 - protein, 39 aa, Artificial Sequence
  Non-cyclic GFR-binding peptide
  MOD_RES (1), (3), (34), (35): Xaa is C or S
XKXSRVIMVTAKKVKPKRGVIKRIQVPRLAQPVXXPAAS

SEQ ID NO: 27294 - protein, 38 aa, Artificial Sequence
  Non-cyclic GFR-binding peptide
  MOD_RES (2), (4), (38): Xaa is C or S
RXEXKNHQLFNSLQEHQGQHPKIRYYLMTLPEEETPVX

SEQ ID NO: 27295 - protein, 36 aa, Artificial Sequence
  Non-cyclic GFR-binding peptide
  MOD_RES (34), (34): Xaa is C or S
  MOD_RES (12), (13), (14), (15), (16): Xaa is A or G
  MOD_RES (17), (18), (19), (20): Xaa is A or G or is absent
SRVVMNSMEGIXXXXXXXXXMIQVTINSLKTPAXTP

SEQ ID NO: 27296 - protein, 39 aa, Artificial Sequence
  Non-cyclic GFR-binding peptide
  MOD_RES (1), (3): Xaa is C or S
  MOD_RES (16), (17), (18), (19), (20): Xaa is A or G
  MOD_RES (21), (22), (23), (24): Xaa is A or G or is absent
XKXALHDELTNSLQEXXXXXXXXXYYVVPLPELQVQTPR

SEQ ID NO: 27297 - protein, 39 aa, Artificial Sequence
  Non-cyclic GFR-binding peptide
  MOD_RES (33), (34): Xaa is C or S
  MOD_RES (11), (12), (13), (14), (15): Xaa is A or G
  MOD_RES (16), (17), (18), (19): Xaa is A or G or is absent
EVVMDSMEGIXXXXXXXXXMIQMTINSLETPVXXAKPIK

SEQ ID NO: 27298 - protein, 36 aa, Artificial Sequence
  Non-cyclic GFR-binding peptide
  MOD_RES (31), (31): Xaa is C or S
RVVMNVQVEKIVNSSDDVKAVKVSRLKTPAXTPKTV

SEQ ID NO: 27299 - protein, 40 aa, Artificial Sequence
  Non-cyclic GFR-binding peptide
  MOD_RES (36), (36): Xaa is C or S
  MOD_RES (12), (13), (14), (15), (16): Xaa is A or G
  MOD_RES (17), (18), (19), (20): Xaa is A or G or is absent
LHDELTNSLQEXXXXXXXXXYYVVPLPELQVQTPRXQVNR

SEQ ID NO: 27300 - protein, 39 aa, Artificial Sequence
  Non-cyclic GFR-binding peptide
  MOD_RES (2), (36): Xaa is C or S
  MOD_RES (14), (15), (16), (17), (18): Xaa is A or G
  MOD_RES (19), (20), (21), (22): Xaa is A or G or is absent
EXKNHQLFNSLQEXXXXXXXXXYYLMTLPEEETPVXELG

SEQ ID NO: 27301 - protein, 42 aa, Artificial Sequence
  Non-cyclic GFR-binding peptide
  MOD_RES (2), (4), (38), (39): Xaa is C or S
  MOD_RES (16), (17), (18), (19), (20): Xaa is A or G
  MOD_RES (21), (22), (23), (24): Xaa is A or G or is absent
RXGXGEVVMDSMEGIXXXXXXXXXMIQMTINSLETPVXXAKP

SEQ ID NO: 27302 - protein, 36 aa, Artificial Sequence
  Non-cyclic GFR-binding peptide
  MOD_RES (31), (32): Xaa is C or S
EVVMDVTAKKVVKENEDIKRMQVPRLETPVXXAKPI

SEQ ID NO: 27303 - protein, 35 aa, Artificial Sequence
  Non-cyclic GFR-binding peptide
  MOD_RES (1), (35): Xaa is C or S
XKNHQLFNSLQEHQGQHPKIRYYVMPLPEEETPVX

SEQ ID NO: 27304 - protein, 38 aa, Artificial Sequence
  Non-cyclic GFR-binding peptide
  MOD_RES (2), (36), (37): Xaa is C or S
  MOD_RES (14), (15), (16), (17), (18): Xaa is A or G
  MOD_RES (19), (20), (21), (22): Xaa is A or G or is absent
GXGEVVMEVQVEKXXXXXXXXXVKAMKVSRLETPVXXA

SEQ ID NO: 27305 - protein, 40 aa, Artificial Sequence
  Non-cyclic GFR-binding peptide
  MOD_RES (2), (4), (35), (36): Xaa is C or S
SXKXSRVIMVQVEKVKPKRGVVKAIKVSRLAQPVXXPAAS

SEQ ID NO: 27306 - protein, 36 aa, Artificial Sequence
  Non-cyclic GFR-binding peptide
  MOD_RES (1), (34), (35): Xaa is C or S
  MOD_RES (12), (13), (14), (15), (16): Xaa is A or G
  MOD_RES (17), (18), (19), (20): Xaa is A or G or is absent
XSRVIMVTAKKXXXXXXXXXIKRIQVPRLAQPVXXP

SEQ ID NO: 27307 - protein, 38 aa, Artificial Sequence
  Non-cyclic GFR-binding peptide
  MOD_RES (2), (36), (37): Xaa is C or S
  MOD_RES (14), (15), (16), (17), (18): Xaa is A or G
  MOD_RES (19), (20), (21), (22): Xaa is A or G or is absent
GXSRVVMNVTAKKXXXXXXXXXIKRVQVPRLKTPAXXP

SEQ ID NO: 27308 - protein, 42 aa, Artificial Sequence
  Non-cyclic GFR-binding peptide
  MOD_RES (2), (4), (41): Xaa is C or S
AXAXELHEELRNSLQELKPKKRVYEYYVVPLPEHHVRSPQXK

SEQ ID NO: 27309 - protein, 35 aa, Artificial Sequence
  Non-cyclic GFR-binding peptide
  MOD_RES (1), (34), (35): Xaa is C or S
  MOD_RES (12), (13), (14), (15), (16): Xaa is A or G
  MOD_RES (17), (18), (19), (20): Xaa is A or G or is absent
XSKVVMVQVEKXXXXXXXXXVKAIKVSRLDQPVXX

SEQ ID NO: 27310 - protein, 33 aa, Artificial Sequence
  Non-cyclic GFR-binding peptide
  MOD_RES (1), (3): Xaa is C or S
XKXSKVVMVQVEKVKPTRGVVKAIKVSRLDQPV

SEQ ID NO: 27311 - protein, 32 aa, Artificial Sequence
  Non-cyclic GFR-binding peptide
  MOD_RES (11), (12), (13), (14), (15): Xaa is A or G
  MOD_RES (16), (17), (18), (19): Xaa is A or G or is absent
NHQLFNSLQEXXXXXXXXXYYLMTLPEEETPV

SEQ ID NO: 27312 - protein, 41 aa, Artificial Sequence
  Non-cyclic GFR-binding peptide
  MOD_RES (1), (3), (35), (36): Xaa is C or S
XGXSRVVMNSMEGIIVNSSDDMIQVTINSLKTPAXXPKPVY

SEQ ID NO: 27313 - protein, 32 aa, Artificial Sequence
  Non-cyclic GFR-binding peptide
  MOD_RES (11), (12), (13), (14), (15): Xaa is A or G
  MOD_RES (16), (17), (18), (19): Xaa is A or G or is absent
SKVVMVTAKKXXXXXXXXXIKRIQVPRLDQPV

SEQ ID NO: 27314 - protein, 34 aa, Artificial Sequence
  Non-cyclic GFR-binding peptide
  MOD_RES (2), (4): Xaa is C or S
SXKXSRVIMSMEGIVKPKRGVMIQITINSLAQPV

SEQ ID NO: 27315 - protein, 38 aa, Artificial Sequence
  Non-cyclic GFR-binding peptide
  MOD_RES (1), (3), (37), (38): Xaa is C or S
  MOD_RES (15), (16), (17), (18), (19): Xaa is A or G
  MOD_RES (20), (21), (22), (23): Xaa is A or G or is absent
XGXGEVVMEVTAKKXXXXXXXXXIKRMQVPRLETPVXX

SEQ ID NO: 27316 - protein, 35 aa, Artificial Sequence
  Non-cyclic GFR-binding peptide
  MOD_RES (1), (33): Xaa is C or S
XSRVVMNSMEGIIVNSSDDMIQVTINSLKTPAXTP

SEQ ID NO: 27317 - protein, 36 aa, Artificial Sequence
  Non-cyclic GFR-binding peptide
  MOD_RES (1), (35), (36): Xaa is C or S
  MOD_RES (13), (14), (15), (16), (17): Xaa is A or G
  MOD_RES (18), (19), (20), (21): Xaa is A or G or is absent
XGEVVMESMEGIXXXXXXXXXMIQMTINSLETPVXX

SEQ ID NO: 27318 - protein, 34 aa, Artificial Sequence
  Non-cyclic GFR-binding peptide
  MOD_RES (33), (33): Xaa is C or S
NHQLFNSLQEHQGQHPKIRYYVMPLPEEETPVXE

SEQ ID NO: 27319 - protein, 37 aa, Artificial Sequence
  Non-cyclic GFR-binding peptide
  MOD_RES (2), (4): Xaa is C or S
RXEXKNHQLFNSLQEHQGQHPKIRYYVMPLPEEETPV

SEQ ID NO: 27320 - protein, 35 aa, Artificial Sequence
  Non-cyclic GFR-binding peptide
  MOD_RES (34), (35): Xaa is C or S
  MOD_RES (12), (13), (14), (15), (16): Xaa is A or G
  MOD_RES (17), (18), (19), (20): Xaa is A or G or is absent
GEVVMDVTAKKXXXXXXXXXIKRMQVPRLETPVXX

SEQ ID NO: 27321 - protein, 37 aa, Artificial Sequence
  Non-cyclic GFR-binding peptide
  MOD_RES (2), (34), (35): Xaa is C or S
GXARVVMNVQVEKIVNSSDDVKAVKVSRLQTPAXXPK

SEQ ID NO: 27322 - protein, 32 aa, Artificial Sequence
  Non-cyclic GFR-binding peptide
  MOD_RES (32), (32): Xaa is C or S
GEVVMEVTAKKVVKDYEDIKRMQVPRLETPVX

SEQ ID NO: 27323 - protein, 41 aa, Artificial Sequence
  Non-cyclic GFR-binding peptide
  MOD_RES (2), (4), (38), (39): Xaa is C or S
  MOD_RES (16), (17), (18), (19), (20): Xaa is A or G
  MOD_RES (21), (22), (23), (24): Xaa is A or G or is absent
HXGXARVVMNSMEGIXXXXXXXXXMIQVTINSLQTPAXXPK

SEQ ID NO: 27324 - protein, 37 aa, Artificial Sequence
  Non-cyclic GFR-binding peptide
  MOD_RES (32), (33): Xaa is C or S
SRVVMNVQVEKIVNSSDDVKAVKVSRLKTPAXXPKPV

SEQ ID NO: 27325 - protein, 34 aa, Artificial Sequence
  Non-cyclic GFR-binding peptide
  MOD_RES (33), (34): Xaa is C or S
  MOD_RES (11), (12), (13), (14), (15): Xaa is A or G
  MOD_RES (16), (17), (18), (19): Xaa is A or G or is absent
EVVMEVTAKKXXXXXXXXXIKRMQVPRLETPVXX

SEQ ID NO: 27326 - protein, 41 aa, Artificial Sequence
  Non-cyclic GFR-binding peptide
  MOD_RES (2), (4), (35), (36): Xaa is C or S
SXKXSRVIMVQVEKVKPKRGVVKAIKVSRLAQPVXXPAASA

SEQ ID NO: 27327 - protein, 35 aa, Artificial Sequence
  Non-cyclic GFR-binding peptide
  MOD_RES (1), (35): Xaa is C or S
  MOD_RES (13), (14), (15), (16), (17): Xaa is A or G
  MOD_RES (18), (19), (20), (21): Xaa is A or G or is absent
XKNHQLFNSLQEXXXXXXXXXYYLMTLPEEETPVX

SEQ ID NO: 27328 - protein, 37 aa, Artificial Sequence
  Non-cyclic GFR-binding peptide
  MOD_RES (1), (3), (36), (37): Xaa is C or S
  MOD_RES (14), (15), (16), (17), (18): Xaa is A or G
  MOD_RES (19), (20), (21), (22): Xaa is A or G or is absent
XKXSKVIMSMEGIXXXXXXXXXMIQITINSLDQSVXX

SEQ ID NO: 27329 - protein, 34 aa, Artificial Sequence
  Non-cyclic GFR-binding peptide
  MOD_RES (34), (34): Xaa is C or S
  MOD_RES (12), (13), (14), (15), (16): Xaa is A or G
  MOD_RES (17), (18), (19), (20): Xaa is A or G or is absent
KNHQLFNSLQEXXXXXXXXXYYLMTLPEEETPVX

SEQ ID NO: 27330 - protein, 36 aa, Artificial Sequence
  Non-cyclic GFR-binding peptide
  MOD_RES (1), (35): Xaa is C or S
XKNHQLFNSLQEHQGQHPKIRYYLMTLPEEETPVXE

SEQ ID NO: 27331 - protein, 36 aa, Artificial Sequence
  Non-cyclic GFR-binding peptide
  MOD_RES (33), (34): Xaa is C or S
  MOD_RES (11), (12), (13), (14), (15): Xaa is A or G
  MOD_RES (16), (17), (18), (19): Xaa is A or G or is absent
RVVMNVTAKKXXXXXXXXXIKRVQVPRLKTPAXXPK

SEQ ID NO: 27332 - protein, 39 aa, Artificial Sequence
  Non-cyclic GFR-binding peptide
  MOD_RES (2), (34), (35): Xaa is C or S
GXSRVVMNSMEGIIVNSSDDMIQVTINSLKTPAXXPKPV

SEQ ID NO: 27333 - protein, 32 aa, Artificial Sequence
  Non-cyclic GFR-binding peptide
  MOD_RES (31), (32): Xaa is C or S
RVVMNVQVEKIVNSSDDVKAVKVSRLKTPAXX

SEQ ID NO: 27334 - protein, 35 aa, Artificial Sequence
  Non-cyclic GFR-binding peptide
  MOD_RES (1), (35): Xaa is C or S
  MOD_RES (13), (14), (15), (16), (17): Xaa is A or G
  MOD_RES (18), (19), (20), (21): Xaa is A or G or is absent
XGEVVMESMEGIXXXXXXXXXMIQMTINSLETPVX

SEQ ID NO: 27335 - protein, 35 aa, Artificial Sequence
  Non-cyclic GFR-binding peptide
  MOD_RES (13), (14), (15), (16), (17): Xaa is A or G
  MOD_RES (18), (19), (20), (21): Xaa is A or G or is absent
ELHEELRNSLQEXXXXXXXXXYYLVTLPEHHVRSP

SEQ ID NO: 27336 - protein, 36 aa, Artificial Sequence
  Non-cyclic GFR-binding peptide
  MOD_RES (34), (35): Xaa is C or S
  MOD_RES (12), (13), (14), (15), (16): Xaa is A or G
  MOD_RES (17), (18), (19), (20): Xaa is A or G or is absent
SRVVMNVQVEKXXXXXXXXXVKAVKVSRLKTPAXXP

SEQ ID NO: 27337 - protein, 40 aa, Artificial Sequence
  Non-cyclic GFR-binding peptide
  MOD_RES (1), (38): Xaa is C or S
XELHEELRNSLQELKPKKRVYEYYLVTLPEHHVRSPQXKV

SEQ ID NO: 27338 - protein, 38 aa, Artificial Sequence
  Non-cyclic GFR-binding peptide
  MOD_RES (1), (34), (35): Xaa is C or S
  MOD_RES (12), (13), (14), (15), (16): Xaa is A or G
  MOD_RES (17), (18), (19), (20): Xaa is A or G or is absent
XSRVIMVTAKKXXXXXXXXXIKRIQVPRLAQPVXXPAA

SEQ ID NO: 27339 - protein, 37 aa, Artificial Sequence
  Non-cyclic GFR-binding peptide
  MOD_RES (31), (32): Xaa is C or S
SKVVMVTAKKVKPTRGVIKRIQVPRLDQPVXXPSASA

SEQ ID NO: 27340 - protein, 42 aa, Artificial Sequence
  Non-cyclic GFR-binding peptide
  MOD_RES (2), (4), (38), (39): Xaa is C or S
  MOD_RES (16), (17), (18), (19), (20): Xaa is A or G
  MOD_RES (21), (22), (23), (24): Xaa is A or G or is absent
RXGXGEVVMEVTAKKXXXXXXXXXIKRMQVPRLETPVXXAKP

SEQ ID NO: 27341 - protein, 37 aa, Artificial Sequence
  Non-cyclic GFR-binding peptide
  MOD_RES (2), (4), (37): Xaa is C or S
  MOD_RES (15), (16), (17), (18), (19): Xaa is A or G
  MOD_RES (20), (21), (22), (23): Xaa is A or G or is absent
SXKXSRVIMVTAKKXXXXXXXXXIKRIQVPRLAQPVX

SEQ ID NO: 27342 - protein, 38 aa, Artificial Sequence
  Non-cyclic GFR-binding peptide
  MOD_RES (2), (4), (35), (36): Xaa is C or S
SXKXSRVIMVQVEKVKPKRGVVKAIKVSRLAQPVXXPA

SEQ ID NO: 27343 - protein, 37 aa, Artificial Sequence
  Non-cyclic GFR-binding peptide
  MOD_RES (31), (32): Xaa is C or S
SKVVMVQVEKVKPTRGVVKAIKVSRLDQPVXXPSASA

SEQ ID NO: 27344 - protein, 32 aa, Artificial Sequence
  Non-cyclic GFR-binding peptide
  MOD_RES (1), (1): Xaa is C or S
XGEVVMESMEGIVVKDYEDMIQMTINSLETPV

SEQ ID NO: 27345 - protein, 35 aa, Artificial Sequence
  Non-cyclic GFR-binding peptide
  MOD_RES (33), (34): Xaa is C or S
  MOD_RES (11), (12), (13), (14), (15): Xaa is A or G
  MOD_RES (16), (17), (18), (19): Xaa is A or G or is absent
EVVMDVQVEKXXXXXXXXXVKAMKVSRLETPVXXA

SEQ ID NO: 27346 - protein, 32 aa, Artificial Sequence
  Non-cyclic GFR-binding peptide
  MOD_RES (1), (32): Xaa is C or S
XSRVIMSMEGIVKPKRGVMIQITINSLAQPVX

SEQ ID NO: 27347 - protein, 42 aa, Artificial Sequence
  Non-cyclic GFR-binding peptide
  MOD_RES (1), (3), (40): Xaa is C or S
XKXALHDELTNSLQEFIPKKRVIEYYVVPLPELQVQTPRXQV

SEQ ID NO: 27348 - protein, 41 aa, Artificial Sequence
  Non-cyclic GFR-binding peptide
  MOD_RES (1), (3), (40): Xaa is C or S
  MOD_RES (16), (17), (18), (19), (20): Xaa is A or G
  MOD_RES (21), (22), (23), (24): Xaa is A or G or is absent
XAXELHEELRNSLQEXXXXXXXXXYYVVPLPEHHVRSPQXK

SEQ ID NO: 27349 - protein, 36 aa, Artificial Sequence
  Non-cyclic GFR-binding peptide
  MOD_RES (33), (34): Xaa is C or S
  MOD_RES (11), (12), (13), (14), (15): Xaa is A or G
  MOD_RES (16), (17), (18), (19): Xaa is A or G or is absent
EVVMDVQVEKXXXXXXXXXVKAMKVSRLETPVXXAK

SEQ ID NO: 27350 - protein, 37 aa, Artificial Sequence
  Non-cyclic GFR-binding peptide
  MOD_RES (31), (32): Xaa is C or S
SRVIMSMEGIVKPKRGVMIQITINSLAQPVXXPAASA

SEQ ID NO: 27351 - protein, 41 aa, Artificial Sequence
  Non-cyclic GFR-binding peptide
  MOD_RES (2), (4), (38): Xaa is C or S
  MOD_RES (16), (17), (18), (19), (20): Xaa is A or G
  MOD_RES (21), (22), (23), (24): Xaa is A or G or is absent
RXEXKNHQLFNSLQEXXXXXXXXXYYVMPLPEEETPVXELG

SEQ ID NO: 27352 - protein, 32 aa, Artificial Sequence
  Non-cyclic GFR-binding peptide
  MOD_RES (11), (12), (13), (14), (15): Xaa is A or G
  MOD_RES (16), (17), (18), (19): Xaa is A or G or is absent
HEELRNSLQEXXXXXXXXXYYVVPLPEHHVRS

SEQ ID NO: 27353 - protein, 40 aa, Artificial Sequence
  Non-cyclic GFR-binding peptide
  MOD_RES (1), (3), (40): Xaa is C or S
  MOD_RES (16), (17), (18), (19), (20): Xaa is A or G
  MOD_RES (21), (22), (23), (24): Xaa is A or G or is absent
XAXELHEELRNSLQEXXXXXXXXXYYVVPLPEHHVRSPQX

SEQ ID NO: 27354 - protein, 39 aa, Artificial Sequence
  Non-cyclic GFR-binding peptide
  MOD_RES (2), (36), (37): Xaa is C or S
  MOD_RES (14), (15), (16), (17), (18): Xaa is A or G
  MOD_RES (19), (20), (21), (22): Xaa is A or G or is absent
GXGEVVMDSMEGIXXXXXXXXXMIQMTINSLETPVXXAK

SEQ ID NO: 27355 - protein, 36 aa, Artificial Sequence
  Non-cyclic GFR-binding peptide
  MOD_RES (31), (32): Xaa is C or S
SKVVMSMEGIVKPTRGVMIQITINSLDQPVXXPSAS

SEQ ID NO: 27356 - protein, 36 aa, Artificial Sequence
  Non-cyclic GFR-binding peptide
  MOD_RES (34), (35): Xaa is C or S
  MOD_RES (12), (13), (14), (15), (16): Xaa is A or G
  MOD_RES (17), (18), (19), (20): Xaa is A or G or is absent
SRVVMNVTAKKXXXXXXXXXIKRVQVPRLKTPAXXP

SEQ ID NO: 27357 - protein, 38 aa, Artificial Sequence
  Non-cyclic GFR-binding peptide
  MOD_RES (1), (3): Xaa is C or S
  MOD_RES (16), (17), (18), (19), (20): Xaa is A or G
  MOD_RES (21), (22), (23), (24): Xaa is A or G or is absent
XAXELHEELRNSLQEXXXXXXXXXYYVVPLPEHHVRSP

SEQ ID NO: 27358 - protein, 35 aa, Artificial Sequence
  Non-cyclic GFR-binding peptide
  MOD_RES (1), (33), (34): Xaa is C or S
XARVVMNVQVEKIVNSSDDVKAVKVSRLQTPAXXP

SEQ ID NO: 27359 - protein, 36 aa, Artificial Sequence
  Non-cyclic GFR-binding peptide
  MOD_RES (1), (3), (34), (35): Xaa is C or S
XKXSKVVMSMEGIVKPTRGVMIQITINSLDQPVXXP

SEQ ID NO: 27360 - protein, 38 aa, Artificial Sequence
  Non-cyclic GFR-binding peptide
  MOD_RES (1), (3), (37), (38): Xaa is C or S
  MOD_RES (15), (16), (17), (18), (19): Xaa is A or G
  MOD_RES (20), (21), (22), (23): Xaa is A or G or is absent
XGXSRVVMNVTAKKXXXXXXXXXIKRVQVPRLKTPAXX

SEQ ID NO: 27361 - protein, 38 aa, Artificial Sequence
  Non-cyclic GFR-binding peptide
  MOD_RES (33), (34): Xaa is C or S
  MOD_RES (11), (12), (13), (14), (15): Xaa is A or G
  MOD_RES (16), (17), (18), (19): Xaa is A or G or is absent
SRVIMVQVEKXXXXXXXXXVKAIKVSRLAQPVXXPAAS

SEQ ID NO: 27362 - protein, 35 aa, Artificial Sequence
  Non-cyclic GFR-binding peptide
  MOD_RES (33), (34): Xaa is C or S
  MOD_RES (11), (12), (13), (14), (15): Xaa is A or G
  MOD_RES (16), (17), (18), (19): Xaa is A or G or is absent
RVVMNVTAKKXXXXXXXXXIKRVQVPRLKTPAXXP

SEQ ID NO: 27363 - protein, 37 aa, Artificial Sequence
  Non-cyclic GFR-binding peptide
  MOD_RES (1), (34), (35): Xaa is C or S
  MOD_RES (12), (13), (14), (15), (16): Xaa is A or G
  MOD_RES (17), (18), (19), (20): Xaa is A or G or is absent
XSKVIMVTAKKXXXXXXXXXIKRIQVPRLDQSVXXPS

SEQ ID NO: 27364 - protein, 34 aa, Artificial Sequence
  Non-cyclic GFR-binding peptide
  MOD_RES (31), (32): Xaa is C or S
EVVMEVQVEKVVKDYEDVKAMKVSRLETPVXXAK

SEQ ID NO: 27365 - protein, 34 aa, Artificial Sequence
  Non-cyclic GFR-binding peptide
  MOD_RES (2), (33), (34): Xaa is C or S
KXSKVVMSMEGIVKPTRGVMIQITINSLDQPVXX

SEQ ID NO: 27366 - protein, 44 aa, Artificial Sequence
  Non-cyclic GFR-binding peptide
  MOD_RES (1), (3), (40): Xaa is C or S
  MOD_RES (16), (17), (18), (19), (20): Xaa is A or G
  MOD_RES (21), (22), (23), (24): Xaa is A or G or is absent
XAXELHEELRNSLQEXXXXXXXXXYYLVTLPEHHVRSPQXKVSS

SEQ ID NO: 27367 - protein, 37 aa, Artificial Sequence
  Non-cyclic GFR-binding peptide
  MOD_RES (2), (4): Xaa is C or S
  MOD_RES (16), (17), (18), (19), (20): Xaa is A or G
  MOD_RES (21), (22), (23), (24): Xaa is A or G or is absent
RXGXGEVVMESMEGIXXXXXXXXXMIQMTINSLETPV

SEQ ID NO: 27368 - protein, 36 aa, Artificial Sequence
  Non-cyclic GFR-binding peptide
  MOD_RES (31), (32): Xaa is C or S
SRVIMVQVEKVKPKRGVVKAIKVSRLAQPVXXPAAS

SEQ ID NO: 27369 - protein, 36 aa, Artificial Sequence
  Non-cyclic GFR-binding peptide
  MOD_RES (2), (4), (35), (36): Xaa is C or S
SXKXSRVIMVQVEKVKPKRGVVKAIKVSRLAQPVXX

SEQ ID NO: 27370 - protein, 38 aa, Artificial Sequence
  Non-cyclic GFR-binding peptide
  MOD_RES (1), (3), (36), (37): Xaa is C or S
  MOD_RES (14), (15), (16), (17), (18): Xaa is A or G
  MOD_RES (19), (20), (21), (22): Xaa is A or G or is absent
XKXSKVVMVTAKKXXXXXXXXXIKRIQVPRLDQPVXXP

SEQ ID NO: 27371 - protein, 39 aa, Artificial Sequence
  Non-cyclic GFR-binding peptide
  MOD_RES (1), (3), (34), (35): Xaa is C or S
XKXSRVIMVQVEKVKPKRGVVKAIKVSRLAQPVXXPAAS

SEQ ID NO: 27372 - protein, 41 aa, Artificial Sequence
  Non-cyclic GFR-binding peptide
  MOD_RES (1), (3), (37), (38): Xaa is C or S
  MOD_RES (15), (16), (17), (18), (19): Xaa is A or G
  MOD_RES (20), (21), (22), (23): Xaa is A or G or is absent
XGXGEVVMDSMEGIXXXXXXXXXMIQMTINSLETPVXXAKP

SEQ ID NO: 27373 - protein, 33 aa, Artificial Sequence
  Non-cyclic GFR-binding peptide
  MOD_RES (2), (33): Xaa is C or S
KXSKVIMVTAKKIKPTKGIIKRIQVPRLDQSVX

SEQ ID NO: 27374 - protein, 45 aa, Artificial Sequence
  Non-cyclic GFR-binding peptide
  MOD_RES (2), (4), (41): Xaa is C or S
  MOD_RES (17), (18), (19), (20), (21): Xaa is A or G
  MOD_RES (22), (23), (24), (25): Xaa is A or G or is absent
EXKXALHDELTNSLQEXXXXXXXXXYYLVTLPELQVQTPRXQVNR

SEQ ID NO: 27375 - protein, 36 aa, Artificial Sequence
  Non-cyclic GFR-binding peptide
  MOD_RES (1), (3): Xaa is C or S
  MOD_RES (15), (16), (17), (18), (19): Xaa is A or G
  MOD_RES (20), (21), (22), (23): Xaa is A or G or is absent
XGXGEVVMDSMEGIXXXXXXXXXMIQMTINSLETPV

SEQ ID NO: 27376 - protein, 35 aa, Artificial Sequence
  Non-cyclic GFR-binding peptide
  MOD_RES (1), (32), (33): Xaa is C or S
XSKVIMSMEGIIKPTKGIMIQITINSLDQSVXXPS

SEQ ID NO: 27377 - protein, 36 aa, Artificial Sequence
  Non-cyclic GFR-binding peptide
  MOD_RES (31), (32): Xaa is C or S
SRVIMSMEGIVKPKRGVMIQITINSLAQPVXXPAAS

SEQ ID NO: 27378 - protein, 34 aa, Artificial Sequence
  Non-cyclic GFR-binding peptide
  MOD_RES (1), (32), (33): Xaa is C or S
XSKVIMVTAKKIKPTKGIIKRIQVPRLDQSVXXP

SEQ ID NO: 27379 - protein, 34 aa, Artificial Sequence
  Non-cyclic GFR-binding peptide
  MOD_RES (32), (33): Xaa is C or S
ARVVMNVQVEKIVNSSDDVKAVKVSRLQTPAXXP

SEQ ID NO: 27380 - protein, 36 aa, Artificial Sequence
  Non-cyclic GFR-binding peptide
  MOD_RES (1), (3), (35), (36): Xaa is C or S
XGXSRVVMNSMEGIIVNSSDDMIQVTINSLKTPAXX

SEQ ID NO: 27381 - protein, 36 aa, Artificial Sequence
  Non-cyclic GFR-binding peptide
  MOD_RES (1), (35), (36): Xaa is C or S
  MOD_RES (13), (14), (15), (16), (17): Xaa is A or G
  MOD_RES (18), (19), (20), (21): Xaa is A or G or is absent
XGEVVMDVTAKKXXXXXXXXXIKRMQVPRLETPVXX

SEQ ID NO: 27382 - protein, 39 aa, Artificial Sequence
  Non-cyclic GFR-binding peptide
  MOD_RES (37), (37): Xaa is C or S
ELHEELRNSLQELKPKKRVYEYYVVPLPEHHVRSPQXKV

SEQ ID NO: 27383 - protein, 39 aa, Artificial Sequence
  Non-cyclic GFR-binding peptide
  MOD_RES (2), (34), (35): Xaa is C or S
GXARVVMNVQVEKIVNSSDDVKAVKVSRLQTPAXXPKPV

SEQ ID NO: 27384 - protein, 41 aa, Artificial Sequence
  Non-cyclic GFR-binding peptide
  MOD_RES (1), (3), (37), (38): Xaa is C or S
  MOD_RES (15), (16), (17), (18), (19): Xaa is A or G
  MOD_RES (20), (21), (22), (23): Xaa is A or G or is absent
XGXGEVVMESMEGIXXXXXXXXXMIQMTINSLETPVXXAKP

SEQ ID NO: 27385 - protein, 40 aa, Artificial Sequence
  Non-cyclic GFR-binding peptide
  MOD_RES (2), (39): Xaa is C or S
KXALHDELTNSLQEFIPKKRVIEYYVVPLPELQVQTPRXQ

SEQ ID NO: 27386 - protein, 37 aa, Artificial Sequence
  Non-cyclic GFR-binding peptide
  MOD_RES (2), (36): Xaa is C or S
EXKNHQLFNSLQEHQGQHPKIRYYVMPLPEEETPVXE

SEQ ID NO: 27387 - protein, 36 aa, Artificial Sequence
  Non-cyclic GFR-binding peptide
  MOD_RES (1), (3): Xaa is C or S
  MOD_RES (15), (16), (17), (18), (19): Xaa is A or G
  MOD_RES (20), (21), (22), (23): Xaa is A or G or is absent
XGXGEVVMESMEGIXXXXXXXXXMIQMTINSLETPV

SEQ ID NO: 27388 - protein, 37 aa, Artificial Sequence
  Non-cyclic GFR-binding peptide
  MOD_RES (32), (33): Xaa is C or S
GEVVMDVQVEKVVKENEDVKAMKVSRLETPVXXAKPI

SEQ ID NO: 27389 - protein, 36 aa, Artificial Sequence
  Non-cyclic GFR-binding peptide
  MOD_RES (1), (3), (36): Xaa is C or S
  MOD_RES (14), (15), (16), (17), (18): Xaa is A or G
  MOD_RES (19), (20), (21), (22): Xaa is A or G or is absent
XKXSKVIMSMEGIXXXXXXXXXMIQITINSLDQSVX

SEQ ID NO: 27390 - protein, 38 aa, Artificial Sequence
  Non-cyclic GFR-binding peptide
  MOD_RES (2), (4), (38): Xaa is C or S
  MOD_RES (16), (17), (18), (19), (20): Xaa is A or G
  MOD_RES (21), (22), (23), (24): Xaa is A or G or is absent
RXGXGEVVMDSMEGIXXXXXXXXXMIQMTINSLETPVX

SEQ ID NO: 27391 - protein, 38 aa, Artificial Sequence
  Non-cyclic GFR-binding peptide
  MOD_RES (2), (4), (38): Xaa is C or S
  MOD_RES (16), (17), (18), (19), (20): Xaa is A or G
  MOD_RES (21), (22), (23), (24): Xaa is A or G or is absent
RXGXGEVVMEVQVEKXXXXXXXXXVKAMKVSRLETPVX

SEQ ID NO: 27392 - protein, 38 aa, Artificial Sequence
  Non-cyclic GFR-binding peptide
  MOD_RES (1), (38): Xaa is C or S
XELHEELRNSLQELKPKKRVYEYYLVTLPEHHVRSPQX

SEQ ID NO: 27393 - protein, 34 aa, Artificial Sequence
  Non-cyclic GFR-binding peptide
  MOD_RES (2), (34): Xaa is C or S
GXGEVVMESMEGIVVKDYEDMIQMTINSLETPVX

SEQ ID NO: 27394 - protein, 37 aa, Artificial Sequence
  Non-cyclic GFR-binding peptide
  MOD_RES (31), (32): Xaa is C or S
EVVMEVTAKKVVKDYEDIKRMQVPRLETPVXXAKPIS

SEQ ID NO: 27395 - protein, 42 aa, Artificial Sequence
  Non-cyclic GFR-binding peptide
  MOD_RES (2), (36), (37): Xaa is C or S
  MOD_RES (14), (15), (16), (17), (18): Xaa is A or G
  MOD_RES (19), (20), (21), (22): Xaa is A or G or is absent
GXSRVVMNVTAKKXXXXXXXXXIKRVQVPRLKTPAXXPKPVY

SEQ ID NO: 27396 - protein, 43 aa, Artificial Sequence
  Non-cyclic GFR-binding peptide
  MOD_RES (2), (4), (38): Xaa is C or S
  MOD_RES (16), (17), (18), (19), (20): Xaa is A or G
  MOD_RES (21), (22), (23), (24): Xaa is A or G or is absent
HXGXSRVVMNVQVEKXXXXXXXXXVKAVKVSRLKTPAXTPKTV

SEQ ID NO: 27397 - protein, 37 aa, Artificial Sequence
  Non-cyclic GFR-binding peptide
  MOD_RES (2), (4), (35), (36): Xaa is C or S
SXKXSKVVMSMEGIVKPTRGVMIQITINSLDQPVXXP

SEQ ID NO: 27398 - protein, 38 aa, Artificial Sequence
  Non-cyclic GFR-binding peptide
  MOD_RES (1), (3): Xaa is C or S
  MOD_RES (16), (17), (18), (19), (20): Xaa is A or G
  MOD_RES (21), (22), (23), (24): Xaa is A or G or is absent
XKXALHDELTNSLQEXXXXXXXXXYYVVPLPELQVQTP

SEQ ID NO: 27399 - protein, 37 aa, Artificial Sequence
  Non-cyclic GFR-binding peptide
  MOD_RES (2), (34), (35): Xaa is C or S
GXSRVVMNVQVEKIVNSSDDVKAVKVSRLKTPAXXPK

SEQ ID NO: 27400 - protein, 34 aa, Artificial Sequence
  Non-cyclic GFR-binding peptide
HEELRNSLQELKPKKRVYEYYLVTLPEHHVRSPQ

SEQ ID NO: 27401 - protein, 38 aa, Artificial Sequence
  Non-cyclic GFR-binding peptide
  MOD_RES (2), (4), (38): Xaa is C or S
RXEXKNHQLFNSLQEHQGQHPKIRYYVMPLPEEETPVX

SEQ ID NO: 27402 - protein, 41 aa, Artificial Sequence
  Non-cyclic GFR-binding peptide
  MOD_RES (2), (39): Xaa is C or S
  MOD_RES (15), (16), (17), (18), (19): Xaa is A or G
  MOD_RES (20), (21), (22), (23): Xaa is A or G or is absent
KXALHDELTNSLQEXXXXXXXXXYYVVPLPELQVQTPRXQV

SEQ ID NO: 27403 - protein, 33 aa, Artificial Sequence
  Non-cyclic GFR-binding peptide
HDELTNSLQEFIPKKRVIEYYLVTLPELQVQTP

SEQ ID NO: 27404 - protein, 39 aa, Artificial Sequence
  Non-cyclic GFR-binding peptide
  MOD_RES (1), (33), (34): Xaa is C or S
XGEVVMDSMEGIVVKENEDMIQMTINSLETPVXXAKPIK

SEQ ID NO: 27405 - protein, 36 aa, Artificial Sequence
  Non-cyclic GFR-binding peptide
  MOD_RES (34), (35): Xaa is C or S
  MOD_RES (12), (13), (14), (15), (16): Xaa is A or G
  MOD_RES (17), (18), (19), (20): Xaa is A or G or is absent
ARVVMNVQVEKXXXXXXXXXVKAVKVSRLQTPAXXP

SEQ ID NO: 27406 - protein, 32 aa, Artificial Sequence
  Non-cyclic GFR-binding peptide
  MOD_RES (1), (1): Xaa is C or S
XARVVMNVTAKKIVNSSDDIKRVQVPRLQTPA

SEQ ID NO: 27407 - protein, 33 aa, Artificial Sequence
  Non-cyclic GFR-binding peptide
HDELTNSLQEFIPKKRVIEYYVVPLPELQVQTP

SEQ ID NO: 27408 - protein, 34 aa, Artificial Sequence
  Non-cyclic GFR-binding peptide
  MOD_RES (1), (3): Xaa is C or S
XGXSRVVMNVTAKKIVNSSDDIKRVQVPRLKTPA

SEQ ID NO: 27409 - protein, 36 aa, Artificial Sequence
  Non-cyclic GFR-binding peptide
  MOD_RES (1), (3): Xaa is C or S
  MOD_RES (15), (16), (17), (18), (19): Xaa is A or G
  MOD_RES (20), (21), (22), (23): Xaa is A or G or is absent
XGXSRVVMNVQVEKXXXXXXXXXVKAVKVSRLKTPA

SEQ ID NO: 27410 - protein, 37 aa, Artificial Sequence
  Non-cyclic GFR-binding peptide
  MOD_RES (37), (37): Xaa is C or S
ALHDELTNSLQEFIPKKRVIEYYVVPLPELQVQTPRX

SEQ ID NO: 27411 - protein, 34 aa, Artificial Sequence
  Non-cyclic GFR-binding peptide
  MOD_RES (2), (33), (34): Xaa is C or S
KXSRVIMVQVEKVKPKRGVVKAIKVSRLAQPVXX

SEQ ID NO: 27412 - protein, 36 aa, Artificial Sequence
  Non-cyclic GFR-binding peptide
  MOD_RES (31), (32): Xaa is C or S
SKVVMVQVEKVKPTRGVVKAIKVSRLDQPVXXPSAS

SEQ ID NO: 27413 - protein, 37 aa, Artificial Sequence
  Non-cyclic GFR-binding peptide
  MOD_RES (31), (32): Xaa is C or S
SRVIMVQVEKVKPKRGVVKAIKVSRLAQPVXXPAASA

SEQ ID NO: 27414 - protein, 35 aa, Artificial Sequence
  Non-cyclic GFR-binding peptide
  MOD_RES (2), (33), (34): Xaa is C or S
KXSKVVMVTAKKVKPTRGVIKRIQVPRLDQPVXXP

SEQ ID NO: 27415 - protein, 44 aa, Artificial Sequence
  Non-cyclic GFR-binding peptide
  MOD_RES (2), (4), (38), (39): Xaa is C or S
  MOD_RES (16), (17), (18), (19), (20): Xaa is A or G
  MOD_RES (21), (22), (23), (24): Xaa is A or G or is absent
HXGXSRVVMNVTAKKXXXXXXXXXIKRVQVPRLKTPAXXPKPVY

SEQ ID NO: 27416 - protein, 37 aa, Artificial Sequence
  Non-cyclic GFR-binding peptide
  MOD_RES (2), (36), (37): Xaa is C or S
  MOD_RES (14), (15), (16), (17), (18): Xaa is A or G
  MOD_RES (19), (20), (21), (22): Xaa is A or G or is absent
GXGEVVMESMEGIXXXXXXXXXMIQMTINSLETPVXX

SEQ ID NO: 27417 - protein, 36 aa, Artificial Sequence
  Non-cyclic GFR-binding peptide
  MOD_RES (2), (4), (36): Xaa is C or S
RXGXGEVVMEVQVEKVVKDYEDVKAMKVSRLETPVX

SEQ ID NO: 27418 - protein, 34 aa, Artificial Sequence
  Non-cyclic GFR-binding peptide
  MOD_RES (1), (3): Xaa is C or S
XGXARVVMNVQVEKIVNSSDDVKAVKVSRLQTPA

SEQ ID NO: 27419 - protein, 35 aa, Artificial Sequence
  Non-cyclic GFR-binding peptide
  MOD_RES (2), (2): Xaa is C or S
  MOD_RES (14), (15), (16), (17), (18): Xaa is A or G
  MOD_RES (19), (20), (21), (22): Xaa is A or G or is absent
GXARVVMNSMEGIXXXXXXXXXMIQVTINSLQTPA

SEQ ID NO: 27420 - protein, 37 aa, Artificial Sequence
  Non-cyclic GFR-binding peptide
  MOD_RES (32), (33): Xaa is C or S
SRVVMNVTAKKIVNSSDDIKRVQVPRLKTPAXXPKPV

SEQ ID NO: 27421 - protein, 38 aa, Artificial Sequence
  Non-cyclic GFR-binding peptide
  MOD_RES (1), (33): Xaa is C or S
XSRVVMNVQVEKIVNSSDDVKAVKVSRLKTPAXTPKTV

SEQ ID NO: 27422 - protein, 34 aa, Artificial Sequence
  Non-cyclic GFR-binding peptide
  MOD_RES (33), (34): Xaa is C or S
  MOD_RES (11), (12), (13), (14), (15): Xaa is A or G
  MOD_RES (16), (17), (18), (19): Xaa is A or G or is absent
SRVIMVQVEKXXXXXXXXXVKAIKVSRLAQPVXX

SEQ ID NO: 27423 - protein, 32 aa, Artificial Sequence
  Non-cyclic GFR-binding peptide
  MOD_RES (11), (12), (13), (14), (15): Xaa is A or G
  MOD_RES (16), (17), (18), (19): Xaa is A or G or is absent
NHQLFNSLQEXXXXXXXXXYYVMPLPEEETPV

SEQ ID NO: 27424 - protein, 36 aa, Artificial Sequence
  Non-cyclic GFR-binding peptide
  MOD_RES (2), (34): Xaa is C or S
GXSRVVMNVQVEKIVNSSDDVKAVKVSRLKTPAXTP

SEQ ID NO: 27425 - protein, 39 aa, Artificial Sequence
  Non-cyclic GFR-binding peptide
  MOD_RES (1), (38): Xaa is C or S
  MOD_RES (14), (15), (16), (17), (18): Xaa is A or G
  MOD_RES (19), (20), (21), (22): Xaa is A or G or is absent
XALHDELTNSLQEXXXXXXXXXYYLVTLPELQVQTPRXQ

SEQ ID NO: 27426 - protein, 37 aa, Artificial Sequence
  Non-cyclic GFR-binding peptide
  MOD_RES (2), (4), (37): Xaa is C or S
  MOD_RES (15), (16), (17), (18), (19): Xaa is A or G
  MOD_RES (20), (21), (22), (23): Xaa is A or G or is absent
SXKXSKVIMSMEGIXXXXXXXXXMIQITINSLDQSVX

SEQ ID NO: 27427 - protein, 37 aa, Artificial Sequence
  Non-cyclic GFR-binding peptide
  MOD_RES (32), (33): Xaa is C or S
GEVVMEVQVEKVVKDYEDVKAMKVSRLETPVXXAKPI

SEQ ID NO: 27428 - protein, 39 aa, Artificial Sequence
  Non-cyclic GFR-binding peptide
  MOD_RES (2), (34), (35): Xaa is C or S
GXGEVVMDVTAKKVVKENEDIKRMQVPRLETPVXXAKPI

SEQ ID NO: 27429 - protein, 41 aa, Artificial Sequence
  Non-cyclic GFR-binding peptide
  MOD_RES (2), (35), (36): Xaa is C or S
  MOD_RES (13), (14), (15), (16), (17): Xaa is A or G
  MOD_RES (18), (19), (20), (21): Xaa is A or G or is absent
KXSRVIMSMEGIXXXXXXXXXMIQITINSLAQPVXXPAASA

SEQ ID NO: 27430 - protein, 36 aa, Artificial Sequence
  Non-cyclic GFR-binding peptide
  MOD_RES (31), (31): Xaa is C or S
RVVMNVTAKKIVNSSDDIKRVQVPRLKTPAXTPKTV

SEQ ID NO: 27431 - protein, 38 aa, Artificial Sequence
  Non-cyclic GFR-binding peptide
  MOD_RES (36), (36): Xaa is C or S
LHDELTNSLQEFIPKKRVIEYYVVPLPELQVQTPRXQV

SEQ ID NO: 27432 - protein, 36 aa, Artificial Sequence
  Non-cyclic GFR-binding peptide
  MOD_RES (36), (36): Xaa is C or S
LHEELRNSLQELKPKKRVYEYYVVPLPEHHVRSPQX

SEQ ID NO: 27433 - protein, 35 aa, Artificial Sequence
  Non-cyclic GFR-binding peptide
LHEELRNSLQELKPKKRVYEYYVVPLPEHHVRSPQ

SEQ ID NO: 27434 - protein, 36 aa, Artificial Sequence
  Non-cyclic GFR-binding peptide
  MOD_RES (1), (35), (36): Xaa is C or S
  MOD_RES (13), (14), (15), (16), (17): Xaa is A or G
  MOD_RES (18), (19), (20), (21): Xaa is A or G or is absent
XGEVVMDVQVEKXXXXXXXXXVKAMKVSRLETPVXX

SEQ ID NO: 27435 - protein, 34 aa, Artificial Sequence
  Non-cyclic GFR-binding peptide
  MOD_RES (31), (32): Xaa is C or S
EVVMESMEGIVVKDYEDMIQMTINSLETPVXXAK

SEQ ID NO: 27436 - protein, 39 aa, Artificial Sequence
  Non-cyclic GFR-binding peptide
  MOD_RES (2), (4), (38), (39): Xaa is C or S
  MOD_RES (16), (17), (18), (19), (20): Xaa is A or G
  MOD_RES (21), (22), (23), (24): Xaa is A or G or is absent
RXGXGEVVMEVTAKKXXXXXXXXXIKRMQVPRLETPVXX

SEQ ID NO: 27437 - protein, 40 aa, Artificial Sequence
  Non-cyclic GFR-binding peptide
  MOD_RES (1), (3), (35), (36): Xaa is C or S
XGXARVVMNSMEGIIVNSSDDMIQVTINSLQTPAXXPKPV

SEQ ID NO: 27438 - protein, 33 aa, Artificial Sequence
  Non-cyclic GFR-binding peptide
  MOD_RES (1), (33): Xaa is C or S
XGEVVMEVTAKKVVKDYEDIKRMQVPRLETPVX

SEQ ID NO: 27439 - protein, 43 aa, Artificial Sequence
  Non-cyclic GFR-binding peptide
  MOD_RES (2), (4), (37), (38): Xaa is C or S
  MOD_RES (15), (16), (17), (18), (19): Xaa is A or G
  MOD_RES (20), (21), (22), (23): Xaa is A or G or is absent
SXKXSRVIMSMEGIXXXXXXXXXMIQITINSLAQPVXXPAASA

SEQ ID NO: 27440 - protein, 36 aa, Artificial Sequence
  Non-cyclic GFR-binding peptide
  MOD_RES (1), (3), (34), (35): Xaa is C or S
XKXSKVIMVTAKKIKPTKGIIKRIQVPRLDQSVXXP

SEQ ID NO: 27441 - protein, 43 aa, Artificial Sequence
  Non-cyclic GFR-binding peptide
  MOD_RES (1), (3), (37): Xaa is C or S
  MOD_RES (15), (16), (17), (18), (19): Xaa is A or G
  MOD_RES (20), (21), (22), (23): Xaa is A or G or is absent
XEXKNHQLFNSLQEXXXXXXXXXYYLMTLPEEETPVXELGEDN

SEQ ID NO: 27442 - protein, 36 aa, Artificial Sequence
  Non-cyclic GFR-binding peptide
  MOD_RES (1), (1): Xaa is C or S
  MOD_RES (14), (15), (16), (17), (18): Xaa is A or G
  MOD_RES (19), (20), (21), (22): Xaa is A or G or is absent
XELHEELRNSLQEXXXXXXXXXYYVVPLPEHHVRSP

SEQ ID NO: 27443 - protein, 36 aa, Artificial Sequence
  Non-cyclic GFR-binding peptide
  MOD_RES (32), (33): Xaa is C or S
ARVVMNSMEGIIVNSSDDMIQVTINSLQTPAXXPKP

SEQ ID NO: 27444 - protein, 40 aa, Artificial Sequence
  Non-cyclic GFR-binding peptide
  MOD_RES (1), (3), (40): Xaa is C or S
  MOD_RES (16), (17), (18), (19), (20): Xaa is A or G
  MOD_RES (21), (22), (23), (24): Xaa is A or G or is absent
XKXALHDELTNSLQEXXXXXXXXXYYVVPLPELQVQTPRX

SEQ ID NO: 27445 - protein, 32 aa, Artificial Sequence
  Non-cyclic GFR-binding peptide
  MOD_RES (11), (12), (13), (14), (15): Xaa is A or G
  MOD_RES (16), (17), (18), (19): Xaa is A or G or is absent
HDELTNSLQEXXXXXXXXXYYLVTLPELQVQT

SEQ ID NO: 27446 - protein, 35 aa, Artificial Sequence
  Non-cyclic GFR-binding peptide
  MOD_RES (1), (3): Xaa is C or S
  MOD_RES (14), (15), (16), (17), (18): Xaa is A or G
  MOD_RES (19), (20), (21), (22): Xaa is A or G or is absent
XKXSRVIMVQVEKXXXXXXXXXVKAIKVSRLAQPV

SEQ ID NO: 27447 - protein, 36 aa, Artificial Sequence
  Non-cyclic GFR-binding peptide
  MOD_RES (1), (3), (34), (35): Xaa is C or S
XKXSKVVMVTAKKVKPTRGVIKRIQVPRLDQPVXXP

SEQ ID NO: 27448 - protein, 34 aa, Artificial Sequence
  Non-cyclic GFR-binding peptide
  MOD_RES (33), (34): Xaa is C or S
  MOD_RES (11), (12), (13), (14), (15): Xaa is A or G
  MOD_RES (16), (17), (18), (19): Xaa is A or G or is absent
SRVIMVTAKKXXXXXXXXXIKRIQVPRLAQPVXX

SEQ ID NO: 27449 - protein, 38 aa, Artificial Sequence
  Non-cyclic GFR-binding peptide
  MOD_RES (1), (32), (33): Xaa is C or S
XSRVIMSMEGIVKPKRGVMIQITINSLAQPVXXPAASA

SEQ ID NO: 27450 - protein, 32 aa, Artificial Sequence
  Non-cyclic GFR-binding peptide
  MOD_RES (11), (12), (13), (14), (15): Xaa is A or G
  MOD_RES (16), (17), (18), (19): Xaa is A or G or is absent
HDELTNSLQEXXXXXXXXXYYVVPLPELQVQT

SEQ ID NO: 27451 - protein, 35 aa, Artificial Sequence
  Non-cyclic GFR-binding peptide
  MOD_RES (2), (2): Xaa is C or S
  MOD_RES (14), (15), (16), (17), (18): Xaa is A or G
  MOD_RES (19), (20), (21), (22): Xaa is A or G or is absent
GXGEVVMDVQVEKXXXXXXXXXVKAMKVSRLETPV

SEQ ID NO: 27452 - protein, 41 aa, Artificial Sequence
  Non-cyclic GFR-binding peptide
  MOD_RES (2), (4), (38), (39): Xaa is C or S
  MOD_RES (16), (17), (18), (19), (20): Xaa is A or G
  MOD_RES (21), (22), (23), (24): Xaa is A or G or is absent
HXGXSRVVMNVQVEKXXXXXXXXXVKAVKVSRLKTPAXXPK

SEQ ID NO: 27453 - protein, 36 aa, Artificial Sequence
  Non-cyclic GFR-binding peptide
  MOD_RES (1), (3), (35), (36): Xaa is C or S
XGXGEVVMDVQVEKVVKENEDVKAMKVSRLETPVXX

SEQ ID NO: 27454 - protein, 36 aa, Artificial Sequence
  Non-cyclic GFR-binding peptide
  MOD_RES (1), (3): Xaa is C or S
  MOD_RES (15), (16), (17), (18), (19): Xaa is A or G
  MOD_RES (20), (21), (22), (23): Xaa is A or G or is absent
XGXARVVMNVTAKKXXXXXXXXXIKRVQVPRLQTPA

SEQ ID NO: 27455 - protein, 33 aa, Artificial Sequence
  Non-cyclic GFR-binding peptide
  MOD_RES (31), (32): Xaa is C or S
SKVVMVTAKKVKPTRGVIKRIQVPRLDQPVXXP

SEQ ID NO: 27456 - protein, 38 aa, Artificial Sequence
  Non-cyclic GFR-binding peptide
  MOD_RES (1), (35), (36): Xaa is C or S
  MOD_RES (13), (14), (15), (16), (17): Xaa is A or G
  MOD_RES (18), (19), (20), (21): Xaa is A or G or is absent
XARVVMNVQVEKXXXXXXXXXVKAVKVSRLQTPAXXPK

SEQ ID NO: 27457 - protein, 34 aa, Artificial Sequence
  Non-cyclic GFR-binding peptide
  MOD_RES (32), (32): Xaa is C or S
SRVVMNSMEGIIVNSSDDMIQVTINSLKTPAXTP

SEQ ID NO: 27458 - protein, 37 aa, Artificial Sequence
  Non-cyclic GFR-binding peptide
  MOD_RES (33), (34): Xaa is C or S
  MOD_RES (11), (12), (13), (14), (15): Xaa is A or G
  MOD_RES (16), (17), (18), (19): Xaa is A or G or is absent
SRVIMVTAKKXXXXXXXXXIKRIQVPRLAQPVXXPAA

SEQ ID NO: 27459 - protein, 36 aa, Artificial Sequence
  Non-cyclic GFR-binding peptide
  MOD_RES (2), (4), (36): Xaa is C or S
RXGXGEVVMDVTAKKVVKENEDIKRMQVPRLETPVX

SEQ ID NO: 27460 - protein, 39 aa, Artificial Sequence
  Non-cyclic GFR-binding peptide
  MOD_RES (2), (4), (38): Xaa is C or S
  MOD_RES (16), (17), (18), (19), (20): Xaa is A or G
  MOD_RES (21), (22), (23), (24): Xaa is A or G or is absent
RXEXKNHQLFNSLQEXXXXXXXXXYYLMTLPEEETPVXE

SEQ ID NO: 27461 - protein, 41 aa, Artificial Sequence
  Non-cyclic GFR-binding peptide
  MOD_RES (2), (35), (36): Xaa is C or S
  MOD_RES (13), (14), (15), (16), (17): Xaa is A or G
  MOD_RES (18), (19), (20), (21): Xaa is A or G or is absent
KXSKVIMSMEGIXXXXXXXXXMIQITINSLDQSVXXPSASA

SEQ ID NO: 27462 - protein, 33 aa, Artificial Sequence
  Non-cyclic GFR-binding peptide
  MOD_RES (31), (31): Xaa is C or S
RVVMNSMEGIIVNSSDDMIQVTINSLKTPAXTP

SEQ ID NO: 27463 - protein, 34 aa, Artificial Sequence
  Non-cyclic GFR-binding peptide
  MOD_RES (1), (1): Xaa is C or S
  MOD_RES (13), (14), (15), (16), (17): Xaa is A or G
  MOD_RES (18), (19), (20), (21): Xaa is A or G or is absent
XGEVVMDVQVEKXXXXXXXXXVKAMKVSRLETPV

SEQ ID NO: 27464 - protein, 39 aa, Artificial Sequence
  Non-cyclic GFR-binding peptide
  MOD_RES (2), (4), (37), (38): Xaa is C or S
  MOD_RES (15), (16), (17), (18), (19): Xaa is A or G
  MOD_RES (20), (21), (22), (23): Xaa is A or G or is absent
SXKXSKVIMVQVEKXXXXXXXXXVKAIKVSRLDQSVXXP

SEQ ID NO: 27465 - protein, 30 aa, Artificial Sequence
  Non-cyclic GFR-binding peptide
SRVIMVTAKKVKPKRGVIKRIQVPRLAQPV

SEQ ID NO: 27466 - protein, 33 aa, Artificial Sequence
  Non-cyclic GFR-binding peptide
HEELRNSLQELKPKKRVYEYYVVPLPEHHVRSP

SEQ ID NO: 27467 - protein, 36 aa, Artificial Sequence
  Non-cyclic GFR-binding peptide
  MOD_RES (1), (35): Xaa is C or S
  MOD_RES (13), (14), (15), (16), (17): Xaa is A or G
  MOD_RES (18), (19), (20), (21): Xaa is A or G or is absent
XSRVVMNVQVEKXXXXXXXXXVKAVKVSRLKTPAXT

SEQ ID NO: 27468 - protein, 36 aa, Artificial Sequence
  Non-cyclic GFR-binding peptide
  MOD_RES (1), (35): Xaa is C or S
XKNHQLFNSLQEHQGQHPKIRYYVMPLPEEETPVXE

SEQ ID NO: 27469 - protein, 32 aa, Artificial Sequence
  Non-cyclic GFR-binding peptide
  MOD_RES (1), (32): Xaa is C or S
XSKVVMVTAKKVKPTRGVIKRIQVPRLDQPVX

SEQ ID NO: 27470 - protein, 33 aa, Artificial Sequence
  Non-cyclic GFR-binding peptide
LHEELRNSLQELKPKKRVYEYYLVTLPEHHVRS

SEQ ID NO: 27471 - protein, 33 aa, Artificial Sequence
  Non-cyclic GFR-binding peptide
  MOD_RES (31), (32): Xaa is C or S
RVVMNSMEGIIVNSSDDMIQVTINSLKTPAXXP

SEQ ID NO: 27472 - protein, 37 aa, Artificial Sequence
  Non-cyclic GFR-binding peptide
  MOD_RES (2), (4), (37): Xaa is C or S
  MOD_RES (15), (16), (17), (18), (19): Xaa is A or G
  MOD_RES (20), (21), (22), (23): Xaa is A or G or is absent
SXKXSKVVMVTAKKXXXXXXXXXIKRIQVPRLDQPVX

SEQ ID NO: 27473 - protein, 41 aa, Artificial Sequence
  Non-cyclic GFR-binding peptide
  MOD_RES (2), (4), (37), (38): Xaa is C or S
  MOD_RES (15), (16), (17), (18), (19): Xaa is A or G
  MOD_RES (20), (21), (22), (23): Xaa is A or G or is absent
SXKXSKVIMVTAKKXXXXXXXXXIKRIQVPRLDQSVXXPSA

SEQ ID NO: 27474 - protein, 42 aa, Artificial Sequence
  Non-cyclic GFR-binding peptide
  MOD_RES (1), (3), (37), (38): Xaa is C or S
  MOD_RES (15), (16), (17), (18), (19): Xaa is A or G
  MOD_RES (20), (21), (22), (23): Xaa is A or G or is absent
XGXGEVVMESMEGIXXXXXXXXXMIQMTINSLETPVXXAKPI

SEQ ID NO: 27475 - protein, 34 aa, Artificial Sequence
  Non-cyclic GFR-binding peptide
  MOD_RES (2), (34): Xaa is C or S
GXSRVVMNVTAKKIVNSSDDIKRVQVPRLKTPAX

SEQ ID NO: 27476 - protein, 33 aa, Artificial Sequence
  Non-cyclic GFR-binding peptide
  MOD_RES (2), (33): Xaa is C or S
KXSKVVMVTAKKVKPTRGVIKRIQVPRLDQPVX

SEQ ID NO: 27477 - protein, 38 aa, Artificial Sequence
  Non-cyclic GFR-binding peptide
  MOD_RES (2), (4), (37), (38): Xaa is C or S
  MOD_RES (15), (16), (17), (18), (19): Xaa is A or G
  MOD_RES (20), (21), (22), (23): Xaa is A or G or is absent
SXKXSKVVMSMEGIXXXXXXXXXMIQITINSLDQPVXX

SEQ ID NO: 27478 - protein, 41 aa, Artificial Sequence
  Non-cyclic GFR-binding peptide
  MOD_RES (2), (4), (36), (37): Xaa is C or S
RXGXGEVVMDVTAKKVVKENEDIKRMQVPRLETPVXXAKPI

SEQ ID NO: 27479 - protein, 40 aa, Artificial Sequence
  Non-cyclic GFR-binding peptide
  MOD_RES (2), (4), (37), (38): Xaa is C or S
  MOD_RES (15), (16), (17), (18), (19): Xaa is A or G
  MOD_RES (20), (21), (22), (23): Xaa is A or G or is absent
SXKXSKVIMVTAKKXXXXXXXXXIKRIQVPRLDQSVXXPS

SEQ ID NO: 27480 - protein, 34 aa, Artificial Sequence
  Non-cyclic GFR-binding peptide
  MOD_RES (32), (33): Xaa is C or S
SRVVMNVQVEKIVNSSDDVKAVKVSRLKTPAXXP

SEQ ID NO: 27481 - protein, 34 aa, Artificial Sequence
  Non-cyclic GFR-binding peptide
  MOD_RES (11), (12), (13), (14), (15): Xaa is A or G
  MOD_RES (16), (17), (18), (19): Xaa is A or G or is absent
HEELRNSLQEXXXXXXXXXYYLVTLPEHHVRSPQ

SEQ ID NO: 27482 - protein, 36 aa, Artificial Sequence
  Non-cyclic GFR-binding peptide
  MOD_RES (1), (3): Xaa is C or S
  MOD_RES (15), (16), (17), (18), (19): Xaa is A or G
  MOD_RES (20), (21), (22), (23): Xaa is A or G or is absent
XGXGEVVMEVQVEKXXXXXXXXXVKAMKVSRLETPV

SEQ ID NO: 27483 - protein, 40 aa, Artificial Sequence
  Non-cyclic GFR-binding peptide
  MOD_RES (1), (3), (37), (38): Xaa is C or S
  MOD_RES (15), (16), (17), (18), (19): Xaa is A or G
  MOD_RES (20), (21), (22), (23): Xaa is A or G or is absent
XGXSRVVMNVQVEKXXXXXXXXXVKAVKVSRLKTPAXXPK

SEQ ID NO: 27484 - protein, 41 aa, Artificial Sequence
  Non-cyclic GFR-binding peptide
  MOD_RES (2), (4), (36), (37): Xaa is C or S
HXGXARVVMNVTAKKIVNSSDDIKRVQVPRLQTPAXXPKPV

SEQ ID NO: 27485 - protein, 36 aa, Artificial Sequence
  Non-cyclic GFR-binding peptide
  MOD_RES (2), (33), (34): Xaa is C or S
KXSRVIMSMEGIVKPKRGVMIQITINSLAQPVXXPA

SEQ ID NO: 27486 - protein, 35 aa, Artificial Sequence
  Non-cyclic GFR-binding peptide
  MOD_RES (31), (32): Xaa is C or S
RVVMNVQVEKIVNSSDDVKAVKVSRLQTPAXXPKP

SEQ ID NO: 27487 - protein, 40 aa, Artificial Sequence
  Non-cyclic GFR-binding peptide
  MOD_RES (2), (35), (36): Xaa is C or S
  MOD_RES (13), (14), (15), (16), (17): Xaa is A or G
  MOD_RES (18), (19), (20), (21): Xaa is A or G or is absent
KXSKVVMVQVEKXXXXXXXXXVKAIKVSRLDQPVXXPSAS

SEQ ID NO: 27488 - protein, 38 aa, Artificial Sequence
  Non-cyclic GFR-binding peptide
  MOD_RES (1), (35), (36): Xaa is C or S
  MOD_RES (13), (14), (15), (16), (17): Xaa is A or G
  MOD_RES (18), (19), (20), (21): Xaa is A or G or is absent
XSRVVMNVTAKKXXXXXXXXXIKRVQVPRLKTPAXXPK

SEQ ID NO: 27489 - protein, 41 aa, Artificial Sequence
  Non-cyclic GFR-binding peptide
  MOD_RES (1), (3), (36), (37): Xaa is C or S
  MOD_RES (14), (15), (16), (17), (18): Xaa is A or G
  MOD_RES (19), (20), (21), (22): Xaa is A or G or is absent
XKXSKVIMVQVEKXXXXXXXXXVKAIKVSRLDQSVXXPSAS

SEQ ID NO: 27490 - protein, 34 aa, Artificial Sequence
  Non-cyclic GFR-binding peptide
  MOD_RES (33), (34): Xaa is C or S
  MOD_RES (11), (12), (13), (14), (15): Xaa is A or G
  MOD_RES (16), (17), (18), (19): Xaa is A or G or is absent
EVVMEVQVEKXXXXXXXXXVKAMKVSRLETPVXX

SEQ ID NO: 27491 - protein, 36 aa, Artificial Sequence
  Non-cyclic GFR-binding peptide
  MOD_RES (32), (33): Xaa is C or S
ARVVMNVTAKKIVNSSDDIKRVQVPRLQTPAXXPKP

SEQ ID NO: 27492 - protein, 39 aa, Artificial Sequence
  Non-cyclic GFR-binding peptide
  MOD_RES (1), (3): Xaa is C or S
  MOD_RES (16), (17), (18), (19), (20): Xaa is A or G
  MOD_RES (21), (22), (23), (24): Xaa is A or G or is absent
XKXALHDELTNSLQEXXXXXXXXXYYLVTLPELQVQTPR

SEQ ID NO: 27493 - protein, 33 aa, Artificial Sequence
  Non-cyclic GFR-binding peptide
  MOD_RES (1), (1): Xaa is C or S
  MOD_RES (12), (13), (14), (15), (16): Xaa is A or G
  MOD_RES (17), (18), (19), (20): Xaa is A or G or is absent
XSRVIMVTAKKXXXXXXXXXIKRIQVPRLAQPV

SEQ ID NO: 27494 - protein, 38 aa, Artificial Sequence
  Non-cyclic GFR-binding peptide
  MOD_RES (37), (37): Xaa is C or S
ELHEELRNSLQELKPKKRVYEYYVVPLPEHHVRSPQXK

SEQ ID NO: 27495 - protein, 39 aa, Artificial Sequence
  Non-cyclic GFR-binding peptide
  MOD_RES (2), (4), (37), (38): Xaa is C or S
  MOD_RES (15), (16), (17), (18), (19): Xaa is A or G
  MOD_RES (20), (21), (22), (23): Xaa is A or G or is absent
SXKXSKVVMVTAKKXXXXXXXXXIKRIQVPRLDQPVXXP

SEQ ID NO: 27496 - protein, 37 aa, Artificial Sequence
  Non-cyclic GFR-binding peptide
  MOD_RES (1), (34), (35): Xaa is C or S
  MOD_RES (12), (13), (14), (15), (16): Xaa is A or G
  MOD_RES (17), (18), (19), (20): Xaa is A or G or is absent
XSKVIMVQVEKXXXXXXXXXVKAIKVSRLDQSVXXPS

SEQ ID NO: 27497 - protein, 38 aa, Artificial Sequence
  Non-cyclic GFR-binding peptide
  MOD_RES (1), (3), (35), (36): Xaa is C or S
XGXGEVVMDSMEGIVVKENEDMIQMTINSLETPVXXAK

SEQ ID NO: 27498 - protein, 34 aa, Artificial Sequence
  Non-cyclic GFR-binding peptide
  MOD_RES (33), (33): Xaa is C or S
  MOD_RES (11), (12), (13), (14), (15): Xaa is A or G
  MOD_RES (16), (17), (18), (19): Xaa is A or G or is absent
NHQLFNSLQEXXXXXXXXXYYVMPLPEEETPVXE

SEQ ID NO: 27499 - protein, 39 aa, Artificial Sequence
  Non-cyclic GFR-binding peptide
  MOD_RES (2), (34), (35): Xaa is C or S
GXGEVVMEVTAKKVVKDYEDIKRMQVPRLETPVXXAKPI

SEQ ID NO: 27500 - protein, 34 aa, Artificial Sequence
  Non-cyclic GFR-binding peptide
  MOD_RES (31), (32): Xaa is C or S
EVVMDSMEGIVVKENEDMIQMTINSLETPVXXAK

SEQ ID NO: 27501 - protein, 36 aa, Artificial Sequence
  Non-cyclic GFR-binding peptide
  MOD_RES (1), (3), (34), (35): Xaa is C or S
XKXSKVIMVQVEKIKPTKGIVKAIKVSRLDQSVXXP

SEQ ID NO: 27502 - protein, 42 aa, Artificial Sequence
  Non-cyclic GFR-binding peptide
  MOD_RES (2), (4), (37), (38): Xaa is C or S
  MOD_RES (15), (16), (17), (18), (19): Xaa is A or G
  MOD_RES (20), (21), (22), (23): Xaa is A or G or is absent
SXKXSKVIMVQVEKXXXXXXXXXVKAIKVSRLDQSVXXPSAS

SEQ ID NO: 27503 - protein, 44 aa, Artificial Sequence
  Non-cyclic GFR-binding peptide
  MOD_RES (2), (4), (38): Xaa is C or S
RXEXKNHQLFNSLQEHQGQHPKIRYYLMTLPEEETPVXELGEDN

SEQ ID NO: 27504 - protein, 40 aa, Artificial Sequence
  Non-cyclic GFR-binding peptide
  MOD_RES (1), (3), (40): Xaa is C or S
  MOD_RES (16), (17), (18), (19), (20): Xaa is A or G
  MOD_RES (21), (22), (23), (24): Xaa is A or G or is absent
XAXELHEELRNSLQEXXXXXXXXXYYLVTLPEHHVRSPQX

SEQ ID NO: 27505 - protein, 40 aa, Artificial Sequence
  Non-cyclic GFR-binding peptide
  MOD_RES (2), (36): Xaa is C or S
  MOD_RES (14), (15), (16), (17), (18): Xaa is A or G
  MOD_RES (19), (20), (21), (22): Xaa is A or G or is absent
EXKNHQLFNSLQEXXXXXXXXXYYVMPLPEEETPVXELGE

SEQ ID NO: 27506 - protein, 39 aa, Artificial Sequence
  Non-cyclic GFR-binding peptide
  MOD_RES (2), (4), (38), (39): Xaa is C or S
  MOD_RES (16), (17), (18), (19), (20): Xaa is A or G
  MOD_RES (21), (22), (23), (24): Xaa is A or G or is absent
RXGXGEVVMEVQVEKXXXXXXXXXVKAMKVSRLETPVXX

SEQ ID NO: 27507 - protein, 36 aa, Artificial Sequence
  Non-cyclic GFR-binding peptide
  MOD_RES (1), (3), (34), (35): Xaa is C or S
XKXSRVIMVQVEKVKPKRGVVKAIKVSRLAQPVXXP

SEQ ID NO: 27508 - protein, 36 aa, Artificial Sequence
  Non-cyclic GFR-binding peptide
  MOD_RES (2), (4), (36): Xaa is C or S
RXGXGEVVMESMEGIVVKDYEDMIQMTINSLETPVX

SEQ ID NO: 27509 - protein, 42 aa, Artificial Sequence
  Non-cyclic GFR-binding peptide
  MOD_RES (2), (4), (38), (39): Xaa is C or S
  MOD_RES (16), (17), (18), (19), (20): Xaa is A or G
  MOD_RES (21), (22), (23), (24): Xaa is A or G or is absent
RXGXGEVVMDVQVEKXXXXXXXXXVKAMKVSRLETPVXXAKP

SEQ ID NO: 27510 - protein, 38 aa, Artificial Sequence
  Non-cyclic GFR-binding peptide
  MOD_RES (32), (33): Xaa is C or S
ARVVMNVQVEKIVNSSDDVKAVKVSRLQTPAXXPKPVT

SEQ ID NO: 27511 - protein, 39 aa, Artificial Sequence
  Non-cyclic GFR-binding peptide
  MOD_RES (1), (38): Xaa is C or S
  MOD_RES (14), (15), (16), (17), (18): Xaa is A or G
  MOD_RES (19), (20), (21), (22): Xaa is A or G or is absent
XELHEELRNSLQEXXXXXXXXXYYVVPLPEHHVRSPQXK

SEQ ID NO: 27512 - protein, 35 aa, Artificial Sequence
  Non-cyclic GFR-binding peptide
  MOD_RES (1), (35): Xaa is C or S
  MOD_RES (13), (14), (15), (16), (17): Xaa is A or G
  MOD_RES (18), (19), (20), (21): Xaa is A or G or is absent
XSRVVMNSMEGIXXXXXXXXXMIQVTINSLKTPAX

SEQ ID NO: 27513 - protein, 34 aa, Artificial Sequence
  Non-cyclic GFR-binding peptide
  MOD_RES (32), (32): Xaa is C or S
SRVVMNVTAKKIVNSSDDIKRVQVPRLKTPAXTP

SEQ ID NO: 27514 - protein, 36 aa, Artificial Sequence
  Non-cyclic GFR-binding peptide
  MOD_RES (34), (35): Xaa is C or S
  MOD_RES (12), (13), (14), (15), (16): Xaa is A or G
  MOD_RES (17), (18), (19), (20): Xaa is A or G or is absent
ARVVMNVTAKKXXXXXXXXXIKRVQVPRLQTPAXXP

SEQ ID NO: 27515 - protein, 31 aa, Artificial Sequence
  Non-cyclic GFR-binding peptide
  MOD_RES (31), (31): Xaa is C or S
RVVMNVQVEKIVNSSDDVKAVKVSRLQTPAX

SEQ ID NO: 27516 - protein, 32 aa, Artificial Sequence
  Non-cyclic GFR-binding peptide
  MOD_RES (31), (32): Xaa is C or S
RVVMNSMEGIIVNSSDDMIQVTINSLKTPAXX

SEQ ID NO: 27517 - protein, 38 aa, Artificial Sequence
  Non-cyclic GFR-binding peptide
  MOD_RES (37), (37): Xaa is C or S
  MOD_RES (13), (14), (15), (16), (17): Xaa is A or G
  MOD_RES (18), (19), (20), (21): Xaa is A or G or is absent
ALHDELTNSLQEXXXXXXXXXYYVVPLPELQVQTPRXQ

SEQ ID NO: 27518 - protein, 36 aa, Artificial Sequence
  Non-cyclic GFR-binding peptide
  MOD_RES (32), (33): Xaa is C or S
SRVVMNSMEGIIVNSSDDMIQVTINSLKTPAXXPKP

SEQ ID NO: 27519 - protein, 38 aa, Artificial Sequence
  Non-cyclic GFR-binding peptide
  MOD_RES (2), (4), (37), (38): Xaa is C or S
  MOD_RES (15), (16), (17), (18), (19): Xaa is A or G
  MOD_RES (20), (21), (22), (23): Xaa is A or G or is absent
SXKXSKVVMVTAKKXXXXXXXXXIKRIQVPRLDQPVXX

SEQ ID NO: 27520 - protein, 32 aa, Artificial Sequence
  Non-cyclic GFR-binding peptide
  MOD_RES (11), (12), (13), (14), (15): Xaa is A or G
  MOD_RES (16), (17), (18), (19): Xaa is A or G or is absent
EVVMDSMEGIXXXXXXXXXMIQMTINSLETPV

SEQ ID NO: 27521 - protein, 34 aa, Artificial Sequence
  Non-cyclic GFR-binding peptide
LHDELTNSLQEFIPKKRVIEYYVVPLPELQVQTP

SEQ ID NO: 27522 - protein, 37 aa, Artificial Sequence
  Non-cyclic GFR-binding peptide
  MOD_RES (2), (4), (36), (37): Xaa is C or S
RXGXGEVVMDVTAKKVVKENEDIKRMQVPRLETPVXX

SEQ ID NO: 27523 - protein, 33 aa, Artificial Sequence
  Non-cyclic GFR-binding peptide
  MOD_RES (31), (32): Xaa is C or S
SKVIMSMEGIIKPTKGIMIQITINSLDQSVXXP

SEQ ID NO: 27524 - protein, 34 aa, Artificial Sequence
  Non-cyclic GFR-binding peptide
  MOD_RES (1), (33), (34): Xaa is C or S
XGEVVMDVTAKKVVKENEDIKRMQVPRLETPVXX

SEQ ID NO: 27525 - protein, 39 aa, Artificial Sequence
  Non-cyclic GFR-binding peptide
  MOD_RES (2), (4), (38), (39): Xaa is C or S
  MOD_RES (16), (17), (18), (19), (20): Xaa is A or G
  MOD_RES (21), (22), (23), (24): Xaa is A or G or is absent
RXGXGEVVMDSMEGIXXXXXXXXXMIQMTINSLETPVXX

SEQ ID NO: 27526 - protein, 39 aa, Artificial Sequence
  Non-cyclic GFR-binding peptide
  MOD_RES (1), (35), (36): Xaa is C or S
  MOD_RES (13), (14), (15), (16), (17): Xaa is A or G
  MOD_RES (18), (19), (20), (21): Xaa is A or G or is absent
XSRVVMNVQVEKXXXXXXXXXVKAVKVSRLKTPAXXPKP

SEQ ID NO: 27527 - protein, 39 aa, Artificial Sequence
  Non-cyclic GFR-binding peptide
  MOD_RES (2), (33), (34): Xaa is C or S
KXSRVIMSMEGIVKPKRGVMIQITINSLAQPVXXPAASA

SEQ ID NO: 27528 - protein, 35 aa, Artificial Sequence
  Non-cyclic GFR-binding peptide
  MOD_RES (34), (35): Xaa is C or S
  MOD_RES (12), (13), (14), (15), (16): Xaa is A or G
  MOD_RES (17), (18), (19), (20): Xaa is A or G or is absent
ARVVMNVTAKKXXXXXXXXXIKRVQVPRLQTPAXX

SEQ ID NO: 27529 - protein, 39 aa, Artificial Sequence
  Non-cyclic GFR-binding peptide
  MOD_RES (1), (3), (35), (36): Xaa is C or S
XGXGEVVMDSMEGIVVKENEDMIQMTINSLETPVXXAKP

SEQ ID NO: 27530 - protein, 42 aa, Artificial Sequence
  Non-cyclic GFR-binding peptide
  MOD_RES (1), (3), (37): Xaa is C or S
XEXKNHQLFNSLQEHQGQHPKIRYYLMTLPEEETPVXELGED

SEQ ID NO: 27531 - protein, 39 aa, Artificial Sequence
  Non-cyclic GFR-binding peptide
  MOD_RES (2), (36), (37): Xaa is C or S
  MOD_RES (14), (15), (16), (17), (18): Xaa is A or G
  MOD_RES (19), (20), (21), (22): Xaa is A or G or is absent
GXGEVVMEVQVEKXXXXXXXXXVKAMKVSRLETPVXXAK

SEQ ID NO: 27532 - protein, 36 aa, Artificial Sequence
  Non-cyclic GFR-binding peptide
  MOD_RES (33), (34): Xaa is C or S
  MOD_RES (11), (12), (13), (14), (15): Xaa is A or G
  MOD_RES (16), (17), (18), (19): Xaa is A or G or is absent
RVVMNVQVEKXXXXXXXXXVKAVKVSRLKTPAXXPK

SEQ ID NO: 27533 - protein, 38 aa, Artificial Sequence
  Non-cyclic GFR-binding peptide
  MOD_RES (2), (4), (36), (37): Xaa is C or S
HXGXARVVMNVQVEKIVNSSDDVKAVKVSRLQTPAXXP

SEQ ID NO: 27534 - protein, 34 aa, Artificial Sequence
  Non-cyclic GFR-binding peptide
  MOD_RES (33), (34): Xaa is C or S
  MOD_RES (11), (12), (13), (14), (15): Xaa is A or G
  MOD_RES (16), (17), (18), (19): Xaa is A or G or is absent
RVVMNSMEGIXXXXXXXXXMIQVTINSLKTPAXX

SEQ ID NO: 27535 - protein, 36 aa, Artificial Sequence
  Non-cyclic GFR-binding peptide
  MOD_RES (1), (3): Xaa is C or S
  MOD_RES (15), (16), (17), (18), (19): Xaa is A or G
  MOD_RES (20), (21), (22), (23): Xaa is A or G or is absent
XGXARVVMNVQVEKXXXXXXXXXVKAVKVSRLQTPA

SEQ ID NO: 27536 - protein, 38 aa, Artificial Sequence
  Non-cyclic GFR-binding peptide
  MOD_RES (2), (36), (37): Xaa is C or S
  MOD_RES (14), (15), (16), (17), (18): Xaa is A or G
  MOD_RES (19), (20), (21), (22): Xaa is A or G or is absent
GXGEVVMDVQVEKXXXXXXXXXVKAMKVSRLETPVXXA

SEQ ID NO: 27537 - protein, 31 aa, Artificial Sequence
  Non-cyclic GFR-binding peptide
  MOD_RES (1), (1): Xaa is C or S
XSKVVMSMEGIVKPTRGVMIQITINSLDQPV

SEQ ID NO: 27538 - protein, 42 aa, Artificial Sequence
  Non-cyclic GFR-binding peptide
  MOD_RES (1), (3), (37), (38): Xaa is C or S
  MOD_RES (15), (16), (17), (18), (19): Xaa is A or G
  MOD_RES (20), (21), (22), (23): Xaa is A or G or is absent
XGXGEVVMEVQVEKXXXXXXXXXVKAMKVSRLETPVXXAKPI

SEQ ID NO: 27539 - protein, 35 aa, Artificial Sequence
  Non-cyclic GFR-binding peptide
  MOD_RES (1), (3), (35): Xaa is C or S
XGXGEVVMESMEGIVVKDYEDMIQMTINSLETPVX

SEQ ID NO: 27540 - protein, 40 aa, Artificial Sequence
  Non-cyclic GFR-binding peptide
  MOD_RES (2), (39): Xaa is C or S
AXELHEELRNSLQELKPKKRVYEYYVVPLPEHHVRSPQXK

SEQ ID NO: 27541 - protein, 37 aa, Artificial Sequence
  Non-cyclic GFR-binding peptide
  MOD_RES (2), (4), (37): Xaa is C or S
  MOD_RES (15), (16), (17), (18), (19): Xaa is A or G
  MOD_RES (20), (21), (22), (23): Xaa is A or G or is absent
SXKXSKVIMVTAKKXXXXXXXXXIKRIQVPRLDQSVX

SEQ ID NO: 27542 - protein, 41 aa, Artificial Sequence
  Non-cyclic GFR-binding peptide
  MOD_RES (2), (4), (35), (36): Xaa is C or S
SXKXSRVIMVTAKKVKPKRGVIKRIQVPRLAQPVXXPAASA

SEQ ID NO: 27543 - protein, 41 aa, Artificial Sequence
  Non-cyclic GFR-binding peptide
  MOD_RES (1), (35): Xaa is C or S
  MOD_RES (13), (14), (15), (16), (17): Xaa is A or G
  MOD_RES (18), (19), (20), (21): Xaa is A or G or is absent
XSRVVMNVQVEKXXXXXXXXXVKAVKVSRLKTPAXTPKTVH

SEQ ID NO: 27544 - protein, 34 aa, Artificial Sequence
  Non-cyclic GFR-binding peptide
  MOD_RES (1), (34): Xaa is C or S
  MOD_RES (12), (13), (14), (15), (16): Xaa is A or G
  MOD_RES (17), (18), (19), (20): Xaa is A or G or is absent
XSKVVMVQVEKXXXXXXXXXVKAIKVSRLDQPVX

SEQ ID NO: 27545 - protein, 37 aa, Artificial Sequence
  Non-cyclic GFR-binding peptide
  MOD_RES (36), (36): Xaa is C or S
  MOD_RES (12), (13), (14), (15), (16): Xaa is A or G
  MOD_RES (17), (18), (19), (20): Xaa is A or G or is absent
LHDELTNSLQEXXXXXXXXXYYVVPLPELQVQTPRXQ

SEQ ID NO: 27546 - protein, 36 aa, Artificial Sequence
  Non-cyclic GFR-binding peptide
  MOD_RES (1), (32), (33): Xaa is C or S
XSKVIMSMEGIIKPTKGIMIQITINSLDQSVXXPSA

SEQ ID NO: 27547 - protein, 39 aa, Artificial Sequence
  Non-cyclic GFR-binding peptide
  MOD_RES (2), (4), (35), (36): Xaa is C or S
SXKXSKVVMSMEGIVKPTRGVMIQITINSLDQPVXXPSA

SEQ ID NO: 27548 - protein, 40 aa, Artificial Sequence
  Non-cyclic GFR-binding peptide
  MOD_RES (1), (34), (35): Xaa is C or S
  MOD_RES (12), (13), (14), (15), (16): Xaa is A or G
  MOD_RES (17), (18), (19), (20): Xaa is A or G or is absent
XSKVVMVTAKKXXXXXXXXXIKRIQVPRLDQPVXXPSASA

SEQ ID NO: 27549 - protein, 36 aa, Artificial Sequence
  Non-cyclic GFR-binding peptide
  MOD_RES (2), (34), (35): Xaa is C or S
GXSRVVMNSMEGIIVNSSDDMIQVTINSLKTPAXXP

SEQ ID NO: 27550 - protein, 32 aa, Artificial Sequence
  Non-cyclic GFR-binding peptide
  MOD_RES (32), (32): Xaa is C or S
GEVVMDVQVEKVVKENEDVKAMKVSRLETPVX

SEQ ID NO: 27551 - protein, 40 aa, Artificial Sequence
  Non-cyclic GFR-binding peptide
  MOD_RES (2), (4), (38), (39): Xaa is C or S
  MOD_RES (16), (17), (18), (19), (20): Xaa is A or G
  MOD_RES (21), (22), (23), (24): Xaa is A or G or is absent
RXGXGEVVMESMEGIXXXXXXXXXMIQMTINSLETPVXXA

SEQ ID NO: 27552 - protein, 41 aa, Artificial Sequence
  Non-cyclic GFR-binding peptide
  MOD_RES (1), (35), (36): Xaa is C or S
  MOD_RES (13), (14), (15), (16), (17): Xaa is A or G
  MOD_RES (18), (19), (20), (21): Xaa is A or G or is absent
XARVVMNVQVEKXXXXXXXXXVKAVKVSRLQTPAXXPKPVT

SEQ ID NO: 27553 - protein, 37 aa, Artificial Sequence
  Non-cyclic GFR-binding peptide
  MOD_RES (35), (35): Xaa is C or S
  MOD_RES (11), (12), (13), (14), (15): Xaa is A or G
  MOD_RES (16), (17), (18), (19): Xaa is A or G or is absent
HDELTNSLQEXXXXXXXXXYYLVTLPELQVQTPRXQV

SEQ ID NO: 27554 - protein, 39 aa, Artificial Sequence
  Non-cyclic GFR-binding peptide
  MOD_RES (2), (4), (37), (38): Xaa is C or S
  MOD_RES (15), (16), (17), (18), (19): Xaa is A or G
  MOD_RES (20), (21), (22), (23): Xaa is A or G or is absent
SXKXSKVVMVQVEKXXXXXXXXXVKAIKVSRLDQPVXXP

SEQ ID NO: 27555 - protein, 42 aa, Artificial Sequence
  Non-cyclic GFR-binding peptide
  MOD_RES (1), (3), (40): Xaa is C or S
  MOD_RES (16), (17), (18), (19), (20): Xaa is A or G
  MOD_RES (21), (22), (23), (24): Xaa is A or G or is absent
XAXELHEELRNSLQEXXXXXXXXXYYLVTLPEHHVRSPQXKV

SEQ ID NO: 27556 - protein, 35 aa, Artificial Sequence
  Non-cyclic GFR-binding peptide
  MOD_RES (2), (4), (35): Xaa is C or S
SXKXSKVIMVTAKKIKPTKGIIKRIQVPRLDQSVX

SEQ ID NO: 27557 - protein, 38 aa, Artificial Sequence
  Non-cyclic GFR-binding peptide
  MOD_RES (33), (34): Xaa is C or S
  MOD_RES (11), (12), (13), (14), (15): Xaa is A or G
  MOD_RES (16), (17), (18), (19): Xaa is A or G or is absent
SRVIMVTAKKXXXXXXXXXIKRIQVPRLAQPVXXPAAS

SEQ ID NO: 27558 - protein, 35 aa, Artificial Sequence
  Non-cyclic GFR-binding peptide
  MOD_RES (33), (34): Xaa is C or S
  MOD_RES (11), (12), (13), (14), (15): Xaa is A or G
  MOD_RES (16), (17), (18), (19): Xaa is A or G or is absent
RVVMNVQVEKXXXXXXXXXVKAVKVSRLKTPAXXP

SEQ ID NO: 27559 - protein, 36 aa, Artificial Sequence
  Non-cyclic GFR-binding peptide
  MOD_RES (2), (36): Xaa is C or S
  MOD_RES (14), (15), (16), (17), (18): Xaa is A or G
  MOD_RES (19), (20), (21), (22): Xaa is A or G or is absent
GXGEVVMEVTAKKXXXXXXXXXIKRMQVPRLETPVX

SEQ ID NO: 27560 - protein, 43 aa, Artificial Sequence
  Non-cyclic GFR-binding peptide
  MOD_RES (2), (39): Xaa is C or S
  MOD_RES (15), (16), (17), (18), (19): Xaa is A or G
  MOD_RES (20), (21), (22), (23): Xaa is A or G or is absent
KXALHDELTNSLQEXXXXXXXXXYYLVTLPELQVQTPRXQVNR

SEQ ID NO: 27561 - protein, 33 aa, Artificial Sequence
  Non-cyclic GFR-binding peptide
  MOD_RES (33), (33): Xaa is C or S
  MOD_RES (11), (12), (13), (14), (15): Xaa is A or G
  MOD_RES (16), (17), (18), (19): Xaa is A or G or is absent
EVVMDVTAKKXXXXXXXXXIKRMQVPRLETPVX

SEQ ID NO: 27562 - protein, 36 aa, Artificial Sequence
  Non-cyclic GFR-binding peptide
  MOD_RES (1), (3), (36): Xaa is C or S
  MOD_RES (14), (15), (16), (17), (18): Xaa is A or G
  MOD_RES (19), (20), (21), (22): Xaa is A or G or is absent
XKXSKVVMVQVEKXXXXXXXXXVKAIKVSRLDQPVX

SEQ ID NO: 27563 - protein, 42 aa, Artificial Sequence
  Non-cyclic GFR-binding peptide
  MOD_RES (2), (4), (36), (37): Xaa is C or S
HXGXSRVVMNSMEGIIVNSSDDMIQVTINSLKTPAXXPKPVY

SEQ ID NO: 27564 - protein, 34 aa, Artificial Sequence
  Non-cyclic GFR-binding peptide
  MOD_RES (2), (4): Xaa is C or S
SXKXSKVVMVTAKKVKPTRGVIKRIQVPRLDQPV

SEQ ID NO: 27565 - protein, 37 aa, Artificial Sequence
  Non-cyclic GFR-binding peptide
  MOD_RES (2), (4), (35), (36): Xaa is C or S
SXKXSKVIMSMEGIIKPTKGIMIQITINSLDQSVXXP

SEQ ID NO: 27566 - protein, 36 aa, Artificial Sequence
  Non-cyclic GFR-binding peptide
  MOD_RES (31), (32): Xaa is C or S
EVVMESMEGIVVKDYEDMIQMTINSLETPVXXAKPI

SEQ ID NO: 27567 - protein, 41 aa, Artificial Sequence
  Non-cyclic GFR-binding peptide
  MOD_RES (2), (36), (37): Xaa is C or S
  MOD_RES (14), (15), (16), (17), (18): Xaa is A or G
  MOD_RES (19), (20), (21), (22): Xaa is A or G or is absent
GXARVVMNVQVEKXXXXXXXXXVKAVKVSRLQTPAXXPKPV

SEQ ID NO: 27568 - protein, 31 aa, Artificial Sequence
  Non-cyclic GFR-binding peptide
  MOD_RES (1), (1): Xaa is C or S
XSKVVMVQVEKVKPTRGVVKAIKVSRLDQPV

SEQ ID NO: 27569 - protein, 39 aa, Artificial Sequence
  Non-cyclic GFR-binding peptide
  MOD_RES (1), (38): Xaa is C or S
XALHDELTNSLQEFIPKKRVIEYYLVTLPELQVQTPRXQ

SEQ ID NO: 27570 - protein, 38 aa, Artificial Sequence
  Non-cyclic GFR-binding peptide
  MOD_RES (2), (4), (36): Xaa is C or S
HXGXSRVVMNVTAKKIVNSSDDIKRVQVPRLKTPAXTP

SEQ ID NO: 27571 - protein, 35 aa, Artificial Sequence
  Non-cyclic GFR-binding peptide
  MOD_RES (33), (34): Xaa is C or S
  MOD_RES (11), (12), (13), (14), (15): Xaa is A or G
  MOD_RES (16), (17), (18), (19): Xaa is A or G or is absent
SKVVMSMEGIXXXXXXXXXMIQITINSLDQPVXXP

SEQ ID NO: 27572 - protein, 35 aa, Artificial Sequence
  Non-cyclic GFR-binding peptide
  MOD_RES (33), (33): Xaa is C or S
  MOD_RES (11), (12), (13), (14), (15): Xaa is A or G
  MOD_RES (16), (17), (18), (19): Xaa is A or G or is absent
RVVMNSMEGIXXXXXXXXXMIQVTINSLKTPAXTP

SEQ ID NO: 27573 - protein, 39 aa, Artificial Sequence
  Non-cyclic GFR-binding peptide
  MOD_RES (35), (35): Xaa is C or S
HEELRNSLQELKPKKRVYEYYVVPLPEHHVRSPQXKVSS

SEQ ID NO: 27574 - protein, 39 aa, Artificial Sequence
  Non-cyclic GFR-binding peptide
  MOD_RES (36), (36): Xaa is C or S
LHDELTNSLQEFIPKKRVIEYYLVTLPELQVQTPRXQVN

SEQ ID NO: 27575 - protein, 33 aa, Artificial Sequence
  Non-cyclic GFR-binding peptide
  MOD_RES (1), (3): Xaa is C or S
XKXSKVIMVQVEKIKPTKGIVKAIKVSRLDQSV

SEQ ID NO: 27576 - protein, 37 aa, Artificial Sequence
  Non-cyclic GFR-binding peptide
  MOD_RES (2), (4), (36), (37): Xaa is C or S
HXGXSRVVMNVQVEKIVNSSDDVKAVKVSRLKTPAXX

SEQ ID NO: 27577 - protein, 37 aa, Artificial Sequence
  Non-cyclic GFR-binding peptide
  MOD_RES (34), (35): Xaa is C or S
  MOD_RES (12), (13), (14), (15), (16): Xaa is A or G
  MOD_RES (17), (18), (19), (20): Xaa is A or G or is absent
ARVVMNSMEGIXXXXXXXXXMIQVTINSLQTPAXXPK

SEQ ID NO: 27578 - protein, 37 aa, Artificial Sequence
  Non-cyclic GFR-binding peptide
  MOD_RES (1), (3), (35), (36): Xaa is C or S
XGXSRVVMNSMEGIIVNSSDDMIQVTINSLKTPAXXP

SEQ ID NO: 27579 - protein, 34 aa, Artificial Sequence
  Non-cyclic GFR-binding peptide
  MOD_RES (1), (1): Xaa is C or S
  MOD_RES (13), (14), (15), (16), (17): Xaa is A or G
  MOD_RES (18), (19), (20), (21): Xaa is A or G or is absent
XKNHQLFNSLQEXXXXXXXXXYYVMPLPEEETPV

SEQ ID NO: 27580 - protein, 35 aa, Artificial Sequence
  Non-cyclic GFR-binding peptide
  MOD_RES (2), (35): Xaa is C or S
  MOD_RES (13), (14), (15), (16), (17): Xaa is A or G
  MOD_RES (18), (19), (20), (21): Xaa is A or G or is absent
KXSKVVMSMEGIXXXXXXXXXMIQITINSLDQPVX

SEQ ID NO: 27581 - protein, 33 aa, Artificial Sequence
  Non-cyclic GFR-binding peptide
  MOD_RES (32), (33): Xaa is C or S
ARVVMNSMEGIIVNSSDDMIQVTINSLQTPAXX

SEQ ID NO: 27582 - protein, 35 aa, Artificial Sequence
  Non-cyclic GFR-binding peptide
  MOD_RES (31), (32): Xaa is C or S
EVVMEVTAKKVVKDYEDIKRMQVPRLETPVXXAKP

SEQ ID NO: 27583 - protein, 44 aa, Artificial Sequence
  Non-cyclic GFR-binding peptide
  MOD_RES (2), (4), (41): Xaa is C or S
  MOD_RES (17), (18), (19), (20), (21): Xaa is A or G
  MOD_RES (22), (23), (24), (25): Xaa is A or G or is absent
AXAXELHEELRNSLQEXXXXXXXXXYYLVTLPEHHVRSPQXKVS

SEQ ID NO: 27584 - protein, 37 aa, Artificial Sequence
  Non-cyclic GFR-binding peptide
  MOD_RES (32), (33): Xaa is C or S
GEVVMEVTAKKVVKDYEDIKRMQVPRLETPVXXAKPI

SEQ ID NO: 27585 - protein, 39 aa, Artificial Sequence
  Non-cyclic GFR-binding peptide
  MOD_RES (33), (34): Xaa is C or S
  MOD_RES (11), (12), (13), (14), (15): Xaa is A or G
  MOD_RES (16), (17), (18), (19): Xaa is A or G or is absent
SKVVMSMEGIXXXXXXXXXMIQITINSLDQPVXXPSASA

SEQ ID NO: 27586 - protein, 42 aa, Artificial Sequence
  Non-cyclic GFR-binding peptide
  MOD_RES (2), (4), (37), (38): Xaa is C or S
  MOD_RES (15), (16), (17), (18), (19): Xaa is A or G
  MOD_RES (20), (21), (22), (23): Xaa is A or G or is absent
SXKXSKVVMVQVEKXXXXXXXXXVKAIKVSRLDQPVXXPSAS

SEQ ID NO: 27587 - protein, 31 aa, Artificial Sequence
  Non-cyclic GFR-binding peptide
GEVVMDVQVEKVVKENEDVKAMKVSRLETPV

SEQ ID NO: 27588 - protein, 39 aa, Artificial Sequence
  Non-cyclic GFR-binding peptide
  MOD_RES (2), (4), (36), (37): Xaa is C or S
HXGXARVVMNVQVEKIVNSSDDVKAVKVSRLQTPAXXPK

SEQ ID NO: 27589 - protein, 38 aa, Artificial Sequence
  Non-cyclic GFR-binding peptide
  MOD_RES (1), (3): Xaa is C or S
  MOD_RES (16), (17), (18), (19), (20): Xaa is A or G
  MOD_RES (21), (22), (23), (24): Xaa is A or G or is absent
XAXELHEELRNSLQEXXXXXXXXXYYLVTLPEHHVRSP

SEQ ID NO: 27590 - protein, 35 aa, Artificial Sequence
  Non-cyclic GFR-binding peptide
  MOD_RES (33), (33): Xaa is C or S
  MOD_RES (11), (12), (13), (14), (15): Xaa is A or G
  MOD_RES (16), (17), (18), (19): Xaa is A or G or is absent
NHQLFNSLQEXXXXXXXXXYYVMPLPEEETPVXEL

SEQ ID NO: 27591 - protein, 37 aa, Artificial Sequence
  Non-cyclic GFR-binding peptide
  MOD_RES (34), (35): Xaa is C or S
  MOD_RES (12), (13), (14), (15), (16): Xaa is A or G
  MOD_RES (17), (18), (19), (20): Xaa is A or G or is absent
GEVVMDVTAKKXXXXXXXXXIKRMQVPRLETPVXXAK

SEQ ID NO: 27592 - protein, 42 aa, Artificial Sequence
  Non-cyclic GFR-binding peptide
  MOD_RES (2), (4), (37), (38): Xaa is C or S
  MOD_RES (15), (16), (17), (18), (19): Xaa is A or G
  MOD_RES (20), (21), (22), (23): Xaa is A or G or is absent
SXKXSKVIMSMEGIXXXXXXXXXMIQITINSLDQSVXXPSAS

SEQ ID NO: 27593 - protein, 35 aa, Artificial Sequence
  Non-cyclic GFR-binding peptide
  MOD_RES (34), (35): Xaa is C or S
  MOD_RES (12), (13), (14), (15), (16): Xaa is A or G
  MOD_RES (17), (18), (19), (20): Xaa is A or G or is absent
GEVVMDVQVEKXXXXXXXXXVKAMKVSRLETPVXX

SEQ ID NO: 27594 - protein, 41 aa, Artificial Sequence
  Non-cyclic GFR-binding peptide
  MOD_RES (1), (3), (37): Xaa is C or S
XEXKNHQLFNSLQEHQGQHPKIRYYVMPLPEEETPVXELGE

SEQ ID NO: 27595 - protein, 36 aa, Artificial Sequence
  Non-cyclic GFR-binding peptide
  MOD_RES (1), (3), (34), (35): Xaa is C or S
XKXSKVIMSMEGIIKPTKGIMIQITINSLDQSVXXP

SEQ ID NO: 27596 - protein, 41 aa, Artificial Sequence
  Non-cyclic GFR-binding peptide
  MOD_RES (1), (38): Xaa is C or S
  MOD_RES (14), (15), (16), (17), (18): Xaa is A or G
  MOD_RES (19), (20), (21), (22): Xaa is A or G or is absent
XALHDELTNSLQEXXXXXXXXXYYLVTLPELQVQTPRXQVN

SEQ ID NO: 27597 - protein, 33 aa, Artificial Sequence
  Non-cyclic GFR-binding peptide
  MOD_RES (31), (32): Xaa is C or S
SRVIMSMEGIVKPKRGVMIQITINSLAQPVXXP

SEQ ID NO: 27598 - protein, 41 aa, Artificial Sequence
  Non-cyclic GFR-binding peptide
  MOD_RES (1), (35): Xaa is C or S
XKNHQLFNSLQEHQGQHPKIRYYLMTLPEEETPVXELGEDN

SEQ ID NO: 27599 - protein, 35 aa, Artificial Sequence
  Non-cyclic GFR-binding peptide
  MOD_RES (1), (3), (35): Xaa is C or S
XGXARVVMNSMEGIIVNSSDDMIQVTINSLQTPAX

SEQ ID NO: 27600 - protein, 33 aa, Artificial Sequence
  Non-cyclic GFR-binding peptide
  MOD_RES (1), (1): Xaa is C or S
  MOD_RES (12), (13), (14), (15), (16): Xaa is A or G
  MOD_RES (17), (18), (19), (20): Xaa is A or G or is absent
XSKVIMVQVEKXXXXXXXXXVKAIKVSRLDQSV

SEQ ID NO: 27601 - protein, 41 aa, Artificial Sequence
  Non-cyclic GFR-binding peptide
  MOD_RES (1), (3), (36), (37): Xaa is C or S
  MOD_RES (14), (15), (16), (17), (18): Xaa is A or G
  MOD_RES (19), (20), (21), (22): Xaa is A or G or is absent
XKXSKVVMSMEGIXXXXXXXXXMIQITINSLDQPVXXPSAS

SEQ ID NO: 27602 - protein, 39 aa, Artificial Sequence
  Non-cyclic GFR-binding peptide
  MOD_RES (34), (34): Xaa is C or S
  MOD_RES (12), (13), (14), (15), (16): Xaa is A or G
  MOD_RES (17), (18), (19), (20): Xaa is A or G or is absent
SRVVMNVQVEKXXXXXXXXXVKAVKVSRLKTPAXTPKTV

SEQ ID NO: 27603 - protein, 32 aa, Artificial Sequence
  Non-cyclic GFR-binding peptide
  MOD_RES (31), (32): Xaa is C or S
RVVMNVTAKKIVNSSDDIKRVQVPRLKTPAXX

SEQ ID NO: 27604 - protein, 31 aa, Artificial Sequence
  Non-cyclic GFR-binding peptide
GEVVMEVQVEKVVKDYEDVKAMKVSRLETPV

SEQ ID NO: 27605 - protein, 42 aa, Artificial Sequence
  Non-cyclic GFR-binding peptide
  MOD_RES (1), (3), (37), (38): Xaa is C or S
  MOD_RES (15), (16), (17), (18), (19): Xaa is A or G
  MOD_RES (20), (21), (22), (23): Xaa is A or G or is absent
XGXGEVVMEVTAKKXXXXXXXXXIKRMQVPRLETPVXXAKPI

SEQ ID NO: 27606 - protein, 33 aa, Artificial Sequence
  Non-cyclic GFR-binding peptide
KNHQLFNSLQEHQGQHPKIRYYVMPLPEEETPV

SEQ ID NO: 27607 - protein, 37 aa, Artificial Sequence
  Non-cyclic GFR-binding peptide
  MOD_RES (2), (4), (37): Xaa is C or S
  MOD_RES (15), (16), (17), (18), (19): Xaa is A or G
  MOD_RES (20), (21), (22), (23): Xaa is A or G or is absent
SXKXSRVIMVQVEKXXXXXXXXXVKAIKVSRLAQPVX

SEQ ID NO: 27608 - protein, 39 aa, Artificial Sequence
  Non-cyclic GFR-binding peptide
  MOD_RES (1), (35), (36): Xaa is C or S
  MOD_RES (13), (14), (15), (16), (17): Xaa is A or G
  MOD_RES (18), (19), (20), (21): Xaa is A or G or is absent
XGEVVMEVTAKKXXXXXXXXXIKRMQVPRLETPVXXAKP

SEQ ID NO: 27609 - protein, 37 aa, Artificial Sequence
  Non-cyclic GFR-binding peptide
  MOD_RES (31), (32): Xaa is C or S
SKVVMSMEGIVKPTRGVMIQITINSLDQPVXXPSASA

SEQ ID NO: 27610 - protein, 34 aa, Artificial Sequence
  Non-cyclic GFR-binding peptide
  MOD_RES (1), (1): Xaa is C or S
XKNHQLFNSLQEHQGQHPKIRYYVMPLPEEETPV

SEQ ID NO: 27611 - protein, 35 aa, Artificial Sequence
  Non-cyclic GFR-binding peptide
LHDELTNSLQEFIPKKRVIEYYLVTLPELQVQTPR

SEQ ID NO: 27612 - protein, 34 aa, Artificial Sequence
  Non-cyclic GFR-binding peptide
  MOD_RES (34), (34): Xaa is C or S
  MOD_RES (12), (13), (14), (15), (16): Xaa is A or G
  MOD_RES (17), (18), (19), (20): Xaa is A or G or is absent
GEVVMEVTAKKXXXXXXXXXIKRMQVPRLETPVX

SEQ ID NO: 27613 - protein, 38 aa, Artificial Sequence
  Non-cyclic GFR-binding peptide
  MOD_RES (34), (35): Xaa is C or S
  MOD_RES (12), (13), (14), (15), (16): Xaa is A or G
  MOD_RES (17), (18), (19), (20): Xaa is A or G or is absent
GEVVMDVQVEKXXXXXXXXXVKAMKVSRLETPVXXAKP

SEQ ID NO: 27614 - protein, 40 aa, Artificial Sequence
  Non-cyclic GFR-binding peptide
  MOD_RES (1), (3), (37): Xaa is C or S
XEXKNHQLFNSLQEHQGQHPKIRYYVMPLPEEETPVXELG

SEQ ID NO: 27615 - protein, 38 aa, Artificial Sequence
  Non-cyclic GFR-binding peptide
  MOD_RES (2), (4), (37), (38): Xaa is C or S
  MOD_RES (15), (16), (17), (18), (19): Xaa is A or G
  MOD_RES (20), (21), (22), (23): Xaa is A or G or is absent
SXKXSKVVMVQVEKXXXXXXXXXVKAIKVSRLDQPVXX

SEQ ID NO: 27616 - protein, 36 aa, Artificial Sequence
  Non-cyclic GFR-binding peptide
  MOD_RES (34), (35): Xaa is C or S
  MOD_RES (12), (13), (14), (15), (16): Xaa is A or G
  MOD_RES (17), (18), (19), (20): Xaa is A or G or is absent
GEVVMDSMEGIXXXXXXXXXMIQMTINSLETPVXXA

SEQ ID NO: 27617 - protein, 32 aa, Artificial Sequence
  Non-cyclic GFR-binding peptide
  MOD_RES (2), (2): Xaa is C or S
KXSRVIMVQVEKVKPKRGVVKAIKVSRLAQPV

SEQ ID NO: 27618 - protein, 41 aa, Artificial Sequence
  Non-cyclic GFR-binding peptide
  MOD_RES (2), (35), (36): Xaa is C or S
  MOD_RES (13), (14), (15), (16), (17): Xaa is A or G
  MOD_RES (18), (19), (20), (21): Xaa is A or G or is absent
KXSKVVMSMEGIXXXXXXXXXMIQITINSLDQPVXXPSASA

SEQ ID NO: 27619 - protein, 36 aa, Artificial Sequence
  Non-cyclic GFR-binding peptide
  MOD_RES (2), (35), (36): Xaa is C or S
  MOD_RES (13), (14), (15), (16), (17): Xaa is A or G
  MOD_RES (18), (19), (20), (21): Xaa is A or G or is absent
KXSKVIMSMEGIXXXXXXXXXMIQITINSLDQSVXX

SEQ ID NO: 27620 - protein, 41 aa, Artificial Sequence
  Non-cyclic GFR-binding peptide
  MOD_RES (2), (4), (38): Xaa is C or S
  MOD_RES (16), (17), (18), (19), (20): Xaa is A or G
  MOD_RES (21), (22), (23), (24): Xaa is A or G or is absent
HXGXSRVVMNVTAKKXXXXXXXXXIKRVQVPRLKTPAXTPK

SEQ ID NO: 27621 - protein, 37 aa, Artificial Sequence
  Non-cyclic GFR-binding peptide
  MOD_RES (36), (36): Xaa is C or S
LHEELRNSLQELKPKKRVYEYYVVPLPEHHVRSPQXK

SEQ ID NO: 27622 - protein, 37 aa, Artificial Sequence
  Non-cyclic GFR-binding peptide
  MOD_RES (31), (32): Xaa is C or S
SRVIMVTAKKVKPKRGVIKRIQVPRLAQPVXXPAASA

SEQ ID NO: 27623 - protein, 40 aa, Artificial Sequence
  Non-cyclic GFR-binding peptide
  MOD_RES (2), (34), (35): Xaa is C or S
GXARVVMNSMEGIIVNSSDDMIQVTINSLQTPAXXPKPVT

SEQ ID NO: 27624 - protein, 36 aa, Artificial Sequence
  Non-cyclic GFR-binding peptide
  MOD_RES (31), (32): Xaa is C or S
SKVVMVTAKKVKPTRGVIKRIQVPRLDQPVXXPSAS

SEQ ID NO: 27625 - protein, 34 aa, Artificial Sequence
  Non-cyclic GFR-binding peptide
  MOD_RES (1), (32), (33): Xaa is C or S
XSRVIMVTAKKVKPKRGVIKRIQVPRLAQPVXXP

SEQ ID NO: 27626 - protein, 34 aa, Artificial Sequence
  Non-cyclic GFR-binding peptide
  MOD_RES (1), (3), (34): Xaa is C or S
XKXSKVVMVQVEKVKPTRGVVKAIKVSRLDQPVX

SEQ ID NO: 27627 - protein, 37 aa, Artificial Sequence
  Non-cyclic GFR-binding peptide
  MOD_RES (2), (34), (35): Xaa is C or S
GXGEVVMESMEGIVVKDYEDMIQMTINSLETPVXXAK

SEQ ID NO: 27628 - protein, 33 aa, Artificial Sequence
  Non-cyclic GFR-binding peptide
  MOD_RES (33), (33): Xaa is C or S
  MOD_RES (11), (12), (13), (14), (15): Xaa is A or G
  MOD_RES (16), (17), (18), (19): Xaa is A or G or is absent
EVVMDVQVEKXXXXXXXXXVKAMKVSRLETPVX

SEQ ID NO: 27629 - protein, 39 aa, Artificial Sequence
  Non-cyclic GFR-binding peptide
  MOD_RES (1), (33): Xaa is C or S
XSRVVMNSMEGIIVNSSDDMIQVTINSLKTPAXTPKTVH

SEQ ID NO: 27630 - protein, 37 aa, Artificial Sequence
  Non-cyclic GFR-binding peptide
  MOD_RES (2), (2): Xaa is C or S
  MOD_RES (15), (16), (17), (18), (19): Xaa is A or G
  MOD_RES (20), (21), (22), (23): Xaa is A or G or is absent
KXALHDELTNSLQEXXXXXXXXXYYVVPLPELQVQTP

SEQ ID NO: 27631 - protein, 31 aa, Artificial Sequence
  Non-cyclic GFR-binding peptide
SRVVMNVQVEKIVNSSDDVKAVKVSRLKTPA

SEQ ID NO: 27632 - protein, 40 aa, Artificial Sequence
  Non-cyclic GFR-binding peptide
  MOD_RES (2), (4): Xaa is C or S
  MOD_RES (17), (18), (19), (20), (21): Xaa is A or G
  MOD_RES (22), (23), (24), (25): Xaa is A or G or is absent
EXKXALHDELTNSLQEXXXXXXXXXYYLVTLPELQVQTPR

SEQ ID NO: 27633 - protein, 38 aa, Artificial Sequence
  Non-cyclic GFR-binding peptide
  MOD_RES (34), (34): Xaa is C or S
  MOD_RES (12), (13), (14), (15), (16): Xaa is A or G
  MOD_RES (17), (18), (19), (20): Xaa is A or G or is absent
KNHQLFNSLQEXXXXXXXXXYYLMTLPEEETPVXELGE

SEQ ID NO: 27634 - protein, 38 aa, Artificial Sequence
  Non-cyclic GFR-binding peptide
  MOD_RES (2), (33), (34): Xaa is C or S
KXSKVVMVTAKKVKPTRGVIKRIQVPRLDQPVXXPSAS

SEQ ID NO: 27635 - protein, 39 aa, Artificial Sequence
  Non-cyclic GFR-binding peptide
  MOD_RES (2), (39): Xaa is C or S
KXALHDELTNSLQEFIPKKRVIEYYVVPLPELQVQTPRX

SEQ ID NO: 27636 - protein, 44 aa, Artificial Sequence
  Non-cyclic GFR-binding peptide
  MOD_RES (2), (4), (38), (39): Xaa is C or S
  MOD_RES (16), (17), (18), (19), (20): Xaa is A or G
  MOD_RES (21), (22), (23), (24): Xaa is A or G or is absent
HXGXSRVVMNVQVEKXXXXXXXXXVKAVKVSRLKTPAXXPKPVY

SEQ ID NO: 27637 - protein, 38 aa, Artificial Sequence
  Non-cyclic GFR-binding peptide
  MOD_RES (2), (33), (34): Xaa is C or S
KXSKVIMVTAKKIKPTKGIIKRIQVPRLDQSVXXPSAS

SEQ ID NO: 27638 - protein, 34 aa, Artificial Sequence
  Non-cyclic GFR-binding peptide
  MOD_RES (2), (2): Xaa is C or S
  MOD_RES (13), (14), (15), (16), (17): Xaa is A or G
  MOD_RES (18), (19), (20), (21): Xaa is A or G or is absent
KXSKVVMSMEGIXXXXXXXXXMIQITINSLDQPV

SEQ ID NO: 27639 - protein, 38 aa, Artificial Sequence
  Non-cyclic GFR-binding peptide
  MOD_RES (2), (4): Xaa is C or S
  MOD_RES (17), (18), (19), (20), (21): Xaa is A or G
  MOD_RES (22), (23), (24), (25): Xaa is A or G or is absent
AXAXELHEELRNSLQEXXXXXXXXXYYLVTLPEHHVRS

SEQ ID NO: 27640 - protein, 39 aa, Artificial Sequence
  Non-cyclic GFR-binding peptide
  MOD_RES (1), (3), (34), (35): Xaa is C or S
XKXSRVIMSMEGIVKPKRGVMIQITINSLAQPVXXPAAS

SEQ ID NO: 27641 - protein, 39 aa, Artificial Sequence
  Non-cyclic GFR-binding peptide
  MOD_RES (34), (35): Xaa is C or S
  MOD_RES (12), (13), (14), (15), (16): Xaa is A or G
  MOD_RES (17), (18), (19), (20): Xaa is A or G or is absent
ARVVMNSMEGIXXXXXXXXXMIQVTINSLQTPAXXPKPV

SEQ ID NO: 27642 - protein, 39 aa, Artificial Sequence
  Non-cyclic GFR-binding peptide
  MOD_RES (37), (37): Xaa is C or S
  MOD_RES (13), (14), (15), (16), (17): Xaa is A or G
  MOD_RES (18), (19), (20), (21): Xaa is A or G or is absent
ELHEELRNSLQEXXXXXXXXXYYLVTLPEHHVRSPQXKV

SEQ ID NO: 27643 - protein, 34 aa, Artificial Sequence
  Non-cyclic GFR-binding peptide
ELHEELRNSLQELKPKKRVYEYYVVPLPEHHVRS

SEQ ID NO: 27644 - protein, 42 aa, Artificial Sequence
  Non-cyclic GFR-binding peptide
  MOD_RES (2), (4), (36), (37): Xaa is C or S
HXGXSRVVMNVTAKKIVNSSDDIKRVQVPRLKTPAXXPKPVY

SEQ ID NO: 27645 - protein, 38 aa, Artificial Sequence
  Non-cyclic GFR-binding peptide
  MOD_RES (1), (33), (34): Xaa is C or S
XSRVVMNSMEGIIVNSSDDMIQVTINSLKTPAXXPKPV

SEQ ID NO: 27646 - protein, 39 aa, Artificial Sequence
  Non-cyclic GFR-binding peptide
  MOD_RES (2), (34), (35): Xaa is C or S
GXGEVVMEVQVEKVVKDYEDVKAMKVSRLETPVXXAKPI

SEQ ID NO: 27647 - protein, 36 aa, Artificial Sequence
  Non-cyclic GFR-binding peptide
  MOD_RES (31), (32): Xaa is C or S
SRVIMVTAKKVKPKRGVIKRIQVPRLAQPVXXPAAS

SEQ ID NO: 27648 - protein, 38 aa, Artificial Sequence
  Non-cyclic GFR-binding peptide
  MOD_RES (2), (34), (35): Xaa is C or S
GXGEVVMESMEGIVVKDYEDMIQMTINSLETPVXXAKP

SEQ ID NO: 27649 - protein, 37 aa, Artificial Sequence
  Non-cyclic GFR-binding peptide
  MOD_RES (1), (32), (33): Xaa is C or S
XSRVIMVTAKKVKPKRGVIKRIQVPRLAQPVXXPAAS

SEQ ID NO: 27650 - protein, 36 aa, Artificial Sequence
  Non-cyclic GFR-binding peptide
  MOD_RES (2), (34), (35): Xaa is C or S
GXGEVVMDSMEGIVVKENEDMIQMTINSLETPVXXA

SEQ ID NO: 27651 - protein, 35 aa, Artificial Sequence
  Non-cyclic GFR-binding peptide
  MOD_RES (33), (33): Xaa is C or S
NHQLFNSLQEHQGQHPKIRYYLMTLPEEETPVXEL

SEQ ID NO: 27652 - protein, 39 aa, Artificial Sequence
  Non-cyclic GFR-binding peptide
  MOD_RES (1), (33), (34): Xaa is C or S
XGEVVMDVTAKKVVKENEDIKRMQVPRLETPVXXAKPIK

SEQ ID NO: 27653 - protein, 39 aa, Artificial Sequence
  Non-cyclic GFR-binding peptide
  MOD_RES (2), (4), (38): Xaa is C or S
  MOD_RES (16), (17), (18), (19), (20): Xaa is A or G
  MOD_RES (21), (22), (23), (24): Xaa is A or G or is absent
HXGXSRVVMNSMEGIXXXXXXXXXMIQVTINSLKTPAXT

SEQ ID NO: 27654 - protein, 35 aa, Artificial Sequence
  Non-cyclic GFR-binding peptide
  MOD_RES (2), (4): Xaa is C or S
RXGXGEVVMEVQVEKVVKDYEDVKAMKVSRLETPV

SEQ ID NO: 27655 - protein, 35 aa, Artificial Sequence
  Non-cyclic GFR-binding peptide
  MOD_RES (35), (35): Xaa is C or S
  MOD_RES (11), (12), (13), (14), (15): Xaa is A or G
  MOD_RES (16), (17), (18), (19): Xaa is A or G or is absent
HDELTNSLQEXXXXXXXXXYYVVPLPELQVQTPRX

SEQ ID NO: 27656 - protein, 38 aa, Artificial Sequence
  Non-cyclic GFR-binding peptide
  MOD_RES (32), (33): Xaa is C or S
SRVVMNSMEGIIVNSSDDMIQVTINSLKTPAXXPKPVY

SEQ ID NO: 27657 - protein, 38 aa, Artificial Sequence
  Non-cyclic GFR-binding peptide
  MOD_RES (1), (3), (35): Xaa is C or S
XGXSRVVMNVTAKKIVNSSDDIKRVQVPRLKTPAXTPK

SEQ ID NO: 27658 - protein, 33 aa, Artificial Sequence
  Non-cyclic GFR-binding peptide
  MOD_RES (2), (2): Xaa is C or S
GXGEVVMEVQVEKVVKDYEDVKAMKVSRLETPV

SEQ ID NO: 27659 - protein, 41 aa, Artificial Sequence
  Non-cyclic GFR-binding peptide
  MOD_RES (37), (37): Xaa is C or S
  MOD_RES (13), (14), (15), (16), (17): Xaa is A or G
  MOD_RES (18), (19), (20), (21): Xaa is A or G or is absent
ELHEELRNSLQEXXXXXXXXXYYVVPLPEHHVRSPQXKVSS

SEQ ID NO: 27660 - protein, 38 aa, Artificial Sequence
  Non-cyclic GFR-binding peptide
  MOD_RES (1), (35): Xaa is C or S
  MOD_RES (13), (14), (15), (16), (17): Xaa is A or G
  MOD_RES (18), (19), (20), (21): Xaa is A or G or is absent
XSRVVMNVTAKKXXXXXXXXXIKRVQVPRLKTPAXTPK

SEQ ID NO: 27661 - protein, 37 aa, Artificial Sequence
  Non-cyclic GFR-binding peptide
  MOD_RES (2), (4), (36), (37): Xaa is C or S
HXGXSRVVMNSMEGIIVNSSDDMIQVTINSLKTPAXX

SEQ ID NO: 27662 - protein, 35 aa, Artificial Sequence
  Non-cyclic GFR-binding peptide
  MOD_RES (1), (3), (35): Xaa is C or S
XGXSRVVMNVTAKKIVNSSDDIKRVQVPRLKTPAX

SEQ ID NO: 27663 - protein, 44 aa, Artificial Sequence
  Non-cyclic GFR-binding peptide
  MOD_RES (2), (4), (38), (39): Xaa is C or S
  MOD_RES (16), (17), (18), (19), (20): Xaa is A or G
  MOD_RES (21), (22), (23), (24): Xaa is A or G or is absent
HXGXSRVVMNSMEGIXXXXXXXXXMIQVTINSLKTPAXXPKPVY

SEQ ID NO: 27664 - protein, 42 aa, Artificial Sequence
  Non-cyclic GFR-binding peptide
  MOD_RES (2), (4), (38), (39): Xaa is C or S
  MOD_RES (16), (17), (18), (19), (20): Xaa is A or G
  MOD_RES (21), (22), (23), (24): Xaa is A or G or is absent
RXGXGEVVMEVQVEKXXXXXXXXXVKAMKVSRLETPVXXAKP

SEQ ID NO: 27665 - protein, 37 aa, Artificial Sequence
  Non-cyclic GFR-binding peptide
  MOD_RES (2), (33), (34): Xaa is C or S
KXSKVIMVQVEKIKPTKGIVKAIKVSRLDQSVXXPSA

SEQ ID NO: 27666 - protein, 36 aa, Artificial Sequence
  Non-cyclic GFR-binding peptide
  MOD_RES (2), (35), (36): Xaa is C or S
  MOD_RES (13), (14), (15), (16), (17): Xaa is A or G
  MOD_RES (18), (19), (20), (21): Xaa is A or G or is absent
KXSKVVMSMEGIXXXXXXXXXMIQITINSLDQPVXX

SEQ ID NO: 27667 - protein, 36 aa, Artificial Sequence
  Non-cyclic GFR-binding peptide
  MOD_RES (2), (4): Xaa is C or S
  MOD_RES (15), (16), (17), (18), (19): Xaa is A or G
  MOD_RES (20), (21), (22), (23): Xaa is A or G or is absent
SXKXSKVVMVQVEKXXXXXXXXXVKAIKVSRLDQPV

SEQ ID NO: 27668 - protein, 38 aa, Artificial Sequence
  Non-cyclic GFR-binding peptide
  MOD_RES (32), (32): Xaa is C or S
SRVVMNSMEGIIVNSSDDMIQVTINSLKTPAXTPKTVH

SEQ ID NO: 27669 - protein, 42 aa, Artificial Sequence
  Non-cyclic GFR-binding peptide
  MOD_RES (2), (4), (41): Xaa is C or S
EXKXALHDELTNSLQEFIPKKRVIEYYLVTLPELQVQTPRXQ

SEQ ID NO: 27670 - protein, 39 aa, Artificial Sequence
  Non-cyclic GFR-binding peptide
  MOD_RES (1), (34), (35): Xaa is C or S
  MOD_RES (12), (13), (14), (15), (16): Xaa is A or G
  MOD_RES (17), (18), (19), (20): Xaa is A or G or is absent
XSKVVMSMEGIXXXXXXXXXMIQITINSLDQPVXXPSAS

SEQ ID NO: 27671 - protein, 35 aa, Artificial Sequence
  Non-cyclic GFR-binding peptide
  MOD_RES (2), (33), (34): Xaa is C or S
KXSRVIMSMEGIVKPKRGVMIQITINSLAQPVXXP

SEQ ID NO: 27672 - protein, 40 aa, Artificial Sequence
  Non-cyclic GFR-binding peptide
  MOD_RES (2), (35), (36): Xaa is C or S
  MOD_RES (13), (14), (15), (16), (17): Xaa is A or G
  MOD_RES (18), (19), (20), (21): Xaa is A or G or is absent
KXSKVIMVQVEKXXXXXXXXXVKAIKVSRLDQSVXXPSAS

SEQ ID NO: 27673 - protein, 42 aa, Artificial Sequence
  Non-cyclic GFR-binding peptide
  MOD_RES (1), (3), (37): Xaa is C or S
XEXKNHQLFNSLQEHQGQHPKIRYYVMPLPEEETPVXELGED

SEQ ID NO: 27674 - protein, 45 aa, Artificial Sequence
  Non-cyclic GFR-binding peptide
  MOD_RES (2), (4), (41): Xaa is C or S
EXKXALHDELTNSLQEFIPKKRVIEYYLVTLPELQVQTPRXQVNR

SEQ ID NO: 27675 - protein, 31 aa, Artificial Sequence
  Non-cyclic GFR-binding peptide
  MOD_RES (31), (31): Xaa is C or S
RVVMNVTAKKIVNSSDDIKRVQVPRLQTPAX

SEQ ID NO: 27676 - protein, 32 aa, Artificial Sequence
  Non-cyclic GFR-binding peptide
  MOD_RES (31), (32): Xaa is C or S
SRVIMSMEGIVKPKRGVMIQITINSLAQPVXX

SEQ ID NO: 27677 - protein, 40 aa, Artificial Sequence
  Non-cyclic GFR-binding peptide
  MOD_RES (1), (38): Xaa is C or S
  MOD_RES (14), (15), (16), (17), (18): Xaa is A or G
  MOD_RES (19), (20), (21), (22): Xaa is A or G or is absent
XELHEELRNSLQEXXXXXXXXXYYLVTLPEHHVRSPQXKV

SEQ ID NO: 27678 - protein, 35 aa, Artificial Sequence
  Non-cyclic GFR-binding peptide
  MOD_RES (2), (4): Xaa is C or S
HXGXARVVMNVTAKKIVNSSDDIKRVQVPRLQTPA

SEQ ID NO: 27679 - protein, 38 aa, Artificial Sequence
  Non-cyclic GFR-binding peptide
  MOD_RES (34), (35): Xaa is C or S
  MOD_RES (12), (13), (14), (15), (16): Xaa is A or G
  MOD_RES (17), (18), (19), (20): Xaa is A or G or is absent
ARVVMNVTAKKXXXXXXXXXIKRVQVPRLQTPAXXPKP

SEQ ID NO: 27680 - protein, 35 aa, Artificial Sequence
  Non-cyclic GFR-binding peptide
  MOD_RES (31), (32): Xaa is C or S
SKVVMVQVEKVKPTRGVVKAIKVSRLDQPVXXPSA

SEQ ID NO: 27681 - protein, 35 aa, Artificial Sequence
  Non-cyclic GFR-binding peptide
ELHEELRNSLQELKPKKRVYEYYVVPLPEHHVRSP

SEQ ID NO: 27682 - protein, 33 aa, Artificial Sequence
  Non-cyclic GFR-binding peptide
  MOD_RES (12), (13), (14), (15), (16): Xaa is A or G
  MOD_RES (17), (18), (19), (20): Xaa is A or G or is absent
GEVVMDVQVEKXXXXXXXXXVKAMKVSRLETPV

SEQ ID NO: 27683 - protein, 38 aa, Artificial Sequence
  Non-cyclic GFR-binding peptide
  MOD_RES (34), (35): Xaa is C or S
  MOD_RES (12), (13), (14), (15), (16): Xaa is A or G
  MOD_RES (17), (18), (19), (20): Xaa is A or G or is absent
GEVVMDSMEGIXXXXXXXXXMIQMTINSLETPVXXAKP

SEQ ID NO: 27684 - protein, 38 aa, Artificial Sequence
  Non-cyclic GFR-binding peptide
  MOD_RES (33), (34): Xaa is C or S
  MOD_RES (11), (12), (13), (14), (15): Xaa is A or G
  MOD_RES (16), (17), (18), (19): Xaa is A or G or is absent
SKVVMVQVEKXXXXXXXXXVKAIKVSRLDQPVXXPSAS

SEQ ID NO: 27685 - protein, 44 aa, Artificial Sequence
  Non-cyclic GFR-binding peptide
  MOD_RES (2), (4), (38), (39): Xaa is C or S
  MOD_RES (16), (17), (18), (19), (20): Xaa is A or G
  MOD_RES (21), (22), (23), (24): Xaa is A or G or is absent
HXGXARVVMNVQVEKXXXXXXXXXVKAVKVSRLQTPAXXPKPVT

SEQ ID NO: 27686 - protein, 41 aa, Artificial Sequence
  Non-cyclic GFR-binding peptide
  MOD_RES (2), (4), (35), (36): Xaa is C or S
SXKXSKVVMVTAKKVKPTRGVIKRIQVPRLDQPVXXPSASA

SEQ ID NO: 27687 - protein, 38 aa, Artificial Sequence
  Non-cyclic GFR-binding peptide
  MOD_RES (32), (33): Xaa is C or S
GEVVMESMEGIVVKDYEDMIQMTINSLETPVXXAKPIS

SEQ ID NO: 27688 - protein, 40 aa, Artificial Sequence
  Non-cyclic GFR-binding peptide
  MOD_RES (1), (35), (36): Xaa is C or S
  MOD_RES (13), (14), (15), (16), (17): Xaa is A or G
  MOD_RES (18), (19), (20), (21): Xaa is A or G or is absent
XARVVMNVTAKKXXXXXXXXXIKRVQVPRLQTPAXXPKPV

SEQ ID NO: 27689 - protein, 35 aa, Artificial Sequence
  Non-cyclic GFR-binding peptide
  MOD_RES (1), (33), (34): Xaa is C or S
XGEVVMEVQVEKVVKDYEDVKAMKVSRLETPVXXA

SEQ ID NO: 27690 - protein, 41 aa, Artificial Sequence
  Non-cyclic GFR-binding peptide
  MOD_RES (1), (3), (35): Xaa is C or S
XGXSRVVMNVQVEKIVNSSDDVKAVKVSRLKTPAXTPKTVH

SEQ ID NO: 27691 - protein, 31 aa, Artificial Sequence
  Non-cyclic GFR-binding peptide
  MOD_RES (31), (31): Xaa is C or S
SKVIMSMEGIIKPTKGIMIQITINSLDQSVX

SEQ ID NO: 27692 - protein, 34 aa, Artificial Sequence
  Non-cyclic GFR-binding peptide
  MOD_RES (34), (34): Xaa is C or S
  MOD_RES (12), (13), (14), (15), (16): Xaa is A or G
  MOD_RES (17), (18), (19), (20): Xaa is A or G or is absent
ARVVMNVQVEKXXXXXXXXXVKAVKVSRLQTPAX

SEQ ID NO: 27693 - protein, 39 aa, Artificial Sequence
  Non-cyclic GFR-binding peptide
  MOD_RES (2), (33), (34): Xaa is C or S
KXSRVIMVQVEKVKPKRGVVKAIKVSRLAQPVXXPAASA

SEQ ID NO: 27694 - protein, 36 aa, Artificial Sequence
  Non-cyclic GFR-binding peptide
  MOD_RES (2), (4), (35), (36): Xaa is C or S
SXKXSKVIMVQVEKIKPTKGIVKAIKVSRLDQSVXX

SEQ ID NO: 27695 - protein, 40 aa, Artificial Sequence
  Non-cyclic GFR-binding peptide
  MOD_RES (1), (3), (35), (36): Xaa is C or S
XGXSRVVMNVQVEKIVNSSDDVKAVKVSRLKTPAXXPKPV

SEQ ID NO: 27696 - protein, 34 aa, Artificial Sequence
  Non-cyclic GFR-binding peptide
  MOD_RES (2), (34): Xaa is C or S
GXSRVVMNVQVEKIVNSSDDVKAVKVSRLKTPAX

SEQ ID NO: 27697 - protein, 37 aa, Artificial Sequence
  Non-cyclic GFR-binding peptide
  MOD_RES (2), (4), (35), (36): Xaa is C or S
SXKXSRVIMVQVEKVKPKRGVVKAIKVSRLAQPVXXP

SEQ ID NO: 27698 - protein, 40 aa, Artificial Sequence
  Non-cyclic GFR-binding peptide
  MOD_RES (1), (3), (36), (37): Xaa is C or S
  MOD_RES (14), (15), (16), (17), (18): Xaa is A or G
  MOD_RES (19), (20), (21), (22): Xaa is A or G or is absent
XKXSKVVMVQVEKXXXXXXXXXVKAIKVSRLDQPVXXPSA

SEQ ID NO: 27699 - protein, 36 aa, Artificial Sequence
  Non-cyclic GFR-binding peptide
  MOD_RES (31), (32): Xaa is C or S
SKVIMSMEGIIKPTKGIMIQITINSLDQSVXXPSAS

SEQ ID NO: 27700 - protein, 37 aa, Artificial Sequence
  Non-cyclic GFR-binding peptide
  MOD_RES (31), (32): Xaa is C or S
EVVMEVQVEKVVKDYEDVKAMKVSRLETPVXXAKPIS

SEQ ID NO: 27701 - protein, 33 aa, Artificial Sequence
  Non-cyclic GFR-binding peptide
  MOD_RES (12), (13), (14), (15), (16): Xaa is A or G
  MOD_RES (17), (18), (19), (20): Xaa is A or G or is absent
ARVVMNVTAKKXXXXXXXXXIKRVQVPRLQTPA

SEQ ID NO: 27702 - protein, 35 aa, Artificial Sequence
  Non-cyclic GFR-binding peptide
  MOD_RES (33), (34): Xaa is C or S
  MOD_RES (11), (12), (13), (14), (15): Xaa is A or G
  MOD_RES (16), (17), (18), (19): Xaa is A or G or is absent
SKVIMVQVEKXXXXXXXXXVKAIKVSRLDQSVXXP

SEQ ID NO: 27703 - protein, 35 aa, Artificial Sequence
  Non-cyclic GFR-binding peptide
  MOD_RES (1), (3), (35): Xaa is C or S
XGXGEVVMEVQVEKVVKDYEDVKAMKVSRLETPVX

SEQ ID NO: 27704 - protein, 34 aa, Artificial Sequence
  Non-cyclic GFR-binding peptide
  MOD_RES (32), (33): Xaa is C or S
GEVVMDSMEGIVVKENEDMIQMTINSLETPVXXA

SEQ ID NO: 27705 - protein, 38 aa, Artificial Sequence
  Non-cyclic GFR-binding peptide
  MOD_RES (1), (33), (34): Xaa is C or S
XGEVVMDSMEGIVVKENEDMIQMTINSLETPVXXAKPI

SEQ ID NO: 27706 - protein, 37 aa, Artificial Sequence
  Non-cyclic GFR-binding peptide
  MOD_RES (1), (3): Xaa is C or S
XKXALHDELTNSLQEFIPKKRVIEYYVVPLPELQVQT

SEQ ID NO: 27707 - protein, 36 aa, Artificial Sequence
  Non-cyclic GFR-binding peptide
  MOD_RES (2), (36): Xaa is C or S
EXKNHQLFNSLQEHQGQHPKIRYYLMTLPEEETPVX

SEQ ID NO: 27708 - protein, 32 aa, Artificial Sequence
  Non-cyclic GFR-binding peptide
  MOD_RES (32), (32): Xaa is C or S
GEVVMEVQVEKVVKDYEDVKAMKVSRLETPVX

SEQ ID NO: 27709 - protein, 39 aa, Artificial Sequence
  Non-cyclic GFR-binding peptide
  MOD_RES (1), (35), (36): Xaa is C or S
  MOD_RES (13), (14), (15), (16), (17): Xaa is A or G
  MOD_RES (18), (19), (20), (21): Xaa is A or G or is absent
XGEVVMDVQVEKXXXXXXXXXVKAMKVSRLETPVXXAKP

SEQ ID NO: 27710 - protein, 36 aa, Artificial Sequence
  Non-cyclic GFR-binding peptide
  MOD_RES (1), (3), (34), (35): Xaa is C or S
XKXSKVVMVQVEKVKPTRGVVKAIKVSRLDQPVXXP

SEQ ID NO: 27711 - protein, 34 aa, Artificial Sequence
  Non-cyclic GFR-binding peptide
  MOD_RES (1), (3): Xaa is C or S
XGXGEVVMEVTAKKVVKDYEDIKRMQVPRLETPV

SEQ ID NO: 27712 - protein, 38 aa, Artificial Sequence
  Non-cyclic GFR-binding peptide
  MOD_RES (2), (36), (37): Xaa is C or S
  MOD_RES (14), (15), (16), (17), (18): Xaa is A or G
  MOD_RES (19), (20), (21), (22): Xaa is A or G or is absent
GXSRVVMNSMEGIXXXXXXXXXMIQVTINSLKTPAXXP

SEQ ID NO: 27713 - protein, 33 aa, Artificial Sequence
  Non-cyclic GFR-binding peptide
  MOD_RES (1), (33): Xaa is C or S
XSRVVMNVQVEKIVNSSDDVKAVKVSRLKTPAX

SEQ ID NO: 27714 - protein, 35 aa, Artificial Sequence
  Non-cyclic GFR-binding peptide
  MOD_RES (1), (3): Xaa is C or S
  MOD_RES (14), (15), (16), (17), (18): Xaa is A or G
  MOD_RES (19), (20), (21), (22): Xaa is A or G or is absent
XKXSKVVMVQVEKXXXXXXXXXVKAIKVSRLDQPV

SEQ ID NO: 27715 - protein, 34 aa, Artificial Sequence
  Non-cyclic GFR-binding peptide
  MOD_RES (2), (34): Xaa is C or S
GXARVVMNVTAKKIVNSSDDIKRVQVPRLQTPAX

SEQ ID NO: 27716 - protein, 35 aa, Artificial Sequence
  Non-cyclic GFR-binding peptide
  MOD_RES (1), (33), (34): Xaa is C or S
XGEVVMDVQVEKVVKENEDVKAMKVSRLETPVXXA

SEQ ID NO: 27717 - protein, 35 aa, Artificial Sequence
  Non-cyclic GFR-binding peptide
  MOD_RES (1), (32), (33): Xaa is C or S
XSKVVMVTAKKVKPTRGVIKRIQVPRLDQPVXXPS

SEQ ID NO: 27718 - protein, 37 aa, Artificial Sequence
  Non-cyclic GFR-binding peptide
  MOD_RES (2), (36): Xaa is C or S
  MOD_RES (14), (15), (16), (17), (18): Xaa is A or G
  MOD_RES (19), (20), (21), (22): Xaa is A or G or is absent
GXSRVVMNVQVEKXXXXXXXXXVKAVKVSRLKTPAXT

SEQ ID NO: 27719 - protein, 40 aa, Artificial Sequence
  Non-cyclic GFR-binding peptide
  MOD_RES (2), (4), (36), (37): Xaa is C or S
HXGXSRVVMNVTAKKIVNSSDDIKRVQVPRLKTPAXXPKP

SEQ ID NO: 27720 - protein, 39 aa, Artificial Sequence
  Non-cyclic GFR-binding peptide
  MOD_RES (2), (4), (37), (38): Xaa is C or S
  MOD_RES (15), (16), (17), (18), (19): Xaa is A or G
  MOD_RES (20), (21), (22), (23): Xaa is A or G or is absent
SXKXSKVIMVTAKKXXXXXXXXXIKRIQVPRLDQSVXXP

SEQ ID NO: 27721 - protein, 36 aa, Artificial Sequence
  Non-cyclic GFR-binding peptide
  MOD_RES (1), (1): Xaa is C or S
XELHEELRNSLQELKPKKRVYEYYLVTLPEHHVRSP

SEQ ID NO: 27722 - protein, 39 aa, Artificial Sequence
  Non-cyclic GFR-binding peptide
  MOD_RES (1), (34), (35): Xaa is C or S
  MOD_RES (12), (13), (14), (15), (16): Xaa is A or G
  MOD_RES (17), (18), (19), (20): Xaa is A or G or is absent
XSRVIMSMEGIXXXXXXXXXMIQITINSLAQPVXXPAAS

SEQ ID NO: 27723 - protein, 36 aa, Artificial Sequence
  Non-cyclic GFR-binding peptide
  MOD_RES (31), (32): Xaa is C or S
EVVMDVQVEKVVKENEDVKAMKVSRLETPVXXAKPI

SEQ ID NO: 27724 - protein, 42 aa, Artificial Sequence
  Non-cyclic GFR-binding peptide
  MOD_RES (2), (36): Xaa is C or S
EXKNHQLFNSLQEHQGQHPKIRYYVMPLPEEETPVXELGEDN

SEQ ID NO: 27725 - protein, 39 aa, Artificial Sequence
  Non-cyclic GFR-binding peptide
  MOD_RES (1), (38): Xaa is C or S
XELHEELRNSLQELKPKKRVYEYYLVTLPEHHVRSPQXK

SEQ ID NO: 27726 - protein, 38 aa, Artificial Sequence
  Non-cyclic GFR-binding peptide
  MOD_RES (1), (3), (36), (37): Xaa is C or S
  MOD_RES (14), (15), (16), (17), (18): Xaa is A or G
  MOD_RES (19), (20), (21), (22): Xaa is A or G or is absent
XKXSRVIMVTAKKXXXXXXXXXIKRIQVPRLAQPVXXP

SEQ ID NO: 27727 - protein, 35 aa, Artificial Sequence
  Non-cyclic GFR-binding peptide
  MOD_RES (2), (35): Xaa is C or S
  MOD_RES (13), (14), (15), (16), (17): Xaa is A or G
  MOD_RES (18), (19), (20), (21): Xaa is A or G or is absent
KXSKVIMSMEGIXXXXXXXXXMIQITINSLDQSVX

SEQ ID NO: 27728 - protein, 39 aa, Artificial Sequence
  Non-cyclic GFR-binding peptide
  MOD_RES (33), (34): Xaa is C or S
  MOD_RES (11), (12), (13), (14), (15): Xaa is A or G
  MOD_RES (16), (17), (18), (19): Xaa is A or G or is absent
SKVVMVQVEKXXXXXXXXXVKAIKVSRLDQPVXXPSASA

SEQ ID NO: 27729 - protein, 36 aa, Artificial Sequence
  Non-cyclic GFR-binding peptide
  MOD_RES (2), (33), (34): Xaa is C or S
KXSRVIMVQVEKVKPKRGVVKAIKVSRLAQPVXXPA

SEQ ID NO: 27730 - protein, 42 aa, Artificial Sequence
  Non-cyclic GFR-binding peptide
  MOD_RES (2), (4), (37), (38): Xaa is C or S
  MOD_RES (15), (16), (17), (18), (19): Xaa is A or G
  MOD_RES (20), (21), (22), (23): Xaa is A or G or is absent
SXKXSKVIMVTAKKXXXXXXXXXIKRIQVPRLDQSVXXPSAS

SEQ ID NO: 27731 - protein, 39 aa, Artificial Sequence
  Non-cyclic GFR-binding peptide
  MOD_RES (33), (34): Xaa is C or S
  MOD_RES (11), (12), (13), (14), (15): Xaa is A or G
  MOD_RES (16), (17), (18), (19): Xaa is A or G or is absent
EVVMEVTAKKXXXXXXXXXIKRMQVPRLETPVXXAKPIS

SEQ ID NO: 27732 - protein, 34 aa, Artificial Sequence
  Non-cyclic GFR-binding peptide
  MOD_RES (32), (33): Xaa is C or S
ARVVMNSMEGIIVNSSDDMIQVTINSLQTPAXXP

SEQ ID NO: 27733 - protein, 37 aa, Artificial Sequence
  Non-cyclic GFR-binding peptide
  MOD_RES (1), (1): Xaa is C or S
  MOD_RES (14), (15), (16), (17), (18): Xaa is A or G
  MOD_RES (19), (20), (21), (22): Xaa is A or G or is absent
XALHDELTNSLQEXXXXXXXXXYYVVPLPELQVQTPR

SEQ ID NO: 27734 - protein, 41 aa, Artificial Sequence
  Non-cyclic GFR-binding peptide
  MOD_RES (2), (39): Xaa is C or S
  MOD_RES (15), (16), (17), (18), (19): Xaa is A or G
  MOD_RES (20), (21), (22), (23): Xaa is A or G or is absent
KXALHDELTNSLQEXXXXXXXXXYYLVTLPELQVQTPRXQV

SEQ ID NO: 27735 - protein, 41 aa, Artificial Sequence
  Non-cyclic GFR-binding peptide
  MOD_RES (2), (4), (37), (38): Xaa is C or S
  MOD_RES (15), (16), (17), (18), (19): Xaa is A or G
  MOD_RES (20), (21), (22), (23): Xaa is A or G or is absent
SXKXSKVIMVQVEKXXXXXXXXXVKAIKVSRLDQSVXXPSA

SEQ ID NO: 27736 - protein, 37 aa, Artificial Sequence
  Non-cyclic GFR-binding peptide
  MOD_RES (1), (35), (36): Xaa is C or S
  MOD_RES (13), (14), (15), (16), (17): Xaa is A or G
  MOD_RES (18), (19), (20), (21): Xaa is A or G or is absent
XGEVVMDSMEGIXXXXXXXXXMIQMTINSLETPVXXA

SEQ ID NO: 27737 - protein, 43 aa, Artificial Sequence
  Non-cyclic GFR-binding peptide
  MOD_RES (2), (4), (38): Xaa is C or S
  MOD_RES (16), (17), (18), (19), (20): Xaa is A or G
  MOD_RES (21), (22), (23), (24): Xaa is A or G or is absent
RXEXKNHQLFNSLQEXXXXXXXXXYYVMPLPEEETPVXELGED

SEQ ID NO: 27738 - protein, 36 aa, Artificial Sequence
  Non-cyclic GFR-binding peptide
  MOD_RES (1), (33), (34): Xaa is C or S
XSRVVMNSMEGIIVNSSDDMIQVTINSLKTPAXXPK

SEQ ID NO: 27739 - protein, 36 aa, Artificial Sequence
  Non-cyclic GFR-binding peptide
  MOD_RES (1), (32), (33): Xaa is C or S
XSKVVMVTAKKVKPTRGVIKRIQVPRLDQPVXXPSA

SEQ ID NO: 27740 - protein, 41 aa, Artificial Sequence
  Non-cyclic GFR-binding peptide
  MOD_RES (2), (35), (36): Xaa is C or S
  MOD_RES (13), (14), (15), (16), (17): Xaa is A or G
  MOD_RES (18), (19), (20), (21): Xaa is A or G or is absent
KXSRVIMVQVEKXXXXXXXXXVKAIKVSRLAQPVXXPAASA

SEQ ID NO: 27741 - protein, 38 aa, Artificial Sequence
  Non-cyclic GFR-binding peptide
  MOD_RES (2), (4), (36), (37): Xaa is C or S
RXGXGEVVMDVTAKKVVKENEDIKRMQVPRLETPVXXA

SEQ ID NO: 27742 - protein, 40 aa, Artificial Sequence
  Non-cyclic GFR-binding peptide
  MOD_RES (2), (4), (38), (39): Xaa is C or S
  MOD_RES (16), (17), (18), (19), (20): Xaa is A or G
  MOD_RES (21), (22), (23), (24): Xaa is A or G or is absent
RXGXGEVVMEVQVEKXXXXXXXXXVKAMKVSRLETPVXXA

SEQ ID NO: 27743 - protein, 36 aa, Artificial Sequence
  Non-cyclic GFR-binding peptide
  MOD_RES (1), (35), (36): Xaa is C or S
  MOD_RES (13), (14), (15), (16), (17): Xaa is A or G
  MOD_RES (18), (19), (20), (21): Xaa is A or G or is absent
XSRVVMNSMEGIXXXXXXXXXMIQVTINSLKTPAXX

SEQ ID NO: 27744 - protein, 44 aa, Artificial Sequence
  Non-cyclic GFR-binding peptide
  MOD_RES (2), (4), (38), (39): Xaa is C or S
  MOD_RES (16), (17), (18), (19), (20): Xaa is A or G
  MOD_RES (21), (22), (23), (24): Xaa is A or G or is absent
RXGXGEVVMESMEGIXXXXXXXXXMIQMTINSLETPVXXAKPIS

SEQ ID NO: 27745 - protein, 39 aa, Artificial Sequence
  Non-cyclic GFR-binding peptide
  MOD_RES (2), (33), (34): Xaa is C or S
KXSKVVMVTAKKVKPTRGVIKRIQVPRLDQPVXXPSASA

SEQ ID NO: 27746 - protein, 39 aa, Artificial Sequence
  Non-cyclic GFR-binding peptide
  MOD_RES (33), (34): Xaa is C or S
  MOD_RES (11), (12), (13), (14), (15): Xaa is A or G
  MOD_RES (16), (17), (18), (19): Xaa is A or G or is absent
EVVMEVQVEKXXXXXXXXXVKAMKVSRLETPVXXAKPIS

SEQ ID NO: 27747 - protein, 39 aa, Artificial Sequence
  Non-cyclic GFR-binding peptide
  MOD_RES (1), (3), (37), (38): Xaa is C or S
  MOD_RES (15), (16), (17), (18), (19): Xaa is A or G
  MOD_RES (20), (21), (22), (23): Xaa is A or G or is absent
XGXGEVVMDSMEGIXXXXXXXXXMIQMTINSLETPVXXA

SEQ ID NO: 27748 - protein, 36 aa, Artificial Sequence
  Non-cyclic GFR-binding peptide
  MOD_RES (35), (35): Xaa is C or S
  MOD_RES (11), (12), (13), (14), (15): Xaa is A or G
  MOD_RES (16), (17), (18), (19): Xaa is A or G or is absent
HEELRNSLQEXXXXXXXXXYYVVPLPEHHVRSPQXK

SEQ ID NO: 27749 - protein, 36 aa, Artificial Sequence
  Non-cyclic GFR-binding peptide
  MOD_RES (2), (4), (36): Xaa is C or S
HXGXARVVMNVTAKKIVNSSDDIKRVQVPRLQTPAX

SEQ ID NO: 27750 - protein, 38 aa, Artificial Sequence
  Non-cyclic GFR-binding peptide
  MOD_RES (1), (3), (37), (38): Xaa is C or S
  MOD_RES (15), (16), (17), (18), (19): Xaa is A or G
  MOD_RES (20), (21), (22), (23): Xaa is A or G or is absent
XGXGEVVMEVQVEKXXXXXXXXXVKAMKVSRLETPVXX

SEQ ID NO: 27751 - protein, 30 aa, Artificial Sequence
  Non-cyclic GFR-binding peptide
RVVMNSMEGIIVNSSDDMIQVTINSLQTPA

SEQ ID NO: 27752 - protein, 38 aa, Artificial Sequence
  Non-cyclic GFR-binding peptide
  MOD_RES (2), (4), (37), (38): Xaa is C or S
  MOD_RES (15), (16), (17), (18), (19): Xaa is A or G
  MOD_RES (20), (21), (22), (23): Xaa is A or G or is absent
SXKXSKVIMSMEGIXXXXXXXXXMIQITINSLDQSVXX

SEQ ID NO: 27753 - protein, 42 aa, Artificial Sequence
  Non-cyclic GFR-binding peptide
  MOD_RES (1), (3), (40): Xaa is C or S
XKXALHDELTNSLQEFIPKKRVIEYYLVTLPELQVQTPRXQV

SEQ ID NO: 27754 - protein, 38 aa, Artificial Sequence
  Non-cyclic GFR-binding peptide
  MOD_RES (33), (34): Xaa is C or S
  MOD_RES (11), (12), (13), (14), (15): Xaa is A or G
  MOD_RES (16), (17), (18), (19): Xaa is A or G or is absent
SKVVMVTAKKXXXXXXXXXIKRIQVPRLDQPVXXPSAS

SEQ ID NO: 27755 - protein, 39 aa, Artificial Sequence
  Non-cyclic GFR-binding peptide
  MOD_RES (1), (33), (34): Xaa is C or S
XSRVVMNVTAKKIVNSSDDIKRVQVPRLKTPAXXPKPVY

SEQ ID NO: 27756 - protein, 38 aa, Artificial Sequence
  Non-cyclic GFR-binding peptide
  MOD_RES (2), (4), (38): Xaa is C or S
  MOD_RES (16), (17), (18), (19), (20): Xaa is A or G
  MOD_RES (21), (22), (23), (24): Xaa is A or G or is absent
RXGXGEVVMDVTAKKXXXXXXXXXIKRMQVPRLETPVX

SEQ ID NO: 27757 - protein, 43 aa, Artificial Sequence
  Non-cyclic GFR-binding peptide
  MOD_RES (1), (3), (37), (38): Xaa is C or S
  MOD_RES (15), (16), (17), (18), (19): Xaa is A or G
  MOD_RES (20), (21), (22), (23): Xaa is A or G or is absent
XGXSRVVMNSMEGIXXXXXXXXXMIQVTINSLKTPAXXPKPVY

SEQ ID NO: 27758 - protein, 35 aa, Artificial Sequence
  Non-cyclic GFR-binding peptide
  MOD_RES (2), (4): Xaa is C or S
RXGXGEVVMESMEGIVVKDYEDMIQMTINSLETPV

SEQ ID NO: 27759 - protein, 38 aa, Artificial Sequence
  Non-cyclic GFR-binding peptide
  MOD_RES (1), (32), (33): Xaa is C or S
XSRVIMVTAKKVKPKRGVIKRIQVPRLAQPVXXPAASA

SEQ ID NO: 27760 - protein, 35 aa, Artificial Sequence
  Non-cyclic GFR-binding peptide
  MOD_RES (1), (3), (34), (35): Xaa is C or S
XKXSKVVMVQVEKVKPTRGVVKAIKVSRLDQPVXX

SEQ ID NO: 27761 - protein, 36 aa, Artificial Sequence
  Non-cyclic GFR-binding peptide
  MOD_RES (1), (1): Xaa is C or S
XELHEELRNSLQELKPKKRVYEYYVVPLPEHHVRSP

SEQ ID NO: 27762 - protein, 41 aa, Artificial Sequence
  Non-cyclic GFR-binding peptide
  MOD_RES (2), (36): Xaa is C or S
EXKNHQLFNSLQEHQGQHPKIRYYLMTLPEEETPVXELGED

SEQ ID NO: 27763 - protein, 43 aa, Artificial Sequence
  Non-cyclic GFR-binding peptide
  MOD_RES (2), (39): Xaa is C or S
  MOD_RES (15), (16), (17), (18), (19): Xaa is A or G
  MOD_RES (20), (21), (22), (23): Xaa is A or G or is absent
KXALHDELTNSLQEXXXXXXXXXYYVVPLPELQVQTPRXQVNR

SEQ ID NO: 27764 - protein, 39 aa, Artificial Sequence
  Non-cyclic GFR-binding peptide
  MOD_RES (2), (36): Xaa is C or S
EXKNHQLFNSLQEHQGQHPKIRYYLMTLPEEETPVXELG

SEQ ID NO: 27765 - protein, 38 aa, Artificial Sequence
  Non-cyclic GFR-binding peptide
  MOD_RES (37), (37): Xaa is C or S
ALHDELTNSLQEFIPKKRVIEYYVVPLPELQVQTPRXQ

SEQ ID NO: 27766 - protein, 35 aa, Artificial Sequence
  Non-cyclic GFR-binding peptide
  MOD_RES (33), (34): Xaa is C or S
  MOD_RES (11), (12), (13), (14), (15): Xaa is A or G
  MOD_RES (16), (17), (18), (19): Xaa is A or G or is absent
SRVIMSMEGIXXXXXXXXXMIQITINSLAQPVXXP

SEQ ID NO: 27767 - protein, 41 aa, Artificial Sequence
  Non-cyclic GFR-binding peptide
  MOD_RES (2), (4), (41): Xaa is C or S
  MOD_RES (17), (18), (19), (20), (21): Xaa is A or G
  MOD_RES (22), (23), (24), (25): Xaa is A or G or is absent
AXAXELHEELRNSLQEXXXXXXXXXYYVVPLPEHHVRSPQX

SEQ ID NO: 27768 - protein, 41 aa, Artificial Sequence
  Non-cyclic GFR-binding peptide
  MOD_RES (2), (35), (36): Xaa is C or S
  MOD_RES (13), (14), (15), (16), (17): Xaa is A or G
  MOD_RES (18), (19), (20), (21): Xaa is A or G or is absent
KXSKVIMVQVEKXXXXXXXXXVKAIKVSRLDQSVXXPSASA

SEQ ID NO: 27769 - protein, 35 aa, Artificial Sequence
  Non-cyclic GFR-binding peptide
  MOD_RES (13), (14), (15), (16), (17): Xaa is A or G
  MOD_RES (18), (19), (20), (21): Xaa is A or G or is absent
ALHDELTNSLQEXXXXXXXXXYYLVTLPELQVQTP

SEQ ID NO: 27770 - protein, 44 aa, Artificial Sequence
  Non-cyclic GFR-binding peptide
  MOD_RES (1), (3), (40): Xaa is C or S
XKXALHDELTNSLQEFIPKKRVIEYYVVPLPELQVQTPRXQVNR

SEQ ID NO: 27771 - protein, 40 aa, Artificial Sequence
  Non-cyclic GFR-binding peptide
  MOD_RES (2), (35), (36): Xaa is C or S
  MOD_RES (13), (14), (15), (16), (17): Xaa is A or G
  MOD_RES (18), (19), (20), (21): Xaa is A or G or is absent
KXSRVIMVQVEKXXXXXXXXXVKAIKVSRLAQPVXXPAAS

SEQ ID NO: 27772 - protein, 38 aa, Artificial Sequence
  Non-cyclic GFR-binding peptide
  MOD_RES (1), (33), (34): Xaa is C or S
XGEVVMDVQVEKVVKENEDVKAMKVSRLETPVXXAKPI

SEQ ID NO: 27773 - protein, 39 aa, Artificial Sequence
  Non-cyclic GFR-binding peptide
  MOD_RES (1), (3), (36), (37): Xaa is C or S
  MOD_RES (14), (15), (16), (17), (18): Xaa is A or G
  MOD_RES (19), (20), (21), (22): Xaa is A or G or is absent
XKXSKVVMVQVEKXXXXXXXXXVKAIKVSRLDQPVXXPS

SEQ ID NO: 27774 - protein, 37 aa, Artificial Sequence
  Non-cyclic GFR-binding peptide
  MOD_RES (36), (36): Xaa is C or S
  MOD_RES (12), (13), (14), (15), (16): Xaa is A or G
  MOD_RES (17), (18), (19), (20): Xaa is A or G or is absent
LHEELRNSLQEXXXXXXXXXYYVVPLPEHHVRSPQXK

SEQ ID NO: 27775 - protein, 38 aa, Artificial Sequence
  Non-cyclic GFR-binding peptide
  MOD_RES (1), (38): Xaa is C or S
  MOD_RES (14), (15), (16), (17), (18): Xaa is A or G
  MOD_RES (19), (20), (21), (22): Xaa is A or G or is absent
XELHEELRNSLQEXXXXXXXXXYYLVTLPEHHVRSPQX

SEQ ID NO: 27776 - protein, 43 aa, Artificial Sequence
  Non-cyclic GFR-binding peptide
  MOD_RES (2), (4), (41): Xaa is C or S
  MOD_RES (17), (18), (19), (20), (21): Xaa is A or G
  MOD_RES (22), (23), (24), (25): Xaa is A or G or is absent
EXKXALHDELTNSLQEXXXXXXXXXYYVVPLPELQVQTPRXQV

SEQ ID NO: 27777 - protein, 36 aa, Artificial Sequence
  Non-cyclic GFR-binding peptide
  MOD_RES (2), (2): Xaa is C or S
  MOD_RES (15), (16), (17), (18), (19): Xaa is A or G
  MOD_RES (20), (21), (22), (23): Xaa is A or G or is absent
AXELHEELRNSLQEXXXXXXXXXYYVVPLPEHHVRS

SEQ ID NO: 27778 - protein, 39 aa, Artificial Sequence
  Non-cyclic GFR-binding peptide
  MOD_RES (2), (4), (37), (38): Xaa is C or S
  MOD_RES (15), (16), (17), (18), (19): Xaa is A or G
  MOD_RES (20), (21), (22), (23): Xaa is A or G or is absent
SXKXSKVIMSMEGIXXXXXXXXXMIQITINSLDQSVXXP

SEQ ID NO: 27779 - protein, 34 aa, Artificial Sequence
  Non-cyclic GFR-binding peptide
  MOD_RES (31), (32): Xaa is C or S
RVVMNSMEGIIVNSSDDMIQVTINSLKTPAXXPK

SEQ ID NO: 27780 - protein, 33 aa, Artificial Sequence
  Non-cyclic GFR-binding peptide
HEELRNSLQELKPKKRVYEYYLVTLPEHHVRSP

SEQ ID NO: 27781 - protein, 37 aa, Artificial Sequence
  Non-cyclic GFR-binding peptide
  MOD_RES (34), (34): Xaa is C or S
  MOD_RES (12), (13), (14), (15), (16): Xaa is A or G
  MOD_RES (17), (18), (19), (20): Xaa is A or G or is absent
KNHQLFNSLQEXXXXXXXXXYYLMTLPEEETPVXELG

SEQ ID NO: 27782 - protein, 40 aa, Artificial Sequence
  Non-cyclic GFR-binding peptide
  MOD_RES (1), (34), (35): Xaa is C or S
  MOD_RES (12), (13), (14), (15), (16): Xaa is A or G
  MOD_RES (17), (18), (19), (20): Xaa is A or G or is absent
XSRVIMVTAKKXXXXXXXXXIKRIQVPRLAQPVXXPAASA

SEQ ID NO: 27783 - protein, 36 aa, Artificial Sequence
  Non-cyclic GFR-binding peptide
  MOD_RES (1), (3), (34), (35): Xaa is C or S
XKXSRVIMVTAKKVKPKRGVIKRIQVPRLAQPVXXP

SEQ ID NO: 27784 - protein, 37 aa, Artificial Sequence
  Non-cyclic GFR-binding peptide
  MOD_RES (1), (3), (37): Xaa is C or S
  MOD_RES (15), (16), (17), (18), (19): Xaa is A or G
  MOD_RES (20), (21), (22), (23): Xaa is A or G or is absent
XGXGEVVMEVTAKKXXXXXXXXXIKRMQVPRLETPVX

SEQ ID NO: 27785 - protein, 36 aa, Artificial Sequence
  Non-cyclic GFR-binding peptide
  MOD_RES (1), (34), (35): Xaa is C or S
  MOD_RES (12), (13), (14), (15), (16): Xaa is A or G
  MOD_RES (17), (18), (19), (20): Xaa is A or G or is absent
XSRVIMVQVEKXXXXXXXXXVKAIKVSRLAQPVXXP

SEQ ID NO: 27786 - protein, 37 aa, Artificial Sequence
  Non-cyclic GFR-binding peptide
  MOD_RES (34), (34): Xaa is C or S
  MOD_RES (12), (13), (14), (15), (16): Xaa is A or G
  MOD_RES (17), (18), (19), (20): Xaa is A or G or is absent
SRVVMNSMEGIXXXXXXXXXMIQVTINSLKTPAXTPK

SEQ ID NO: 27787 - protein, 39 aa, Artificial Sequence
  Non-cyclic GFR-binding peptide
  MOD_RES (2), (4), (38), (39): Xaa is C or S
  MOD_RES (16), (17), (18), (19), (20): Xaa is A or G
  MOD_RES (21), (22), (23), (24): Xaa is A or G or is absent
RXGXGEVVMESMEGIXXXXXXXXXMIQMTINSLETPVXX

SEQ ID NO: 27788 - protein, 33 aa, Artificial Sequence
  Non-cyclic GFR-binding peptide
  MOD_RES (12), (13), (14), (15), (16): Xaa is A or G
  MOD_RES (17), (18), (19), (20): Xaa is A or G or is absent
LHEELRNSLQEXXXXXXXXXYYVVPLPEHHVRS

SEQ ID NO: 27789 - protein, 35 aa, Artificial Sequence
  Non-cyclic GFR-binding peptide
  MOD_RES (33), (34): Xaa is C or S
  MOD_RES (11), (12), (13), (14), (15): Xaa is A or G
  MOD_RES (16), (17), (18), (19): Xaa is A or G or is absent
RVVMNVQVEKXXXXXXXXXVKAVKVSRLQTPAXXP

SEQ ID NO: 27790 - protein, 34 aa, Artificial Sequence
  Non-cyclic GFR-binding peptide
  MOD_RES (33), (33): Xaa is C or S
  MOD_RES (11), (12), (13), (14), (15): Xaa is A or G
  MOD_RES (16), (17), (18), (19): Xaa is A or G or is absent
RVVMNSMEGIXXXXXXXXXMIQVTINSLKTPAXT

SEQ ID NO: 27791 - protein, 35 aa, Artificial Sequence
  Non-cyclic GFR-binding peptide
  MOD_RES (35), (35): Xaa is C or S
  MOD_RES (11), (12), (13), (14), (15): Xaa is A or G
  MOD_RES (16), (17), (18), (19): Xaa is A or G or is absent
HDELTNSLQEXXXXXXXXXYYLVTLPELQVQTPRX

SEQ ID NO: 27792 - protein, 38 aa, Artificial Sequence
  Non-cyclic GFR-binding peptide
  MOD_RES (1), (3), (37), (38): Xaa is C or S
  MOD_RES (15), (16), (17), (18), (19): Xaa is A or G
  MOD_RES (20), (21), (22), (23): Xaa is A or G or is absent
XGXARVVMNVQVEKXXXXXXXXXVKAVKVSRLQTPAXX

SEQ ID NO: 27793 - protein, 35 aa, Artificial Sequence
  Non-cyclic GFR-binding peptide
  MOD_RES (1), (34), (35): Xaa is C or S
  MOD_RES (12), (13), (14), (15), (16): Xaa is A or G
  MOD_RES (17), (18), (19), (20): Xaa is A or G or is absent
XSKVVMVTAKKXXXXXXXXXIKRIQVPRLDQPVXX

SEQ ID NO: 27794 - protein, 40 aa, Artificial Sequence
  Non-cyclic GFR-binding peptide
  MOD_RES (2), (34), (35): Xaa is C or S
GXSRVVMNVQVEKIVNSSDDVKAVKVSRLKTPAXXPKPVY

SEQ ID NO: 27795 - protein, 40 aa, Artificial Sequence
  Non-cyclic GFR-binding peptide
  MOD_RES (2), (4), (38): Xaa is C or S
  MOD_RES (16), (17), (18), (19), (20): Xaa is A or G
  MOD_RES (21), (22), (23), (24): Xaa is A or G or is absent
HXGXSRVVMNSMEGIXXXXXXXXXMIQVTINSLKTPAXTP

SEQ ID NO: 27796 - protein, 35 aa, Artificial Sequence
  Non-cyclic GFR-binding peptide
  MOD_RES (2), (34), (35): Xaa is C or S
GXGEVVMDSMEGIVVKENEDMIQMTINSLETPVXX

SEQ ID NO: 27797 - protein, 40 aa, Artificial Sequence
  Non-cyclic GFR-binding peptide
  MOD_RES (1), (3), (37), (38): Xaa is C or S
  MOD_RES (15), (16), (17), (18), (19): Xaa is A or G
  MOD_RES (20), (21), (22), (23): Xaa is A or G or is absent
XGXSRVVMNVTAKKXXXXXXXXXIKRVQVPRLKTPAXXPK

SEQ ID NO: 27798 - protein, 35 aa, Artificial Sequence
  Non-cyclic GFR-binding peptide
  MOD_RES (2), (2): Xaa is C or S
  MOD_RES (14), (15), (16), (17), (18): Xaa is A or G
  MOD_RES (19), (20), (21), (22): Xaa is A or G or is absent
GXSRVVMNVQVEKXXXXXXXXXVKAVKVSRLKTPA

SEQ ID NO: 27799 - protein, 42 aa, Artificial Sequence
  Non-cyclic GFR-binding peptide
  MOD_RES (2), (4), (37), (38): Xaa is C or S
  MOD_RES (15), (16), (17), (18), (19): Xaa is A or G
  MOD_RES (20), (21), (22), (23): Xaa is A or G or is absent
SXKXSKVVMVTAKKXXXXXXXXXIKRIQVPRLDQPVXXPSAS

SEQ ID NO: 27800 - protein, 37 aa, Artificial Sequence
  Non-cyclic GFR-binding peptide
  MOD_RES (1), (35): Xaa is C or S
XKNHQLFNSLQEHQGQHPKIRYYLMTLPEEETPVXEL

SEQ ID NO: 27801 - protein, 35 aa, Artificial Sequence
  Non-cyclic GFR-binding peptide
  MOD_RES (33), (34): Xaa is C or S
  MOD_RES (11), (12), (13), (14), (15): Xaa is A or G
  MOD_RES (16), (17), (18), (19): Xaa is A or G or is absent
RVVMNVTAKKXXXXXXXXXIKRVQVPRLQTPAXXP

SEQ ID NO: 27802 - protein, 36 aa, Artificial Sequence
  Non-cyclic GFR-binding peptide
  MOD_RES (34), (34): Xaa is C or S
  MOD_RES (12), (13), (14), (15), (16): Xaa is A or G
  MOD_RES (17), (18), (19), (20): Xaa is A or G or is absent
KNHQLFNSLQEXXXXXXXXXYYVMPLPEEETPVXEL

SEQ ID NO: 27803 - protein, 40 aa, Artificial Sequence
  Non-cyclic GFR-binding peptide
  MOD_RES (1), (3), (34), (35): Xaa is C or S
XKXSRVIMSMEGIVKPKRGVMIQITINSLAQPVXXPAASA

SEQ ID NO: 27804 - protein, 38 aa, Artificial Sequence
  Non-cyclic GFR-binding peptide
  MOD_RES (1), (33), (34): Xaa is C or S
XGEVVMEVQVEKVVKDYEDVKAMKVSRLETPVXXAKPI

SEQ ID NO: 27805 - protein, 33 aa, Artificial Sequence
  Non-cyclic GFR-binding peptide
  MOD_RES (31), (32): Xaa is C or S
EVVMDSMEGIVVKENEDMIQMTINSLETPVXXA

SEQ ID NO: 27806 - protein, 40 aa, Artificial Sequence
  Non-cyclic GFR-binding peptide
  MOD_RES (2), (36), (37): Xaa is C or S
  MOD_RES (14), (15), (16), (17), (18): Xaa is A or G
  MOD_RES (19), (20), (21), (22): Xaa is A or G or is absent
GXGEVVMEVQVEKXXXXXXXXXVKAMKVSRLETPVXXAKP

SEQ ID NO: 27807 - protein, 41 aa, Artificial Sequence
  Non-cyclic GFR-binding peptide
  MOD_RES (2), (4), (35), (36): Xaa is C or S
SXKXSKVVMVQVEKVKPTRGVVKAIKVSRLDQPVXXPSASA

SEQ ID NO: 27808 - protein, 39 aa, Artificial Sequence
  Non-cyclic GFR-binding peptide
  MOD_RES (1), (33): Xaa is C or S
XSRVVMNVTAKKIVNSSDDIKRVQVPRLKTPAXTPKTVH

SEQ ID NO: 27809 - protein, 37 aa, Artificial Sequence
  Non-cyclic GFR-binding peptide
  MOD_RES (1), (34), (35): Xaa is C or S
  MOD_RES (12), (13), (14), (15), (16): Xaa is A or G
  MOD_RES (17), (18), (19), (20): Xaa is A or G or is absent
XSKVVMSMEGIXXXXXXXXXMIQITINSLDQPVXXPS

SEQ ID NO: 27810 - protein, 41 aa, Artificial Sequence
  Non-cyclic GFR-binding peptide
  MOD_RES (2), (4), (36), (37): Xaa is C or S
RXGXGEVVMEVQVEKVVKDYEDVKAMKVSRLETPVXXAKPI

SEQ ID NO: 27811 - protein, 35 aa, Artificial Sequence
  Non-cyclic GFR-binding peptide
  MOD_RES (33), (34): Xaa is C or S
  MOD_RES (11), (12), (13), (14), (15): Xaa is A or G
  MOD_RES (16), (17), (18), (19): Xaa is A or G or is absent
EVVMEVTAKKXXXXXXXXXIKRMQVPRLETPVXXA

SEQ ID NO: 27812 - protein, 38 aa, Artificial Sequence
  Non-cyclic GFR-binding peptide
  MOD_RES (2), (34), (35): Xaa is C or S
GXGEVVMDSMEGIVVKENEDMIQMTINSLETPVXXAKP

SEQ ID NO: 27813 - protein, 34 aa, Artificial Sequence
  Non-cyclic GFR-binding peptide
  MOD_RES (32), (33): Xaa is C or S
GEVVMESMEGIVVKDYEDMIQMTINSLETPVXXA

SEQ ID NO: 27814 - protein, 36 aa, Artificial Sequence
  Non-cyclic GFR-binding peptide
  MOD_RES (2), (34), (35): Xaa is C or S
GXGEVVMEVTAKKVVKDYEDIKRMQVPRLETPVXXA

SEQ ID NO: 27815 - protein, 37 aa, Artificial Sequence
  Non-cyclic GFR-binding peptide
  MOD_RES (34), (35): Xaa is C or S
  MOD_RES (12), (13), (14), (15), (16): Xaa is A or G
  MOD_RES (17), (18), (19), (20): Xaa is A or G or is absent
GEVVMESMEGIXXXXXXXXXMIQMTINSLETPVXXAK

SEQ ID NO: 27816 - protein, 36 aa, Artificial Sequence
  Non-cyclic GFR-binding peptide
  MOD_RES (2), (35), (36): Xaa is C or S
  MOD_RES (13), (14), (15), (16), (17): Xaa is A or G
  MOD_RES (18), (19), (20), (21): Xaa is A or G or is absent
KXSKVIMVQVEKXXXXXXXXXVKAIKVSRLDQSVXX

SEQ ID NO: 27817 - protein, 39 aa, Artificial Sequence
  Non-cyclic GFR-binding peptide
  MOD_RES (2), (4), (36), (37): Xaa is C or S
RXGXGEVVMESMEGIVVKDYEDMIQMTINSLETPVXXAK

SEQ ID NO: 27818 - protein, 41 aa, Artificial Sequence
  Non-cyclic GFR-binding peptide
  MOD_RES (2), (4), (41): Xaa is C or S
EXKXALHDELTNSLQEFIPKKRVIEYYLVTLPELQVQTPRX

SEQ ID NO: 27819 - protein, 36 aa, Artificial Sequence
  Non-cyclic GFR-binding peptide
  MOD_RES (1), (35), (36): Xaa is C or S
  MOD_RES (13), (14), (15), (16), (17): Xaa is A or G
  MOD_RES (18), (19), (20), (21): Xaa is A or G or is absent
XGEVVMEVTAKKXXXXXXXXXIKRMQVPRLETPVXX

SEQ ID NO: 27820 - protein, 34 aa, Artificial Sequence
  Non-cyclic GFR-binding peptide
  MOD_RES (1), (3): Xaa is C or S
XGXARVVMNSMEGIIVNSSDDMIQVTINSLQTPA

SEQ ID NO: 27821 - protein, 32 aa, Artificial Sequence
  Non-cyclic GFR-binding peptide
  MOD_RES (32), (32): Xaa is C or S
SRVVMNVTAKKIVNSSDDIKRVQVPRLKTPAX

SEQ ID NO: 27822 - protein, 41 aa, Artificial Sequence
  Non-cyclic GFR-binding peptide
  MOD_RES (1), (3), (36), (37): Xaa is C or S
  MOD_RES (14), (15), (16), (17), (18): Xaa is A or G
  MOD_RES (19), (20), (21), (22): Xaa is A or G or is absent
XKXSKVVMVTAKKXXXXXXXXXIKRIQVPRLDQPVXXPSAS

SEQ ID NO: 27823 - protein, 37 aa, Artificial Sequence
  Non-cyclic GFR-binding peptide
  MOD_RES (2), (4): Xaa is C or S
  MOD_RES (16), (17), (18), (19), (20): Xaa is A or G
  MOD_RES (21), (22), (23), (24): Xaa is A or G or is absent
HXGXSRVVMNVTAKKXXXXXXXXXIKRVQVPRLKTPA

SEQ ID NO: 27824 - protein, 32 aa, Artificial Sequence
  Non-cyclic GFR-binding peptide
  MOD_RES (31), (32): Xaa is C or S
EVVMESMEGIVVKDYEDMIQMTINSLETPVXX

SEQ ID NO: 27825 - protein, 37 aa, Artificial Sequence
  Non-cyclic GFR-binding peptide
  MOD_RES (37), (37): Xaa is C or S
ELHEELRNSLQELKPKKRVYEYYLVTLPEHHVRSPQX

SEQ ID NO: 27826 - protein, 36 aa, Artificial Sequence
  Non-cyclic GFR-binding peptide
  MOD_RES (2), (36): Xaa is C or S
  MOD_RES (14), (15), (16), (17), (18): Xaa is A or G
  MOD_RES (19), (20), (21), (22): Xaa is A or G or is absent
GXGEVVMDVQVEKXXXXXXXXXVKAMKVSRLETPVX

SEQ ID NO: 27827 - protein, 40 aa, Artificial Sequence
  Non-cyclic GFR-binding peptide
  MOD_RES (1), (3), (34), (35): Xaa is C or S
XKXSKVIMSMEGIIKPTKGIMIQITINSLDQSVXXPSASA

SEQ ID NO: 27828 - protein, 40 aa, Artificial Sequence
  Non-cyclic GFR-binding peptide
  MOD_RES (2), (36): Xaa is C or S
EXKNHQLFNSLQEHQGQHPKIRYYVMPLPEEETPVXELGE

SEQ ID NO: 27829 - protein, 38 aa, Artificial Sequence
  Non-cyclic GFR-binding peptide
  MOD_RES (1), (3), (35), (36): Xaa is C or S
XGXGEVVMDVTAKKVVKENEDIKRMQVPRLETPVXXAK

SEQ ID NO: 27830 - protein, 37 aa, Artificial Sequence
  Non-cyclic GFR-binding peptide
  MOD_RES (2), (4): Xaa is C or S
  MOD_RES (16), (17), (18), (19), (20): Xaa is A or G
  MOD_RES (21), (22), (23), (24): Xaa is A or G or is absent
HXGXSRVVMNVQVEKXXXXXXXXXVKAVKVSRLKTPA

SEQ ID NO: 27831 - protein, 35 aa, Artificial Sequence
  Non-cyclic GFR-binding peptide
  MOD_RES (34), (34): Xaa is C or S
KNHQLFNSLQEHQGQHPKIRYYVMPLPEEETPVXE

SEQ ID NO: 27832 - protein, 33 aa, Artificial Sequence
  Non-cyclic GFR-binding peptide
  MOD_RES (1), (33): Xaa is C or S
XGEVVMESMEGIVVKDYEDMIQMTINSLETPVX

SEQ ID NO: 27833 - protein, 36 aa, Artificial Sequence
  Non-cyclic GFR-binding peptide
  MOD_RES (2), (4): Xaa is C or S
  MOD_RES (15), (16), (17), (18), (19): Xaa is A or G
  MOD_RES (20), (21), (22), (23): Xaa is A or G or is absent
SXKXSRVIMVQVEKXXXXXXXXXVKAIKVSRLAQPV

SEQ ID NO: 27834 - protein, 34 aa, Artificial Sequence
  Non-cyclic GFR-binding peptide
  MOD_RES (34), (34): Xaa is C or S
KNHQLFNSLQEHQGQHPKIRYYLMTLPEEETPVX

SEQ ID NO: 27835 - protein, 34 aa, Artificial Sequence
  Non-cyclic GFR-binding peptide
  MOD_RES (2), (33), (34): Xaa is C or S
KXSKVVMVQVEKVKPTRGVVKAIKVSRLDQPVXX

SEQ ID NO: 27836 - protein, 39 aa, Artificial Sequence
  Non-cyclic GFR-binding peptide
  MOD_RES (1), (33): Xaa is C or S
XSRVVMNVQVEKIVNSSDDVKAVKVSRLKTPAXTPKTVH

SEQ ID NO: 27837 - protein, 36 aa, Artificial Sequence
  Non-cyclic GFR-binding peptide
  MOD_RES (2), (4): Xaa is C or S
  MOD_RES (15), (16), (17), (18), (19): Xaa is A or G
  MOD_RES (20), (21), (22), (23): Xaa is A or G or is absent
SXKXSKVIMSMEGIXXXXXXXXXMIQITINSLDQSV

SEQ ID NO: 27838 - protein, 35 aa, Artificial Sequence
  Non-cyclic GFR-binding peptide
  MOD_RES (1), (32), (33): Xaa is C or S
XSKVVMVQVEKVKPTRGVVKAIKVSRLDQPVXXPS

SEQ ID NO: 27839 - protein, 36 aa, Artificial Sequence
  Non-cyclic GFR-binding peptide
  MOD_RES (35), (35): Xaa is C or S
  MOD_RES (11), (12), (13), (14), (15): Xaa is A or G
  MOD_RES (16), (17), (18), (19): Xaa is A or G or is absent
HEELRNSLQEXXXXXXXXXYYLVTLPEHHVRSPQXK

SEQ ID NO: 27840 - protein, 37 aa, Artificial Sequence
  Non-cyclic GFR-binding peptide
  MOD_RES (2), (2): Xaa is C or S
AXELHEELRNSLQELKPKKRVYEYYLVTLPEHHVRSP

SEQ ID NO: 27841 - protein, 33 aa, Artificial Sequence
  Non-cyclic GFR-binding peptide
  MOD_RES (1), (32), (33): Xaa is C or S
XSRVIMVTAKKVKPKRGVIKRIQVPRLAQPVXX

SEQ ID NO: 27842 - protein, 35 aa, Artificial Sequence
  Non-cyclic GFR-binding peptide
  MOD_RES (1), (35): Xaa is C or S
  MOD_RES (13), (14), (15), (16), (17): Xaa is A or G
  MOD_RES (18), (19), (20), (21): Xaa is A or G or is absent
XGEVVMEVTAKKXXXXXXXXXIKRMQVPRLETPVX

SEQ ID NO: 27843 - protein, 41 aa, Artificial Sequence
  Non-cyclic GFR-binding peptide
  MOD_RES (37), (37): Xaa is C or S
ELHEELRNSLQELKPKKRVYEYYLVTLPEHHVRSPQXKVSS

SEQ ID NO: 27844 - protein, 41 aa, Artificial Sequence
  Non-cyclic GFR-binding peptide
  MOD_RES (1), (35): Xaa is C or S
  MOD_RES (13), (14), (15), (16), (17): Xaa is A or G
  MOD_RES (18), (19), (20), (21): Xaa is A or G or is absent
XSRVVMNSMEGIXXXXXXXXXMIQVTINSLKTPAXTPKTVH

SEQ ID NO: 27845 - protein, 34 aa, Artificial Sequence
  Non-cyclic GFR-binding peptide
  MOD_RES (1), (3), (34): Xaa is C or S
XKXSKVIMVQVEKIKPTKGIVKAIKVSRLDQSVX

SEQ ID NO: 27846 - protein, 42 aa, Artificial Sequence
  Non-cyclic GFR-binding peptide
  MOD_RES (2), (4), (38), (39): Xaa is C or S
  MOD_RES (16), (17), (18), (19), (20): Xaa is A or G
  MOD_RES (21), (22), (23), (24): Xaa is A or G or is absent
HXGXSRVVMNSMEGIXXXXXXXXXMIQVTINSLKTPAXXPKP

SEQ ID NO: 27847 - protein, 32 aa, Artificial Sequence
  Non-cyclic GFR-binding peptide
  MOD_RES (1), (32): Xaa is C or S
XSRVIMVTAKKVKPKRGVIKRIQVPRLAQPVX

SEQ ID NO: 27848 - protein, 39 aa, Artificial Sequence
  Non-cyclic GFR-binding peptide
  MOD_RES (1), (3), (34), (35): Xaa is C or S
XKXSKVVMSMEGIVKPTRGVMIQITINSLDQPVXXPSAS

SEQ ID NO: 27849 - protein, 36 aa, Artificial Sequence
  Non-cyclic GFR-binding peptide
  MOD_RES (2), (35), (36): Xaa is C or S
  MOD_RES (13), (14), (15), (16), (17): Xaa is A or G
  MOD_RES (18), (19), (20), (21): Xaa is A or G or is absent
KXSKVVMVTAKKXXXXXXXXXIKRIQVPRLDQPVXX

SEQ ID NO: 27850 - protein, 33 aa, Artificial Sequence
  Non-cyclic GFR-binding peptide
  MOD_RES (1), (3): Xaa is C or S
XKXSKVIMVTAKKIKPTKGIIKRIQVPRLDQSV

SEQ ID NO: 27851 - protein, 38 aa, Artificial Sequence
  Non-cyclic GFR-binding peptide
  MOD_RES (1), (35): Xaa is C or S
  MOD_RES (13), (14), (15), (16), (17): Xaa is A or G
  MOD_RES (18), (19), (20), (21): Xaa is A or G or is absent
XSRVVMNSMEGIXXXXXXXXXMIQVTINSLKTPAXTPK

SEQ ID NO: 27852 - protein, 41 aa, Artificial Sequence
  Non-cyclic GFR-binding peptide
  MOD_RES (2), (4), (38), (39): Xaa is C or S
  MOD_RES (16), (17), (18), (19), (20): Xaa is A or G
  MOD_RES (21), (22), (23), (24): Xaa is A or G or is absent
RXGXGEVVMDVQVEKXXXXXXXXXVKAMKVSRLETPVXXAK

SEQ ID NO: 27853 - protein, 39 aa, Artificial Sequence
  Non-cyclic GFR-binding peptide
  MOD_RES (2), (34), (35): Xaa is C or S
GXSRVVMNVQVEKIVNSSDDVKAVKVSRLKTPAXXPKPV

SEQ ID NO: 27854 - protein, 40 aa, Artificial Sequence
  Non-cyclic GFR-binding peptide
  MOD_RES (2), (34): Xaa is C or S
GXSRVVMNSMEGIIVNSSDDMIQVTINSLKTPAXTPKTVH

SEQ ID NO: 27855 - protein, 33 aa, Artificial Sequence
  Non-cyclic GFR-binding peptide
  MOD_RES (2), (2): Xaa is C or S
GXARVVMNVQVEKIVNSSDDVKAVKVSRLQTPA

SEQ ID NO: 27856 - protein, 38 aa, Artificial Sequence
  Non-cyclic GFR-binding peptide
  MOD_RES (2), (4), (35), (36): Xaa is C or S
SXKXSKVVMVQVEKVKPTRGVVKAIKVSRLDQPVXXPS

SEQ ID NO: 27857 - protein, 37 aa, Artificial Sequence
  Non-cyclic GFR-binding peptide
  MOD_RES (33), (34): Xaa is C or S
  MOD_RES (11), (12), (13), (14), (15): Xaa is A or G
  MOD_RES (16), (17), (18), (19): Xaa is A or G or is absent
RVVMNVQVEKXXXXXXXXXVKAVKVSRLKTPAXXPKP

SEQ ID NO: 27858 - protein, 40 aa, Artificial Sequence
  Non-cyclic GFR-binding peptide
  MOD_RES (2), (4), (37), (38): Xaa is C or S
  MOD_RES (15), (16), (17), (18), (19): Xaa is A or G
  MOD_RES (20), (21), (22), (23): Xaa is A or G or is absent
SXKXSRVIMSMEGIXXXXXXXXXMIQITINSLAQPVXXPA

SEQ ID NO: 27859 - protein, 41 aa, Artificial Sequence
  Non-cyclic GFR-binding peptide
  MOD_RES (1), (38): Xaa is C or S
XELHEELRNSLQELKPKKRVYEYYVVPLPEHHVRSPQXKVS

SEQ ID NO: 27860 - protein, 37 aa, Artificial Sequence
  Non-cyclic GFR-binding peptide
  MOD_RES (2), (4), (35), (36): Xaa is C or S
SXKXSKVIMVQVEKIKPTKGIVKAIKVSRLDQSVXXP

SEQ ID NO: 27861 - protein, 33 aa, Artificial Sequence
  Non-cyclic GFR-binding peptide
  MOD_RES (12), (13), (14), (15), (16): Xaa is A or G
  MOD_RES (17), (18), (19), (20): Xaa is A or G or is absent
SRVVMNVTAKKXXXXXXXXXIKRVQVPRLKTPA

SEQ ID NO: 27862 - protein, 34 aa, Artificial Sequence
  Non-cyclic GFR-binding peptide
  MOD_RES (31), (32): Xaa is C or S
EVVMEVTAKKVVKDYEDIKRMQVPRLETPVXXAK

SEQ ID NO: 27863 - protein, 36 aa, Artificial Sequence
  Non-cyclic GFR-binding peptide
  MOD_RES (2), (34): Xaa is C or S
GXSRVVMNSMEGIIVNSSDDMIQVTINSLKTPAXTP

SEQ ID NO: 27864 - protein, 36 aa, Artificial Sequence
  Non-cyclic GFR-binding peptide
  MOD_RES (33), (34): Xaa is C or S
  MOD_RES (11), (12), (13), (14), (15): Xaa is A or G
  MOD_RES (16), (17), (18), (19): Xaa is A or G or is absent
EVVMEVTAKKXXXXXXXXXIKRMQVPRLETPVXXAK

SEQ ID NO: 27865 - protein, 36 aa, Artificial Sequence
  Non-cyclic GFR-binding peptide
  MOD_RES (1), (32), (33): Xaa is C or S
XSRVIMVTAKKVKPKRGVIKRIQVPRLAQPVXXPAA

SEQ ID NO: 27866 - protein, 41 aa, Artificial Sequence
  Non-cyclic GFR-binding peptide
  MOD_RES (2), (4), (35), (36): Xaa is C or S
SXKXSRVIMSMEGIVKPKRGVMIQITINSLAQPVXXPAASA

SEQ ID NO: 27867 - protein, 36 aa, Artificial Sequence
  Non-cyclic GFR-binding peptide
  MOD_RES (1), (34), (35): Xaa is C or S
  MOD_RES (12), (13), (14), (15), (16): Xaa is A or G
  MOD_RES (17), (18), (19), (20): Xaa is A or G or is absent
XSKVVMVTAKKXXXXXXXXXIKRIQVPRLDQPVXXP

SEQ ID NO: 27868 - protein, 38 aa, Artificial Sequence
  Non-cyclic GFR-binding peptide
  MOD_RES (2), (36): Xaa is C or S
EXKNHQLFNSLQEHQGQHPKIRYYVMPLPEEETPVXEL

SEQ ID NO: 27869 - protein, 35 aa, Artificial Sequence
  Non-cyclic GFR-binding peptide
  MOD_RES (2), (4), (35): Xaa is C or S
SXKXSRVIMSMEGIVKPKRGVMIQITINSLAQPVX

SEQ ID NO: 27870 - protein, 34 aa, Artificial Sequence
  Non-cyclic GFR-binding peptide
  MOD_RES (1), (3), (34): Xaa is C or S
XKXSKVVMVTAKKVKPTRGVIKRIQVPRLDQPVX

SEQ ID NO: 27871 - protein, 35 aa, Artificial Sequence
  Non-cyclic GFR-binding peptide
  MOD_RES (2), (2): Xaa is C or S
  MOD_RES (14), (15), (16), (17), (18): Xaa is A or G
  MOD_RES (19), (20), (21), (22): Xaa is A or G or is absent
GXSRVVMNSMEGIXXXXXXXXXMIQVTINSLKTPA

SEQ ID NO: 27872 - protein, 43 aa, Artificial Sequence
  Non-cyclic GFR-binding peptide
  MOD_RES (2), (4), (41): Xaa is C or S
AXAXELHEELRNSLQELKPKKRVYEYYVVPLPEHHVRSPQXKV

SEQ ID NO: 27873 - protein, 40 aa, Artificial Sequence
  Non-cyclic GFR-binding peptide
  MOD_RES (2), (4), (36), (37): Xaa is C or S
RXGXGEVVMDVQVEKVVKENEDVKAMKVSRLETPVXXAKP

SEQ ID NO: 27874 - protein, 36 aa, Artificial Sequence
  Non-cyclic GFR-binding peptide
  MOD_RES (2), (4): Xaa is C or S
  MOD_RES (15), (16), (17), (18), (19): Xaa is A or G
  MOD_RES (20), (21), (22), (23): Xaa is A or G or is absent
SXKXSRVIMVTAKKXXXXXXXXXIKRIQVPRLAQPV

SEQ ID NO: 27875 - protein, 35 aa, Artificial Sequence
  Non-cyclic GFR-binding peptide
  MOD_RES (32), (33): Xaa is C or S
ARVVMNVQVEKIVNSSDDVKAVKVSRLQTPAXXPK

SEQ ID NO: 27876 - protein, 35 aa, Artificial Sequence
  Non-cyclic GFR-binding peptide
  MOD_RES (34), (34): Xaa is C or S
  MOD_RES (12), (13), (14), (15), (16): Xaa is A or G
  MOD_RES (17), (18), (19), (20): Xaa is A or G or is absent
SRVVMNVTAKKXXXXXXXXXIKRVQVPRLKTPAXT

SEQ ID NO: 27877 - protein, 33 aa, Artificial Sequence
  Non-cyclic GFR-binding peptide
  MOD_RES (32), (33): Xaa is C or S
GEVVMEVQVEKVVKDYEDVKAMKVSRLETPVXX

SEQ ID NO: 27878 - protein, 33 aa, Artificial Sequence
  Non-cyclic GFR-binding peptide
  MOD_RES (31), (32): Xaa is C or S
SKVVMSMEGIVKPTRGVMIQITINSLDQPVXXP

SEQ ID NO: 27879 - protein, 44 aa, Artificial Sequence
  Non-cyclic GFR-binding peptide
  MOD_RES (2), (4), (41): Xaa is C or S
AXAXELHEELRNSLQELKPKKRVYEYYVVPLPEHHVRSPQXKVS

SEQ ID NO: 27880 - protein, 36 aa, Artificial Sequence
  Non-cyclic GFR-binding peptide
  MOD_RES (2), (33), (34): Xaa is C or S
KXSRVIMVTAKKVKPKRGVIKRIQVPRLAQPVXXPA

SEQ ID NO: 27881 - protein, 44 aa, Artificial Sequence
  Non-cyclic GFR-binding peptide
  MOD_RES (2), (4), (38), (39): Xaa is C or S
  MOD_RES (16), (17), (18), (19), (20): Xaa is A or G
  MOD_RES (21), (22), (23), (24): Xaa is A or G or is absent
RXGXGEVVMDSMEGIXXXXXXXXXMIQMTINSLETPVXXAKPIK

SEQ ID NO: 27882 - protein, 41 aa, Artificial Sequence
  Non-cyclic GFR-binding peptide
  MOD_RES (2), (4), (37), (38): Xaa is C or S
  MOD_RES (15), (16), (17), (18), (19): Xaa is A or G
  MOD_RES (20), (21), (22), (23): Xaa is A or G or is absent
SXKXSRVIMSMEGIXXXXXXXXXMIQITINSLAQPVXXPAA

SEQ ID NO: 27883 - protein, 37 aa, Artificial Sequence
  Non-cyclic GFR-binding peptide
  MOD_RES (32), (32): Xaa is C or S
SRVVMNSMEGIIVNSSDDMIQVTINSLKTPAXTPKTV

SEQ ID NO: 27884 - protein, 39 aa, Artificial Sequence
  Non-cyclic GFR-binding peptide
  MOD_RES (2), (36), (37): Xaa is C or S
  MOD_RES (14), (15), (16), (17), (18): Xaa is A or G
  MOD_RES (19), (20), (21), (22): Xaa is A or G or is absent
GXARVVMNVQVEKXXXXXXXXXVKAVKVSRLQTPAXXPK

SEQ ID NO: 27885 - protein, 36 aa, Artificial Sequence
  Non-cyclic GFR-binding peptide
  MOD_RES (34), (34): Xaa is C or S
KNHQLFNSLQEHQGQHPKIRYYLMTLPEEETPVXEL

SEQ ID NO: 27886 - protein, 40 aa, Artificial Sequence
  Non-cyclic GFR-binding peptide
  MOD_RES (1), (3), (35), (36): Xaa is C or S
XGXSRVVMNVTAKKIVNSSDDIKRVQVPRLKTPAXXPKPV

SEQ ID NO: 27887 - protein, 37 aa, Artificial Sequence
  Non-cyclic GFR-binding peptide
  MOD_RES (1), (34), (35): Xaa is C or S
  MOD_RES (12), (13), (14), (15), (16): Xaa is A or G
  MOD_RES (17), (18), (19), (20): Xaa is A or G or is absent
XSKVIMSMEGIXXXXXXXXXMIQITINSLDQSVXXPS

SEQ ID NO: 27888 - protein, 34 aa, Artificial Sequence
  Non-cyclic GFR-binding peptide
  MOD_RES (34), (34): Xaa is C or S
  MOD_RES (12), (13), (14), (15), (16): Xaa is A or G
  MOD_RES (17), (18), (19), (20): Xaa is A or G or is absent
SRVVMNVQVEKXXXXXXXXXVKAVKVSRLKTPAX

SEQ ID NO: 27889 - protein, 34 aa, Artificial Sequence
  Non-cyclic GFR-binding peptide
  MOD_RES (1), (1): Xaa is C or S
  MOD_RES (13), (14), (15), (16), (17): Xaa is A or G
  MOD_RES (18), (19), (20), (21): Xaa is A or G or is absent
XARVVMNVTAKKXXXXXXXXXIKRVQVPRLQTPA

SEQ ID NO: 27890 - protein, 39 aa, Artificial Sequence
  Non-cyclic GFR-binding peptide
  MOD_RES (2), (4), (38): Xaa is C or S
  MOD_RES (16), (17), (18), (19), (20): Xaa is A or G
  MOD_RES (21), (22), (23), (24): Xaa is A or G or is absent
HXGXSRVVMNVTAKKXXXXXXXXXIKRVQVPRLKTPAXT

SEQ ID NO: 27891 - protein, 34 aa, Artificial Sequence
  Non-cyclic GFR-binding peptide
  MOD_RES (33), (34): Xaa is C or S
  MOD_RES (11), (12), (13), (14), (15): Xaa is A or G
  MOD_RES (16), (17), (18), (19): Xaa is A or G or is absent
EVVMDSMEGIXXXXXXXXXMIQMTINSLETPVXX

SEQ ID NO: 27892 - protein, 44 aa, Artificial Sequence
  Non-cyclic GFR-binding peptide
  MOD_RES (2), (4), (38), (39): Xaa is C or S
  MOD_RES (16), (17), (18), (19), (20): Xaa is A or G
  MOD_RES (21), (22), (23), (24): Xaa is A or G or is absent
HXGXARVVMNSMEGIXXXXXXXXXMIQVTINSLQTPAXXPKPVT

SEQ ID NO: 27893 - protein, 34 aa, Artificial Sequence
  Non-cyclic GFR-binding peptide
LHDELTNSLQEFIPKKRVIEYYLVTLPELQVQTP

SEQ ID NO: 27894 - protein, 37 aa, Artificial Sequence
  Non-cyclic GFR-binding peptide
  MOD_RES (1), (3), (37): Xaa is C or S
  MOD_RES (15), (16), (17), (18), (19): Xaa is A or G
  MOD_RES (20), (21), (22), (23): Xaa is A or G or is absent
XGXSRVVMNVTAKKXXXXXXXXXIKRVQVPRLKTPAX

SEQ ID NO: 27895 - protein, 37 aa, Artificial Sequence
  Non-cyclic GFR-binding peptide
  MOD_RES (1), (3): Xaa is C or S
  MOD_RES (16), (17), (18), (19), (20): Xaa is A or G
  MOD_RES (21), (22), (23), (24): Xaa is A or G or is absent
XKXALHDELTNSLQEXXXXXXXXXYYVVPLPELQVQT

SEQ ID NO: 27896 - protein, 34 aa, Artificial Sequence
  Non-cyclic GFR-binding peptide
  MOD_RES (1), (1): Xaa is C or S
  MOD_RES (13), (14), (15), (16), (17): Xaa is A or G
  MOD_RES (18), (19), (20), (21): Xaa is A or G or is absent
XSRVVMNSMEGIXXXXXXXXXMIQVTINSLKTPA

SEQ ID NO: 27897 - protein, 34 aa, Artificial Sequence
  Non-cyclic GFR-binding peptide
  MOD_RES (1), (1): Xaa is C or S
  MOD_RES (13), (14), (15), (16), (17): Xaa is A or G
  MOD_RES (18), (19), (20), (21): Xaa is A or G or is absent
XGEVVMEVQVEKXXXXXXXXXVKAMKVSRLETPV

SEQ ID NO: 27898 - protein, 38 aa, Artificial Sequence
  Non-cyclic GFR-binding peptide
  MOD_RES (1), (38): Xaa is C or S
XALHDELTNSLQEFIPKKRVIEYYVVPLPELQVQTPRX

SEQ ID NO: 27899 - protein, 35 aa, Artificial Sequence
  Non-cyclic GFR-binding peptide
  MOD_RES (34), (35): Xaa is C or S
  MOD_RES (12), (13), (14), (15), (16): Xaa is A or G
  MOD_RES (17), (18), (19), (20): Xaa is A or G or is absent
GEVVMEVTAKKXXXXXXXXXIKRMQVPRLETPVXX

SEQ ID NO: 27900 - protein, 41 aa, Artificial Sequence
  Non-cyclic GFR-binding peptide
  MOD_RES (1), (3), (36), (37): Xaa is C or S
  MOD_RES (14), (15), (16), (17), (18): Xaa is A or G
  MOD_RES (19), (20), (21), (22): Xaa is A or G or is absent
XKXSKVIMVTAKKXXXXXXXXXIKRIQVPRLDQSVXXPSAS

SEQ ID NO: 27901 - protein, 35 aa, Artificial Sequence
  Non-cyclic GFR-binding peptide
  MOD_RES (2), (34), (35): Xaa is C or S
GXSRVVMNVTAKKIVNSSDDIKRVQVPRLKTPAXX

SEQ ID NO: 27902 - protein, 38 aa, Artificial Sequence
  Non-cyclic GFR-binding peptide
  MOD_RES (34), (34): Xaa is C or S
  MOD_RES (12), (13), (14), (15), (16): Xaa is A or G
  MOD_RES (17), (18), (19), (20): Xaa is A or G or is absent
SRVVMNVTAKKXXXXXXXXXIKRVQVPRLKTPAXTPKT

SEQ ID NO: 27903 - protein, 33 aa, Artificial Sequence
  Non-cyclic GFR-binding peptide
  MOD_RES (1), (32), (33): Xaa is C or S
XSKVIMVTAKKIKPTKGIIKRIQVPRLDQSVXX

SEQ ID NO: 27904 - protein, 35 aa, Artificial Sequence
  Non-cyclic GFR-binding peptide
  MOD_RES (32), (32): Xaa is C or S
SRVVMNSMEGIIVNSSDDMIQVTINSLKTPAXTPK

SEQ ID NO: 27905 - protein, 40 aa, Artificial Sequence
  Non-cyclic GFR-binding peptide
  MOD_RES (1), (35), (36): Xaa is C or S
  MOD_RES (13), (14), (15), (16), (17): Xaa is A or G
  MOD_RES (18), (19), (20), (21): Xaa is A or G or is absent
XSRVVMNVTAKKXXXXXXXXXIKRVQVPRLKTPAXXPKPV

SEQ ID NO: 27906 - protein, 36 aa, Artificial Sequence
  Non-cyclic GFR-binding peptide
  MOD_RES (33), (34): Xaa is C or S
  MOD_RES (11), (12), (13), (14), (15): Xaa is A or G
  MOD_RES (16), (17), (18), (19): Xaa is A or G or is absent
SKVVMSMEGIXXXXXXXXXMIQITINSLDQPVXXPS

SEQ ID NO: 27907 - protein, 38 aa, Artificial Sequence
  Non-cyclic GFR-binding peptide
  MOD_RES (32), (33): Xaa is C or S
GEVVMEVTAKKVVKDYEDIKRMQVPRLETPVXXAKPIS

SEQ ID NO: 27908 - protein, 38 aa, Artificial Sequence
  Non-cyclic GFR-binding peptide
  MOD_RES (1), (38): Xaa is C or S
  MOD_RES (14), (15), (16), (17), (18): Xaa is A or G
  MOD_RES (19), (20), (21), (22): Xaa is A or G or is absent
XALHDELTNSLQEXXXXXXXXXYYLVTLPELQVQTPRX

SEQ ID NO: 27909 - protein, 38 aa, Artificial Sequence
  Non-cyclic GFR-binding peptide
  MOD_RES (1), (3), (35), (36): Xaa is C or S
XGXGEVVMEVTAKKVVKDYEDIKRMQVPRLETPVXXAK

SEQ ID NO: 27910 - protein, 37 aa, Artificial Sequence
  Non-cyclic GFR-binding peptide
  MOD_RES (2), (35), (36): Xaa is C or S
  MOD_RES (13), (14), (15), (16), (17): Xaa is A or G
  MOD_RES (18), (19), (20), (21): Xaa is A or G or is absent
KXSRVIMSMEGIXXXXXXXXXMIQITINSLAQPVXXP

SEQ ID NO: 27911 - protein, 40 aa, Artificial Sequence
  Non-cyclic GFR-binding peptide
  MOD_RES (1), (3), (37), (38): Xaa is C or S
  MOD_RES (15), (16), (17), (18), (19): Xaa is A or G
  MOD_RES (20), (21), (22), (23): Xaa is A or G or is absent
XGXGEVVMESMEGIXXXXXXXXXMIQMTINSLETPVXXAK

SEQ ID NO: 27912 - protein, 36 aa, Artificial Sequence
  Non-cyclic GFR-binding peptide
  MOD_RES (1), (35): Xaa is C or S
  MOD_RES (13), (14), (15), (16), (17): Xaa is A or G
  MOD_RES (18), (19), (20), (21): Xaa is A or G or is absent
XSRVVMNSMEGIXXXXXXXXXMIQVTINSLKTPAXT

SEQ ID NO: 27913 - protein, 37 aa, Artificial Sequence
  Non-cyclic GFR-binding peptide
  MOD_RES (2), (4), (36), (37): Xaa is C or S
HXGXSRVVMNVTAKKIVNSSDDIKRVQVPRLKTPAXX

SEQ ID NO: 27914 - protein, 37 aa, Artificial Sequence
  Non-cyclic GFR-binding peptide
  MOD_RES (33), (34): Xaa is C or S
  MOD_RES (11), (12), (13), (14), (15): Xaa is A or G
  MOD_RES (16), (17), (18), (19): Xaa is A or G or is absent
RVVMNSMEGIXXXXXXXXXMIQVTINSLQTPAXXPKP

SEQ ID NO: 27915 - protein, 38 aa, Artificial Sequence
  Non-cyclic GFR-binding peptide
  MOD_RES (2), (4): Xaa is C or S
  MOD_RES (17), (18), (19), (20), (21): Xaa is A or G
  MOD_RES (22), (23), (24), (25): Xaa is A or G or is absent
AXAXELHEELRNSLQEXXXXXXXXXYYVVPLPEHHVRS

SEQ ID NO: 27916 - protein, 36 aa, Artificial Sequence
  Non-cyclic GFR-binding peptide
  MOD_RES (2), (4), (35), (36): Xaa is C or S
SXKXSKVIMVTAKKIKPTKGIIKRIQVPRLDQSVXX

SEQ ID NO: 27917 - protein, 37 aa, Artificial Sequence
  Non-cyclic GFR-binding peptide
  MOD_RES (1), (33), (34): Xaa is C or S
XARVVMNVQVEKIVNSSDDVKAVKVSRLQTPAXXPKP

SEQ ID NO: 27918 - protein, 41 aa, Artificial Sequence
  Non-cyclic GFR-binding peptide
  MOD_RES (1), (3), (37): Xaa is C or S
  MOD_RES (15), (16), (17), (18), (19): Xaa is A or G
  MOD_RES (20), (21), (22), (23): Xaa is A or G or is absent
XEXKNHQLFNSLQEXXXXXXXXXYYVMPLPEEETPVXELGE

SEQ ID NO: 27919 - protein, 42 aa, Artificial Sequence
  Non-cyclic GFR-binding peptide
  MOD_RES (2), (4), (36), (37): Xaa is C or S
HXGXARVVMNVTAKKIVNSSDDIKRVQVPRLQTPAXXPKPVT

SEQ ID NO: 27920 - protein, 36 aa, Artificial Sequence
  Non-cyclic GFR-binding peptide
  MOD_RES (33), (34): Xaa is C or S
  MOD_RES (11), (12), (13), (14), (15): Xaa is A or G
  MOD_RES (16), (17), (18), (19): Xaa is A or G or is absent
EVVMEVQVEKXXXXXXXXXVKAMKVSRLETPVXXAK

SEQ ID NO: 27921 - protein, 41 aa, Artificial Sequence
  Non-cyclic GFR-binding peptide
  MOD_RES (2), (4), (41): Xaa is C or S
  MOD_RES (17), (18), (19), (20), (21): Xaa is A or G
  MOD_RES (22), (23), (24), (25): Xaa is A or G or is absent
AXAXELHEELRNSLQEXXXXXXXXXYYLVTLPEHHVRSPQX

SEQ ID NO: 27922 - protein, 42 aa, Artificial Sequence
  Non-cyclic GFR-binding peptide
  MOD_RES (1), (3), (37), (38): Xaa is C or S
  MOD_RES (15), (16), (17), (18), (19): Xaa is A or G
  MOD_RES (20), (21), (22), (23): Xaa is A or G or is absent
XGXSRVVMNVQVEKXXXXXXXXXVKAVKVSRLKTPAXXPKPV

SEQ ID NO: 27923 - protein, 30 aa, Artificial Sequence
  Non-cyclic GFR-binding peptide
SRVIMVQVEKVKPKRGVVKAIKVSRLAQPV

SEQ ID NO: 27924 - protein, 37 aa, Artificial Sequence
  Non-cyclic GFR-binding peptide
  MOD_RES (34), (34): Xaa is C or S
  MOD_RES (12), (13), (14), (15), (16): Xaa is A or G
  MOD_RES (17), (18), (19), (20): Xaa is A or G or is absent
SRVVMNVQVEKXXXXXXXXXVKAVKVSRLKTPAXTPK

SEQ ID NO: 27925 - protein, 33 aa, Artificial Sequence
  Non-cyclic GFR-binding peptide
  MOD_RES (32), (33): Xaa is C or S
ARVVMNVQVEKIVNSSDDVKAVKVSRLQTPAXX

SEQ ID NO: 27926 - protein, 39 aa, Artificial Sequence
  Non-cyclic GFR-binding peptide
  MOD_RES (34), (35): Xaa is C or S
  MOD_RES (12), (13), (14), (15), (16): Xaa is A or G
  MOD_RES (17), (18), (19), (20): Xaa is A or G or is absent
GEVVMDSMEGIXXXXXXXXXMIQMTINSLETPVXXAKPI

SEQ ID NO: 27927 - protein, 35 aa, Artificial Sequence
  Non-cyclic GFR-binding peptide
  MOD_RES (2), (2): Xaa is C or S
  MOD_RES (14), (15), (16), (17), (18): Xaa is A or G
  MOD_RES (19), (20), (21), (22): Xaa is A or G or is absent
GXARVVMNVTAKKXXXXXXXXXIKRVQVPRLQTPA

SEQ ID NO: 27928 - protein, 37 aa, Artificial Sequence
  Non-cyclic GFR-binding peptide
  MOD_RES (1), (33), (34): Xaa is C or S
XSRVVMNVTAKKIVNSSDDIKRVQVPRLKTPAXXPKP

SEQ ID NO: 27929 - protein, 41 aa, Artificial Sequence
  Non-cyclic GFR-binding peptide
  MOD_RES (1), (38): Xaa is C or S
  MOD_RES (14), (15), (16), (17), (18): Xaa is A or G
  MOD_RES (19), (20), (21), (22): Xaa is A or G or is absent
XALHDELTNSLQEXXXXXXXXXYYVVPLPELQVQTPRXQVN

SEQ ID NO: 27930 - protein, 38 aa, Artificial Sequence
  Non-cyclic GFR-binding peptide
  MOD_RES (33), (33): Xaa is C or S
  MOD_RES (11), (12), (13), (14), (15): Xaa is A or G
  MOD_RES (16), (17), (18), (19): Xaa is A or G or is absent
NHQLFNSLQEXXXXXXXXXYYVMPLPEEETPVXELGED

SEQ ID NO: 27931 - protein, 33 aa, Artificial Sequence
  Non-cyclic GFR-binding peptide
  MOD_RES (31), (32): Xaa is C or S
SKVVMVQVEKVKPTRGVVKAIKVSRLDQPVXXP

SEQ ID NO: 27932 - protein, 37 aa, Artificial Sequence
  Non-cyclic GFR-binding peptide
  MOD_RES (2), (33), (34): Xaa is C or S
KXSKVVMVQVEKVKPTRGVVKAIKVSRLDQPVXXPSA

SEQ ID NO: 27933 - protein, 41 aa, Artificial Sequence
  Non-cyclic GFR-binding peptide
  MOD_RES (1), (3), (36), (37): Xaa is C or S
  MOD_RES (14), (15), (16), (17), (18): Xaa is A or G
  MOD_RES (19), (20), (21), (22): Xaa is A or G or is absent
XKXSRVIMVTAKKXXXXXXXXXIKRIQVPRLAQPVXXPAAS

SEQ ID NO: 27934 - protein, 41 aa, Artificial Sequence
  Non-cyclic GFR-binding peptide
  MOD_RES (2), (39): Xaa is C or S
  MOD_RES (15), (16), (17), (18), (19): Xaa is A or G
  MOD_RES (20), (21), (22), (23): Xaa is A or G or is absent
AXELHEELRNSLQEXXXXXXXXXYYLVTLPEHHVRSPQXKV

SEQ ID NO: 27935 - protein, 31 aa, Artificial Sequence
  Non-cyclic GFR-binding peptide
ARVVMNVTAKKIVNSSDDIKRVQVPRLQTPA

SEQ ID NO: 27936 - protein, 39 aa, Artificial Sequence
  Non-cyclic GFR-binding peptide
  MOD_RES (2), (4), (38), (39): Xaa is C or S
  MOD_RES (16), (17), (18), (19), (20): Xaa is A or G
  MOD_RES (21), (22), (23), (24): Xaa is A or G or is absent
HXGXSRVVMNSMEGIXXXXXXXXXMIQVTINSLKTPAXX

SEQ ID NO: 27937 - protein, 41 aa, Artificial Sequence
  Non-cyclic GFR-binding peptide
  MOD_RES (2), (36): Xaa is C or S
  MOD_RES (14), (15), (16), (17), (18): Xaa is A or G
  MOD_RES (19), (20), (21), (22): Xaa is A or G or is absent
EXKNHQLFNSLQEXXXXXXXXXYYLMTLPEEETPVXELGED

SEQ ID NO: 27938 - protein, 39 aa, Artificial Sequence
  Non-cyclic GFR-binding peptide
  MOD_RES (33), (34): Xaa is C or S
  MOD_RES (11), (12), (13), (14), (15): Xaa is A or G
  MOD_RES (16), (17), (18), (19): Xaa is A or G or is absent
SKVIMVTAKKXXXXXXXXXIKRIQVPRLDQSVXXPSASA

SEQ ID NO: 27939 - protein, 38 aa, Artificial Sequence
  Non-cyclic GFR-binding peptide
  MOD_RES (2), (2): Xaa is C or S
KXALHDELTNSLQEFIPKKRVIEYYLVTLPELQVQTPR

SEQ ID NO: 27940 - protein, 35 aa, Artificial Sequence
  Non-cyclic GFR-binding peptide
  MOD_RES (32), (33): Xaa is C or S
GEVVMEVQVEKVVKDYEDVKAMKVSRLETPVXXAK

SEQ ID NO: 27941 - protein, 37 aa, Artificial Sequence
  Non-cyclic GFR-binding peptide
  MOD_RES (1), (3), (34), (35): Xaa is C or S
XKXSRVIMSMEGIVKPKRGVMIQITINSLAQPVXXPA

SEQ ID NO: 27942 - protein, 40 aa, Artificial Sequence
  Non-cyclic GFR-binding peptide
  MOD_RES (2), (4), (35), (36): Xaa is C or S
SXKXSKVVMVTAKKVKPTRGVIKRIQVPRLDQPVXXPSAS

SEQ ID NO: 27943 - protein, 36 aa, Artificial Sequence
  Non-cyclic GFR-binding peptide
  MOD_RES (33), (34): Xaa is C or S
  MOD_RES (11), (12), (13), (14), (15): Xaa is A or G
  MOD_RES (16), (17), (18), (19): Xaa is A or G or is absent
RVVMNVQVEKXXXXXXXXXVKAVKVSRLQTPAXXPK

SEQ ID NO: 27944 - protein, 45 aa, Artificial Sequence
  Non-cyclic GFR-binding peptide
  MOD_RES (2), (4), (41): Xaa is C or S
AXAXELHEELRNSLQELKPKKRVYEYYLVTLPEHHVRSPQXKVSS

SEQ ID NO: 27945 - protein, 34 aa, Artificial Sequence
  Non-cyclic GFR-binding peptide
  MOD_RES (2), (33), (34): Xaa is C or S
KXSKVIMVQVEKIKPTKGIVKAIKVSRLDQSVXX

SEQ ID NO: 27946 - protein, 37 aa, Artificial Sequence
  Non-cyclic GFR-binding peptide
  MOD_RES (1), (32), (33): Xaa is C or S
XSRVIMVQVEKVKPKRGVVKAIKVSRLAQPVXXPAAS

SEQ ID NO: 27947 - protein, 39 aa, Artificial Sequence
  Non-cyclic GFR-binding peptide
  MOD_RES (1), (3), (37): Xaa is C or S
  MOD_RES (15), (16), (17), (18), (19): Xaa is A or G
  MOD_RES (20), (21), (22), (23): Xaa is A or G or is absent
XEXKNHQLFNSLQEXXXXXXXXXYYVMPLPEEETPVXEL

SEQ ID NO: 27948 - protein, 41 aa, Artificial Sequence
  Non-cyclic GFR-binding peptide
  MOD_RES (1), (3), (35), (36): Xaa is C or S
XGXGEVVMDVQVEKVVKENEDVKAMKVSRLETPVXXAKPIK

SEQ ID NO: 27949 - protein, 43 aa, Artificial Sequence
  Non-cyclic GFR-binding peptide
  MOD_RES (1), (3), (40): Xaa is C or S
  MOD_RES (16), (17), (18), (19), (20): Xaa is A or G
  MOD_RES (21), (22), (23), (24): Xaa is A or G or is absent
XKXALHDELTNSLQEXXXXXXXXXYYVVPLPELQVQTPRXQVN

SEQ ID NO: 27950 - protein, 40 aa, Artificial Sequence
  Non-cyclic GFR-binding peptide
  MOD_RES (2), (4), (35), (36): Xaa is C or S
SXKXSRVIMSMEGIVKPKRGVMIQITINSLAQPVXXPAAS

SEQ ID NO: 27951 - protein, 31 aa, Artificial Sequence
  Non-cyclic GFR-binding peptide
  MOD_RES (31), (31): Xaa is C or S
EVVMDVQVEKVVKENEDVKAMKVSRLETPVX

SEQ ID NO: 27952 - protein, 34 aa, Artificial Sequence
  Non-cyclic GFR-binding peptide
  MOD_RES (1), (3): Xaa is C or S
XGXGEVVMDSMEGIVVKENEDMIQMTINSLETPV

SEQ ID NO: 27953 - protein, 42 aa, Artificial Sequence
  Non-cyclic GFR-binding peptide
  MOD_RES (2), (4), (41): Xaa is C or S
  MOD_RES (17), (18), (19), (20), (21): Xaa is A or G
  MOD_RES (22), (23), (24), (25): Xaa is A or G or is absent
AXAXELHEELRNSLQEXXXXXXXXXYYLVTLPEHHVRSPQXK

SEQ ID NO: 27954 - protein, 39 aa, Artificial Sequence
  Non-cyclic GFR-binding peptide
  MOD_RES (33), (34): Xaa is C or S
  MOD_RES (11), (12), (13), (14), (15): Xaa is A or G
  MOD_RES (16), (17), (18), (19): Xaa is A or G or is absent
RVVMNVTAKKXXXXXXXXXIKRVQVPRLQTPAXXPKPVT

SEQ ID NO: 27955 - protein, 37 aa, Artificial Sequence
  Non-cyclic GFR-binding peptide
  MOD_RES (33), (34): Xaa is C or S
  MOD_RES (11), (12), (13), (14), (15): Xaa is A or G
  MOD_RES (16), (17), (18), (19): Xaa is A or G or is absent
EVVMESMEGIXXXXXXXXXMIQMTINSLETPVXXAKP

SEQ ID NO: 27956 - protein, 34 aa, Artificial Sequence
  Non-cyclic GFR-binding peptide
  MOD_RES (1), (34): Xaa is C or S
  MOD_RES (12), (13), (14), (15), (16): Xaa is A or G
  MOD_RES (17), (18), (19), (20): Xaa is A or G or is absent
XSKVVMVTAKKXXXXXXXXXIKRIQVPRLDQPVX

SEQ ID NO: 27957 - protein, 38 aa, Artificial Sequence
  Non-cyclic GFR-binding peptide
  MOD_RES (2), (2): Xaa is C or S
  MOD_RES (15), (16), (17), (18), (19): Xaa is A or G
  MOD_RES (20), (21), (22), (23): Xaa is A or G or is absent
KXALHDELTNSLQEXXXXXXXXXYYLVTLPELQVQTPR

SEQ ID NO: 27958 - protein, 35 aa, Artificial Sequence
  Non-cyclic GFR-binding peptide
  MOD_RES (33), (33): Xaa is C or S
NHQLFNSLQEHQGQHPKIRYYVMPLPEEETPVXEL

SEQ ID NO: 27959 - protein, 43 aa, Artificial Sequence
  Non-cyclic GFR-binding peptide
  MOD_RES (2), (4), (38): Xaa is C or S
  MOD_RES (16), (17), (18), (19), (20): Xaa is A or G
  MOD_RES (21), (22), (23), (24): Xaa is A or G or is absent
RXEXKNHQLFNSLQEXXXXXXXXXYYLMTLPEEETPVXELGED

SEQ ID NO: 27960 - protein, 41 aa, Artificial Sequence
  Non-cyclic GFR-binding peptide
  MOD_RES (2), (36), (37): Xaa is C or S
  MOD_RES (14), (15), (16), (17), (18): Xaa is A or G
  MOD_RES (19), (20), (21), (22): Xaa is A or G or is absent
GXGEVVMDVQVEKXXXXXXXXXVKAMKVSRLETPVXXAKPI

SEQ ID NO: 27961 - protein, 36 aa, Artificial Sequence
  Non-cyclic GFR-binding peptide
  MOD_RES (1), (3): Xaa is C or S
  MOD_RES (15), (16), (17), (18), (19): Xaa is A or G
  MOD_RES (20), (21), (22), (23): Xaa is A or G or is absent
XGXGEVVMDVQVEKXXXXXXXXXVKAMKVSRLETPV

SEQ ID NO: 27962 - protein, 36 aa, Artificial Sequence
  Non-cyclic GFR-binding peptide
  MOD_RES (1), (3), (35): Xaa is C or S
XGXSRVVMNSMEGIIVNSSDDMIQVTINSLKTPAXT

SEQ ID NO: 27963 - protein, 34 aa, Artificial Sequence
  Non-cyclic GFR-binding peptide
  MOD_RES (1), (32), (33): Xaa is C or S
XSKVVMVTAKKVKPTRGVIKRIQVPRLDQPVXXP

SEQ ID NO: 27964 - protein, 34 aa, Artificial Sequence
  Non-cyclic GFR-binding peptide
  MOD_RES (2), (2): Xaa is C or S
  MOD_RES (13), (14), (15), (16), (17): Xaa is A or G
  MOD_RES (18), (19), (20), (21): Xaa is A or G or is absent
KXSKVVMVQVEKXXXXXXXXXVKAIKVSRLDQPV

SEQ ID NO: 27965 - protein, 43 aa, Artificial Sequence
  Non-cyclic GFR-binding peptide
  MOD_RES (2), (4), (37), (38): Xaa is C or S
  MOD_RES (15), (16), (17), (18), (19): Xaa is A or G
  MOD_RES (20), (21), (22), (23): Xaa is A or G or is absent
SXKXSKVVMSMEGIXXXXXXXXXMIQITINSLDQPVXXPSASA

SEQ ID NO: 27966 - protein, 42 aa, Artificial Sequence
  Non-cyclic GFR-binding peptide
  MOD_RES (2), (39): Xaa is C or S
KXALHDELTNSLQEFIPKKRVIEYYLVTLPELQVQTPRXQVN

SEQ ID NO: 27967 - protein, 39 aa, Artificial Sequence
  Non-cyclic GFR-binding peptide
  MOD_RES (33), (34): Xaa is C or S
  MOD_RES (11), (12), (13), (14), (15): Xaa is A or G
  MOD_RES (16), (17), (18), (19): Xaa is A or G or is absent
RVVMNVQVEKXXXXXXXXXVKAVKVSRLQTPAXXPKPVT

SEQ ID NO: 27968 - protein, 37 aa, Artificial Sequence
  Non-cyclic GFR-binding peptide
  MOD_RES (34), (34): Xaa is C or S
  MOD_RES (12), (13), (14), (15), (16): Xaa is A or G
  MOD_RES (17), (18), (19), (20): Xaa is A or G or is absent
KNHQLFNSLQEXXXXXXXXXYYVMPLPEEETPVXELG

SEQ ID NO: 27969 - protein, 39 aa, Artificial Sequence
  Non-cyclic GFR-binding peptide
  MOD_RES (2), (35), (36): Xaa is C or S
  MOD_RES (13), (14), (15), (16), (17): Xaa is A or G
  MOD_RES (18), (19), (20), (21): Xaa is A or G or is absent
KXSKVVMVQVEKXXXXXXXXXVKAIKVSRLDQPVXXPSA

SEQ ID NO: 27970 - protein, 37 aa, Artificial Sequence
  Non-cyclic GFR-binding peptide
  MOD_RES (33), (34): Xaa is C or S
  MOD_RES (11), (12), (13), (14), (15): Xaa is A or G
  MOD_RES (16), (17), (18), (19): Xaa is A or G or is absent
SKVIMSMEGIXXXXXXXXXMIQITINSLDQSVXXPSA

SEQ ID NO: 27971 - protein, 31 aa, Artificial Sequence
  Non-cyclic GFR-binding peptide
SRVVMNSMEGIIVNSSDDMIQVTINSLKTPA

SEQ ID NO: 27972 - protein, 40 aa, Artificial Sequence
  Non-cyclic GFR-binding peptide
  MOD_RES (2), (4), (38), (39): Xaa is C or S
  MOD_RES (16), (17), (18), (19), (20): Xaa is A or G
  MOD_RES (21), (22), (23), (24): Xaa is A or G or is absent
RXGXGEVVMDSMEGIXXXXXXXXXMIQMTINSLETPVXXA

SEQ ID NO: 27973 - protein, 37 aa, Artificial Sequence
  Non-cyclic GFR-binding peptide
  MOD_RES (1), (3), (36), (37): Xaa is C or S
  MOD_RES (14), (15), (16), (17), (18): Xaa is A or G
  MOD_RES (19), (20), (21), (22): Xaa is A or G or is absent
XKXSRVIMSMEGIXXXXXXXXXMIQITINSLAQPVXX

SEQ ID NO: 27974 - protein, 38 aa, Artificial Sequence
  Non-cyclic GFR-binding peptide
  MOD_RES (1), (3), (37): Xaa is C or S
  MOD_RES (15), (16), (17), (18), (19): Xaa is A or G
  MOD_RES (20), (21), (22), (23): Xaa is A or G or is absent
XGXSRVVMNSMEGIXXXXXXXXXMIQVTINSLKTPAXT

SEQ ID NO: 27975 - protein, 38 aa, Artificial Sequence
  Non-cyclic GFR-binding peptide
  MOD_RES (33), (34): Xaa is C or S
  MOD_RES (11), (12), (13), (14), (15): Xaa is A or G
  MOD_RES (16), (17), (18), (19): Xaa is A or G or is absent
SRVIMSMEGIXXXXXXXXXMIQITINSLAQPVXXPAAS

SEQ ID NO: 27976 - protein, 41 aa, Artificial Sequence
  Non-cyclic GFR-binding peptide
  MOD_RES (2), (4), (36): Xaa is C or S
HXGXSRVVMNVTAKKIVNSSDDIKRVQVPRLKTPAXTPKTV

SEQ ID NO: 27977 - protein, 37 aa, Artificial Sequence
  Non-cyclic GFR-binding peptide
  MOD_RES (2), (34), (35): Xaa is C or S
GXSRVVMNSMEGIIVNSSDDMIQVTINSLKTPAXXPK

SEQ ID NO: 27978 - protein, 35 aa, Artificial Sequence
  Non-cyclic GFR-binding peptide
  MOD_RES (34), (35): Xaa is C or S
  MOD_RES (12), (13), (14), (15), (16): Xaa is A or G
  MOD_RES (17), (18), (19), (20): Xaa is A or G or is absent
GEVVMDSMEGIXXXXXXXXXMIQMTINSLETPVXX

SEQ ID NO: 27979 - protein, 39 aa, Artificial Sequence
  Non-cyclic GFR-binding peptide
  MOD_RES (2), (4), (38), (39): Xaa is C or S
  MOD_RES (16), (17), (18), (19), (20): Xaa is A or G
  MOD_RES (21), (22), (23), (24): Xaa is A or G or is absent
RXGXGEVVMDVQVEKXXXXXXXXXVKAMKVSRLETPVXX

SEQ ID NO: 27980 - protein, 36 aa, Artificial Sequence
  Non-cyclic GFR-binding peptide
  MOD_RES (2), (4), (35), (36): Xaa is C or S
SXKXSKVVMVQVEKVKPTRGVVKAIKVSRLDQPVXX

SEQ ID NO: 27981 - protein, 32 aa, Artificial Sequence
  Non-cyclic GFR-binding peptide
  MOD_RES (31), (32): Xaa is C or S
EVVMDVQVEKVVKENEDVKAMKVSRLETPVXX

SEQ ID NO: 27982 - protein, 38 aa, Artificial Sequence
  Non-cyclic GFR-binding peptide
  MOD_RES (1), (35), (36): Xaa is C or S
  MOD_RES (13), (14), (15), (16), (17): Xaa is A or G
  MOD_RES (18), (19), (20), (21): Xaa is A or G or is absent
XSRVVMNSMEGIXXXXXXXXXMIQVTINSLKTPAXXPK

SEQ ID NO: 27983 - protein, 32 aa, Artificial Sequence
  Non-cyclic GFR-binding peptide
  MOD_RES (2), (2): Xaa is C or S
KXSKVIMVQVEKIKPTKGIVKAIKVSRLDQSV

SEQ ID NO: 27984 - protein, 34 aa, Artificial Sequence
  Non-cyclic GFR-binding peptide
  MOD_RES (32), (33): Xaa is C or S
GEVVMDVQVEKVVKENEDVKAMKVSRLETPVXXA

SEQ ID NO: 27985 - protein, 39 aa, Artificial Sequence
  Non-cyclic GFR-binding peptide
  MOD_RES (2), (4), (36), (37): Xaa is C or S
RXGXGEVVMDSMEGIVVKENEDMIQMTINSLETPVXXAK

SEQ ID NO: 27986 - protein, 35 aa, Artificial Sequence
  Non-cyclic GFR-binding peptide
  MOD_RES (2), (35): Xaa is C or S
  MOD_RES (13), (14), (15), (16), (17): Xaa is A or G
  MOD_RES (18), (19), (20), (21): Xaa is A or G or is absent
KXSKVVMVQVEKXXXXXXXXXVKAIKVSRLDQPVX

SEQ ID NO: 27987 - protein, 39 aa, Artificial Sequence
  Non-cyclic GFR-binding peptide
  MOD_RES (1), (3), (37), (38): Xaa is C or S
  MOD_RES (15), (16), (17), (18), (19): Xaa is A or G
  MOD_RES (20), (21), (22), (23): Xaa is A or G or is absent
XGXARVVMNSMEGIXXXXXXXXXMIQVTINSLQTPAXXP

SEQ ID NO: 27988 - protein, 40 aa, Artificial Sequence
  Non-cyclic GFR-binding peptide
  MOD_RES (2), (4), (38), (39): Xaa is C or S
  MOD_RES (16), (17), (18), (19), (20): Xaa is A or G
  MOD_RES (21), (22), (23), (24): Xaa is A or G or is absent
HXGXARVVMNVQVEKXXXXXXXXXVKAVKVSRLQTPAXXP

SEQ ID NO: 27989 - protein, 40 aa, Artificial Sequence
  Non-cyclic GFR-binding peptide
  MOD_RES (2), (39): Xaa is C or S
  MOD_RES (15), (16), (17), (18), (19): Xaa is A or G
  MOD_RES (20), (21), (22), (23): Xaa is A or G or is absent
AXELHEELRNSLQEXXXXXXXXXYYVVPLPEHHVRSPQXK

SEQ ID NO: 27990 - protein, 44 aa, Artificial Sequence
  Non-cyclic GFR-binding peptide
  MOD_RES (1), (3), (40): Xaa is C or S
  MOD_RES (16), (17), (18), (19), (20): Xaa is A or G
  MOD_RES (21), (22), (23), (24): Xaa is A or G or is absent
XKXALHDELTNSLQEXXXXXXXXXYYVVPLPELQVQTPRXQVNR

SEQ ID NO: 27991 - protein, 32 aa, Artificial Sequence
  Non-cyclic GFR-binding peptide
  MOD_RES (31), (32): Xaa is C or S
EVVMEVQVEKVVKDYEDVKAMKVSRLETPVXX

SEQ ID NO: 27992 - protein, 37 aa, Artificial Sequence
  Non-cyclic GFR-binding peptide
  MOD_RES (31), (31): Xaa is C or S
RVVMNSMEGIIVNSSDDMIQVTINSLKTPAXTPKTVH

SEQ ID NO: 27993 - protein, 40 aa, Artificial Sequence
  Non-cyclic GFR-binding peptide
  MOD_RES (2), (4), (36), (37): Xaa is C or S
RXGXGEVVMDSMEGIVVKENEDMIQMTINSLETPVXXAKP

SEQ ID NO: 27994 - protein, 35 aa, Artificial Sequence
  Non-cyclic GFR-binding peptide
  MOD_RES (33), (34): Xaa is C or S
  MOD_RES (11), (12), (13), (14), (15): Xaa is A or G
  MOD_RES (16), (17), (18), (19): Xaa is A or G or is absent
EVVMEVQVEKXXXXXXXXXVKAMKVSRLETPVXXA

SEQ ID NO: 27995 - protein, 41 aa, Artificial Sequence
  Non-cyclic GFR-binding peptide
  MOD_RES (2), (36), (37): Xaa is C or S
  MOD_RES (14), (15), (16), (17), (18): Xaa is A or G
  MOD_RES (19), (20), (21), (22): Xaa is A or G or is absent
GXSRVVMNVTAKKXXXXXXXXXIKRVQVPRLKTPAXXPKPV

SEQ ID NO: 27996 - protein, 34 aa, Artificial Sequence
  Non-cyclic GFR-binding peptide
  MOD_RES (33), (33): Xaa is C or S
  MOD_RES (11), (12), (13), (14), (15): Xaa is A or G
  MOD_RES (16), (17), (18), (19): Xaa is A or G or is absent
NHQLFNSLQEXXXXXXXXXYYLMTLPEEETPVXE

SEQ ID NO: 27997 - protein, 34 aa, Artificial Sequence
  Non-cyclic GFR-binding peptide
  MOD_RES (31), (32): Xaa is C or S
SRVIMVTAKKVKPKRGVIKRIQVPRLAQPVXXPA

SEQ ID NO: 27998 - protein, 36 aa, Artificial Sequence
  Non-cyclic GFR-binding peptide
  MOD_RES (33), (34): Xaa is C or S
  MOD_RES (11), (12), (13), (14), (15): Xaa is A or G
  MOD_RES (16), (17), (18), (19): Xaa is A or G or is absent
SRVIMVQVEKXXXXXXXXXVKAIKVSRLAQPVXXPA

SEQ ID NO: 27999 - protein, 37 aa, Artificial Sequence
  Non-cyclic GFR-binding peptide
  MOD_RES (1), (35), (36): Xaa is C or S
  MOD_RES (13), (14), (15), (16), (17): Xaa is A or G
  MOD_RES (18), (19), (20), (21): Xaa is A or G or is absent
XARVVMNSMEGIXXXXXXXXXMIQVTINSLQTPAXXP

SEQ ID NO: 28000 - protein, 33 aa, Artificial Sequence
  Non-cyclic GFR-binding peptide
  MOD_RES (31), (32): Xaa is C or S
RVVMNVQVEKIVNSSDDVKAVKVSRLKTPAXXP

SEQ ID NO: 28001 - protein, 36 aa, Artificial Sequence
  Non-cyclic GFR-binding peptide
  MOD_RES (1), (3), (36): Xaa is C or S
  MOD_RES (14), (15), (16), (17), (18): Xaa is A or G
  MOD_RES (19), (20), (21), (22): Xaa is A or G or is absent
XKXSRVIMSMEGIXXXXXXXXXMIQITINSLAQPVX

SEQ ID NO: 28002 - protein, 33 aa, Artificial Sequence
  Non-cyclic GFR-binding peptide
  MOD_RES (12), (13), (14), (15), (16): Xaa is A or G
  MOD_RES (17), (18), (19), (20): Xaa is A or G or is absent
LHEELRNSLQEXXXXXXXXXYYLVTLPEHHVRS

SEQ ID NO: 28003 - protein, 37 aa, Artificial Sequence
  Non-cyclic GFR-binding peptide
  MOD_RES (31), (32): Xaa is C or S
EVVMDSMEGIVVKENEDMIQMTINSLETPVXXAKPIK

SEQ ID NO: 28004 - protein, 33 aa, Artificial Sequence
  Non-cyclic GFR-binding peptide
  MOD_RES (1), (1): Xaa is C or S
  MOD_RES (12), (13), (14), (15), (16): Xaa is A or G
  MOD_RES (17), (18), (19), (20): Xaa is A or G or is absent
XSKVIMVTAKKXXXXXXXXXIKRIQVPRLDQSV

SEQ ID NO: 28005 - protein, 39 aa, Artificial Sequence
  Non-cyclic GFR-binding peptide
  MOD_RES (36), (36): Xaa is C or S
  MOD_RES (12), (13), (14), (15), (16): Xaa is A or G
  MOD_RES (17), (18), (19), (20): Xaa is A or G or is absent
LHEELRNSLQEXXXXXXXXXYYVVPLPEHHVRSPQXKVS

SEQ ID NO: 28006 - protein, 40 aa, Artificial Sequence
  Non-cyclic GFR-binding peptide
  MOD_RES (1), (3), (35), (36): Xaa is C or S
XGXGEVVMDVTAKKVVKENEDIKRMQVPRLETPVXXAKPI

SEQ ID NO: 28007 - protein, 38 aa, Artificial Sequence
  Non-cyclic GFR-binding peptide
  MOD_RES (1), (3), (34), (35): Xaa is C or S
XKXSKVIMVTAKKIKPTKGIIKRIQVPRLDQSVXXPSA

SEQ ID NO: 28008 - protein, 36 aa, Artificial Sequence
  Non-cyclic GFR-binding peptide
  MOD_RES (33), (33): Xaa is C or S
  MOD_RES (11), (12), (13), (14), (15): Xaa is A or G
  MOD_RES (16), (17), (18), (19): Xaa is A or G or is absent
RVVMNVTAKKXXXXXXXXXIKRVQVPRLKTPAXTPK

SEQ ID NO: 28009 - protein, 39 aa, Artificial Sequence
  Non-cyclic GFR-binding peptide
  MOD_RES (2), (35), (36): Xaa is C or S
  MOD_RES (13), (14), (15), (16), (17): Xaa is A or G
  MOD_RES (18), (19), (20), (21): Xaa is A or G or is absent
KXSKVVMVTAKKXXXXXXXXXIKRIQVPRLDQPVXXPSA

SEQ ID NO: 28010 - protein, 38 aa, Artificial Sequence
  Non-cyclic GFR-binding peptide
  MOD_RES (1), (35), (36): Xaa is C or S
  MOD_RES (13), (14), (15), (16), (17): Xaa is A or G
  MOD_RES (18), (19), (20), (21): Xaa is A or G or is absent
XGEVVMEVQVEKXXXXXXXXXVKAMKVSRLETPVXXAK

SEQ ID NO: 28011 - protein, 40 aa, Artificial Sequence
  Non-cyclic GFR-binding peptide
  MOD_RES (2), (36), (37): Xaa is C or S
  MOD_RES (14), (15), (16), (17), (18): Xaa is A or G
  MOD_RES (19), (20), (21), (22): Xaa is A or G or is absent
GXSRVVMNVQVEKXXXXXXXXXVKAVKVSRLKTPAXXPKP

SEQ ID NO: 28012 - protein, 36 aa, Artificial Sequence
  Non-cyclic GFR-binding peptide
  MOD_RES (1), (1): Xaa is C or S
XALHDELTNSLQEFIPKKRVIEYYVVPLPELQVQTP

SEQ ID NO: 28013 - protein, 34 aa, Artificial Sequence
  Non-cyclic GFR-binding peptide
  MOD_RES (2), (33), (34): Xaa is C or S
KXSKVIMVTAKKIKPTKGIIKRIQVPRLDQSVXX

SEQ ID NO: 28014 - protein, 39 aa, Artificial Sequence
  Non-cyclic GFR-binding peptide
  MOD_RES (1), (34), (35): Xaa is C or S
  MOD_RES (12), (13), (14), (15), (16): Xaa is A or G
  MOD_RES (17), (18), (19), (20): Xaa is A or G or is absent
XSRVIMVTAKKXXXXXXXXXIKRIQVPRLAQPVXXPAAS

SEQ ID NO: 28015 - protein, 43 aa, Artificial Sequence
  Non-cyclic GFR-binding peptide
  MOD_RES (2), (4), (41): Xaa is C or S
  MOD_RES (17), (18), (19), (20), (21): Xaa is A or G
  MOD_RES (22), (23), (24), (25): Xaa is A or G or is absent
EXKXALHDELTNSLQEXXXXXXXXXYYLVTLPELQVQTPRXQV

SEQ ID NO: 28016 - protein, 39 aa, Artificial Sequence
  Non-cyclic GFR-binding peptide
  MOD_RES (1), (34), (35): Xaa is C or S
  MOD_RES (12), (13), (14), (15), (16): Xaa is A or G
  MOD_RES (17), (18), (19), (20): Xaa is A or G or is absent
XSKVIMVQVEKXXXXXXXXXVKAIKVSRLDQSVXXPSAS

SEQ ID NO: 28017 - protein, 32 aa, Artificial Sequence
  Non-cyclic GFR-binding peptide
  MOD_RES (2), (2): Xaa is C or S
KXSKVIMVTAKKIKPTKGIIKRIQVPRLDQSV

SEQ ID NO: 28018 - protein, 35 aa, Artificial Sequence
  Non-cyclic GFR-binding peptide
  MOD_RES (1), (35): Xaa is C or S
  MOD_RES (13), (14), (15), (16), (17): Xaa is A or G
  MOD_RES (18), (19), (20), (21): Xaa is A or G or is absent
XSRVVMNVTAKKXXXXXXXXXIKRVQVPRLKTPAX

SEQ ID NO: 28019 - protein, 37 aa, Artificial Sequence
  Non-cyclic GFR-binding peptide
  MOD_RES (1), (3), (35), (36): Xaa is C or S
XGXARVVMNVTAKKIVNSSDDIKRVQVPRLQTPAXXP

SEQ ID NO: 28020 - protein, 35 aa, Artificial Sequence
  Non-cyclic GFR-binding peptide
  MOD_RES (2), (33), (34): Xaa is C or S
KXSKVIMSMEGIIKPTKGIMIQITINSLDQSVXXP

SEQ ID NO: 28021 - protein, 39 aa, Artificial Sequence
  Non-cyclic GFR-binding peptide
  MOD_RES (1), (35): Xaa is C or S
  MOD_RES (13), (14), (15), (16), (17): Xaa is A or G
  MOD_RES (18), (19), (20), (21): Xaa is A or G or is absent
XSRVVMNVTAKKXXXXXXXXXIKRVQVPRLKTPAXTPKT

SEQ ID NO: 28022 - protein, 38 aa, Artificial Sequence
  Non-cyclic GFR-binding peptide
  MOD_RES (2), (35), (36): Xaa is C or S
  MOD_RES (13), (14), (15), (16), (17): Xaa is A or G
  MOD_RES (18), (19), (20), (21): Xaa is A or G or is absent
KXSKVIMSMEGIXXXXXXXXXMIQITINSLDQSVXXPS

SEQ ID NO: 28023 - protein, 38 aa, Artificial Sequence
  Non-cyclic GFR-binding peptide
  MOD_RES (1), (35), (36): Xaa is C or S
  MOD_RES (13), (14), (15), (16), (17): Xaa is A or G
  MOD_RES (18), (19), (20), (21): Xaa is A or G or is absent
XARVVMNVTAKKXXXXXXXXXIKRVQVPRLQTPAXXPK

SEQ ID NO: 28024 - protein, 42 aa, Artificial Sequence
  Non-cyclic GFR-binding peptide
  MOD_RES (1), (3), (36), (37): Xaa is C or S
  MOD_RES (14), (15), (16), (17), (18): Xaa is A or G
  MOD_RES (19), (20), (21), (22): Xaa is A or G or is absent
XKXSKVVMSMEGIXXXXXXXXXMIQITINSLDQPVXXPSASA

SEQ ID NO: 28025 - protein, 34 aa, Artificial Sequence
  Non-cyclic GFR-binding peptide
  MOD_RES (33), (34): Xaa is C or S
  MOD_RES (11), (12), (13), (14), (15): Xaa is A or G
  MOD_RES (16), (17), (18), (19): Xaa is A or G or is absent
SKVIMSMEGIXXXXXXXXXMIQITINSLDQSVXX

SEQ ID NO: 28026 - protein, 39 aa, Artificial Sequence
  Non-cyclic GFR-binding peptide
  MOD_RES (1), (3), (37), (38): Xaa is C or S
  MOD_RES (15), (16), (17), (18), (19): Xaa is A or G
  MOD_RES (20), (21), (22), (23): Xaa is A or G or is absent
XGXGEVVMEVQVEKXXXXXXXXXVKAMKVSRLETPVXXA

SEQ ID NO: 28027 - protein, 32 aa, Artificial Sequence
  Non-cyclic GFR-binding peptide
  MOD_RES (31), (31): Xaa is C or S
RVVMNVTAKKIVNSSDDIKRVQVPRLKTPAXT

SEQ ID NO: 28028 - protein, 34 aa, Artificial Sequence
  Non-cyclic GFR-binding peptide
  MOD_RES (1), (3): Xaa is C or S
XGXGEVVMESMEGIVVKDYEDMIQMTINSLETPV

SEQ ID NO: 28029 - protein, 38 aa, Artificial Sequence
  Non-cyclic GFR-binding peptide
  MOD_RES (33), (34): Xaa is C or S
  MOD_RES (11), (12), (13), (14), (15): Xaa is A or G
  MOD_RES (16), (17), (18), (19): Xaa is A or G or is absent
RVVMNSMEGIXXXXXXXXXMIQVTINSLKTPAXXPKPV

SEQ ID NO: 28030 - protein, 37 aa, Artificial Sequence
  Non-cyclic GFR-binding peptide
  MOD_RES (37), (37): Xaa is C or S
  MOD_RES (13), (14), (15), (16), (17): Xaa is A or G
  MOD_RES (18), (19), (20), (21): Xaa is A or G or is absent
ELHEELRNSLQEXXXXXXXXXYYLVTLPEHHVRSPQX

SEQ ID NO: 28031 - protein, 42 aa, Artificial Sequence
  Non-cyclic GFR-binding peptide
  MOD_RES (1), (3), (37): Xaa is C or S
  MOD_RES (15), (16), (17), (18), (19): Xaa is A or G
  MOD_RES (20), (21), (22), (23): Xaa is A or G or is absent
XEXKNHQLFNSLQEXXXXXXXXXYYLMTLPEEETPVXELGED

SEQ ID NO: 28032 - protein, 38 aa, Artificial Sequence
  Non-cyclic GFR-binding peptide
  MOD_RES (33), (33): Xaa is C or S
  MOD_RES (11), (12), (13), (14), (15): Xaa is A or G
  MOD_RES (16), (17), (18), (19): Xaa is A or G or is absent
NHQLFNSLQEXXXXXXXXXYYLMTLPEEETPVXELGED

SEQ ID NO: 28033 - protein, 40 aa, Artificial Sequence
  Non-cyclic GFR-binding peptide
  MOD_RES (2), (4), (36), (37): Xaa is C or S
HXGXARVVMNVTAKKIVNSSDDIKRVQVPRLQTPAXXPKP

SEQ ID NO: 28034 - protein, 37 aa, Artificial Sequence
  Non-cyclic GFR-binding peptide
  MOD_RES (1), (35), (36): Xaa is C or S
  MOD_RES (13), (14), (15), (16), (17): Xaa is A or G
  MOD_RES (18), (19), (20), (21): Xaa is A or G or is absent
XGEVVMDVQVEKXXXXXXXXXVKAMKVSRLETPVXXA

SEQ ID NO: 28035 - protein, 38 aa, Artificial Sequence
  Non-cyclic GFR-binding peptide
  MOD_RES (1), (3), (34), (35): Xaa is C or S
XKXSKVIMVQVEKIKPTKGIVKAIKVSRLDQSVXXPSA

SEQ ID NO: 28036 - protein, 38 aa, Artificial Sequence
  Non-cyclic GFR-binding peptide
  MOD_RES (1), (3), (37), (38): Xaa is C or S
  MOD_RES (15), (16), (17), (18), (19): Xaa is A or G
  MOD_RES (20), (21), (22), (23): Xaa is A or G or is absent
XGXARVVMNVTAKKXXXXXXXXXIKRVQVPRLQTPAXX

SEQ ID NO: 28037 - protein, 39 aa, Artificial Sequence
  Non-cyclic GFR-binding peptide
  MOD_RES (2), (34), (35): Xaa is C or S
GXARVVMNVTAKKIVNSSDDIKRVQVPRLQTPAXXPKPV

SEQ ID NO: 28038 - protein, 43 aa, Artificial Sequence
  Non-cyclic GFR-binding peptide
  MOD_RES (2), (4), (38), (39): Xaa is C or S
  MOD_RES (16), (17), (18), (19), (20): Xaa is A or G
  MOD_RES (21), (22), (23), (24): Xaa is A or G or is absent
RXGXGEVVMEVTAKKXXXXXXXXXIKRMQVPRLETPVXXAKPI

SEQ ID NO: 28039 - protein, 36 aa, Artificial Sequence
  Non-cyclic GFR-binding peptide
  MOD_RES (32), (33): Xaa is C or S
GEVVMDSMEGIVVKENEDMIQMTINSLETPVXXAKP

SEQ ID NO: 28040 - protein, 36 aa, Artificial Sequence
  Non-cyclic GFR-binding peptide
  MOD_RES (1), (3), (36): Xaa is C or S
  MOD_RES (14), (15), (16), (17), (18): Xaa is A or G
  MOD_RES (19), (20), (21), (22): Xaa is A or G or is absent
XKXSKVVMVTAKKXXXXXXXXXIKRIQVPRLDQPVX

SEQ ID NO: 28041 - protein, 37 aa, Artificial Sequence
  Non-cyclic GFR-binding peptide
  MOD_RES (2), (33), (34): Xaa is C or S
KXSKVIMVTAKKIKPTKGIIKRIQVPRLDQSVXXPSA

SEQ ID NO: 28042 - protein, 38 aa, Artificial Sequence
  Non-cyclic GFR-binding peptide
  MOD_RES (35), (35): Xaa is C or S
HDELTNSLQEFIPKKRVIEYYLVTLPELQVQTPRXQVN

SEQ ID NO: 28043 - protein, 36 aa, Artificial Sequence
  Non-cyclic GFR-binding peptide
  MOD_RES (2), (2): Xaa is C or S
  MOD_RES (15), (16), (17), (18), (19): Xaa is A or G
  MOD_RES (20), (21), (22), (23): Xaa is A or G or is absent
AXELHEELRNSLQEXXXXXXXXXYYLVTLPEHHVRS

SEQ ID NO: 28044 - protein, 44 aa, Artificial Sequence
  Non-cyclic GFR-binding peptide
  MOD_RES (2), (4), (38), (39): Xaa is C or S
  MOD_RES (16), (17), (18), (19), (20): Xaa is A or G
  MOD_RES (21), (22), (23), (24): Xaa is A or G or is absent
HXGXARVVMNVTAKKXXXXXXXXXIKRVQVPRLQTPAXXPKPVT

SEQ ID NO: 28045 - protein, 35 aa, Artificial Sequence
  Non-cyclic GFR-binding peptide
  MOD_RES (31), (32): Xaa is C or S
SKVVMVTAKKVKPTRGVIKRIQVPRLDQPVXXPSA

SEQ ID NO: 28046 - protein, 39 aa, Artificial Sequence
  Non-cyclic GFR-binding peptide
  MOD_RES (2), (4), (36), (37): Xaa is C or S
RXGXGEVVMEVQVEKVVKDYEDVKAMKVSRLETPVXXAK

SEQ ID NO: 28047 - protein, 39 aa, Artificial Sequence
  Non-cyclic GFR-binding peptide
  MOD_RES (2), (39): Xaa is C or S
AXELHEELRNSLQELKPKKRVYEYYLVTLPEHHVRSPQX

SEQ ID NO: 28048 - protein, 42 aa, Artificial Sequence
  Non-cyclic GFR-binding peptide
  MOD_RES (2), (4), (38), (39): Xaa is C or S
  MOD_RES (16), (17), (18), (19), (20): Xaa is A or G
  MOD_RES (21), (22), (23), (24): Xaa is A or G or is absent
HXGXSRVVMNVQVEKXXXXXXXXXVKAVKVSRLKTPAXXPKP

SEQ ID NO: 28049 - protein, 41 aa, Artificial Sequence
  Non-cyclic GFR-binding peptide
  MOD_RES (1), (35): Xaa is C or S
XKNHQLFNSLQEHQGQHPKIRYYVMPLPEEETPVXELGEDN

SEQ ID NO: 28050 - protein, 33 aa, Artificial Sequence
  Non-cyclic GFR-binding peptide
  MOD_RES (12), (13), (14), (15), (16): Xaa is A or G
  MOD_RES (17), (18), (19), (20): Xaa is A or G or is absent
LHDELTNSLQEXXXXXXXXXYYLVTLPELQVQT

SEQ ID NO: 28051 - protein, 45 aa, Artificial Sequence
  Non-cyclic GFR-binding peptide
  MOD_RES (2), (4), (41): Xaa is C or S
AXAXELHEELRNSLQELKPKKRVYEYYVVPLPEHHVRSPQXKVSS

SEQ ID NO: 28052 - protein, 37 aa, Artificial Sequence
  Non-cyclic GFR-binding peptide
  MOD_RES (2), (4): Xaa is C or S
  MOD_RES (16), (17), (18), (19), (20): Xaa is A or G
  MOD_RES (21), (22), (23), (24): Xaa is A or G or is absent
HXGXSRVVMNSMEGIXXXXXXXXXMIQVTINSLKTPA

SEQ ID NO: 28053 - protein, 40 aa, Artificial Sequence
  Non-cyclic GFR-binding peptide
  MOD_RES (2), (4), (38), (39): Xaa is C or S
  MOD_RES (16), (17), (18), (19), (20): Xaa is A or G
  MOD_RES (21), (22), (23), (24): Xaa is A or G or is absent
RXGXGEVVMEVTAKKXXXXXXXXXIKRMQVPRLETPVXXA

SEQ ID NO: 28054 - protein, 38 aa, Artificial Sequence
  Non-cyclic GFR-binding peptide
  MOD_RES (1), (32), (33): Xaa is C or S
XSKVVMSMEGIVKPTRGVMIQITINSLDQPVXXPSASA

SEQ ID NO: 28055 - protein, 32 aa, Artificial Sequence
  Non-cyclic GFR-binding peptide
  MOD_RES (32), (32): Xaa is C or S
GEVVMESMEGIVVKDYEDMIQMTINSLETPVX

SEQ ID NO: 28056 - protein, 35 aa, Artificial Sequence
  Non-cyclic GFR-binding peptide
  MOD_RES (2), (2): Xaa is C or S
  MOD_RES (14), (15), (16), (17), (18): Xaa is A or G
  MOD_RES (19), (20), (21), (22): Xaa is A or G or is absent
GXGEVVMEVTAKKXXXXXXXXXIKRMQVPRLETPV

SEQ ID NO: 28057 - protein, 37 aa, Artificial Sequence
  Non-cyclic GFR-binding peptide
  MOD_RES (37), (37): Xaa is C or S
  MOD_RES (13), (14), (15), (16), (17): Xaa is A or G
  MOD_RES (18), (19), (20), (21): Xaa is A or G or is absent
ALHDELTNSLQEXXXXXXXXXYYLVTLPELQVQTPRX

SEQ ID NO: 28058 - protein, 37 aa, Artificial Sequence
  Non-cyclic GFR-binding peptide
  MOD_RES (1), (3), (34), (35): Xaa is C or S
XKXSKVIMVTAKKIKPTKGIIKRIQVPRLDQSVXXPS

SEQ ID NO: 28059 - protein, 37 aa, Artificial Sequence
  Non-cyclic GFR-binding peptide
  MOD_RES (1), (33): Xaa is C or S
XSRVVMNVQVEKIVNSSDDVKAVKVSRLKTPAXTPKT

SEQ ID NO: 28060 - protein, 41 aa, Artificial Sequence
  Non-cyclic GFR-binding peptide
  MOD_RES (2), (4), (38), (39): Xaa is C or S
  MOD_RES (16), (17), (18), (19), (20): Xaa is A or G
  MOD_RES (21), (22), (23), (24): Xaa is A or G or is absent
RXGXGEVVMDSMEGIXXXXXXXXXMIQMTINSLETPVXXAK

SEQ ID NO: 28061 - protein, 34 aa, Artificial Sequence
  Non-cyclic GFR-binding peptide
  MOD_RES (2), (2): Xaa is C or S
  MOD_RES (13), (14), (15), (16), (17): Xaa is A or G
  MOD_RES (18), (19), (20), (21): Xaa is A or G or is absent
KXSRVIMVTAKKXXXXXXXXXIKRIQVPRLAQPV

SEQ ID NO: 28062 - protein, 30 aa, Artificial Sequence
  Non-cyclic GFR-binding peptide
RVVMNSMEGIIVNSSDDMIQVTINSLKTPA

SEQ ID NO: 28063 - protein, 42 aa, Artificial Sequence
  Non-cyclic GFR-binding peptide
  MOD_RES (2), (4), (38): Xaa is C or S
  MOD_RES (16), (17), (18), (19), (20): Xaa is A or G
  MOD_RES (21), (22), (23), (24): Xaa is A or G or is absent
HXGXSRVVMNVTAKKXXXXXXXXXIKRVQVPRLKTPAXTPKT

SEQ ID NO: 28064 - protein, 36 aa, Artificial Sequence
  Non-cyclic GFR-binding peptide
  MOD_RES (31), (32): Xaa is C or S
RVVMNVQVEKIVNSSDDVKAVKVSRLKTPAXXPKPV

SEQ ID NO: 28065 - protein, 38 aa, Artificial Sequence
  Non-cyclic GFR-binding peptide
  MOD_RES (1), (3), (34), (35): Xaa is C or S
XKXSKVVMVTAKKVKPTRGVIKRIQVPRLDQPVXXPSA

SEQ ID NO: 28066 - protein, 35 aa, Artificial Sequence
  Non-cyclic GFR-binding peptide
  MOD_RES (1), (34), (35): Xaa is C or S
  MOD_RES (12), (13), (14), (15), (16): Xaa is A or G
  MOD_RES (17), (18), (19), (20): Xaa is A or G or is absent
XSRVIMSMEGIXXXXXXXXXMIQITINSLAQPVXX

SEQ ID NO: 28067 - protein, 42 aa, Artificial Sequence
  Non-cyclic GFR-binding peptide
  MOD_RES (1), (3), (40): Xaa is C or S
XAXELHEELRNSLQELKPKKRVYEYYVVPLPEHHVRSPQXKV

SEQ ID NO: 28068 - protein, 41 aa, Artificial Sequence
  Non-cyclic GFR-binding peptide
  MOD_RES (1), (3), (35), (36): Xaa is C or S
XGXGEVVMDVTAKKVVKENEDIKRMQVPRLETPVXXAKPIK

SEQ ID NO: 28069 - protein, 34 aa, Artificial Sequence
  Non-cyclic GFR-binding peptide
  MOD_RES (34), (34): Xaa is C or S
  MOD_RES (12), (13), (14), (15), (16): Xaa is A or G
  MOD_RES (17), (18), (19), (20): Xaa is A or G or is absent
GEVVMEVQVEKXXXXXXXXXVKAMKVSRLETPVX

SEQ ID NO: 28070 - protein, 39 aa, Artificial Sequence
  Non-cyclic GFR-binding peptide
  MOD_RES (2), (4): Xaa is C or S
  MOD_RES (17), (18), (19), (20), (21): Xaa is A or G
  MOD_RES (22), (23), (24), (25): Xaa is A or G or is absent
AXAXELHEELRNSLQEXXXXXXXXXYYVVPLPEHHVRSP

SEQ ID NO: 28071 - protein, 44 aa, Artificial Sequence
  Non-cyclic GFR-binding peptide
  MOD_RES (2), (4), (38), (39): Xaa is C or S
  MOD_RES (16), (17), (18), (19), (20): Xaa is A or G
  MOD_RES (21), (22), (23), (24): Xaa is A or G or is absent
RXGXGEVVMEVTAKKXXXXXXXXXIKRMQVPRLETPVXXAKPIS

SEQ ID NO: 28072 - protein, 32 aa, Artificial Sequence
  Non-cyclic GFR-binding peptide
  MOD_RES (2), (2): Xaa is C or S
KXSKVIMSMEGIIKPTKGIMIQITINSLDQSV

SEQ ID NO: 28073 - protein, 40 aa, Artificial Sequence
  Non-cyclic GFR-binding peptide
  MOD_RES (2), (35), (36): Xaa is C or S
  MOD_RES (13), (14), (15), (16), (17): Xaa is A or G
  MOD_RES (18), (19), (20), (21): Xaa is A or G or is absent
KXSKVIMSMEGIXXXXXXXXXMIQITINSLDQSVXXPSAS

SEQ ID NO: 28074 - protein, 36 aa, Artificial Sequence
  Non-cyclic GFR-binding peptide
  MOD_RES (1), (3): Xaa is C or S
  MOD_RES (15), (16), (17), (18), (19): Xaa is A or G
  MOD_RES (20), (21), (22), (23): Xaa is A or G or is absent
XGXARVVMNSMEGIXXXXXXXXXMIQVTINSLQTPA

SEQ ID NO: 28075 - protein, 37 aa, Artificial Sequence
  Non-cyclic GFR-binding peptide
  MOD_RES (1), (35): Xaa is C or S
XKNHQLFNSLQEHQGQHPKIRYYVMPLPEEETPVXEL

SEQ ID NO: 28076 - protein, 37 aa, Artificial Sequence
  Non-cyclic GFR-binding peptide
  MOD_RES (2), (4), (35), (36): Xaa is C or S
SXKXSKVIMVTAKKIKPTKGIIKRIQVPRLDQSVXXP

SEQ ID NO: 28077 - protein, 35 aa, Artificial Sequence
  Non-cyclic GFR-binding peptide
  MOD_RES (2), (35): Xaa is C or S
  MOD_RES (13), (14), (15), (16), (17): Xaa is A or G
  MOD_RES (18), (19), (20), (21): Xaa is A or G or is absent
KXSKVIMVTAKKXXXXXXXXXIKRIQVPRLDQSVX

SEQ ID NO: 28078 - protein, 36 aa, Artificial Sequence
  Non-cyclic GFR-binding peptide
  MOD_RES (31), (32): Xaa is C or S
RVVMNSMEGIIVNSSDDMIQVTINSLKTPAXXPKPV

SEQ ID NO: 28079 - protein, 34 aa, Artificial Sequence
  Non-cyclic GFR-binding peptide
  MOD_RES (2), (34): Xaa is C or S
GXGEVVMDVQVEKVVKENEDVKAMKVSRLETPVX

SEQ ID NO: 28080 - protein, 38 aa, Artificial Sequence
  Non-cyclic GFR-binding peptide
  MOD_RES (2), (36), (37): Xaa is C or S
  MOD_RES (14), (15), (16), (17), (18): Xaa is A or G
  MOD_RES (19), (20), (21), (22): Xaa is A or G or is absent
GXGEVVMESMEGIXXXXXXXXXMIQMTINSLETPVXXA

SEQ ID NO: 28081 - protein, 39 aa, Artificial Sequence
  Non-cyclic GFR-binding peptide
  MOD_RES (1), (3), (35): Xaa is C or S
XGXSRVVMNSMEGIIVNSSDDMIQVTINSLKTPAXTPKT

SEQ ID NO: 28082 - protein, 37 aa, Artificial Sequence
  Non-cyclic GFR-binding peptide
  MOD_RES (1), (33), (34): Xaa is C or S
XARVVMNVTAKKIVNSSDDIKRVQVPRLQTPAXXPKP

SEQ ID NO: 28083 - protein, 40 aa, Artificial Sequence
  Non-cyclic GFR-binding peptide
  MOD_RES (2), (4), (38), (39): Xaa is C or S
  MOD_RES (16), (17), (18), (19), (20): Xaa is A or G
  MOD_RES (21), (22), (23), (24): Xaa is A or G or is absent
RXGXGEVVMDVQVEKXXXXXXXXXVKAMKVSRLETPVXXA

SEQ ID NO: 28084 - protein, 37 aa, Artificial Sequence
  Non-cyclic GFR-binding peptide
  MOD_RES (1), (32), (33): Xaa is C or S
XSKVIMSMEGIIKPTKGIMIQITINSLDQSVXXPSAS

SEQ ID NO: 28085 - protein, 40 aa, Artificial Sequence
  Non-cyclic GFR-binding peptide
  MOD_RES (37), (37): Xaa is C or S
ELHEELRNSLQELKPKKRVYEYYLVTLPEHHVRSPQXKVS

SEQ ID NO: 28086 - protein, 34 aa, Artificial Sequence
  Non-cyclic GFR-binding peptide
  MOD_RES (12), (13), (14), (15), (16): Xaa is A or G
  MOD_RES (17), (18), (19), (20): Xaa is A or G or is absent
LHDELTNSLQEXXXXXXXXXYYVVPLPELQVQTP

SEQ ID NO: 28087 - protein, 41 aa, Artificial Sequence
  Non-cyclic GFR-binding peptide
  MOD_RES (1), (35), (36): Xaa is C or S
  MOD_RES (13), (14), (15), (16), (17): Xaa is A or G
  MOD_RES (18), (19), (20), (21): Xaa is A or G or is absent
XARVVMNSMEGIXXXXXXXXXMIQVTINSLQTPAXXPKPVT

SEQ ID NO: 28088 - protein, 34 aa, Artificial Sequence
  Non-cyclic GFR-binding peptide
  MOD_RES (2), (4): Xaa is C or S
SXKXSKVIMVQVEKIKPTKGIVKAIKVSRLDQSV

SEQ ID NO: 28089 - protein, 30 aa, Artificial Sequence
  Non-cyclic GFR-binding peptide
SKVVMSMEGIVKPTRGVMIQITINSLDQPV

SEQ ID NO: 28090 - protein, 40 aa, Artificial Sequence
  Non-cyclic GFR-binding peptide
  MOD_RES (2), (4), (38): Xaa is C or S
  MOD_RES (16), (17), (18), (19), (20): Xaa is A or G
  MOD_RES (21), (22), (23), (24): Xaa is A or G or is absent
RXEXKNHQLFNSLQEXXXXXXXXXYYLMTLPEEETPVXEL

SEQ ID NO: 28091 - protein, 41 aa, Artificial Sequence
  Non-cyclic GFR-binding peptide
  MOD_RES (1), (38): Xaa is C or S
XALHDELTNSLQEFIPKKRVIEYYVVPLPELQVQTPRXQVN

SEQ ID NO: 28092 - protein, 36 aa, Artificial Sequence
  Non-cyclic GFR-binding peptide
  MOD_RES (2), (36): Xaa is C or S
  MOD_RES (14), (15), (16), (17), (18): Xaa is A or G
  MOD_RES (19), (20), (21), (22): Xaa is A or G or is absent
GXGEVVMDVTAKKXXXXXXXXXIKRMQVPRLETPVX

SEQ ID NO: 28093 - protein, 34 aa, Artificial Sequence
  Non-cyclic GFR-binding peptide
  MOD_RES (34), (34): Xaa is C or S
  MOD_RES (12), (13), (14), (15), (16): Xaa is A or G
  MOD_RES (17), (18), (19), (20): Xaa is A or G or is absent
GEVVMDSMEGIXXXXXXXXXMIQMTINSLETPVX

SEQ ID NO: 28094 - protein, 41 aa, Artificial Sequence
  Non-cyclic GFR-binding peptide
  MOD_RES (1), (3), (35), (36): Xaa is C or S
XGXGEVVMEVQVEKVVKDYEDVKAMKVSRLETPVXXAKPIS

SEQ ID NO: 28095 - protein, 36 aa, Artificial Sequence
  Non-cyclic GFR-binding peptide
  MOD_RES (1), (3): Xaa is C or S
  MOD_RES (15), (16), (17), (18), (19): Xaa is A or G
  MOD_RES (20), (21), (22), (23): Xaa is A or G or is absent
XGXGEVVMDVTAKKXXXXXXXXXIKRMQVPRLETPV

SEQ ID NO: 28096 - protein, 35 aa, Artificial Sequence
  Non-cyclic GFR-binding peptide
  MOD_RES (1), (34), (35): Xaa is C or S
  MOD_RES (12), (13), (14), (15), (16): Xaa is A or G
  MOD_RES (17), (18), (19), (20): Xaa is A or G or is absent
XSRVIMVQVEKXXXXXXXXXVKAIKVSRLAQPVXX

SEQ ID NO: 28097 - protein, 41 aa, Artificial Sequence
  Non-cyclic GFR-binding peptide
  MOD_RES (2), (4), (41): Xaa is C or S
  MOD_RES (17), (18), (19), (20), (21): Xaa is A or G
  MOD_RES (22), (23), (24), (25): Xaa is A or G or is absent
EXKXALHDELTNSLQEXXXXXXXXXYYLVTLPELQVQTPRX

SEQ ID NO: 28098 - protein, 41 aa, Artificial Sequence
  Non-cyclic GFR-binding peptide
  MOD_RES (2), (4), (41): Xaa is C or S
EXKXALHDELTNSLQEFIPKKRVIEYYVVPLPELQVQTPRX

SEQ ID NO: 28099 - protein, 38 aa, Artificial Sequence
  Non-cyclic GFR-binding peptide
  MOD_RES (2), (33), (34): Xaa is C or S
KXSKVVMSMEGIVKPTRGVMIQITINSLDQPVXXPSAS

SEQ ID NO: 28100 - protein, 35 aa, Artificial Sequence
  Non-cyclic GFR-binding peptide
  MOD_RES (32), (33): Xaa is C or S
GEVVMEVTAKKVVKDYEDIKRMQVPRLETPVXXAK

SEQ ID NO: 28101 - protein, 36 aa, Artificial Sequence
  Non-cyclic GFR-binding peptide
  MOD_RES (1), (33), (34): Xaa is C or S
XARVVMNVTAKKIVNSSDDIKRVQVPRLQTPAXXPK

SEQ ID NO: 28102 - protein, 37 aa, Artificial Sequence
  Non-cyclic GFR-binding peptide
  MOD_RES (1), (33), (34): Xaa is C or S
XGEVVMDVQVEKVVKENEDVKAMKVSRLETPVXXAKP

SEQ ID NO: 28103 - protein, 37 aa, Artificial Sequence
  Non-cyclic GFR-binding peptide
  MOD_RES (1), (3), (35), (36): Xaa is C or S
XGXARVVMNVQVEKIVNSSDDVKAVKVSRLQTPAXXP

SEQ ID NO: 28104 - protein, 37 aa, Artificial Sequence
  Non-cyclic GFR-binding peptide
  MOD_RES (2), (35), (36): Xaa is C or S
  MOD_RES (13), (14), (15), (16), (17): Xaa is A or G
  MOD_RES (18), (19), (20), (21): Xaa is A or G or is absent
KXSKVVMVTAKKXXXXXXXXXIKRIQVPRLDQPVXXP

SEQ ID NO: 28105 - protein, 36 aa, Artificial Sequence
  Non-cyclic GFR-binding peptide
  MOD_RES (1), (35): Xaa is C or S
  MOD_RES (13), (14), (15), (16), (17): Xaa is A or G
  MOD_RES (18), (19), (20), (21): Xaa is A or G or is absent
XKNHQLFNSLQEXXXXXXXXXYYLMTLPEEETPVXE

SEQ ID NO: 28106 - protein, 33 aa, Artificial Sequence
  Non-cyclic GFR-binding peptide
  MOD_RES (1), (1): Xaa is C or S
  MOD_RES (12), (13), (14), (15), (16): Xaa is A or G
  MOD_RES (17), (18), (19), (20): Xaa is A or G or is absent
XSKVVMVTAKKXXXXXXXXXIKRIQVPRLDQPV

SEQ ID NO: 28107 - protein, 36 aa, Artificial Sequence
  Non-cyclic GFR-binding peptide
  MOD_RES (2), (36): Xaa is C or S
  MOD_RES (14), (15), (16), (17), (18): Xaa is A or G
  MOD_RES (19), (20), (21), (22): Xaa is A or G or is absent
EXKNHQLFNSLQEXXXXXXXXXYYLMTLPEEETPVX

SEQ ID NO: 28108 - protein, 40 aa, Artificial Sequence
  Non-cyclic GFR-binding peptide
  MOD_RES (1), (3), (35), (36): Xaa is C or S
XGXGEVVMEVTAKKVVKDYEDIKRMQVPRLETPVXXAKPI

SEQ ID NO: 28109 - protein, 33 aa, Artificial Sequence
  Non-cyclic GFR-binding peptide
  MOD_RES (2), (2): Xaa is C or S
GXGEVVMDVTAKKVVKENEDIKRMQVPRLETPV

SEQ ID NO: 28110 - protein, 34 aa, Artificial Sequence
  Non-cyclic GFR-binding peptide
  MOD_RES (12), (13), (14), (15), (16): Xaa is A or G
  MOD_RES (17), (18), (19), (20): Xaa is A or G or is absent
LHEELRNSLQEXXXXXXXXXYYVVPLPEHHVRSP

SEQ ID NO: 28111 - protein, 40 aa, Artificial Sequence
  Non-cyclic GFR-binding peptide
  MOD_RES (1), (35): Xaa is C or S
  MOD_RES (13), (14), (15), (16), (17): Xaa is A or G
  MOD_RES (18), (19), (20), (21): Xaa is A or G or is absent
XKNHQLFNSLQEXXXXXXXXXYYVMPLPEEETPVXELGED

SEQ ID NO: 28112 - protein, 39 aa, Artificial Sequence
  Non-cyclic GFR-binding peptide
  MOD_RES (1), (38): Xaa is C or S
  MOD_RES (14), (15), (16), (17), (18): Xaa is A or G
  MOD_RES (19), (20), (21), (22): Xaa is A or G or is absent
XELHEELRNSLQEXXXXXXXXXYYLVTLPEHHVRSPQXK

SEQ ID NO: 28113 - protein, 32 aa, Artificial Sequence
  Non-cyclic GFR-binding peptide
  MOD_RES (32), (32): Xaa is C or S
ARVVMNSMEGIIVNSSDDMIQVTINSLQTPAX

SEQ ID NO: 28114 - protein, 34 aa, Artificial Sequence
  Non-cyclic GFR-binding peptide
HEELRNSLQELKPKKRVYEYYVVPLPEHHVRSPQ

SEQ ID NO: 28115 - protein, 38 aa, Artificial Sequence
  Non-cyclic GFR-binding peptide
  MOD_RES (1), (32), (33): Xaa is C or S
XSKVIMSMEGIIKPTKGIMIQITINSLDQSVXXPSASA

SEQ ID NO: 28116 - protein, 31 aa, Artificial Sequence
  Non-cyclic GFR-binding peptide
  MOD_RES (31), (31): Xaa is C or S
EVVMESMEGIVVKDYEDMIQMTINSLETPVX

SEQ ID NO: 28117 - protein, 38 aa, Artificial Sequence
  Non-cyclic GFR-binding peptide
  MOD_RES (2), (35), (36): Xaa is C or S
  MOD_RES (13), (14), (15), (16), (17): Xaa is A or G
  MOD_RES (18), (19), (20), (21): Xaa is A or G or is absent
KXSKVVMVQVEKXXXXXXXXXVKAIKVSRLDQPVXXPS

SEQ ID NO: 28118 - protein, 35 aa, Artificial Sequence
  Non-cyclic GFR-binding peptide
  MOD_RES (1), (34), (35): Xaa is C or S
  MOD_RES (12), (13), (14), (15), (16): Xaa is A or G
  MOD_RES (17), (18), (19), (20): Xaa is A or G or is absent
XSKVVMSMEGIXXXXXXXXXMIQITINSLDQPVXX

SEQ ID NO: 28119 - protein, 35 aa, Artificial Sequence
  Non-cyclic GFR-binding peptide
  MOD_RES (1), (1): Xaa is C or S
XELHEELRNSLQELKPKKRVYEYYVVPLPEHHVRS

SEQ ID NO: 28120 - protein, 41 aa, Artificial Sequence
  Non-cyclic GFR-binding peptide
  MOD_RES (1), (3), (40): Xaa is C or S
XKXALHDELTNSLQEFIPKKRVIEYYVVPLPELQVQTPRXQ

SEQ ID NO: 28121 - protein, 37 aa, Artificial Sequence
  Non-cyclic GFR-binding peptide
  MOD_RES (31), (32): Xaa is C or S
EVVMDVQVEKVVKENEDVKAMKVSRLETPVXXAKPIK

SEQ ID NO: 28122 - protein, 37 aa, Artificial Sequence
  Non-cyclic GFR-binding peptide
  MOD_RES (1), (3), (34), (35): Xaa is C or S
XKXSKVIMSMEGIIKPTKGIMIQITINSLDQSVXXPS

SEQ ID NO: 28123 - protein, 37 aa, Artificial Sequence
  Non-cyclic GFR-binding peptide
  MOD_RES (36), (36): Xaa is C or S
LHEELRNSLQELKPKKRVYEYYLVTLPEHHVRSPQXK

SEQ ID NO: 28124 - protein, 41 aa, Artificial Sequence
  Non-cyclic GFR-binding peptide
  MOD_RES (2), (4), (38), (39): Xaa is C or S
  MOD_RES (16), (17), (18), (19), (20): Xaa is A or G
  MOD_RES (21), (22), (23), (24): Xaa is A or G or is absent
RXGXGEVVMEVTAKKXXXXXXXXXIKRMQVPRLETPVXXAK

SEQ ID NO: 28125 - protein, 38 aa, Artificial Sequence
  Non-cyclic GFR-binding peptide
  MOD_RES (2), (2): Xaa is C or S
AXELHEELRNSLQELKPKKRVYEYYLVTLPEHHVRSPQ

SEQ ID NO: 28126 - protein, 38 aa, Artificial Sequence
  Non-cyclic GFR-binding peptide
  MOD_RES (33), (33): Xaa is C or S
  MOD_RES (11), (12), (13), (14), (15): Xaa is A or G
  MOD_RES (16), (17), (18), (19): Xaa is A or G or is absent
RVVMNSMEGIXXXXXXXXXMIQVTINSLKTPAXTPKTV

SEQ ID NO: 28127 - protein, 42 aa, Artificial Sequence
  Non-cyclic GFR-binding peptide
  MOD_RES (2), (36): Xaa is C or S
  MOD_RES (14), (15), (16), (17), (18): Xaa is A or G
  MOD_RES (19), (20), (21), (22): Xaa is A or G or is absent
GXSRVVMNVQVEKXXXXXXXXXVKAVKVSRLKTPAXTPKTVH

SEQ ID NO: 28128 - protein, 40 aa, Artificial Sequence
  Non-cyclic GFR-binding peptide
  MOD_RES (2), (4), (36), (37): Xaa is C or S
RXGXGEVVMEVTAKKVVKDYEDIKRMQVPRLETPVXXAKP

SEQ ID NO: 28129 - protein, 37 aa, Artificial Sequence
  Non-cyclic GFR-binding peptide
  MOD_RES (1), (3), (34), (35): Xaa is C or S
XKXSKVVMSMEGIVKPTRGVMIQITINSLDQPVXXPS

SEQ ID NO: 28130 - protein, 38 aa, Artificial Sequence
  Non-cyclic GFR-binding peptide
  MOD_RES (2), (4), (35), (36): Xaa is C or S
SXKXSKVIMVTAKKIKPTKGIIKRIQVPRLDQSVXXPS

SEQ ID NO: 28131 - protein, 36 aa, Artificial Sequence
  Non-cyclic GFR-binding peptide
  MOD_RES (31), (32): Xaa is C or S
SKVIMVTAKKIKPTKGIIKRIQVPRLDQSVXXPSAS

SEQ ID NO: 28132 - protein, 36 aa, Artificial Sequence
  Non-cyclic GFR-binding peptide
  MOD_RES (2), (4), (36): Xaa is C or S
HXGXSRVVMNVQVEKIVNSSDDVKAVKVSRLKTPAX

SEQ ID NO: 28133 - protein, 35 aa, Artificial Sequence
  Non-cyclic GFR-binding peptide
  MOD_RES (31), (32): Xaa is C or S
EVVMDVTAKKVVKENEDIKRMQVPRLETPVXXAKP

SEQ ID NO: 28134 - protein, 32 aa, Artificial Sequence
  Non-cyclic GFR-binding peptide
HEELRNSLQELKPKKRVYEYYVVPLPEHHVRS

SEQ ID NO: 28135 - protein, 36 aa, Artificial Sequence
  Non-cyclic GFR-binding peptide
  MOD_RES (34), (35): Xaa is C or S
  MOD_RES (12), (13), (14), (15), (16): Xaa is A or G
  MOD_RES (17), (18), (19), (20): Xaa is A or G or is absent
GEVVMDVQVEKXXXXXXXXXVKAMKVSRLETPVXXA

SEQ ID NO: 28136 - protein, 38 aa, Artificial Sequence
  Non-cyclic GFR-binding peptide
  MOD_RES (1), (3), (36), (37): Xaa is C or S
  MOD_RES (14), (15), (16), (17), (18): Xaa is A or G
  MOD_RES (19), (20), (21), (22): Xaa is A or G or is absent
XKXSKVIMSMEGIXXXXXXXXXMIQITINSLDQSVXXP

SEQ ID NO: 28137 - protein, 40 aa, Artificial Sequence
  Non-cyclic GFR-binding peptide
  MOD_RES (2), (36), (37): Xaa is C or S
  MOD_RES (14), (15), (16), (17), (18): Xaa is A or G
  MOD_RES (19), (20), (21), (22): Xaa is A or G or is absent
GXGEVVMDSMEGIXXXXXXXXXMIQMTINSLETPVXXAKP

SEQ ID NO: 28138 - protein, 42 aa, Artificial Sequence
  Non-cyclic GFR-binding peptide
  MOD_RES (2), (4), (41): Xaa is C or S
  MOD_RES (17), (18), (19), (20), (21): Xaa is A or G
  MOD_RES (22), (23), (24), (25): Xaa is A or G or is absent
EXKXALHDELTNSLQEXXXXXXXXXYYLVTLPELQVQTPRXQ

SEQ ID NO: 28139 - protein, 40 aa, Artificial Sequence
  Non-cyclic GFR-binding peptide
  MOD_RES (2), (4), (38): Xaa is C or S
RXEXKNHQLFNSLQEHQGQHPKIRYYVMPLPEEETPVXEL

SEQ ID NO: 28140 - protein, 36 aa, Artificial Sequence
  Non-cyclic GFR-binding peptide
  MOD_RES (1), (32), (33): Xaa is C or S
XSKVVMSMEGIVKPTRGVMIQITINSLDQPVXXPSA

SEQ ID NO: 28141 - protein, 36 aa, Artificial Sequence
  Non-cyclic GFR-binding peptide
  MOD_RES (1), (35), (36): Xaa is C or S
  MOD_RES (13), (14), (15), (16), (17): Xaa is A or G
  MOD_RES (18), (19), (20), (21): Xaa is A or G or is absent
XSRVVMNVQVEKXXXXXXXXXVKAVKVSRLKTPAXX

SEQ ID NO: 28142 - protein, 33 aa, Artificial Sequence
  Non-cyclic GFR-binding peptide
  MOD_RES (12), (13), (14), (15), (16): Xaa is A or G
  MOD_RES (17), (18), (19), (20): Xaa is A or G or is absent
GEVVMEVTAKKXXXXXXXXXIKRMQVPRLETPV

SEQ ID NO: 28143 - protein, 42 aa, Artificial Sequence
  Non-cyclic GFR-binding peptide
  MOD_RES (1), (3), (37), (38): Xaa is C or S
  MOD_RES (15), (16), (17), (18), (19): Xaa is A or G
  MOD_RES (20), (21), (22), (23): Xaa is A or G or is absent
XGXSRVVMNVTAKKXXXXXXXXXIKRVQVPRLKTPAXXPKPV

SEQ ID NO: 28144 - protein, 42 aa, Artificial Sequence
  Non-cyclic GFR-binding peptide
  MOD_RES (1), (38): Xaa is C or S
XALHDELTNSLQEFIPKKRVIEYYLVTLPELQVQTPRXQVNR

SEQ ID NO: 28145 - protein, 38 aa, Artificial Sequence
  Non-cyclic GFR-binding peptide
  MOD_RES (1), (3), (34), (35): Xaa is C or S
XKXSRVIMSMEGIVKPKRGVMIQITINSLAQPVXXPAA

SEQ ID NO: 28146 - protein, 39 aa, Artificial Sequence
  Non-cyclic GFR-binding peptide
  MOD_RES (2), (36), (37): Xaa is C or S
  MOD_RES (14), (15), (16), (17), (18): Xaa is A or G
  MOD_RES (19), (20), (21), (22): Xaa is A or G or is absent
GXGEVVMDVQVEKXXXXXXXXXVKAMKVSRLETPVXXAK

SEQ ID NO: 28147 - protein, 39 aa, Artificial Sequence
  Non-cyclic GFR-binding peptide
  MOD_RES (1), (3), (37): Xaa is C or S
  MOD_RES (15), (16), (17), (18), (19): Xaa is A or G
  MOD_RES (20), (21), (22), (23): Xaa is A or G or is absent
XGXSRVVMNVTAKKXXXXXXXXXIKRVQVPRLKTPAXTP

SEQ ID NO: 28148 - protein, 44 aa, Artificial Sequence
  Non-cyclic GFR-binding peptide
  MOD_RES (2), (4), (38): Xaa is C or S
RXEXKNHQLFNSLQEHQGQHPKIRYYVMPLPEEETPVXELGEDN

SEQ ID NO: 28149 - protein, 32 aa, Artificial Sequence
  Non-cyclic GFR-binding peptide
HEELRNSLQELKPKKRVYEYYLVTLPEHHVRS

SEQ ID NO: 28150 - protein, 33 aa, Artificial Sequence
  Non-cyclic GFR-binding peptide
  MOD_RES (32), (32): Xaa is C or S
SRVVMNSMEGIIVNSSDDMIQVTINSLKTPAXT

SEQ ID NO: 28151 - protein, 41 aa, Artificial Sequence
  Non-cyclic GFR-binding peptide
  MOD_RES (2), (4), (38), (39): Xaa is C or S
  MOD_RES (16), (17), (18), (19), (20): Xaa is A or G
  MOD_RES (21), (22), (23), (24): Xaa is A or G or is absent
HXGXSRVVMNSMEGIXXXXXXXXXMIQVTINSLKTPAXXPK

SEQ ID NO: 28152 - protein, 44 aa, Artificial Sequence
  Non-cyclic GFR-binding peptide
  MOD_RES (2), (4), (41): Xaa is C or S
  MOD_RES (17), (18), (19), (20), (21): Xaa is A or G
  MOD_RES (22), (23), (24), (25): Xaa is A or G or is absent
AXAXELHEELRNSLQEXXXXXXXXXYYVVPLPEHHVRSPQXKVS

SEQ ID NO: 28153 - protein, 36 aa, Artificial Sequence
  Non-cyclic GFR-binding peptide
  MOD_RES (31), (32): Xaa is C or S
EVVMEVTAKKVVKDYEDIKRMQVPRLETPVXXAKPI

SEQ ID NO: 28154 - protein, 38 aa, Artificial Sequence
  Non-cyclic GFR-binding peptide
  MOD_RES (1), (3), (37), (38): Xaa is C or S
  MOD_RES (15), (16), (17), (18), (19): Xaa is A or G
  MOD_RES (20), (21), (22), (23): Xaa is A or G or is absent
XGXGEVVMDSMEGIXXXXXXXXXMIQMTINSLETPVXX

SEQ ID NO: 28155 - protein, 40 aa, Artificial Sequence
  Non-cyclic GFR-binding peptide
  MOD_RES (1), (38): Xaa is C or S
XELHEELRNSLQELKPKKRVYEYYVVPLPEHHVRSPQXKV

SEQ ID NO: 28156 - protein, 37 aa, Artificial Sequence
  Non-cyclic GFR-binding peptide
  MOD_RES (2), (34): Xaa is C or S
GXSRVVMNVTAKKIVNSSDDIKRVQVPRLKTPAXTPK

SEQ ID NO: 28157 - protein, 33 aa, Artificial Sequence
  Non-cyclic GFR-binding peptide
  MOD_RES (33), (33): Xaa is C or S
  MOD_RES (11), (12), (13), (14), (15): Xaa is A or G
  MOD_RES (16), (17), (18), (19): Xaa is A or G or is absent
RVVMNVQVEKXXXXXXXXXVKAVKVSRLQTPAX

SEQ ID NO: 28158 - protein, 35 aa, Artificial Sequence
  Non-cyclic GFR-binding peptide
  MOD_RES (1), (34), (35): Xaa is C or S
  MOD_RES (12), (13), (14), (15), (16): Xaa is A or G
  MOD_RES (17), (18), (19), (20): Xaa is A or G or is absent
XSKVIMVTAKKXXXXXXXXXIKRIQVPRLDQSVXX

SEQ ID NO: 28159 - protein, 43 aa, Artificial Sequence
  Non-cyclic GFR-binding peptide
  MOD_RES (2), (4), (37), (38): Xaa is C or S
  MOD_RES (15), (16), (17), (18), (19): Xaa is A or G
  MOD_RES (20), (21), (22), (23): Xaa is A or G or is absent
SXKXSRVIMVTAKKXXXXXXXXXIKRIQVPRLAQPVXXPAASA

SEQ ID NO: 28160 - protein, 39 aa, Artificial Sequence
  Non-cyclic GFR-binding peptide
  MOD_RES (2), (4), (38), (39): Xaa is C or S
  MOD_RES (16), (17), (18), (19), (20): Xaa is A or G
  MOD_RES (21), (22), (23), (24): Xaa is A or G or is absent
HXGXSRVVMNVQVEKXXXXXXXXXVKAVKVSRLKTPAXX

SEQ ID NO: 28161 - protein, 36 aa, Artificial Sequence
  Non-cyclic GFR-binding peptide
  MOD_RES (1), (3): Xaa is C or S
  MOD_RES (15), (16), (17), (18), (19): Xaa is A or G
  MOD_RES (20), (21), (22), (23): Xaa is A or G or is absent
XEXKNHQLFNSLQEXXXXXXXXXYYLMTLPEEETPV

SEQ ID NO: 28162 - protein, 37 aa, Artificial Sequence
  Non-cyclic GFR-binding peptide
  MOD_RES (31), (32): Xaa is C or S
EVVMESMEGIVVKDYEDMIQMTINSLETPVXXAKPIS

SEQ ID NO: 28163 - protein, 36 aa, Artificial Sequence
  Non-cyclic GFR-binding peptide
  MOD_RES (34), (34): Xaa is C or S
KNHQLFNSLQEHQGQHPKIRYYVMPLPEEETPVXEL

SEQ ID NO: 28164 - protein, 36 aa, Artificial Sequence
  Non-cyclic GFR-binding peptide
  MOD_RES (33), (34): Xaa is C or S
  MOD_RES (11), (12), (13), (14), (15): Xaa is A or G
  MOD_RES (16), (17), (18), (19): Xaa is A or G or is absent
SRVIMVTAKKXXXXXXXXXIKRIQVPRLAQPVXXPA

SEQ ID NO: 28165 - protein, 38 aa, Artificial Sequence
  Non-cyclic GFR-binding peptide
  MOD_RES (2), (36): Xaa is C or S
  MOD_RES (14), (15), (16), (17), (18): Xaa is A or G
  MOD_RES (19), (20), (21), (22): Xaa is A or G or is absent
EXKNHQLFNSLQEXXXXXXXXXYYVMPLPEEETPVXEL

SEQ ID NO: 28166 - protein, 41 aa, Artificial Sequence
  Non-cyclic GFR-binding peptide
  MOD_RES (2), (36), (37): Xaa is C or S
  MOD_RES (14), (15), (16), (17), (18): Xaa is A or G
  MOD_RES (19), (20), (21), (22): Xaa is A or G or is absent
GXARVVMNSMEGIXXXXXXXXXMIQVTINSLQTPAXXPKPV

SEQ ID NO: 28167 - protein, 35 aa, Artificial Sequence
  Non-cyclic GFR-binding peptide
  MOD_RES (13), (14), (15), (16), (17): Xaa is A or G
  MOD_RES (18), (19), (20), (21): Xaa is A or G or is absent
ALHDELTNSLQEXXXXXXXXXYYVVPLPELQVQTP

SEQ ID NO: 28168 - protein, 39 aa, Artificial Sequence
  Non-cyclic GFR-binding peptide
  MOD_RES (2), (35), (36): Xaa is C or S
  MOD_RES (13), (14), (15), (16), (17): Xaa is A or G
  MOD_RES (18), (19), (20), (21): Xaa is A or G or is absent
KXSRVIMSMEGIXXXXXXXXXMIQITINSLAQPVXXPAA

SEQ ID NO: 28169 - protein, 33 aa, Artificial Sequence
  Non-cyclic GFR-binding peptide
  MOD_RES (33), (33): Xaa is C or S
  MOD_RES (11), (12), (13), (14), (15): Xaa is A or G
  MOD_RES (16), (17), (18), (19): Xaa is A or G or is absent
SKVVMVTAKKXXXXXXXXXIKRIQVPRLDQPVX

SEQ ID NO: 28170 - protein, 41 aa, Artificial Sequence
  Non-cyclic GFR-binding peptide
  MOD_RES (2), (4), (38): Xaa is C or S
  MOD_RES (16), (17), (18), (19), (20): Xaa is A or G
  MOD_RES (21), (22), (23), (24): Xaa is A or G or is absent
HXGXSRVVMNVQVEKXXXXXXXXXVKAVKVSRLKTPAXTPK

SEQ ID NO: 28171 - protein, 36 aa, Artificial Sequence
  Non-cyclic GFR-binding peptide
  MOD_RES (33), (34): Xaa is C or S
  MOD_RES (11), (12), (13), (14), (15): Xaa is A or G
  MOD_RES (16), (17), (18), (19): Xaa is A or G or is absent
SKVIMVQVEKXXXXXXXXXVKAIKVSRLDQSVXXPS

SEQ ID NO: 28172 - protein, 37 aa, Artificial Sequence
  Non-cyclic GFR-binding peptide
  MOD_RES (33), (34): Xaa is C or S
  MOD_RES (11), (12), (13), (14), (15): Xaa is A or G
  MOD_RES (16), (17), (18), (19): Xaa is A or G or is absent
EVVMDVTAKKXXXXXXXXXIKRMQVPRLETPVXXAKP

SEQ ID NO: 28173 - protein, 38 aa, Artificial Sequence
  Non-cyclic GFR-binding peptide
  MOD_RES (2), (36), (37): Xaa is C or S
  MOD_RES (14), (15), (16), (17), (18): Xaa is A or G
  MOD_RES (19), (20), (21), (22): Xaa is A or G or is absent
GXARVVMNSMEGIXXXXXXXXXMIQVTINSLQTPAXXP

SEQ ID NO: 28174 - protein, 37 aa, Artificial Sequence
  Non-cyclic GFR-binding peptide
  MOD_RES (2), (34), (35): Xaa is C or S
GXARVVMNSMEGIIVNSSDDMIQVTINSLQTPAXXPK

SEQ ID NO: 28175 - protein, 35 aa, Artificial Sequence
  Non-cyclic GFR-binding peptide
  MOD_RES (31), (32): Xaa is C or S
EVVMESMEGIVVKDYEDMIQMTINSLETPVXXAKP

SEQ ID NO: 28176 - protein, 44 aa, Artificial Sequence
  Non-cyclic GFR-binding peptide
  MOD_RES (2), (4), (38): Xaa is C or S
  MOD_RES (16), (17), (18), (19), (20): Xaa is A or G
  MOD_RES (21), (22), (23), (24): Xaa is A or G or is absent
HXGXSRVVMNSMEGIXXXXXXXXXMIQVTINSLKTPAXTPKTVH

SEQ ID NO: 28177 - protein, 38 aa, Artificial Sequence
  Non-cyclic GFR-binding peptide
  MOD_RES (1), (3), (37), (38): Xaa is C or S
  MOD_RES (15), (16), (17), (18), (19): Xaa is A or G
  MOD_RES (20), (21), (22), (23): Xaa is A or G or is absent
XGXGEVVMDVTAKKXXXXXXXXXIKRMQVPRLETPVXX

SEQ ID NO: 28178 - protein, 43 aa, Artificial Sequence
  Non-cyclic GFR-binding peptide
  MOD_RES (2), (39): Xaa is C or S
  MOD_RES (15), (16), (17), (18), (19): Xaa is A or G
  MOD_RES (20), (21), (22), (23): Xaa is A or G or is absent
AXELHEELRNSLQEXXXXXXXXXYYVVPLPEHHVRSPQXKVSS

SEQ ID NO: 28179 - protein, 38 aa, Artificial Sequence
  Non-cyclic GFR-binding peptide
  MOD_RES (1), (3): Xaa is C or S
XKXALHDELTNSLQEFIPKKRVIEYYLVTLPELQVQTP

SEQ ID NO: 28180 - protein, 38 aa, Artificial Sequence
  Non-cyclic GFR-binding peptide
  MOD_RES (2), (4), (35), (36): Xaa is C or S
SXKXSRVIMVTAKKVKPKRGVIKRIQVPRLAQPVXXPA

SEQ ID NO: 28181 - protein, 40 aa, Artificial Sequence
  Non-cyclic GFR-binding peptide
  MOD_RES (1), (3), (35): Xaa is C or S
XGXSRVVMNSMEGIIVNSSDDMIQVTINSLKTPAXTPKTV

SEQ ID NO: 28182 - protein, 34 aa, Artificial Sequence
  Non-cyclic GFR-binding peptide
  MOD_RES (2), (2): Xaa is C or S
  MOD_RES (13), (14), (15), (16), (17): Xaa is A or G
  MOD_RES (18), (19), (20), (21): Xaa is A or G or is absent
KXSRVIMVQVEKXXXXXXXXXVKAIKVSRLAQPV

SEQ ID NO: 28183 - protein, 38 aa, Artificial Sequence
  Non-cyclic GFR-binding peptide
  MOD_RES (2), (36), (37): Xaa is C or S
  MOD_RES (14), (15), (16), (17), (18): Xaa is A or G
  MOD_RES (19), (20), (21), (22): Xaa is A or G or is absent
GXGEVVMDSMEGIXXXXXXXXXMIQMTINSLETPVXXA

SEQ ID NO: 28184 - protein, 36 aa, Artificial Sequence
  Non-cyclic GFR-binding peptide
  MOD_RES (1), (1): Xaa is C or S
  MOD_RES (14), (15), (16), (17), (18): Xaa is A or G
  MOD_RES (19), (20), (21), (22): Xaa is A or G or is absent
XALHDELTNSLQEXXXXXXXXXYYLVTLPELQVQTP

SEQ ID NO: 28185 - protein, 31 aa, Artificial Sequence
  Non-cyclic GFR-binding peptide
  MOD_RES (31), (31): Xaa is C or S
SRVIMVTAKKVKPKRGVIKRIQVPRLAQPVX

SEQ ID NO: 28186 - protein, 33 aa, Artificial Sequence
  Non-cyclic GFR-binding peptide
  MOD_RES (2), (2): Xaa is C or S
GXGEVVMDVQVEKVVKENEDVKAMKVSRLETPV

SEQ ID NO: 28187 - protein, 39 aa, Artificial Sequence
  Non-cyclic GFR-binding peptide
  MOD_RES (34), (34): Xaa is C or S
  MOD_RES (12), (13), (14), (15), (16): Xaa is A or G
  MOD_RES (17), (18), (19), (20): Xaa is A or G or is absent
SRVVMNSMEGIXXXXXXXXXMIQVTINSLKTPAXTPKTV

SEQ ID NO: 28188 - protein, 41 aa, Artificial Sequence
  Non-cyclic GFR-binding peptide
  MOD_RES (1), (3), (36), (37): Xaa is C or S
  MOD_RES (14), (15), (16), (17), (18): Xaa is A or G
  MOD_RES (19), (20), (21), (22): Xaa is A or G or is absent
XKXSRVIMVQVEKXXXXXXXXXVKAIKVSRLAQPVXXPAAS

SEQ ID NO: 28189 - protein, 40 aa, Artificial Sequence
  Non-cyclic GFR-binding peptide
  MOD_RES (2), (4), (38), (39): Xaa is C or S
  MOD_RES (16), (17), (18), (19), (20): Xaa is A or G
  MOD_RES (21), (22), (23), (24): Xaa is A or G or is absent
HXGXARVVMNSMEGIXXXXXXXXXMIQVTINSLQTPAXXP

SEQ ID NO: 28190 - protein, 45 aa, Artificial Sequence
  Non-cyclic GFR-binding peptide
  MOD_RES (2), (4), (41): Xaa is C or S
  MOD_RES (17), (18), (19), (20), (21): Xaa is A or G
  MOD_RES (22), (23), (24), (25): Xaa is A or G or is absent
AXAXELHEELRNSLQEXXXXXXXXXYYLVTLPEHHVRSPQXKVSS

SEQ ID NO: 28191 - protein, 41 aa, Artificial Sequence
  Non-cyclic GFR-binding peptide
  MOD_RES (2), (4), (36), (37): Xaa is C or S
HXGXSRVVMNVTAKKIVNSSDDIKRVQVPRLKTPAXXPKPV

SEQ ID NO: 28192 - protein, 34 aa, Artificial Sequence
  Non-cyclic GFR-binding peptide
LHEELRNSLQELKPKKRVYEYYLVTLPEHHVRSP

SEQ ID NO: 28193 - protein, 39 aa, Artificial Sequence
  Non-cyclic GFR-binding peptide
  MOD_RES (2), (36), (37): Xaa is C or S
  MOD_RES (14), (15), (16), (17), (18): Xaa is A or G
  MOD_RES (19), (20), (21), (22): Xaa is A or G or is absent
GXSRVVMNVTAKKXXXXXXXXXIKRVQVPRLKTPAXXPK

SEQ ID NO: 28194 - protein, 37 aa, Artificial Sequence
  Non-cyclic GFR-binding peptide
  MOD_RES (34), (35): Xaa is C or S
  MOD_RES (12), (13), (14), (15), (16): Xaa is A or G
  MOD_RES (17), (18), (19), (20): Xaa is A or G or is absent
SRVVMNSMEGIXXXXXXXXXMIQVTINSLKTPAXXPK

SEQ ID NO: 28195 - protein, 39 aa, Artificial Sequence
  Non-cyclic GFR-binding peptide
  MOD_RES (1), (3), (36), (37): Xaa is C or S
  MOD_RES (14), (15), (16), (17), (18): Xaa is A or G
  MOD_RES (19), (20), (21), (22): Xaa is A or G or is absent
XKXSKVIMSMEGIXXXXXXXXXMIQITINSLDQSVXXPS

SEQ ID NO: 28196 - protein, 30 aa, Artificial Sequence
  Non-cyclic GFR-binding peptide
EVVMEVQVEKVVKDYEDVKAMKVSRLETPV

SEQ ID NO: 28197 - protein, 36 aa, Artificial Sequence
  Non-cyclic GFR-binding peptide
  MOD_RES (2), (2): Xaa is C or S
  MOD_RES (15), (16), (17), (18), (19): Xaa is A or G
  MOD_RES (20), (21), (22), (23): Xaa is A or G or is absent
KXALHDELTNSLQEXXXXXXXXXYYVVPLPELQVQT

SEQ ID NO: 28198 - protein, 40 aa, Artificial Sequence
  Non-cyclic GFR-binding peptide
  MOD_RES (37), (37): Xaa is C or S
ELHEELRNSLQELKPKKRVYEYYVVPLPEHHVRSPQXKVS

SEQ ID NO: 28199 - protein, 43 aa, Artificial Sequence
  Non-cyclic GFR-binding peptide
  MOD_RES (2), (4), (41): Xaa is C or S
  MOD_RES (17), (18), (19), (20), (21): Xaa is A or G
  MOD_RES (22), (23), (24), (25): Xaa is A or G or is absent
AXAXELHEELRNSLQEXXXXXXXXXYYVVPLPEHHVRSPQXKV

SEQ ID NO: 28200 - protein, 32 aa, Artificial Sequence
  Non-cyclic GFR-binding peptide
  MOD_RES (31), (32): Xaa is C or S
SRVIMVQVEKVKPKRGVVKAIKVSRLAQPVXX

SEQ ID NO: 28201 - protein, 34 aa, Artificial Sequence
  Non-cyclic GFR-binding peptide
  MOD_RES (2), (4): Xaa is C or S
SXKXSRVIMVQVEKVKPKRGVVKAIKVSRLAQPV

SEQ ID NO: 28202 - protein, 42 aa, Artificial Sequence
  Non-cyclic GFR-binding peptide
  MOD_RES (1), (38): Xaa is C or S
  MOD_RES (14), (15), (16), (17), (18): Xaa is A or G
  MOD_RES (19), (20), (21), (22): Xaa is A or G or is absent
XELHEELRNSLQEXXXXXXXXXYYVVPLPEHHVRSPQXKVSS

SEQ ID NO: 28203 - protein, 36 aa, Artificial Sequence
  Non-cyclic GFR-binding peptide
  MOD_RES (1), (33), (34): Xaa is C or S
XGEVVMDSMEGIVVKENEDMIQMTINSLETPVXXAK

SEQ ID NO: 28204 - protein, 40 aa, Artificial Sequence
  Non-cyclic GFR-binding peptide
  MOD_RES (2), (36), (37): Xaa is C or S
  MOD_RES (14), (15), (16), (17), (18): Xaa is A or G
  MOD_RES (19), (20), (21), (22): Xaa is A or G or is absent
GXGEVVMESMEGIXXXXXXXXXMIQMTINSLETPVXXAKP

SEQ ID NO: 28205 - protein, 35 aa, Artificial Sequence
  Non-cyclic GFR-binding peptide
  MOD_RES (2), (34), (35): Xaa is C or S
GXARVVMNVTAKKIVNSSDDIKRVQVPRLQTPAXX

SEQ ID NO: 28206 - protein, 41 aa, Artificial Sequence
  Non-cyclic GFR-binding peptide
  MOD_RES (2), (4), (38), (39): Xaa is C or S
  MOD_RES (16), (17), (18), (19), (20): Xaa is A or G
  MOD_RES (21), (22), (23), (24): Xaa is A or G or is absent
HXGXARVVMNVTAKKXXXXXXXXXIKRVQVPRLQTPAXXPK

SEQ ID NO: 28207 - protein, 41 aa, Artificial Sequence
  Non-cyclic GFR-binding peptide
  MOD_RES (2), (36), (37): Xaa is C or S
  MOD_RES (14), (15), (16), (17), (18): Xaa is A or G
  MOD_RES (19), (20), (21), (22): Xaa is A or G or is absent
GXSRVVMNVQVEKXXXXXXXXXVKAVKVSRLKTPAXXPKPV

SEQ ID NO: 28208 - protein, 32 aa, Artificial Sequence
  Non-cyclic GFR-binding peptide
  MOD_RES (11), (12), (13), (14), (15): Xaa is A or G
  MOD_RES (16), (17), (18), (19): Xaa is A or G or is absent
RVVMNVTAKKXXXXXXXXXIKRVQVPRLQTPA

SEQ ID NO: 28209 - protein, 41 aa, Artificial Sequence
  Non-cyclic GFR-binding peptide
  MOD_RES (1), (35), (36): Xaa is C or S
  MOD_RES (13), (14), (15), (16), (17): Xaa is A or G
  MOD_RES (18), (19), (20), (21): Xaa is A or G or is absent
XGEVVMEVQVEKXXXXXXXXXVKAMKVSRLETPVXXAKPIS

SEQ ID NO: 28210 - protein, 36 aa, Artificial Sequence
  Non-cyclic GFR-binding peptide
  MOD_RES (33), (33): Xaa is C or S
  MOD_RES (11), (12), (13), (14), (15): Xaa is A or G
  MOD_RES (16), (17), (18), (19): Xaa is A or G or is absent
RVVMNVQVEKXXXXXXXXXVKAVKVSRLKTPAXTPK

SEQ ID NO: 28211 - protein, 34 aa, Artificial Sequence
  Non-cyclic GFR-binding peptide
  MOD_RES (1), (32), (33): Xaa is C or S
XSKVIMSMEGIIKPTKGIMIQITINSLDQSVXXP

SEQ ID NO: 28212 - protein, 39 aa, Artificial Sequence
  Non-cyclic GFR-binding peptide
  MOD_RES (1), (3), (37): Xaa is C or S
  MOD_RES (15), (16), (17), (18), (19): Xaa is A or G
  MOD_RES (20), (21), (22), (23): Xaa is A or G or is absent
XEXKNHQLFNSLQEXXXXXXXXXYYLMTLPEEETPVXEL

SEQ ID NO: 28213 - protein, 33 aa, Artificial Sequence
  Non-cyclic GFR-binding peptide
  MOD_RES (2), (2): Xaa is C or S
GXSRVVMNVTAKKIVNSSDDIKRVQVPRLKTPA

SEQ ID NO: 28214 - protein, 38 aa, Artificial Sequence
  Non-cyclic GFR-binding peptide
  MOD_RES (1), (3), (37), (38): Xaa is C or S
  MOD_RES (15), (16), (17), (18), (19): Xaa is A or G
  MOD_RES (20), (21), (22), (23): Xaa is A or G or is absent
XGXGEVVMDVQVEKXXXXXXXXXVKAMKVSRLETPVXX

SEQ ID NO: 28215 - protein, 34 aa, Artificial Sequence
  Non-cyclic GFR-binding peptide
  MOD_RES (1), (3), (34): Xaa is C or S
XKXSKVIMVTAKKIKPTKGIIKRIQVPRLDQSVX

SEQ ID NO: 28216 - protein, 39 aa, Artificial Sequence
  Non-cyclic GFR-binding peptide
  MOD_RES (1), (3), (37), (38): Xaa is C or S
  MOD_RES (15), (16), (17), (18), (19): Xaa is A or G
  MOD_RES (20), (21), (22), (23): Xaa is A or G or is absent
XGXGEVVMESMEGIXXXXXXXXXMIQMTINSLETPVXXA

SEQ ID NO: 28217 - protein, 34 aa, Artificial Sequence
  Non-cyclic GFR-binding peptide
  MOD_RES (1), (34): Xaa is C or S
  MOD_RES (12), (13), (14), (15), (16): Xaa is A or G
  MOD_RES (17), (18), (19), (20): Xaa is A or G or is absent
XSRVIMVTAKKXXXXXXXXXIKRIQVPRLAQPVX

SEQ ID NO: 28218 - protein, 35 aa, Artificial Sequence
  Non-cyclic GFR-binding peptide
  MOD_RES (34), (34): Xaa is C or S
KNHQLFNSLQEHQGQHPKIRYYLMTLPEEETPVXE

SEQ ID NO: 28219 - protein, 35 aa, Artificial Sequence
  Non-cyclic GFR-binding peptide
  MOD_RES (34), (34): Xaa is C or S
  MOD_RES (12), (13), (14), (15), (16): Xaa is A or G
  MOD_RES (17), (18), (19), (20): Xaa is A or G or is absent
SRVVMNVQVEKXXXXXXXXXVKAVKVSRLKTPAXT

SEQ ID NO: 28220 - protein, 38 aa, Artificial Sequence
  Non-cyclic GFR-binding peptide
  MOD_RES (34), (35): Xaa is C or S
  MOD_RES (12), (13), (14), (15), (16): Xaa is A or G
  MOD_RES (17), (18), (19), (20): Xaa is A or G or is absent
GEVVMESMEGIXXXXXXXXXMIQMTINSLETPVXXAKP

SEQ ID NO: 28221 - protein, 38 aa, Artificial Sequence
  Non-cyclic GFR-binding peptide
  MOD_RES (35), (35): Xaa is C or S
  MOD_RES (11), (12), (13), (14), (15): Xaa is A or G
  MOD_RES (16), (17), (18), (19): Xaa is A or G or is absent
HDELTNSLQEXXXXXXXXXYYLVTLPELQVQTPRXQVN

SEQ ID NO: 28222 - protein, 36 aa, Artificial Sequence
  Non-cyclic GFR-binding peptide
  MOD_RES (1), (3), (35), (36): Xaa is C or S
XGXARVVMNVTAKKIVNSSDDIKRVQVPRLQTPAXX

SEQ ID NO: 28223 - protein, 33 aa, Artificial Sequence
  Non-cyclic GFR-binding peptide
  MOD_RES (1), (1): Xaa is C or S
  MOD_RES (12), (13), (14), (15), (16): Xaa is A or G
  MOD_RES (17), (18), (19), (20): Xaa is A or G or is absent
XSKVVMVQVEKXXXXXXXXXVKAIKVSRLDQPV

SEQ ID NO: 28224 - protein, 37 aa, Artificial Sequence
  Non-cyclic GFR-binding peptide
  MOD_RES (1), (3), (35): Xaa is C or S
XGXSRVVMNSMEGIIVNSSDDMIQVTINSLKTPAXTP

SEQ ID NO: 28225 - protein, 35 aa, Artificial Sequence
  Non-cyclic GFR-binding peptide
  MOD_RES (34), (35): Xaa is C or S
  MOD_RES (12), (13), (14), (15), (16): Xaa is A or G
  MOD_RES (17), (18), (19), (20): Xaa is A or G or is absent
SRVVMNVTAKKXXXXXXXXXIKRVQVPRLKTPAXX

SEQ ID NO: 28226 - protein, 37 aa, Artificial Sequence
  Non-cyclic GFR-binding peptide
  MOD_RES (35), (35): Xaa is C or S
HEELRNSLQELKPKKRVYEYYLVTLPEHHVRSPQXKV

SEQ ID NO: 28227 - protein, 33 aa, Artificial Sequence
  Non-cyclic GFR-binding peptide
  MOD_RES (1), (3): Xaa is C or S
XKXSKVVMVTAKKVKPTRGVIKRIQVPRLDQPV

SEQ ID NO: 28228 - protein, 41 aa, Artificial Sequence
  Non-cyclic GFR-binding peptide
  MOD_RES (1), (3), (37): Xaa is C or S
  MOD_RES (15), (16), (17), (18), (19): Xaa is A or G
  MOD_RES (20), (21), (22), (23): Xaa is A or G or is absent
XEXKNHQLFNSLQEXXXXXXXXXYYLMTLPEEETPVXELGE

SEQ ID NO: 28229 - protein, 33 aa, Artificial Sequence
  Non-cyclic GFR-binding peptide
  MOD_RES (33), (33): Xaa is C or S
  MOD_RES (11), (12), (13), (14), (15): Xaa is A or G
  MOD_RES (16), (17), (18), (19): Xaa is A or G or is absent
RVVMNSMEGIXXXXXXXXXMIQVTINSLKTPAX

SEQ ID NO: 28230 - protein, 34 aa, Artificial Sequence
  Non-cyclic GFR-binding peptide
  MOD_RES (1), (33), (34): Xaa is C or S
XGEVVMESMEGIVVKDYEDMIQMTINSLETPVXX

SEQ ID NO: 28231 - protein, 34 aa, Artificial Sequence
  Non-cyclic GFR-binding peptide
  MOD_RES (1), (3): Xaa is C or S
XGXSRVVMNVQVEKIVNSSDDVKAVKVSRLKTPA

SEQ ID NO: 28232 - protein, 37 aa, Artificial Sequence
  Non-cyclic GFR-binding peptide
  MOD_RES (1), (33), (34): Xaa is C or S
XGEVVMDVTAKKVVKENEDIKRMQVPRLETPVXXAKP

SEQ ID NO: 28233 - protein, 36 aa, Artificial Sequence
  Non-cyclic GFR-binding peptide
  MOD_RES (1), (3), (35): Xaa is C or S
XGXSRVVMNVQVEKIVNSSDDVKAVKVSRLKTPAXT

SEQ ID NO: 28234 - protein, 39 aa, Artificial Sequence
  Non-cyclic GFR-binding peptide
  MOD_RES (1), (3), (34), (35): Xaa is C or S
XKXSKVIMSMEGIIKPTKGIMIQITINSLDQSVXXPSAS

SEQ ID NO: 28235 - protein, 40 aa, Artificial Sequence
  Non-cyclic GFR-binding peptide
  MOD_RES (1), (3), (34), (35): Xaa is C or S
XKXSKVVMSMEGIVKPTRGVMIQITINSLDQPVXXPSASA

SEQ ID NO: 28236 - protein, 38 aa, Artificial Sequence
  Non-cyclic GFR-binding peptide
  MOD_RES (35), (35): Xaa is C or S
HDELTNSLQEFIPKKRVIEYYVVPLPELQVQTPRXQVN

SEQ ID NO: 28237 - protein, 42 aa, Artificial Sequence
  Non-cyclic GFR-binding peptide
  MOD_RES (2), (36): Xaa is C or S
  MOD_RES (14), (15), (16), (17), (18): Xaa is A or G
  MOD_RES (19), (20), (21), (22): Xaa is A or G or is absent
GXSRVVMNVTAKKXXXXXXXXXIKRVQVPRLKTPAXTPKTVH

SEQ ID NO: 28238 - protein, 36 aa, Artificial Sequence
  Non-cyclic GFR-binding peptide
  MOD_RES (32), (32): Xaa is C or S
SRVVMNVTAKKIVNSSDDIKRVQVPRLKTPAXTPKT

SEQ ID NO: 28239 - protein, 39 aa, Artificial Sequence
  Non-cyclic GFR-binding peptide
  MOD_RES (34), (34): Xaa is C or S
KNHQLFNSLQEHQGQHPKIRYYVMPLPEEETPVXELGED

SEQ ID NO: 28240 - protein, 37 aa, Artificial Sequence
  Non-cyclic GFR-binding peptide
  MOD_RES (1), (35): Xaa is C or S
  MOD_RES (13), (14), (15), (16), (17): Xaa is A or G
  MOD_RES (18), (19), (20), (21): Xaa is A or G or is absent
XSRVVMNVTAKKXXXXXXXXXIKRVQVPRLKTPAXTP

SEQ ID NO: 28241 - protein, 38 aa, Artificial Sequence
  Non-cyclic GFR-binding peptide
  MOD_RES (2), (4), (37), (38): Xaa is C or S
  MOD_RES (15), (16), (17), (18), (19): Xaa is A or G
  MOD_RES (20), (21), (22), (23): Xaa is A or G or is absent
SXKXSRVIMVQVEKXXXXXXXXXVKAIKVSRLAQPVXX

SEQ ID NO: 28242 - protein, 40 aa, Artificial Sequence
  Non-cyclic GFR-binding peptide
  MOD_RES (1), (34), (35): Xaa is C or S
  MOD_RES (12), (13), (14), (15), (16): Xaa is A or G
  MOD_RES (17), (18), (19), (20): Xaa is A or G or is absent
XSKVIMVTAKKXXXXXXXXXIKRIQVPRLDQSVXXPSASA

SEQ ID NO: 28243 - protein, 34 aa, Artificial Sequence
  Non-cyclic GFR-binding peptide
  MOD_RES (1), (1): Xaa is C or S
  MOD_RES (13), (14), (15), (16), (17): Xaa is A or G
  MOD_RES (18), (19), (20), (21): Xaa is A or G or is absent
XARVVMNVQVEKXXXXXXXXXVKAVKVSRLQTPA

SEQ ID NO: 28244 - protein, 38 aa, Artificial Sequence
  Non-cyclic GFR-binding peptide
  MOD_RES (33), (34): Xaa is C or S
  MOD_RES (11), (12), (13), (14), (15): Xaa is A or G
  MOD_RES (16), (17), (18), (19): Xaa is A or G or is absent
EVVMEVQVEKXXXXXXXXXVKAMKVSRLETPVXXAKPI

SEQ ID NO: 28245 - protein, 38 aa, Artificial Sequence
  Non-cyclic GFR-binding peptide
  MOD_RES (1), (33), (34): Xaa is C or S
XGEVVMDVTAKKVVKENEDIKRMQVPRLETPVXXAKPI

SEQ ID NO: 28246 - protein, 35 aa, Artificial Sequence
  Non-cyclic GFR-binding peptide
  MOD_RES (12), (13), (14), (15), (16): Xaa is A or G
  MOD_RES (17), (18), (19), (20): Xaa is A or G or is absent
LHDELTNSLQEXXXXXXXXXYYVVPLPELQVQTPR

SEQ ID NO: 28247 - protein, 34 aa, Artificial Sequence
  Non-cyclic GFR-binding peptide
  MOD_RES (33), (34): Xaa is C or S
  MOD_RES (11), (12), (13), (14), (15): Xaa is A or G
  MOD_RES (16), (17), (18), (19): Xaa is A or G or is absent
SKVVMVTAKKXXXXXXXXXIKRIQVPRLDQPVXX

SEQ ID NO: 28248 - protein, 34 aa, Artificial Sequence
  Non-cyclic GFR-binding peptide
  MOD_RES (2), (34): Xaa is C or S
GXGEVVMEVQVEKVVKDYEDVKAMKVSRLETPVX

SEQ ID NO: 28249 - protein, 37 aa, Artificial Sequence
  Non-cyclic GFR-binding peptide
  MOD_RES (32), (33): Xaa is C or S
ARVVMNSMEGIIVNSSDDMIQVTINSLQTPAXXPKPV

SEQ ID NO: 28250 - protein, 39 aa, Artificial Sequence
  Non-cyclic GFR-binding peptide
  MOD_RES (34), (35): Xaa is C or S
  MOD_RES (12), (13), (14), (15), (16): Xaa is A or G
  MOD_RES (17), (18), (19), (20): Xaa is A or G or is absent
SRVVMNVQVEKXXXXXXXXXVKAVKVSRLKTPAXXPKPV

SEQ ID NO: 28251 - protein, 40 aa, Artificial Sequence
  Non-cyclic GFR-binding peptide
  MOD_RES (1), (35), (36): Xaa is C or S
  MOD_RES (13), (14), (15), (16), (17): Xaa is A or G
  MOD_RES (18), (19), (20), (21): Xaa is A or G or is absent
XGEVVMEVQVEKXXXXXXXXXVKAMKVSRLETPVXXAKPI

SEQ ID NO: 28252 - protein, 40 aa, Artificial Sequence
  Non-cyclic GFR-binding peptide
  MOD_RES (2), (36), (37): Xaa is C or S
  MOD_RES (14), (15), (16), (17), (18): Xaa is A or G
  MOD_RES (19), (20), (21), (22): Xaa is A or G or is absent
GXSRVVMNVTAKKXXXXXXXXXIKRVQVPRLKTPAXXPKP

SEQ ID NO: 28253 - protein, 34 aa, Artificial Sequence
  Non-cyclic GFR-binding peptide
  MOD_RES (2), (34): Xaa is C or S
GXGEVVMDVTAKKVVKENEDIKRMQVPRLETPVX

SEQ ID NO: 28254 - protein, 44 aa, Artificial Sequence
  Non-cyclic GFR-binding peptide
  MOD_RES (2), (4), (38), (39): Xaa is C or S
  MOD_RES (16), (17), (18), (19), (20): Xaa is A or G
  MOD_RES (21), (22), (23), (24): Xaa is A or G or is absent
RXGXGEVVMDVQVEKXXXXXXXXXVKAMKVSRLETPVXXAKPIK

SEQ ID NO: 28255 - protein, 39 aa, Artificial Sequence
  Non-cyclic GFR-binding peptide
  MOD_RES (37), (37): Xaa is C or S
ALHDELTNSLQEFIPKKRVIEYYLVTLPELQVQTPRXQV

SEQ ID NO: 28256 - protein, 33 aa, Artificial Sequence
  Non-cyclic GFR-binding peptide
  MOD_RES (33), (33): Xaa is C or S
  MOD_RES (11), (12), (13), (14), (15): Xaa is A or G
  MOD_RES (16), (17), (18), (19): Xaa is A or G or is absent
SKVIMSMEGIXXXXXXXXXMIQITINSLDQSVX

SEQ ID NO: 28257 - protein, 32 aa, Artificial Sequence
  Non-cyclic GFR-binding peptide
  MOD_RES (1), (1): Xaa is C or S
XGEVVMEVTAKKVVKDYEDIKRMQVPRLETPV

SEQ ID NO: 28258 - protein, 35 aa, Artificial Sequence
  Non-cyclic GFR-binding peptide
  MOD_RES (1), (32), (33): Xaa is C or S
XSKVIMVQVEKIKPTKGIVKAIKVSRLDQSVXXPS

SEQ ID NO: 28259 - protein, 37 aa, Artificial Sequence
  Non-cyclic GFR-binding peptide
  MOD_RES (1), (3), (34), (35): Xaa is C or S
XKXSKVVMVTAKKVKPTRGVIKRIQVPRLDQPVXXPS

SEQ ID NO: 28260 - protein, 37 aa, Artificial Sequence
  Non-cyclic GFR-binding peptide
  MOD_RES (1), (3), (35), (36): Xaa is C or S
XGXGEVVMEVTAKKVVKDYEDIKRMQVPRLETPVXXA

SEQ ID NO: 28261 - protein, 38 aa, Artificial Sequence
  Non-cyclic GFR-binding peptide
  MOD_RES (33), (34): Xaa is C or S
  MOD_RES (11), (12), (13), (14), (15): Xaa is A or G
  MOD_RES (16), (17), (18), (19): Xaa is A or G or is absent
EVVMEVTAKKXXXXXXXXXIKRMQVPRLETPVXXAKPI

SEQ ID NO: 28262 - protein, 42 aa, Artificial Sequence
  Non-cyclic GFR-binding peptide
  MOD_RES (1), (3), (36), (37): Xaa is C or S
  MOD_RES (14), (15), (16), (17), (18): Xaa is A or G
  MOD_RES (19), (20), (21), (22): Xaa is A or G or is absent
XKXSKVIMSMEGIXXXXXXXXXMIQITINSLDQSVXXPSASA

SEQ ID NO: 28263 - protein, 42 aa, Artificial Sequence
  Non-cyclic GFR-binding peptide
  MOD_RES (2), (4), (36): Xaa is C or S
HXGXSRVVMNSMEGIIVNSSDDMIQVTINSLKTPAXTPKTVH

SEQ ID NO: 28264 - protein, 36 aa, Artificial Sequence
  Non-cyclic GFR-binding peptide
  MOD_RES (1), (3), (34), (35): Xaa is C or S
XKXSRVIMSMEGIVKPKRGVMIQITINSLAQPVXXP

SEQ ID NO: 28265 - protein, 34 aa, Artificial Sequence
  Non-cyclic GFR-binding peptide
  MOD_RES (33), (34): Xaa is C or S
  MOD_RES (11), (12), (13), (14), (15): Xaa is A or G
  MOD_RES (16), (17), (18), (19): Xaa is A or G or is absent
SKVVMVQVEKXXXXXXXXXVKAIKVSRLDQPVXX

SEQ ID NO: 28266 - protein, 36 aa, Artificial Sequence
  Non-cyclic GFR-binding peptide
  MOD_RES (1), (3), (35), (36): Xaa is C or S
XGXGEVVMEVTAKKVVKDYEDIKRMQVPRLETPVXX

SEQ ID NO: 28267 - protein, 35 aa, Artificial Sequence
  Non-cyclic GFR-binding peptide
  MOD_RES (2), (2): Xaa is C or S
  MOD_RES (14), (15), (16), (17), (18): Xaa is A or G
  MOD_RES (19), (20), (21), (22): Xaa is A or G or is absent
EXKNHQLFNSLQEXXXXXXXXXYYVMPLPEEETPV

SEQ ID NO: 28268 - protein, 41 aa, Artificial Sequence
  Non-cyclic GFR-binding peptide
  MOD_RES (1), (3), (37), (38): Xaa is C or S
  MOD_RES (15), (16), (17), (18), (19): Xaa is A or G
  MOD_RES (20), (21), (22), (23): Xaa is A or G or is absent
XGXSRVVMNVTAKKXXXXXXXXXIKRVQVPRLKTPAXXPKP

SEQ ID NO: 28269 - protein, 35 aa, Artificial Sequence
  Non-cyclic GFR-binding peptide
  MOD_RES (2), (33), (34): Xaa is C or S
KXSKVVMSMEGIVKPTRGVMIQITINSLDQPVXXP

SEQ ID NO: 28270 - protein, 30 aa, Artificial Sequence
  Non-cyclic GFR-binding peptide
SKVIMSMEGIIKPTKGIMIQITINSLDQSV

SEQ ID NO: 28271 - protein, 39 aa, Artificial Sequence
  Non-cyclic GFR-binding peptide
  MOD_RES (2), (33), (34): Xaa is C or S
KXSKVVMSMEGIVKPTRGVMIQITINSLDQPVXXPSASA

SEQ ID NO: 28272 - protein, 39 aa, Artificial Sequence
  Non-cyclic GFR-binding peptide
  MOD_RES (2), (36), (37): Xaa is C or S
  MOD_RES (14), (15), (16), (17), (18): Xaa is A or G
  MOD_RES (19), (20), (21), (22): Xaa is A or G or is absent
GXGEVVMESMEGIXXXXXXXXXMIQMTINSLETPVXXAK

SEQ ID NO: 28273 - protein, 39 aa, Artificial Sequence
  Non-cyclic GFR-binding peptide
  MOD_RES (1), (35), (36): Xaa is C or S
  MOD_RES (13), (14), (15), (16), (17): Xaa is A or G
  MOD_RES (18), (19), (20), (21): Xaa is A or G or is absent
XGEVVMESMEGIXXXXXXXXXMIQMTINSLETPVXXAKP

SEQ ID NO: 28274 - protein, 40 aa, Artificial Sequence
  Non-cyclic GFR-binding peptide
  MOD_RES (1), (38): Xaa is C or S
  MOD_RES (14), (15), (16), (17), (18): Xaa is A or G
  MOD_RES (19), (20), (21), (22): Xaa is A or G or is absent
XALHDELTNSLQEXXXXXXXXXYYVVPLPELQVQTPRXQV

SEQ ID NO: 28275 - protein, 42 aa, Artificial Sequence
  Non-cyclic GFR-binding peptide
  MOD_RES (1), (3), (36), (37): Xaa is C or S
  MOD_RES (14), (15), (16), (17), (18): Xaa is A or G
  MOD_RES (19), (20), (21), (22): Xaa is A or G or is absent
XKXSRVIMSMEGIXXXXXXXXXMIQITINSLAQPVXXPAASA

SEQ ID NO: 28276 - protein, 33 aa, Artificial Sequence
  Non-cyclic GFR-binding peptide
  MOD_RES (31), (32): Xaa is C or S
SKVIMVTAKKIKPTKGIIKRIQVPRLDQSVXXP

SEQ ID NO: 28277 - protein, 37 aa, Artificial Sequence
  Non-cyclic GFR-binding peptide
  MOD_RES (35), (35): Xaa is C or S
HEELRNSLQELKPKKRVYEYYVVPLPEHHVRSPQXKV

SEQ ID NO: 28278 - protein, 36 aa, Artificial Sequence
  Non-cyclic GFR-binding peptide
  MOD_RES (34), (34): Xaa is C or S
  MOD_RES (12), (13), (14), (15), (16): Xaa is A or G
  MOD_RES (17), (18), (19), (20): Xaa is A or G or is absent
SRVVMNVTAKKXXXXXXXXXIKRVQVPRLKTPAXTP

SEQ ID NO: 28279 - protein, 34 aa, Artificial Sequence
  Non-cyclic GFR-binding peptide
HDELTNSLQEFIPKKRVIEYYVVPLPELQVQTPR

SEQ ID NO: 28280 - protein, 34 aa, Artificial Sequence
  Non-cyclic GFR-binding peptide
  MOD_RES (31), (32): Xaa is C or S
SKVVMSMEGIVKPTRGVMIQITINSLDQPVXXPS

SEQ ID NO: 28281 - protein, 43 aa, Artificial Sequence
  Non-cyclic GFR-binding peptide
  MOD_RES (2), (4), (38), (39): Xaa is C or S
  MOD_RES (16), (17), (18), (19), (20): Xaa is A or G
  MOD_RES (21), (22), (23), (24): Xaa is A or G or is absent
RXGXGEVVMDSMEGIXXXXXXXXXMIQMTINSLETPVXXAKPI

SEQ ID NO: 28282 - protein, 41 aa, Artificial Sequence
  Non-cyclic GFR-binding peptide
  MOD_RES (1), (3), (37), (38): Xaa is C or S
  MOD_RES (15), (16), (17), (18), (19): Xaa is A or G
  MOD_RES (20), (21), (22), (23): Xaa is A or G or is absent
XGXSRVVMNSMEGIXXXXXXXXXMIQVTINSLKTPAXXPKP

SEQ ID NO: 28283 - protein, 33 aa, Artificial Sequence
  Non-cyclic GFR-binding peptide
  MOD_RES (2), (33): Xaa is C or S
KXSKVVMVQVEKVKPTRGVVKAIKVSRLDQPVX

SEQ ID NO: 28284 - protein, 39 aa, Artificial Sequence
  Non-cyclic GFR-binding peptide
  MOD_RES (2), (4), (36): Xaa is C or S
HXGXSRVVMNSMEGIIVNSSDDMIQVTINSLKTPAXTPK

SEQ ID NO: 28285 - protein, 36 aa, Artificial Sequence
  Non-cyclic GFR-binding peptide
  MOD_RES (1), (33), (34): Xaa is C or S
XSRVVMNVTAKKIVNSSDDIKRVQVPRLKTPAXXPK

SEQ ID NO: 28286 - protein, 34 aa, Artificial Sequence
  Non-cyclic GFR-binding peptide
  MOD_RES (1), (32), (33): Xaa is C or S
XSKVVMSMEGIVKPTRGVMIQITINSLDQPVXXP

SEQ ID NO: 28287 - protein, 36 aa, Artificial Sequence
  Non-cyclic GFR-binding peptide
  MOD_RES (1), (33), (34): Xaa is C or S
XARVVMNVQVEKIVNSSDDVKAVKVSRLQTPAXXPK

SEQ ID NO: 28288 - protein, 39 aa, Artificial Sequence
  Non-cyclic GFR-binding peptide
  MOD_RES (2), (4), (37), (38): Xaa is C or S
  MOD_RES (15), (16), (17), (18), (19): Xaa is A or G
  MOD_RES (20), (21), (22), (23): Xaa is A or G or is absent
SXKXSRVIMVQVEKXXXXXXXXXVKAIKVSRLAQPVXXP

SEQ ID NO: 28289 - protein, 39 aa, Artificial Sequence
  Non-cyclic GFR-binding peptide
  MOD_RES (1), (34), (35): Xaa is C or S
  MOD_RES (12), (13), (14), (15), (16): Xaa is A or G
  MOD_RES (17), (18), (19), (20): Xaa is A or G or is absent
XSKVIMSMEGIXXXXXXXXXMIQITINSLDQSVXXPSAS

SEQ ID NO: 28290 - protein, 35 aa, Artificial Sequence
  Non-cyclic GFR-binding peptide
  MOD_RES (31), (31): Xaa is C or S
RVVMNVQVEKIVNSSDDVKAVKVSRLKTPAXTPKT

SEQ ID NO: 28291 - protein, 41 aa, Artificial Sequence
  Non-cyclic GFR-binding peptide
  MOD_RES (2), (36): Xaa is C or S
  MOD_RES (14), (15), (16), (17), (18): Xaa is A or G
  MOD_RES (19), (20), (21), (22): Xaa is A or G or is absent
GXSRVVMNSMEGIXXXXXXXXXMIQVTINSLKTPAXTPKTV

SEQ ID NO: 28292 - protein, 37 aa, Artificial Sequence
  Non-cyclic GFR-binding peptide
  MOD_RES (1), (3), (35), (36): Xaa is C or S
XGXGEVVMDVTAKKVVKENEDIKRMQVPRLETPVXXA

SEQ ID NO: 28293 - protein, 43 aa, Artificial Sequence
  Non-cyclic GFR-binding peptide
  MOD_RES (2), (4), (38), (39): Xaa is C or S
  MOD_RES (16), (17), (18), (19), (20): Xaa is A or G
  MOD_RES (21), (22), (23), (24): Xaa is A or G or is absent
HXGXSRVVMNVTAKKXXXXXXXXXIKRVQVPRLKTPAXXPKPV

SEQ ID NO: 28294 - protein, 36 aa, Artificial Sequence
  Non-cyclic GFR-binding peptide
  MOD_RES (33), (34): Xaa is C or S
  MOD_RES (11), (12), (13), (14), (15): Xaa is A or G
  MOD_RES (16), (17), (18), (19): Xaa is A or G or is absent
RVVMNVTAKKXXXXXXXXXIKRVQVPRLQTPAXXPK

SEQ ID NO: 28295 - protein, 36 aa, Artificial Sequence
  Non-cyclic GFR-binding peptide
  MOD_RES (31), (32): Xaa is C or S
SKVIMVQVEKIKPTKGIVKAIKVSRLDQSVXXPSAS

SEQ ID NO: 28296 - protein, 38 aa, Artificial Sequence
  Non-cyclic GFR-binding peptide
  MOD_RES (1), (3), (34), (35): Xaa is C or S
XKXSKVVMSMEGIVKPTRGVMIQITINSLDQPVXXPSA

SEQ ID NO: 28297 - protein, 38 aa, Artificial Sequence
  Non-cyclic GFR-binding peptide
  MOD_RES (1), (3), (34), (35): Xaa is C or S
XKXSKVVMVQVEKVKPTRGVVKAIKVSRLDQPVXXPSA

SEQ ID NO: 28298 - protein, 38 aa, Artificial Sequence
  Non-cyclic GFR-binding peptide
  MOD_RES (2), (36): Xaa is C or S
  MOD_RES (14), (15), (16), (17), (18): Xaa is A or G
  MOD_RES (19), (20), (21), (22): Xaa is A or G or is absent
GXSRVVMNSMEGIXXXXXXXXXMIQVTINSLKTPAXTP

SEQ ID NO: 28299 - protein, 36 aa, Artificial Sequence
  Non-cyclic GFR-binding peptide
  MOD_RES (1), (3), (35), (36): Xaa is C or S
XGXGEVVMDVTAKKVVKENEDIKRMQVPRLETPVXX

SEQ ID NO: 28300 - protein, 33 aa, Artificial Sequence
  Non-cyclic GFR-binding peptide
  MOD_RES (1), (33): Xaa is C or S
XGEVVMEVQVEKVVKDYEDVKAMKVSRLETPVX

SEQ ID NO: 28301 - protein, 34 aa, Artificial Sequence
  Non-cyclic GFR-binding peptide
  MOD_RES (12), (13), (14), (15), (16): Xaa is A or G
  MOD_RES (17), (18), (19), (20): Xaa is A or G or is absent
LHEELRNSLQEXXXXXXXXXYYLVTLPEHHVRSP

SEQ ID NO: 28302 - protein, 33 aa, Artificial Sequence
  Non-cyclic GFR-binding peptide
  MOD_RES (2), (33): Xaa is C or S
KXSKVIMVQVEKIKPTKGIVKAIKVSRLDQSVX

SEQ ID NO: 28303 - protein, 37 aa, Artificial Sequence
  Non-cyclic GFR-binding peptide
  MOD_RES (2), (4), (37): Xaa is C or S
  MOD_RES (15), (16), (17), (18), (19): Xaa is A or G
  MOD_RES (20), (21), (22), (23): Xaa is A or G or is absent
SXKXSKVIMVQVEKXXXXXXXXXVKAIKVSRLDQSVX

SEQ ID NO: 28304 - protein, 35 aa, Artificial Sequence
  Non-cyclic GFR-binding peptide
  MOD_RES (2), (4): Xaa is C or S
RXGXGEVVMDVTAKKVVKENEDIKRMQVPRLETPV

SEQ ID NO: 28305 - protein, 39 aa, Artificial Sequence
  Non-cyclic GFR-binding peptide
  MOD_RES (2), (33), (34): Xaa is C or S
KXSKVIMSMEGIIKPTKGIMIQITINSLDQSVXXPSASA

SEQ ID NO: 28306 - protein, 36 aa, Artificial Sequence
  Non-cyclic GFR-binding peptide
  MOD_RES (1), (3), (35), (36): Xaa is C or S
XGXSRVVMNVTAKKIVNSSDDIKRVQVPRLKTPAXX

SEQ ID NO: 28307 - protein, 38 aa, Artificial Sequence
  Non-cyclic GFR-binding peptide
  MOD_RES (1), (3), (36), (37): Xaa is C or S
  MOD_RES (14), (15), (16), (17), (18): Xaa is A or G
  MOD_RES (19), (20), (21), (22): Xaa is A or G or is absent
XKXSRVIMVQVEKXXXXXXXXXVKAIKVSRLAQPVXXP

SEQ ID NO: 28308 - protein, 34 aa, Artificial Sequence
  Non-cyclic GFR-binding peptide
  MOD_RES (11), (12), (13), (14), (15): Xaa is A or G
  MOD_RES (16), (17), (18), (19): Xaa is A or G or is absent
HDELTNSLQEXXXXXXXXXYYLVTLPELQVQTPR

SEQ ID NO: 28309 - protein, 37 aa, Artificial Sequence
  Non-cyclic GFR-binding peptide
  MOD_RES (1), (33), (34): Xaa is C or S
XARVVMNSMEGIIVNSSDDMIQVTINSLQTPAXXPKP

SEQ ID NO: 28310 - protein, 40 aa, Artificial Sequence
  Non-cyclic GFR-binding peptide
  MOD_RES (1), (3), (37): Xaa is C or S
  MOD_RES (15), (16), (17), (18), (19): Xaa is A or G
  MOD_RES (20), (21), (22), (23): Xaa is A or G or is absent
XGXSRVVMNVQVEKXXXXXXXXXVKAVKVSRLKTPAXTPK

SEQ ID NO: 28311 - protein, 34 aa, Artificial Sequence
  Non-cyclic GFR-binding peptide
  MOD_RES (11), (12), (13), (14), (15): Xaa is A or G
  MOD_RES (16), (17), (18), (19): Xaa is A or G or is absent
HDELTNSLQEXXXXXXXXXYYVVPLPELQVQTPR

SEQ ID NO: 28312 - protein, 38 aa, Artificial Sequence
  Non-cyclic GFR-binding peptide
  MOD_RES (2), (34): Xaa is C or S
GXSRVVMNVQVEKIVNSSDDVKAVKVSRLKTPAXTPKT

SEQ ID NO: 28313 - protein, 40 aa, Artificial Sequence
  Non-cyclic GFR-binding peptide
  MOD_RES (1), (35), (36): Xaa is C or S
  MOD_RES (13), (14), (15), (16), (17): Xaa is A or G
  MOD_RES (18), (19), (20), (21): Xaa is A or G or is absent
XGEVVMDSMEGIXXXXXXXXXMIQMTINSLETPVXXAKPI

SEQ ID NO: 28314 - protein, 41 aa, Artificial Sequence
  Non-cyclic GFR-binding peptide
  MOD_RES (2), (4), (41): Xaa is C or S
AXAXELHEELRNSLQELKPKKRVYEYYLVTLPEHHVRSPQX

SEQ ID NO: 28315 - protein, 36 aa, Artificial Sequence
  Non-cyclic GFR-binding peptide
  MOD_RES (2), (4), (36): Xaa is C or S
RXGXGEVVMDSMEGIVVKENEDMIQMTINSLETPVX

SEQ ID NO: 28316 - protein, 37 aa, Artificial Sequence
  Non-cyclic GFR-binding peptide
  MOD_RES (37), (37): Xaa is C or S
  MOD_RES (13), (14), (15), (16), (17): Xaa is A or G
  MOD_RES (18), (19), (20), (21): Xaa is A or G or is absent
ELHEELRNSLQEXXXXXXXXXYYVVPLPEHHVRSPQX

SEQ ID NO: 28317 - protein, 37 aa, Artificial Sequence
  Non-cyclic GFR-binding peptide
  MOD_RES (2), (36), (37): Xaa is C or S
  MOD_RES (14), (15), (16), (17), (18): Xaa is A or G
  MOD_RES (19), (20), (21), (22): Xaa is A or G or is absent
GXARVVMNSMEGIXXXXXXXXXMIQVTINSLQTPAXX

SEQ ID NO: 28318 - protein, 39 aa, Artificial Sequence
  Non-cyclic GFR-binding peptide
  MOD_RES (34), (35): Xaa is C or S
  MOD_RES (12), (13), (14), (15), (16): Xaa is A or G
  MOD_RES (17), (18), (19), (20): Xaa is A or G or is absent
GEVVMESMEGIXXXXXXXXXMIQMTINSLETPVXXAKPI

SEQ ID NO: 28319 - protein, 37 aa, Artificial Sequence
  Non-cyclic GFR-binding peptide
  MOD_RES (1), (35), (36): Xaa is C or S
  MOD_RES (13), (14), (15), (16), (17): Xaa is A or G
  MOD_RES (18), (19), (20), (21): Xaa is A or G or is absent
XGEVVMEVTAKKXXXXXXXXXIKRMQVPRLETPVXXA

SEQ ID NO: 28320 - protein, 39 aa, Artificial Sequence
  Non-cyclic GFR-binding peptide
  MOD_RES (1), (35), (36): Xaa is C or S
  MOD_RES (13), (14), (15), (16), (17): Xaa is A or G
  MOD_RES (18), (19), (20), (21): Xaa is A or G or is absent
XSRVVMNVTAKKXXXXXXXXXIKRVQVPRLKTPAXXPKP

SEQ ID NO: 28321 - protein, 36 aa, Artificial Sequence
  Non-cyclic GFR-binding peptide
  MOD_RES (33), (34): Xaa is C or S
  MOD_RES (11), (12), (13), (14), (15): Xaa is A or G
  MOD_RES (16), (17), (18), (19): Xaa is A or G or is absent
SKVIMVTAKKXXXXXXXXXIKRIQVPRLDQSVXXPS

SEQ ID NO: 28322 - protein, 35 aa, Artificial Sequence
  Non-cyclic GFR-binding peptide
  MOD_RES (2), (34), (35): Xaa is C or S
GXGEVVMESMEGIVVKDYEDMIQMTINSLETPVXX

SEQ ID NO: 28323 - protein, 33 aa, Artificial Sequence
  Non-cyclic GFR-binding peptide
  MOD_RES (33), (33): Xaa is C or S
  MOD_RES (11), (12), (13), (14), (15): Xaa is A or G
  MOD_RES (16), (17), (18), (19): Xaa is A or G or is absent
RVVMNVTAKKXXXXXXXXXIKRVQVPRLQTPAX

SEQ ID NO: 28324 - protein, 39 aa, Artificial Sequence
  Non-cyclic GFR-binding peptide
  MOD_RES (2), (4), (38), (39): Xaa is C or S
  MOD_RES (16), (17), (18), (19), (20): Xaa is A or G
  MOD_RES (21), (22), (23), (24): Xaa is A or G or is absent
HXGXARVVMNVTAKKXXXXXXXXXIKRVQVPRLQTPAXX

SEQ ID NO: 28325 - protein, 40 aa, Artificial Sequence
  Non-cyclic GFR-binding peptide
  MOD_RES (1), (3), (40): Xaa is C or S
XKXALHDELTNSLQEFIPKKRVIEYYVVPLPELQVQTPRX

SEQ ID NO: 28326 - protein, 41 aa, Artificial Sequence
  Non-cyclic GFR-binding peptide
  MOD_RES (1), (3), (37), (38): Xaa is C or S
  MOD_RES (15), (16), (17), (18), (19): Xaa is A or G
  MOD_RES (20), (21), (22), (23): Xaa is A or G or is absent
XGXSRVVMNVQVEKXXXXXXXXXVKAVKVSRLKTPAXXPKP

SEQ ID NO: 28327 - protein, 35 aa, Artificial Sequence
  Non-cyclic GFR-binding peptide
  MOD_RES (2), (4): Xaa is C or S
HXGXSRVVMNVTAKKIVNSSDDIKRVQVPRLKTPA

SEQ ID NO: 28328 - protein, 36 aa, Artificial Sequence
  Non-cyclic GFR-binding peptide
  MOD_RES (34), (35): Xaa is C or S
  MOD_RES (12), (13), (14), (15), (16): Xaa is A or G
  MOD_RES (17), (18), (19), (20): Xaa is A or G or is absent
GEVVMEVQVEKXXXXXXXXXVKAMKVSRLETPVXXA

SEQ ID NO: 28329 - protein, 32 aa, Artificial Sequence
  Non-cyclic GFR-binding peptide
  MOD_RES (2), (2): Xaa is C or S
KXSKVVMSMEGIVKPTRGVMIQITINSLDQPV

SEQ ID NO: 28330 - protein, 33 aa, Artificial Sequence
  Non-cyclic GFR-binding peptide
  MOD_RES (2), (2): Xaa is C or S
GXARVVMNVTAKKIVNSSDDIKRVQVPRLQTPA

SEQ ID NO: 28331 - protein, 41 aa, Artificial Sequence
  Non-cyclic GFR-binding peptide
  MOD_RES (1), (3), (35), (36): Xaa is C or S
XGXSRVVMNVTAKKIVNSSDDIKRVQVPRLKTPAXXPKPVY

SEQ ID NO: 28332 - protein, 42 aa, Artificial Sequence
  Non-cyclic GFR-binding peptide
  MOD_RES (2), (4), (38): Xaa is C or S
  MOD_RES (16), (17), (18), (19), (20): Xaa is A or G
  MOD_RES (21), (22), (23), (24): Xaa is A or G or is absent
RXEXKNHQLFNSLQEXXXXXXXXXYYLMTLPEEETPVXELGE

SEQ ID NO: 28333 - protein, 37 aa, Artificial Sequence
  Non-cyclic GFR-binding peptide
  MOD_RES (2), (4), (36): Xaa is C or S
HXGXSRVVMNSMEGIIVNSSDDMIQVTINSLKTPAXT

SEQ ID NO: 28334 - protein, 37 aa, Artificial Sequence
  Non-cyclic GFR-binding peptide
  MOD_RES (2), (36), (37): Xaa is C or S
  MOD_RES (14), (15), (16), (17), (18): Xaa is A or G
  MOD_RES (19), (20), (21), (22): Xaa is A or G or is absent
GXGEVVMDSMEGIXXXXXXXXXMIQMTINSLETPVXX

SEQ ID NO: 28335 - protein, 39 aa, Artificial Sequence
  Non-cyclic GFR-binding peptide
  MOD_RES (1), (3), (37): Xaa is C or S
  MOD_RES (15), (16), (17), (18), (19): Xaa is A or G
  MOD_RES (20), (21), (22), (23): Xaa is A or G or is absent
XGXSRVVMNVQVEKXXXXXXXXXVKAVKVSRLKTPAXTP

SEQ ID NO: 28336 - protein, 37 aa, Artificial Sequence
  Non-cyclic GFR-binding peptide
  MOD_RES (33), (34): Xaa is C or S
  MOD_RES (11), (12), (13), (14), (15): Xaa is A or G
  MOD_RES (16), (17), (18), (19): Xaa is A or G or is absent
EVVMDVQVEKXXXXXXXXXVKAMKVSRLETPVXXAKP

SEQ ID NO: 28337 - protein, 35 aa, Artificial Sequence
  Non-cyclic GFR-binding peptide
  MOD_RES (34), (35): Xaa is C or S
  MOD_RES (12), (13), (14), (15), (16): Xaa is A or G
  MOD_RES (17), (18), (19), (20): Xaa is A or G or is absent
SRVVMNVQVEKXXXXXXXXXVKAVKVSRLKTPAXX

SEQ ID NO: 28338 - protein, 41 aa, Artificial Sequence
  Non-cyclic GFR-binding peptide
  MOD_RES (2), (35), (36): Xaa is C or S
  MOD_RES (13), (14), (15), (16), (17): Xaa is A or G
  MOD_RES (18), (19), (20), (21): Xaa is A or G or is absent
KXSKVVMVTAKKXXXXXXXXXIKRIQVPRLDQPVXXPSASA

SEQ ID NO: 28339 - protein, 33 aa, Artificial Sequence
  Non-cyclic GFR-binding peptide
  MOD_RES (2), (33): Xaa is C or S
KXSKVIMSMEGIIKPTKGIMIQITINSLDQSVX

SEQ ID NO: 28340 - protein, 39 aa, Artificial Sequence
  Non-cyclic GFR-binding peptide
  MOD_RES (37), (37): Xaa is C or S
  MOD_RES (13), (14), (15), (16), (17): Xaa is A or G
  MOD_RES (18), (19), (20), (21): Xaa is A or G or is absent
ELHEELRNSLQEXXXXXXXXXYYVVPLPEHHVRSPQXKV

SEQ ID NO: 28341 - protein, 38 aa, Artificial Sequence
  Non-cyclic GFR-binding peptide
  MOD_RES (34), (34): Xaa is C or S
KNHQLFNSLQEHQGQHPKIRYYVMPLPEEETPVXELGE

SEQ ID NO: 28342 - protein, 39 aa, Artificial Sequence
  Non-cyclic GFR-binding peptide
  MOD_RES (2), (4), (38): Xaa is C or S
  MOD_RES (16), (17), (18), (19), (20): Xaa is A or G
  MOD_RES (21), (22), (23), (24): Xaa is A or G or is absent
RXEXKNHQLFNSLQEXXXXXXXXXYYVMPLPEEETPVXE

SEQ ID NO: 28343 - protein, 36 aa, Artificial Sequence
  Non-cyclic GFR-binding peptide
  MOD_RES (35), (35): Xaa is C or S
HDELTNSLQEFIPKKRVIEYYLVTLPELQVQTPRXQ

SEQ ID NO: 28344 - protein, 40 aa, Artificial Sequence
  Non-cyclic GFR-binding peptide
  MOD_RES (2), (34), (35): Xaa is C or S
GXGEVVMDSMEGIVVKENEDMIQMTINSLETPVXXAKPIK

SEQ ID NO: 28345 - protein, 37 aa, Artificial Sequence
  Non-cyclic GFR-binding peptide
  MOD_RES (2), (33), (34): Xaa is C or S
KXSRVIMSMEGIVKPKRGVMIQITINSLAQPVXXPAA

SEQ ID NO: 28346 - protein, 34 aa, Artificial Sequence
  Non-cyclic GFR-binding peptide
  MOD_RES (1), (3): Xaa is C or S
XGXGEVVMDVQVEKVVKENEDVKAMKVSRLETPV

SEQ ID NO: 28347 - protein, 36 aa, Artificial Sequence
  Non-cyclic GFR-binding peptide
  MOD_RES (2), (2): Xaa is C or S
KXALHDELTNSLQEFIPKKRVIEYYVVPLPELQVQT

SEQ ID NO: 28348 - protein, 37 aa, Artificial Sequence
  Non-cyclic GFR-binding peptide
  MOD_RES (2), (4): Xaa is C or S
  MOD_RES (16), (17), (18), (19), (20): Xaa is A or G
  MOD_RES (21), (22), (23), (24): Xaa is A or G or is absent
RXGXGEVVMDVQVEKXXXXXXXXXVKAMKVSRLETPV

SEQ ID NO: 28349 - protein, 35 aa, Artificial Sequence
  Non-cyclic GFR-binding peptide
  MOD_RES (31), (32): Xaa is C or S
EVVMDVQVEKVVKENEDVKAMKVSRLETPVXXAKP

SEQ ID NO: 28350 - protein, 30 aa, Artificial Sequence
  Non-cyclic GFR-binding peptide
EVVMEVTAKKVVKDYEDIKRMQVPRLETPV

SEQ ID NO: 28351 - protein, 32 aa, Artificial Sequence
  Non-cyclic GFR-binding peptide
  MOD_RES (11), (12), (13), (14), (15): Xaa is A or G
  MOD_RES (16), (17), (18), (19): Xaa is A or G or is absent
SKVIMSMEGIXXXXXXXXXMIQITINSLDQSV

SEQ ID NO: 28352 - protein, 37 aa, Artificial Sequence
  Non-cyclic GFR-binding peptide
  MOD_RES (33), (34): Xaa is C or S
  MOD_RES (11), (12), (13), (14), (15): Xaa is A or G
  MOD_RES (16), (17), (18), (19): Xaa is A or G or is absent
RVVMNVTAKKXXXXXXXXXIKRVQVPRLKTPAXXPKP

SEQ ID NO: 28353 - protein, 42 aa, Artificial Sequence
  Non-cyclic GFR-binding peptide
  MOD_RES (2), (4), (36), (37): Xaa is C or S
RXGXGEVVMEVTAKKVVKDYEDIKRMQVPRLETPVXXAKPIS

SEQ ID NO: 28354 - protein, 38 aa, Artificial Sequence
  Non-cyclic GFR-binding peptide
  MOD_RES (2), (4), (37), (38): Xaa is C or S
  MOD_RES (15), (16), (17), (18), (19): Xaa is A or G
  MOD_RES (20), (21), (22), (23): Xaa is A or G or is absent
SXKXSRVIMSMEGIXXXXXXXXXMIQITINSLAQPVXX

SEQ ID NO: 28355 - protein, 35 aa, Artificial Sequence
  Non-cyclic GFR-binding peptide
  MOD_RES (1), (35): Xaa is C or S
  MOD_RES (13), (14), (15), (16), (17): Xaa is A or G
  MOD_RES (18), (19), (20), (21): Xaa is A or G or is absent
XGEVVMDSMEGIXXXXXXXXXMIQMTINSLETPVX

SEQ ID NO: 28356 - protein, 35 aa, Artificial Sequence
  Non-cyclic GFR-binding peptide
  MOD_RES (1), (35): Xaa is C or S
  MOD_RES (13), (14), (15), (16), (17): Xaa is A or G
  MOD_RES (18), (19), (20), (21): Xaa is A or G or is absent
XARVVMNVQVEKXXXXXXXXXVKAVKVSRLQTPAX

SEQ ID NO: 28357 - protein, 39 aa, Artificial Sequence
  Non-cyclic GFR-binding peptide
  MOD_RES (2), (33), (34): Xaa is C or S
KXSKVVMVQVEKVKPTRGVVKAIKVSRLDQPVXXPSASA

SEQ ID NO: 28358 - protein, 38 aa, Artificial Sequence
  Non-cyclic GFR-binding peptide
  MOD_RES (2), (34), (35): Xaa is C or S
GXARVVMNSMEGIIVNSSDDMIQVTINSLQTPAXXPKP

SEQ ID NO: 28359 - protein, 39 aa, Artificial Sequence
  Non-cyclic GFR-binding peptide
  MOD_RES (1), (35), (36): Xaa is C or S
  MOD_RES (13), (14), (15), (16), (17): Xaa is A or G
  MOD_RES (18), (19), (20), (21): Xaa is A or G or is absent
XGEVVMDVTAKKXXXXXXXXXIKRMQVPRLETPVXXAKP

SEQ ID NO: 28360 - protein, 33 aa, Artificial Sequence
  Non-cyclic GFR-binding peptide
  MOD_RES (11), (12), (13), (14), (15): Xaa is A or G
  MOD_RES (16), (17), (18), (19): Xaa is A or G or is absent
HEELRNSLQEXXXXXXXXXYYVVPLPEHHVRSP

SEQ ID NO: 28361 - protein, 40 aa, Artificial Sequence
  Non-cyclic GFR-binding peptide
  MOD_RES (2), (36), (37): Xaa is C or S
  MOD_RES (14), (15), (16), (17), (18): Xaa is A or G
  MOD_RES (19), (20), (21), (22): Xaa is A or G or is absent
GXARVVMNSMEGIXXXXXXXXXMIQVTINSLQTPAXXPKP

SEQ ID NO: 28362 - protein, 38 aa, Artificial Sequence
  Non-cyclic GFR-binding peptide
  MOD_RES (1), (34), (35): Xaa is C or S
  MOD_RES (12), (13), (14), (15), (16): Xaa is A or G
  MOD_RES (17), (18), (19), (20): Xaa is A or G or is absent
XSRVIMVQVEKXXXXXXXXXVKAIKVSRLAQPVXXPAA

SEQ ID NO: 28363 - protein, 36 aa, Artificial Sequence
  Non-cyclic GFR-binding peptide
  MOD_RES (2), (4), (35), (36): Xaa is C or S
SXKXSRVIMVTAKKVKPKRGVIKRIQVPRLAQPVXX

SEQ ID NO: 28364 - protein, 40 aa, Artificial Sequence
  Non-cyclic GFR-binding peptide
  MOD_RES (2), (4), (36): Xaa is C or S
HXGXSRVVMNVTAKKIVNSSDDIKRVQVPRLKTPAXTPKT

SEQ ID NO: 28365 - protein, 32 aa, Artificial Sequence
  Non-cyclic GFR-binding peptide
  MOD_RES (11), (12), (13), (14), (15): Xaa is A or G
  MOD_RES (16), (17), (18), (19): Xaa is A or G or is absent
RVVMNVQVEKXXXXXXXXXVKAVKVSRLQTPA

SEQ ID NO: 28366 - protein, 38 aa, Artificial Sequence
  Non-cyclic GFR-binding peptide
  MOD_RES (33), (34): Xaa is C or S
  MOD_RES (11), (12), (13), (14), (15): Xaa is A or G
  MOD_RES (16), (17), (18), (19): Xaa is A or G or is absent
RVVMNVQVEKXXXXXXXXXVKAVKVSRLQTPAXXPKPV

SEQ ID NO: 28367 - protein, 40 aa, Artificial Sequence
  Non-cyclic GFR-binding peptide
  MOD_RES (2), (35), (36): Xaa is C or S
  MOD_RES (13), (14), (15), (16), (17): Xaa is A or G
  MOD_RES (18), (19), (20), (21): Xaa is A or G or is absent
KXSKVVMVTAKKXXXXXXXXXIKRIQVPRLDQPVXXPSAS

SEQ ID NO: 28368 - protein, 40 aa, Artificial Sequence
  Non-cyclic GFR-binding peptide
  MOD_RES (1), (35): Xaa is C or S
XKNHQLFNSLQEHQGQHPKIRYYLMTLPEEETPVXELGED

SEQ ID NO: 28369 - protein, 37 aa, Artificial Sequence
  Non-cyclic GFR-binding peptide
  MOD_RES (1), (3), (36), (37): Xaa is C or S
  MOD_RES (14), (15), (16), (17), (18): Xaa is A or G
  MOD_RES (19), (20), (21), (22): Xaa is A or G or is absent
XKXSKVVMSMEGIXXXXXXXXXMIQITINSLDQPVXX

SEQ ID NO: 28370 - protein, 32 aa, Artificial Sequence
  Non-cyclic GFR-binding peptide
  MOD_RES (11), (12), (13), (14), (15): Xaa is A or G
  MOD_RES (16), (17), (18), (19): Xaa is A or G or is absent
SRVIMSMEGIXXXXXXXXXMIQITINSLAQPV

SEQ ID NO: 28371 - protein, 34 aa, Artificial Sequence
  Non-cyclic GFR-binding peptide
  MOD_RES (34), (34): Xaa is C or S
  MOD_RES (12), (13), (14), (15), (16): Xaa is A or G
  MOD_RES (17), (18), (19), (20): Xaa is A or G or is absent
SRVVMNVTAKKXXXXXXXXXIKRVQVPRLKTPAX

SEQ ID NO: 28372 - protein, 40 aa, Artificial Sequence
  Non-cyclic GFR-binding peptide
  MOD_RES (34), (35): Xaa is C or S
  MOD_RES (12), (13), (14), (15), (16): Xaa is A or G
  MOD_RES (17), (18), (19), (20): Xaa is A or G or is absent
GEVVMESMEGIXXXXXXXXXMIQMTINSLETPVXXAKPIS

SEQ ID NO: 28373 - protein, 39 aa, Artificial Sequence
  Non-cyclic GFR-binding peptide
  MOD_RES (37), (37): Xaa is C or S
  MOD_RES (13), (14), (15), (16), (17): Xaa is A or G
  MOD_RES (18), (19), (20), (21): Xaa is A or G or is absent
ALHDELTNSLQEXXXXXXXXXYYLVTLPELQVQTPRXQV

SEQ ID NO: 28374 - protein, 37 aa, Artificial Sequence
  Non-cyclic GFR-binding peptide
  MOD_RES (2), (33), (34): Xaa is C or S
KXSKVVMVTAKKVKPTRGVIKRIQVPRLDQPVXXPSA

SEQ ID NO: 28375 - protein, 42 aa, Artificial Sequence
  Non-cyclic GFR-binding peptide
  MOD_RES (2), (4), (36), (37): Xaa is C or S
RXGXGEVVMDVQVEKVVKENEDVKAMKVSRLETPVXXAKPIK

SEQ ID NO: 28376 - protein, 35 aa, Artificial Sequence
  Non-cyclic GFR-binding peptide
  MOD_RES (1), (33), (34): Xaa is C or S
XGEVVMEVTAKKVVKDYEDIKRMQVPRLETPVXXA

SEQ ID NO: 28377 - protein, 37 aa, Artificial Sequence
  Non-cyclic GFR-binding peptide
  MOD_RES (1), (3), (35): Xaa is C or S
XGXSRVVMNVQVEKIVNSSDDVKAVKVSRLKTPAXTP

SEQ ID NO: 28378 - protein, 35 aa, Artificial Sequence
  Non-cyclic GFR-binding peptide
  MOD_RES (31), (32): Xaa is C or S
SRVIMSMEGIVKPKRGVMIQITINSLAQPVXXPAA

SEQ ID NO: 28379 - protein, 34 aa, Artificial Sequence
  Non-cyclic GFR-binding peptide
  MOD_RES (2), (4): Xaa is C or S
SXKXSKVIMSMEGIIKPTKGIMIQITINSLDQSV

SEQ ID NO: 28380 - protein, 39 aa, Artificial Sequence
  Non-cyclic GFR-binding peptide
  MOD_RES (2), (4), (37), (38): Xaa is C or S
  MOD_RES (15), (16), (17), (18), (19): Xaa is A or G
  MOD_RES (20), (21), (22), (23): Xaa is A or G or is absent
SXKXSRVIMVTAKKXXXXXXXXXIKRIQVPRLAQPVXXP

SEQ ID NO: 28381 - protein, 37 aa, Artificial Sequence
  Non-cyclic GFR-binding peptide
  MOD_RES (1), (1): Xaa is C or S
XALHDELTNSLQEFIPKKRVIEYYLVTLPELQVQTPR

SEQ ID NO: 28382 - protein, 40 aa, Artificial Sequence
  Non-cyclic GFR-binding peptide
  MOD_RES (1), (35): Xaa is C or S
  MOD_RES (13), (14), (15), (16), (17): Xaa is A or G
  MOD_RES (18), (19), (20), (21): Xaa is A or G or is absent
XKNHQLFNSLQEXXXXXXXXXYYLMTLPEEETPVXELGED

SEQ ID NO: 28383 - protein, 41 aa, Artificial Sequence
  Non-cyclic GFR-binding peptide
  MOD_RES (2), (4), (36), (37): Xaa is C or S
RXGXGEVVMESMEGIVVKDYEDMIQMTINSLETPVXXAKPI

SEQ ID NO: 28384 - protein, 33 aa, Artificial Sequence
  Non-cyclic GFR-binding peptide
  MOD_RES (32), (33): Xaa is C or S
GEVVMDVTAKKVVKENEDIKRMQVPRLETPVXX

SEQ ID NO: 28385 - protein, 35 aa, Artificial Sequence
  Non-cyclic GFR-binding peptide
  MOD_RES (2), (34), (35): Xaa is C or S
GXARVVMNVQVEKIVNSSDDVKAVKVSRLQTPAXX

SEQ ID NO: 28386 - protein, 33 aa, Artificial Sequence
  Non-cyclic GFR-binding peptide
  MOD_RES (1), (32), (33): Xaa is C or S
XSKVVMSMEGIVKPTRGVMIQITINSLDQPVXX

SEQ ID NO: 28387 - protein, 38 aa, Artificial Sequence
  Non-cyclic GFR-binding peptide
  MOD_RES (34), (34): Xaa is C or S
KNHQLFNSLQEHQGQHPKIRYYLMTLPEEETPVXELGE

SEQ ID NO: 28388 - protein, 44 aa, Artificial Sequence
  Non-cyclic GFR-binding peptide
  MOD_RES (2), (4), (38): Xaa is C or S
  MOD_RES (16), (17), (18), (19), (20): Xaa is A or G
  MOD_RES (21), (22), (23), (24): Xaa is A or G or is absent
HXGXSRVVMNVQVEKXXXXXXXXXVKAVKVSRLKTPAXTPKTVH

SEQ ID NO: 28389 - protein, 37 aa, Artificial Sequence
  Non-cyclic GFR-binding peptide
  MOD_RES (1), (1): Xaa is C or S
XELHEELRNSLQELKPKKRVYEYYLVTLPEHHVRSPQ

SEQ ID NO: 28390 - protein, 39 aa, Artificial Sequence
  Non-cyclic GFR-binding peptide
  MOD_RES (1), (3), (35), (36): Xaa is C or S
XGXARVVMNVTAKKIVNSSDDIKRVQVPRLQTPAXXPKP

SEQ ID NO: 28391 - protein, 41 aa, Artificial Sequence
  Non-cyclic GFR-binding peptide
  MOD_RES (2), (4), (41): Xaa is C or S
  MOD_RES (17), (18), (19), (20), (21): Xaa is A or G
  MOD_RES (22), (23), (24), (25): Xaa is A or G or is absent
EXKXALHDELTNSLQEXXXXXXXXXYYVVPLPELQVQTPRX

SEQ ID NO: 28392 - protein, 33 aa, Artificial Sequence
  Non-cyclic GFR-binding peptide
  MOD_RES (11), (12), (13), (14), (15): Xaa is A or G
  MOD_RES (16), (17), (18), (19): Xaa is A or G or is absent
HEELRNSLQEXXXXXXXXXYYLVTLPEHHVRSP

SEQ ID NO: 28393 - protein, 37 aa, Artificial Sequence
  Non-cyclic GFR-binding peptide
  MOD_RES (2), (34): Xaa is C or S
GXSRVVMNVQVEKIVNSSDDVKAVKVSRLKTPAXTPK

SEQ ID NO: 28394 - protein, 34 aa, Artificial Sequence
  Non-cyclic GFR-binding peptide
  MOD_RES (2), (33), (34): Xaa is C or S
KXSKVIMSMEGIIKPTKGIMIQITINSLDQSVXX

SEQ ID NO: 28395 - protein, 35 aa, Artificial Sequence
  Non-cyclic GFR-binding peptide
ALHDELTNSLQEFIPKKRVIEYYVVPLPELQVQTP

SEQ ID NO: 28396 - protein, 38 aa, Artificial Sequence
  Non-cyclic GFR-binding peptide
  MOD_RES (1), (3), (35), (36): Xaa is C or S
XGXSRVVMNVTAKKIVNSSDDIKRVQVPRLKTPAXXPK

SEQ ID NO: 28397 - protein, 42 aa, Artificial Sequence
  Non-cyclic GFR-binding peptide
  MOD_RES (2), (4), (41): Xaa is C or S
  MOD_RES (17), (18), (19), (20), (21): Xaa is A or G
  MOD_RES (22), (23), (24), (25): Xaa is A or G or is absent
AXAXELHEELRNSLQEXXXXXXXXXYYVVPLPEHHVRSPQXK

SEQ ID NO: 28398 - protein, 36 aa, Artificial Sequence
  Non-cyclic GFR-binding peptide
  MOD_RES (2), (36): Xaa is C or S
  MOD_RES (14), (15), (16), (17), (18): Xaa is A or G
  MOD_RES (19), (20), (21), (22): Xaa is A or G or is absent
GXGEVVMEVQVEKXXXXXXXXXVKAMKVSRLETPVX

SEQ ID NO: 28399 - protein, 35 aa, Artificial Sequence
  Non-cyclic GFR-binding peptide
  MOD_RES (1), (35): Xaa is C or S
  MOD_RES (13), (14), (15), (16), (17): Xaa is A or G
  MOD_RES (18), (19), (20), (21): Xaa is A or G or is absent
XGEVVMEVQVEKXXXXXXXXXVKAMKVSRLETPVX

SEQ ID NO: 28400 - protein, 34 aa, Artificial Sequence
  Non-cyclic GFR-binding peptide
  MOD_RES (1), (3): Xaa is C or S
XGXGEVVMEVQVEKVVKDYEDVKAMKVSRLETPV

SEQ ID NO: 28401 - protein, 38 aa, Artificial Sequence
  Non-cyclic GFR-binding peptide
  MOD_RES (1), (3), (35), (36): Xaa is C or S
XGXARVVMNVTAKKIVNSSDDIKRVQVPRLQTPAXXPK

SEQ ID NO: 28402 - protein, 41 aa, Artificial Sequence
  Non-cyclic GFR-binding peptide
  MOD_RES (2), (36), (37): Xaa is C or S
  MOD_RES (14), (15), (16), (17), (18): Xaa is A or G
  MOD_RES (19), (20), (21), (22): Xaa is A or G or is absent
GXGEVVMESMEGIXXXXXXXXXMIQMTINSLETPVXXAKPI

SEQ ID NO: 28403 - protein, 37 aa, Artificial Sequence
  Non-cyclic GFR-binding peptide
  MOD_RES (33), (34): Xaa is C or S
  MOD_RES (11), (12), (13), (14), (15): Xaa is A or G
  MOD_RES (16), (17), (18), (19): Xaa is A or G or is absent
SKVVMVQVEKXXXXXXXXXVKAIKVSRLDQPVXXPSA

SEQ ID NO: 28404 - protein, 38 aa, Artificial Sequence
  Non-cyclic GFR-binding peptide
  MOD_RES (2), (34), (35): Xaa is C or S
GXSRVVMNSMEGIIVNSSDDMIQVTINSLKTPAXXPKP

SEQ ID NO: 28405 - protein, 38 aa, Artificial Sequence
  Non-cyclic GFR-binding peptide
  MOD_RES (2), (36), (37): Xaa is C or S
  MOD_RES (14), (15), (16), (17), (18): Xaa is A or G
  MOD_RES (19), (20), (21), (22): Xaa is A or G or is absent
GXSRVVMNVQVEKXXXXXXXXXVKAVKVSRLKTPAXXP

SEQ ID NO: 28406 - protein, 32 aa, Artificial Sequence
  Non-cyclic GFR-binding peptide
  MOD_RES (2), (2): Xaa is C or S
KXSKVVMVQVEKVKPTRGVVKAIKVSRLDQPV

SEQ ID NO: 28407 - protein, 32 aa, Artificial Sequence
  Non-cyclic GFR-binding peptide
  MOD_RES (11), (12), (13), (14), (15): Xaa is A or G
  MOD_RES (16), (17), (18), (19): Xaa is A or G or is absent
EVVMESMEGIXXXXXXXXXMIQMTINSLETPV

SEQ ID NO: 28408 - protein, 37 aa, Artificial Sequence
  Non-cyclic GFR-binding peptide
  MOD_RES (1), (32), (33): Xaa is C or S
XSKVVMVTAKKVKPTRGVIKRIQVPRLDQPVXXPSAS

SEQ ID NO: 28409 - protein, 31 aa, Artificial Sequence
  Non-cyclic GFR-binding peptide
  MOD_RES (31), (31): Xaa is C or S
SRVIMVQVEKVKPKRGVVKAIKVSRLAQPVX

SEQ ID NO: 28410 - protein, 35 aa, Artificial Sequence
  Non-cyclic GFR-binding peptide
  MOD_RES (2), (34), (35): Xaa is C or S
GXSRVVMNVQVEKIVNSSDDVKAVKVSRLKTPAXX

SEQ ID NO: 28411 - protein, 42 aa, Artificial Sequence
  Non-cyclic GFR-binding peptide
  MOD_RES (2), (39): Xaa is C or S
AXELHEELRNSLQELKPKKRVYEYYVVPLPEHHVRSPQXKVS

SEQ ID NO: 28412 - protein, 39 aa, Artificial Sequence
  Non-cyclic GFR-binding peptide
  MOD_RES (1), (3): Xaa is C or S
  MOD_RES (16), (17), (18), (19), (20): Xaa is A or G
  MOD_RES (21), (22), (23), (24): Xaa is A or G or is absent
XAXELHEELRNSLQEXXXXXXXXXYYLVTLPEHHVRSPQ

SEQ ID NO: 28413 - protein, 43 aa, Artificial Sequence
  Non-cyclic GFR-binding peptide
  MOD_RES (1), (3), (40): Xaa is C or S
XKXALHDELTNSLQEFIPKKRVIEYYLVTLPELQVQTPRXQVN

SEQ ID NO: 28414 - protein, 40 aa, Artificial Sequence
  Non-cyclic GFR-binding peptide
  MOD_RES (1), (3), (37): Xaa is C or S
  MOD_RES (15), (16), (17), (18), (19): Xaa is A or G
  MOD_RES (20), (21), (22), (23): Xaa is A or G or is absent
XGXSRVVMNVTAKKXXXXXXXXXIKRVQVPRLKTPAXTPK

SEQ ID NO: 28415 - protein, 36 aa, Artificial Sequence
  Non-cyclic GFR-binding peptide
  MOD_RES (34), (34): Xaa is C or S
  MOD_RES (12), (13), (14), (15), (16): Xaa is A or G
  MOD_RES (17), (18), (19), (20): Xaa is A or G or is absent
SRVVMNVQVEKXXXXXXXXXVKAVKVSRLKTPAXTP

SEQ ID NO: 28416 - protein, 35 aa, Artificial Sequence
  Non-cyclic GFR-binding peptide
  MOD_RES (35), (35): Xaa is C or S
  MOD_RES (11), (12), (13), (14), (15): Xaa is A or G
  MOD_RES (16), (17), (18), (19): Xaa is A or G or is absent
HEELRNSLQEXXXXXXXXXYYVVPLPEHHVRSPQX

SEQ ID NO: 28417 - protein, 39 aa, Artificial Sequence
  Non-cyclic GFR-binding peptide
  MOD_RES (2), (4), (36), (37): Xaa is C or S
HXGXSRVVMNVTAKKIVNSSDDIKRVQVPRLKTPAXXPK

SEQ ID NO: 28418 - protein, 39 aa, Artificial Sequence
  Non-cyclic GFR-binding peptide
  MOD_RES (2), (39): Xaa is C or S
  MOD_RES (15), (16), (17), (18), (19): Xaa is A or G
  MOD_RES (20), (21), (22), (23): Xaa is A or G or is absent
AXELHEELRNSLQEXXXXXXXXXYYVVPLPEHHVRSPQX

SEQ ID NO: 28419 - protein, 34 aa, Artificial Sequence
  Non-cyclic GFR-binding peptide
  MOD_RES (31), (32): Xaa is C or S
EVVMDVTAKKVVKENEDIKRMQVPRLETPVXXAK

SEQ ID NO: 28420 - protein, 37 aa, Artificial Sequence
  Non-cyclic GFR-binding peptide
  MOD_RES (1), (34), (35): Xaa is C or S
  MOD_RES (12), (13), (14), (15), (16): Xaa is A or G
  MOD_RES (17), (18), (19), (20): Xaa is A or G or is absent
XSRVIMVQVEKXXXXXXXXXVKAIKVSRLAQPVXXPA

SEQ ID NO: 28421 - protein, 35 aa, Artificial Sequence
  Non-cyclic GFR-binding peptide
  MOD_RES (35), (35): Xaa is C or S
  MOD_RES (11), (12), (13), (14), (15): Xaa is A or G
  MOD_RES (16), (17), (18), (19): Xaa is A or G or is absent
HEELRNSLQEXXXXXXXXXYYLVTLPEHHVRSPQX

SEQ ID NO: 28422 - protein, 41 aa, Artificial Sequence
  Non-cyclic GFR-binding peptide
  MOD_RES (1), (3), (35), (36): Xaa is C or S
XGXGEVVMESMEGIVVKDYEDMIQMTINSLETPVXXAKPIS

SEQ ID NO: 28423 - protein, 37 aa, Artificial Sequence
  Non-cyclic GFR-binding peptide
  MOD_RES (33), (34): Xaa is C or S
  MOD_RES (11), (12), (13), (14), (15): Xaa is A or G
  MOD_RES (16), (17), (18), (19): Xaa is A or G or is absent
SKVVMVTAKKXXXXXXXXXIKRIQVPRLDQPVXXPSA

SEQ ID NO: 28424 - protein, 33 aa, Artificial Sequence
  Non-cyclic GFR-binding peptide
  MOD_RES (12), (13), (14), (15), (16): Xaa is A or G
  MOD_RES (17), (18), (19), (20): Xaa is A or G or is absent
LHDELTNSLQEXXXXXXXXXYYVVPLPELQVQT

SEQ ID NO: 28425 - protein, 31 aa, Artificial Sequence
  Non-cyclic GFR-binding peptide
  MOD_RES (1), (1): Xaa is C or S
XSRVIMVTAKKVKPKRGVIKRIQVPRLAQPV

SEQ ID NO: 28426 - protein, 35 aa, Artificial Sequence
  Non-cyclic GFR-binding peptide
  MOD_RES (1), (3), (34), (35): Xaa is C or S
XKXSRVIMSMEGIVKPKRGVMIQITINSLAQPVXX

SEQ ID NO: 28427 - protein, 39 aa, Artificial Sequence
  Non-cyclic GFR-binding peptide
  MOD_RES (34), (35): Xaa is C or S
  MOD_RES (12), (13), (14), (15), (16): Xaa is A or G
  MOD_RES (17), (18), (19), (20): Xaa is A or G or is absent
SRVVMNVTAKKXXXXXXXXXIKRVQVPRLKTPAXXPKPV

SEQ ID NO: 28428 - protein, 36 aa, Artificial Sequence
  Non-cyclic GFR-binding peptide
  MOD_RES (34), (35): Xaa is C or S
  MOD_RES (12), (13), (14), (15), (16): Xaa is A or G
  MOD_RES (17), (18), (19), (20): Xaa is A or G or is absent
GEVVMEVTAKKXXXXXXXXXIKRMQVPRLETPVXXA

SEQ ID NO: 28429 - protein, 40 aa, Artificial Sequence
  Non-cyclic GFR-binding peptide
  MOD_RES (34), (35): Xaa is C or S
  MOD_RES (12), (13), (14), (15), (16): Xaa is A or G
  MOD_RES (17), (18), (19), (20): Xaa is A or G or is absent
GEVVMDSMEGIXXXXXXXXXMIQMTINSLETPVXXAKPIK

SEQ ID NO: 28430 - protein, 33 aa, Artificial Sequence
  Non-cyclic GFR-binding peptide
  MOD_RES (31), (32): Xaa is C or S
SKVIMVQVEKIKPTKGIVKAIKVSRLDQSVXXP

SEQ ID NO: 28431 - protein, 38 aa, Artificial Sequence
  Non-cyclic GFR-binding peptide
  MOD_RES (2), (33), (34): Xaa is C or S
KXSKVIMSMEGIIKPTKGIMIQITINSLDQSVXXPSAS

SEQ ID NO: 28432 - protein, 39 aa, Artificial Sequence
  Non-cyclic GFR-binding peptide
  MOD_RES (1), (3), (37), (38): Xaa is C or S
  MOD_RES (15), (16), (17), (18), (19): Xaa is A or G
  MOD_RES (20), (21), (22), (23): Xaa is A or G or is absent
XGXGEVVMEVTAKKXXXXXXXXXIKRMQVPRLETPVXXA

SEQ ID NO: 28433 - protein, 33 aa, Artificial Sequence
  Non-cyclic GFR-binding peptide
  MOD_RES (1), (1): Xaa is C or S
  MOD_RES (12), (13), (14), (15), (16): Xaa is A or G
  MOD_RES (17), (18), (19), (20): Xaa is A or G or is absent
XSRVIMVQVEKXXXXXXXXXVKAIKVSRLAQPV

SEQ ID NO: 28434 - protein, 31 aa, Artificial Sequence
  Non-cyclic GFR-binding peptide
  MOD_RES (31), (31): Xaa is C or S
EVVMDVTAKKVVKENEDIKRMQVPRLETPVX

SEQ ID NO: 28435 - protein, 39 aa, Artificial Sequence
  Non-cyclic GFR-binding peptide
  MOD_RES (36), (36): Xaa is C or S
  MOD_RES (12), (13), (14), (15), (16): Xaa is A or G
  MOD_RES (17), (18), (19), (20): Xaa is A or G or is absent
LHDELTNSLQEXXXXXXXXXYYVVPLPELQVQTPRXQVN

SEQ ID NO: 28436 - protein, 36 aa, Artificial Sequence
  Non-cyclic GFR-binding peptide
  MOD_RES (1), (3), (36): Xaa is C or S
  MOD_RES (14), (15), (16), (17), (18): Xaa is A or G
  MOD_RES (19), (20), (21), (22): Xaa is A or G or is absent
XKXSKVIMVTAKKXXXXXXXXXIKRIQVPRLDQSVX

SEQ ID NO: 28437 - protein, 34 aa, Artificial Sequence
  Non-cyclic GFR-binding peptide
  MOD_RES (32), (32): Xaa is C or S
SRVVMNVQVEKIVNSSDDVKAVKVSRLKTPAXTP

SEQ ID NO: 28438 - protein, 37 aa, Artificial Sequence
  Non-cyclic GFR-binding peptide
  MOD_RES (2), (4), (36), (37): Xaa is C or S
RXGXGEVVMESMEGIVVKDYEDMIQMTINSLETPVXX

SEQ ID NO: 28439 - protein, 38 aa, Artificial Sequence
  Non-cyclic GFR-binding peptide
  MOD_RES (2), (4), (38): Xaa is C or S
  MOD_RES (16), (17), (18), (19), (20): Xaa is A or G
  MOD_RES (21), (22), (23), (24): Xaa is A or G or is absent
HXGXSRVVMNVTAKKXXXXXXXXXIKRVQVPRLKTPAX

SEQ ID NO: 28440 - protein, 36 aa, Artificial Sequence
  Non-cyclic GFR-binding peptide
  MOD_RES (1), (3): Xaa is C or S
  MOD_RES (15), (16), (17), (18), (19): Xaa is A or G
  MOD_RES (20), (21), (22), (23): Xaa is A or G or is absent
XEXKNHQLFNSLQEXXXXXXXXXYYVMPLPEEETPV

SEQ ID NO: 28441 - protein, 40 aa, Artificial Sequence
  Non-cyclic GFR-binding peptide
  MOD_RES (1), (3), (36), (37): Xaa is C or S
  MOD_RES (14), (15), (16), (17), (18): Xaa is A or G
  MOD_RES (19), (20), (21), (22): Xaa is A or G or is absent
XKXSKVIMSMEGIXXXXXXXXXMIQITINSLDQSVXXPSA

SEQ ID NO: 28442 - protein, 34 aa, Artificial Sequence
  Non-cyclic GFR-binding peptide
ELHEELRNSLQELKPKKRVYEYYLVTLPEHHVRS

SEQ ID NO: 28443 - protein, 36 aa, Artificial Sequence
  Non-cyclic GFR-binding peptide
  MOD_RES (32), (33): Xaa is C or S
ARVVMNVQVEKIVNSSDDVKAVKVSRLQTPAXXPKP

SEQ ID NO: 28444 - protein, 39 aa, Artificial Sequence
  Non-cyclic GFR-binding peptide
  MOD_RES (2), (4), (37), (38): Xaa is C or S
  MOD_RES (15), (16), (17), (18), (19): Xaa is A or G
  MOD_RES (20), (21), (22), (23): Xaa is A or G or is absent
SXKXSRVIMSMEGIXXXXXXXXXMIQITINSLAQPVXXP

SEQ ID NO: 28445 - protein, 35 aa, Artificial Sequence
  Non-cyclic GFR-binding peptide
  MOD_RES (32), (33): Xaa is C or S
SRVVMNSMEGIIVNSSDDMIQVTINSLKTPAXXPK

SEQ ID NO: 28446 - protein, 37 aa, Artificial Sequence
  Non-cyclic GFR-binding peptide
  MOD_RES (1), (32), (33): Xaa is C or S
XSKVIMVTAKKIKPTKGIIKRIQVPRLDQSVXXPSAS

SEQ ID NO: 28447 - protein, 39 aa, Artificial Sequence
  Non-cyclic GFR-binding peptide
  MOD_RES (1), (3), (35), (36): Xaa is C or S
XGXSRVVMNVTAKKIVNSSDDIKRVQVPRLKTPAXXPKP

SEQ ID NO: 28448 - protein, 33 aa, Artificial Sequence
  Non-cyclic GFR-binding peptide
  MOD_RES (32), (33): Xaa is C or S
SRVVMNVTAKKIVNSSDDIKRVQVPRLKTPAXX

SEQ ID NO: 28449 - protein, 38 aa, Artificial Sequence
  Non-cyclic GFR-binding peptide
  MOD_RES (2), (33), (34): Xaa is C or S
KXSKVIMVQVEKIKPTKGIVKAIKVSRLDQSVXXPSAS

SEQ ID NO: 28450 - protein, 34 aa, Artificial Sequence
  Non-cyclic GFR-binding peptide
  MOD_RES (1), (32), (33): Xaa is C or S
XSRVIMVQVEKVKPKRGVVKAIKVSRLAQPVXXP

SEQ ID NO: 28451 - protein, 37 aa, Artificial Sequence
  Non-cyclic GFR-binding peptide
  MOD_RES (32), (33): Xaa is C or S
GEVVMESMEGIVVKDYEDMIQMTINSLETPVXXAKPI

SEQ ID NO: 28452 - protein, 37 aa, Artificial Sequence
  Non-cyclic GFR-binding peptide
  MOD_RES (1), (3), (34), (35): Xaa is C or S
XKXSKVVMVQVEKVKPTRGVVKAIKVSRLDQPVXXPS

SEQ ID NO: 28453 - protein, 37 aa, Artificial Sequence
  Non-cyclic GFR-binding peptide
  MOD_RES (2), (34), (35): Xaa is C or S
GXGEVVMDSMEGIVVKENEDMIQMTINSLETPVXXAK

SEQ ID NO: 28454 - protein, 39 aa, Artificial Sequence
  Non-cyclic GFR-binding peptide
  MOD_RES (2), (34): Xaa is C or S
GXSRVVMNSMEGIIVNSSDDMIQVTINSLKTPAXTPKTV

SEQ ID NO: 28455 - protein, 37 aa, Artificial Sequence
  Non-cyclic GFR-binding peptide
  MOD_RES (1), (3), (34), (35): Xaa is C or S
XKXSKVIMVQVEKIKPTKGIVKAIKVSRLDQSVXXPS

SEQ ID NO: 28456 - protein, 35 aa, Artificial Sequence
  Non-cyclic GFR-binding peptide
  MOD_RES (2), (2): Xaa is C or S
EXKNHQLFNSLQEHQGQHPKIRYYVMPLPEEETPV

SEQ ID NO: 28457 - protein, 35 aa, Artificial Sequence
  Non-cyclic GFR-binding peptide
  MOD_RES (2), (33), (34): Xaa is C or S
KXSKVIMVTAKKIKPTKGIIKRIQVPRLDQSVXXP

SEQ ID NO: 28458 - protein, 41 aa, Artificial Sequence
  Non-cyclic GFR-binding peptide
  MOD_RES (1), (35), (36): Xaa is C or S
  MOD_RES (13), (14), (15), (16), (17): Xaa is A or G
  MOD_RES (18), (19), (20), (21): Xaa is A or G or is absent
XSRVVMNVTAKKXXXXXXXXXIKRVQVPRLKTPAXXPKPVY

SEQ ID NO: 28459 - protein, 34 aa, Artificial Sequence
  Non-cyclic GFR-binding peptide
  MOD_RES (31), (32): Xaa is C or S
SKVIMSMEGIIKPTKGIMIQITINSLDQSVXXPS

SEQ ID NO: 28460 - protein, 38 aa, Artificial Sequence
  Non-cyclic GFR-binding peptide
  MOD_RES (1), (32), (33): Xaa is C or S
XSKVIMVTAKKIKPTKGIIKRIQVPRLDQSVXXPSASA

SEQ ID NO: 28461 - protein, 43 aa, Artificial Sequence
  Non-cyclic GFR-binding peptide
  MOD_RES (2), (4), (37), (38): Xaa is C or S
  MOD_RES (15), (16), (17), (18), (19): Xaa is A or G
  MOD_RES (20), (21), (22), (23): Xaa is A or G or is absent
SXKXSKVVMVQVEKXXXXXXXXXVKAIKVSRLDQPVXXPSASA

SEQ ID NO: 28462 - protein, 38 aa, Artificial Sequence
  Non-cyclic GFR-binding peptide
  MOD_RES (2), (4), (36), (37): Xaa is C or S
RXGXGEVVMEVQVEKVVKDYEDVKAMKVSRLETPVXXA

SEQ ID NO: 28463 - protein, 39 aa, Artificial Sequence
  Non-cyclic GFR-binding peptide
  MOD_RES (2), (4), (36): Xaa is C or S
HXGXSRVVMNVQVEKIVNSSDDVKAVKVSRLKTPAXTPK

SEQ ID NO: 28464 - protein, 39 aa, Artificial Sequence
  Non-cyclic GFR-binding peptide
  MOD_RES (1), (3), (36), (37): Xaa is C or S
  MOD_RES (14), (15), (16), (17), (18): Xaa is A or G
  MOD_RES (19), (20), (21), (22): Xaa is A or G or is absent
XKXSRVIMSMEGIXXXXXXXXXMIQITINSLAQPVXXPA

SEQ ID NO: 28465 - protein, 37 aa, Artificial Sequence
  Non-cyclic GFR-binding peptide
  MOD_RES (2), (33), (34): Xaa is C or S
KXSRVIMVQVEKVKPKRGVVKAIKVSRLAQPVXXPAA

SEQ ID NO: 28466 - protein, 31 aa, Artificial Sequence
  Non-cyclic GFR-binding peptide
GEVVMEVTAKKVVKDYEDIKRMQVPRLETPV

SEQ ID NO: 28467 - protein, 38 aa, Artificial Sequence
  Non-cyclic GFR-binding peptide
  MOD_RES (2), (34): Xaa is C or S
GXSRVVMNVTAKKIVNSSDDIKRVQVPRLKTPAXTPKT

SEQ ID NO: 28468 - protein, 36 aa, Artificial Sequence
  Non-cyclic GFR-binding peptide
  MOD_RES (31), (32): Xaa is C or S
RVVMNSMEGIIVNSSDDMIQVTINSLQTPAXXPKPV

SEQ ID NO: 28469 - protein, 38 aa, Artificial Sequence
  Non-cyclic GFR-binding peptide
  MOD_RES (2), (4), (37), (38): Xaa is C or S
  MOD_RES (15), (16), (17), (18), (19): Xaa is A or G
  MOD_RES (20), (21), (22), (23): Xaa is A or G or is absent
SXKXSRVIMVTAKKXXXXXXXXXIKRIQVPRLAQPVXX

SEQ ID NO: 28470 - protein, 39 aa, Artificial Sequence
  Non-cyclic GFR-binding peptide
  MOD_RES (2), (35), (36): Xaa is C or S
  MOD_RES (13), (14), (15), (16), (17): Xaa is A or G
  MOD_RES (18), (19), (20), (21): Xaa is A or G or is absent
KXSKVIMSMEGIXXXXXXXXXMIQITINSLDQSVXXPSA

SEQ ID NO: 28471 - protein, 39 aa, Artificial Sequence
  Non-cyclic GFR-binding peptide
  MOD_RES (34), (34): Xaa is C or S
KNHQLFNSLQEHQGQHPKIRYYLMTLPEEETPVXELGED

SEQ ID NO: 28472 - protein, 40 aa, Artificial Sequence
  Non-cyclic GFR-binding peptide
  MOD_RES (1), (3), (37): Xaa is C or S
  MOD_RES (15), (16), (17), (18), (19): Xaa is A or G
  MOD_RES (20), (21), (22), (23): Xaa is A or G or is absent
XGXSRVVMNSMEGIXXXXXXXXXMIQVTINSLKTPAXTPK

SEQ ID NO: 28473 - protein, 32 aa, Artificial Sequence
  Non-cyclic GFR-binding peptide
  MOD_RES (31), (32): Xaa is C or S
EVVMDVTAKKVVKENEDIKRMQVPRLETPVXX

SEQ ID NO: 28474 - protein, 40 aa, Artificial Sequence
  Non-cyclic GFR-binding peptide
  MOD_RES (2), (4), (37), (38): Xaa is C or S
  MOD_RES (15), (16), (17), (18), (19): Xaa is A or G
  MOD_RES (20), (21), (22), (23): Xaa is A or G or is absent
SXKXSRVIMVTAKKXXXXXXXXXIKRIQVPRLAQPVXXPA

SEQ ID NO: 28475 - protein, 41 aa, Artificial Sequence
  Non-cyclic GFR-binding peptide
  MOD_RES (3), (40): Xaa is C or S
VKXQPSRVHHEPLTVLYYEYVRKKPKLEQLSNRLEEHLEXA

SEQ ID NO: 28476 - protein, 34 aa, Artificial Sequence
  Non-cyclic GFR-binding peptide
  MOD_RES (1), (2), (34): Xaa is C or S
XXVPTELRSVKMAKVDEYDKVVKEVQVEMVVEGX

SEQ ID NO: 28477 - protein, 35 aa, Artificial Sequence
  Non-cyclic GFR-binding peptide
  MOD_RES (1), (2), (34): Xaa is C or S
XXVPTELRSVKMAKVDEYDKVVKEVQVEMVVEGXG

SEQ ID NO: 28478 - protein, 36 aa, Artificial Sequence
  Non-cyclic GFR-binding peptide
  MOD_RES (2), (2): Xaa is C or S
  MOD_RES (18), (19), (20), (21), (22): Xaa is A or G
  MOD_RES (23), (24), (25), (26): Xaa is A or G or is absent
QXRPTQVQLEPLTVLYYXXXXXXXXXEQLSNTLEDH

SEQ ID NO: 28479 - protein, 39 aa, Artificial Sequence
  Non-cyclic GFR-binding peptide
  MOD_RES (4), (5), (37), (39): Xaa is C or S
PKPXXAPTKLRSVKVAKVDDSSNVIKEVQVNMVVRSXGX

SEQ ID NO: 28480 - protein, 34 aa, Artificial Sequence
  Non-cyclic GFR-binding peptide
  MOD_RES (1), (32), (34): Xaa is C or S
XVPQALRSVKIAKVVGRKPKVKEVQVMIVRSXKX

SEQ ID NO: 28481 - protein, 38 aa, Artificial Sequence
  Non-cyclic GFR-binding peptide
  MOD_RES (1), (35), (37): Xaa is C or S
  MOD_RES (15), (16), (17), (18), (19): Xaa is A or G
  MOD_RES (20), (21), (22), (23): Xaa is A or G or is absent
XVPTEEEPLTMLYYXXXXXXXXXEQLSNFLQHNKXEXR

SEQ ID NO: 28482 - protein, 38 aa, Artificial Sequence
  Non-cyclic GFR-binding peptide
  MOD_RES (3), (35), (37): Xaa is C or S
PTXAPTKLSNITVQIMDDSSNVIIGEMSNMVVRSXGXH

SEQ ID NO: 28483 - protein, 41 aa, Artificial Sequence
  Non-cyclic GFR-binding peptide
  MOD_RES (4), (38), (40): Xaa is C or S
GLEXVPTEEEPLPMVYYRIKPHQGQHEQLSNFLQHNKXEXR

SEQ ID NO: 28484 - protein, 42 aa, Artificial Sequence
  Non-cyclic GFR-binding peptide
  MOD_RES (5), (6), (40), (42): Xaa is C or S
  MOD_RES (20), (21), (22), (23), (24): Xaa is A or G
  MOD_RES (25), (26), (27), (28): Xaa is A or G or is absent
VPKPXXAPTQLRSVKVAKVXXXXXXXXXKEVQVNMVVRAXGX

SEQ ID NO: 28485 - protein, 36 aa, Artificial Sequence
  Non-cyclic GFR-binding peptide
  MOD_RES (33), (35): Xaa is C or S
  MOD_RES (14), (15), (16), (17), (18): Xaa is A or G
  MOD_RES (19), (20), (21), (22): Xaa is A or G or is absent
VSQDLRPVQIRKIXXXXXXXXXKKATVMIVKSXKXS

SEQ ID NO: 28486 - protein, 38 aa, Artificial Sequence
  Non-cyclic GFR-binding peptide
  MOD_RES (2), (36), (38): Xaa is C or S
EXVPTEEEPLPMVYYRIKPHQGQHEQLSNFLQHNKXEX

SEQ ID NO: 28487 - protein, 39 aa, Artificial Sequence
  Non-cyclic GFR-binding peptide
  MOD_RES (5), (39): Xaa is C or S
  MOD_RES (19), (20), (21), (22), (23): Xaa is A or G
  MOD_RES (24), (25), (26), (27): Xaa is A or G or is absent
TKPTXAPTKLSNITVQIMXXXXXXXXXIGEMSNMVVRSX

SEQ ID NO: 28488 - protein, 40 aa, Artificial Sequence
  Non-cyclic GFR-binding peptide
  MOD_RES (6), (7), (39): Xaa is C or S
SIPKAXXVPTELRPVQMRKIDEYDKVVKKATVEMVVEGXG

SEQ ID NO: 28489 - protein, 33 aa, Artificial Sequence
  Non-cyclic GFR-binding peptide
  MOD_RES (1), (1): Xaa is C or S
  MOD_RES (15), (16), (17), (18), (19): Xaa is A or G
  MOD_RES (20), (21), (22), (23): Xaa is A or G or is absent
XAPTQLSNITVQIMXXXXXXXXXIGEMSNMVVR

SEQ ID NO: 28490 - protein, 36 aa, Artificial Sequence
  Non-cyclic GFR-binding peptide
  MOD_RES (3), (4), (35): Xaa is C or S
SPXXVSQDLRSVKIAKVIGKTPKIKEVQVMIVKSXK

SEQ ID NO: 28491 - protein, 43 aa, Artificial Sequence
  Non-cyclic GFR-binding peptide
  MOD_RES (4), (41), (43): Xaa is C or S
  MOD_RES (20), (21), (22), (23), (24): Xaa is A or G
  MOD_RES (25), (26), (27), (28): Xaa is A or G or is absent
SVKXQPSRVHHEPLPVVYYXXXXXXXXXEQLSNRLEEHLEXAX

SEQ ID NO: 28492 - protein, 35 aa, Artificial Sequence
  Non-cyclic GFR-binding peptide
  MOD_RES (16), (17), (18), (19), (20): Xaa is A or G
  MOD_RES (21), (22), (23), (24): Xaa is A or G or is absent
RPTQVQLEPLTVLYYXXXXXXXXXEQLSNTLEDHL

SEQ ID NO: 28493 - protein, 42 aa, Artificial Sequence
  Non-cyclic GFR-binding peptide
  MOD_RES (3), (40), (42): Xaa is C or S
  MOD_RES (19), (20), (21), (22), (23): Xaa is A or G
  MOD_RES (24), (25), (26), (27): Xaa is A or G or is absent
VQXRPTQVQLEPLTVLYYXXXXXXXXXEQLSNTLEDHLAXKX

SEQ ID NO: 28494 - protein, 34 aa, Artificial Sequence
  Non-cyclic GFR-binding peptide
  MOD_RES (1), (2): Xaa is C or S
  MOD_RES (16), (17), (18), (19), (20): Xaa is A or G
  MOD_RES (21), (22), (23), (24): Xaa is A or G or is absent
XXAPTKLRSVKVAKVXXXXXXXXXKEVQVNMVVR

SEQ ID NO: 28495 - protein, 35 aa, Artificial Sequence
  Non-cyclic GFR-binding peptide
  MOD_RES (32), (34): Xaa is C or S
VPTELRSVKMAKVDENEKVVKEVQVDMVVEGXGXR

SEQ ID NO: 28496 - protein, 30 aa, Artificial Sequence
  Non-cyclic GFR-binding peptide
VPQDLRPVQIRKIVGRTPKVKKATVMVVKS

SEQ ID NO: 28497 - protein, 38 aa, Artificial Sequence
  Non-cyclic GFR-binding peptide
  MOD_RES (5), (5): Xaa is C or S
  MOD_RES (19), (20), (21), (22), (23): Xaa is A or G
  MOD_RES (24), (25), (26), (27): Xaa is A or G or is absent
EGLEXVPTEEEPLPMVYYXXXXXXXXXEQLSNFLQHNK

SEQ ID NO: 28498 - protein, 39 aa, Artificial Sequence
  Non-cyclic GFR-binding peptide
  MOD_RES (7), (7): Xaa is C or S
  MOD_RES (21), (22), (23), (24), (25): Xaa is A or G
  MOD_RES (26), (27), (28), (29): Xaa is A or G or is absent
NDEGLEXVPTEEEPLPMVYYXXXXXXXXXEQLSNFLQHN

SEQ ID NO: 28499 - protein, 40 aa, Artificial Sequence
  Non-cyclic GFR-binding peptide
  MOD_RES (6), (38), (40): Xaa is C or S
VTKPTXAPTKLRPVQVRKIDDSSNVIKKATVNMVVRSXGX

SEQ ID NO: 28500 - protein, 33 aa, Artificial Sequence
  Non-cyclic GFR-binding peptide
  MOD_RES (1), (2), (33): Xaa is C or S
XXVSQDLRSVKIAKVIGKTPKIKEVQVMIVKSX

SEQ ID NO: 28501 - protein, 39 aa, Artificial Sequence
  Non-cyclic GFR-binding peptide
  MOD_RES (6), (7), (38): Xaa is C or S
ASASPXXVSQDLRSVKIAKVIGKTPKIKEVQVMIVKSXK

SEQ ID NO: 28502 - protein, 38 aa, Artificial Sequence
  Non-cyclic GFR-binding peptide
  MOD_RES (4), (5): Xaa is C or S
  MOD_RES (19), (20), (21), (22), (23): Xaa is A or G
  MOD_RES (24), (25), (26), (27): Xaa is A or G or is absent
PKPXXAPTKLSNITVQIMXXXXXXXXXIGEMSNMVVRS

SEQ ID NO: 28503 - protein, 39 aa, Artificial Sequence
  Non-cyclic GFR-binding peptide
  MOD_RES (3), (4), (36), (38): Xaa is C or S
KPXXAPTKLSNITVQIMDDSSNVIIGEMSNMVVRSXGXH

SEQ ID NO: 28504 - protein, 40 aa, Artificial Sequence
  Non-cyclic GFR-binding peptide
  MOD_RES (5), (6), (40): Xaa is C or S
  MOD_RES (20), (21), (22), (23), (24): Xaa is A or G
  MOD_RES (25), (26), (27), (28): Xaa is A or G or is absent
IPKAXXVPTELRSVKMAKVXXXXXXXXXKEVQVDMVVEGX

SEQ ID NO: 28505 - protein, 31 aa, Artificial Sequence
  Non-cyclic GFR-binding peptide
  MOD_RES (1), (1): Xaa is C or S
XAPTKLRSVKVAKVDDSSNVIKEVQVNMVVR

SEQ ID NO: 28506 - protein, 40 aa, Artificial Sequence
  Non-cyclic GFR-binding peptide
  MOD_RES (3), (4), (38), (40): Xaa is C or S
  MOD_RES (18), (19), (20), (21), (22): Xaa is A or G
  MOD_RES (23), (24), (25), (26): Xaa is A or G or is absent
KAXXVPTELRSVKMAKVXXXXXXXXXKEVQVDMVVEGXGX

SEQ ID NO: 28507 - protein, 41 aa, Artificial Sequence
  Non-cyclic GFR-binding peptide
  MOD_RES (5), (6), (40): Xaa is C or S
  MOD_RES (20), (21), (22), (23), (24): Xaa is A or G
  MOD_RES (25), (26), (27), (28): Xaa is A or G or is absent
IPKAXXVPTELSNITMQIMXXXXXXXXXIGEMSDMVVEGXG

SEQ ID NO: 28508 - protein, 33 aa, Artificial Sequence
  Non-cyclic GFR-binding peptide
  MOD_RES (1), (33): Xaa is C or S
XAPTKLSNITVQIMDDSSNVIIGEMSNMVVRSX

SEQ ID NO: 28509 - protein, 36 aa, Artificial Sequence
  Non-cyclic GFR-binding peptide
  MOD_RES (16), (17), (18), (19), (20): Xaa is A or G
  MOD_RES (21), (22), (23), (24): Xaa is A or G or is absent
QPSRVHHEPLTVLYYXXXXXXXXXEQLSNRLEEHLE

SEQ ID NO: 28510 - protein, 37 aa, Artificial Sequence
  Non-cyclic GFR-binding peptide
  MOD_RES (2), (2): Xaa is C or S
  MOD_RES (18), (19), (20), (21), (22): Xaa is A or G
  MOD_RES (23), (24), (25), (26): Xaa is A or G or is absent
QXRPTQVQLEPLTVLYYXXXXXXXXXEQLSNTLEDHL

SEQ ID NO: 28511 - protein, 37 aa, Artificial Sequence
  Non-cyclic GFR-binding peptide
  MOD_RES (3), (4): Xaa is C or S
  MOD_RES (18), (19), (20), (21), (22): Xaa is A or G
  MOD_RES (23), (24), (25), (26): Xaa is A or G or is absent
KPXXAPTKLRPVQVRKIXXXXXXXXXKKATVNMVVRS

SEQ ID NO: 28512 - protein, 36 aa, Artificial Sequence
  Non-cyclic GFR-binding peptide
  MOD_RES (2), (3), (35): Xaa is C or S
PXXAPTQLRPVQVRKIDDSSNVIKKATVNMVVRAXG

SEQ ID NO: 28513 - protein, 32 aa, Artificial Sequence
  Non-cyclic GFR-binding peptide
  MOD_RES (32), (32): Xaa is C or S
VPTELRSVKMAKVDENEKVVKEVQVDMVVEGX

SEQ ID NO: 28514 - protein, 36 aa, Artificial Sequence
  Non-cyclic GFR-binding peptide
  MOD_RES (4), (5): Xaa is C or S
PKAXXVPTELRSVKMAKVDEYDKVVKEVQVEMVVEG

SEQ ID NO: 28515 - protein, 40 aa, Artificial Sequence
  Non-cyclic GFR-binding peptide
  MOD_RES (6), (40): Xaa is C or S
  MOD_RES (20), (21), (22), (23), (24): Xaa is A or G
  MOD_RES (25), (26), (27), (28): Xaa is A or G or is absent
VTKPTXAPTKLRSVKVAKVXXXXXXXXXKEVQVNMVVRSX

SEQ ID NO: 28516 - protein, 42 aa, Artificial Sequence
  Non-cyclic GFR-binding peptide
  MOD_RES (6), (40), (42): Xaa is C or S
  MOD_RES (20), (21), (22), (23), (24): Xaa is A or G
  MOD_RES (25), (26), (27), (28): Xaa is A or G or is absent
DEGLEXVPTEEEPLPMVYYXXXXXXXXXEQLSNFLQHNKXEX

SEQ ID NO: 28517 - protein, 42 aa, Artificial Sequence
  Non-cyclic GFR-binding peptide
  MOD_RES (5), (6), (40), (42): Xaa is C or S
  MOD_RES (20), (21), (22), (23), (24): Xaa is A or G
  MOD_RES (25), (26), (27), (28): Xaa is A or G or is absent
VPKPXXAPTKLSNITVQIMXXXXXXXXXIGEMSNMVVRSXGX

SEQ ID NO: 28518 - protein, 33 aa, Artificial Sequence
  Non-cyclic GFR-binding peptide
  MOD_RES (32), (32): Xaa is C or S
VPTELSNITMQIMDEYDKVVIGEMSEMVVEGXG

SEQ ID NO: 28519 - protein, 38 aa, Artificial Sequence
  Non-cyclic GFR-binding peptide
  MOD_RES (3), (4), (37): Xaa is C or S
  MOD_RES (18), (19), (20), (21), (22): Xaa is A or G
  MOD_RES (23), (24), (25), (26): Xaa is A or G or is absent
SPXXVSQDLRPVQIRKIXXXXXXXXXKKATVMIVKSXK

SEQ ID NO: 28520 - protein, 43 aa, Artificial Sequence
  Non-cyclic GFR-binding peptide
  MOD_RES (6), (7), (41), (43): Xaa is C or S
  MOD_RES (21), (22), (23), (24), (25): Xaa is A or G
  MOD_RES (26), (27), (28), (29): Xaa is A or G or is absent
KIPKAXXVPTELRSVKMAKVXXXXXXXXXKEVQVDMVVEGXGX

SEQ ID NO: 28521 - protein, 37 aa, Artificial Sequence
  Non-cyclic GFR-binding peptide
  MOD_RES (2), (3), (37): Xaa is C or S
  MOD_RES (17), (18), (19), (20), (21): Xaa is A or G
  MOD_RES (22), (23), (24), (25): Xaa is A or G or is absent
PXXAPTKLSNITVQIMXXXXXXXXXIGEMSNMVVRSX

SEQ ID NO: 28522 - protein, 33 aa, Artificial Sequence
  Non-cyclic GFR-binding peptide
  MOD_RES (31), (33): Xaa is C or S
VPQALRPVQIRKIVGRKPKVKKATVMIVRSXKX

SEQ ID NO: 28523 - protein, 41 aa, Artificial Sequence
  Non-cyclic GFR-binding peptide
  MOD_RES (5), (5): Xaa is C or S
SSVKXQPSRVHHEPLPVVYYEYVRKKPKLEQLSNRLEEHLE

SEQ ID NO: 28524 - protein, 43 aa, Artificial Sequence
  Non-cyclic GFR-binding peptide
  MOD_RES (7), (41), (43): Xaa is C or S
  MOD_RES (21), (22), (23), (24), (25): Xaa is A or G
  MOD_RES (26), (27), (28), (29): Xaa is A or G or is absent
HVTKPTXAPTKLRSVKVAKVXXXXXXXXXKEVQVNMVVRSXGX

SEQ ID NO: 28525 - protein, 38 aa, Artificial Sequence
  Non-cyclic GFR-binding peptide
  MOD_RES (3), (3): Xaa is C or S
  MOD_RES (19), (20), (21), (22), (23): Xaa is A or G
  MOD_RES (24), (25), (26), (27): Xaa is A or G or is absent
VKXQPSRVHHEPLPVVYYXXXXXXXXXEQLSNRLEEHL

SEQ ID NO: 28526 - protein, 40 aa, Artificial Sequence
  Non-cyclic GFR-binding peptide
  MOD_RES (4), (38), (40): Xaa is C or S
GLEXVPTEEEPLTMLYYRIKPHQGQHEQLSNFLQHNKXEX

SEQ ID NO: 28527 - protein, 34 aa, Artificial Sequence
  Non-cyclic GFR-binding peptide
  MOD_RES (1), (2): Xaa is C or S
  MOD_RES (16), (17), (18), (19), (20): Xaa is A or G
  MOD_RES (21), (22), (23), (24): Xaa is A or G or is absent
XXVPTELSNITMQIMXXXXXXXXXIGEMSEMVVE

SEQ ID NO: 28528 - protein, 35 aa, Artificial Sequence
  Non-cyclic GFR-binding peptide
  MOD_RES (1), (2), (33), (35): Xaa is C or S
XXVPQALRSVKIAKVVGRKPKVKEVQVMIVRSXKX

SEQ ID NO: 28529 - protein, 38 aa, Artificial Sequence
  Non-cyclic GFR-binding peptide
  MOD_RES (4), (5), (36), (38): Xaa is C or S
ASPXXVSQDLSNITIQIMIGKTPKIIGEMSMIVKSXKX

SEQ ID NO: 28530 - protein, 34 aa, Artificial Sequence
  Non-cyclic GFR-binding peptide
  MOD_RES (33), (33): Xaa is C or S
  MOD_RES (14), (15), (16), (17), (18): Xaa is A or G
  MOD_RES (19), (20), (21), (22): Xaa is A or G or is absent
VPQALSNITIQIMXXXXXXXXXIGEMSMIVRSXK

SEQ ID NO: 28531 - protein, 37 aa, Artificial Sequence
  Non-cyclic GFR-binding peptide
  MOD_RES (6), (6): Xaa is C or S
VTKPTXAPTKLRPVQVRKIDDSSNVIKKATVNMVVRS

SEQ ID NO: 28532 - protein, 34 aa, Artificial Sequence
  Non-cyclic GFR-binding peptide
  MOD_RES (2), (3): Xaa is C or S
AXXVPTELRPVQMRKIDEYDKVVKKATVEMVVEG

SEQ ID NO: 28533 - protein, 35 aa, Artificial Sequence
  Non-cyclic GFR-binding peptide
  MOD_RES (1), (2): Xaa is C or S
  MOD_RES (16), (17), (18), (19), (20): Xaa is A or G
  MOD_RES (21), (22), (23), (24): Xaa is A or G or is absent
XXAPTQLSNITVQIMXXXXXXXXXIGEMSNMVVRA

SEQ ID NO: 28534 - protein, 35 aa, Artificial Sequence
  Non-cyclic GFR-binding peptide
  MOD_RES (1), (34): Xaa is C or S
  MOD_RES (15), (16), (17), (18), (19): Xaa is A or G
  MOD_RES (20), (21), (22), (23): Xaa is A or G or is absent
XVPQALRSVKIAKVXXXXXXXXXKEVQVMIVRSXK

SEQ ID NO: 28535 - protein, 37 aa, Artificial Sequence
  Non-cyclic GFR-binding peptide
  MOD_RES (2), (36): Xaa is C or S
EXVPTEEEPLTMLYYRIKPHQGQHEQLSNFLQHNKXE

SEQ ID NO: 28536 - protein, 40 aa, Artificial Sequence
  Non-cyclic GFR-binding peptide
  MOD_RES (2), (3), (37), (39): Xaa is C or S
  MOD_RES (17), (18), (19), (20), (21): Xaa is A or G
  MOD_RES (22), (23), (24), (25): Xaa is A or G or is absent
PXXAPTKLRPVQVRKIXXXXXXXXXKKATVNMVVRSXGXH

SEQ ID NO: 28537 - protein, 41 aa, Artificial Sequence
  Non-cyclic GFR-binding peptide
  MOD_RES (3), (40): Xaa is C or S
VQXRPTQVQLEPLTVLYYEIVRKKPIFEQLSNTLEDHLAXK

SEQ ID NO: 28538 - protein, 39 aa, Artificial Sequence
  Non-cyclic GFR-binding peptide
  MOD_RES (4), (5), (37), (39): Xaa is C or S
PKAXXVPTELRPVQMRKIDENEKVVKKATVDMVVEGXGX

SEQ ID NO: 28539 - protein, 38 aa, Artificial Sequence
  Non-cyclic GFR-binding peptide
  MOD_RES (6), (7), (38): Xaa is C or S
ASASPXXVPQDLRPVQIRKIVGRTPKVKKATVMVVKSX

SEQ ID NO: 28540 - protein, 40 aa, Artificial Sequence
  Non-cyclic GFR-binding peptide
  MOD_RES (2), (3), (37), (39): Xaa is C or S
  MOD_RES (17), (18), (19), (20), (21): Xaa is A or G
  MOD_RES (22), (23), (24), (25): Xaa is A or G or is absent
PXXAPTKLRSVKVAKVXXXXXXXXXKEVQVNMVVRSXGXH

SEQ ID NO: 28541 - protein, 40 aa, Artificial Sequence
  Non-cyclic GFR-binding peptide
  MOD_RES (5), (37), (39): Xaa is C or S
TKPTXAPTKLRSVKVAKVDDSSNVIKEVQVNMVVRSXGXH

SEQ ID NO: 28542 - protein, 37 aa, Artificial Sequence
  Non-cyclic GFR-binding peptide
  MOD_RES (4), (5): Xaa is C or S
  MOD_RES (19), (20), (21), (22), (23): Xaa is A or G
  MOD_RES (24), (25), (26), (27): Xaa is A or G or is absent
AAPXXVPQALSNITIQIMXXXXXXXXXIGEMSMIVRS

SEQ ID NO: 28543 - protein, 34 aa, Artificial Sequence
  Non-cyclic GFR-binding peptide
  MOD_RES (4), (4): Xaa is C or S
KPTXAPTKLSNITVQIMDDSSNVIIGEMSNMVVR

SEQ ID NO: 28544 - protein, 44 aa, Artificial Sequence
  Non-cyclic GFR-binding peptide
  MOD_RES (5), (42), (44): Xaa is C or S
SSVKXQPSRVHHEPLTVLYYEYVRKKPKLEQLSNRLEEHLEXAX

SEQ ID NO: 28545 - protein, 40 aa, Artificial Sequence
  Non-cyclic GFR-binding peptide
  MOD_RES (6), (7), (38), (40): Xaa is C or S
ASASPXXVPQDLRPVQIRKIVGRTPKVKKATVMVVKSXKX

SEQ ID NO: 28546 - protein, 38 aa, Artificial Sequence
  Non-cyclic GFR-binding peptide
  MOD_RES (4), (4): Xaa is C or S
  MOD_RES (20), (21), (22), (23), (24): Xaa is A or G
  MOD_RES (25), (26), (27), (28): Xaa is A or G or is absent
SVKXQPSRVHHEPLPVVYYXXXXXXXXXEQLSNRLEEH

SEQ ID NO: 28547 - protein, 36 aa, Artificial Sequence
  Non-cyclic GFR-binding peptide
  MOD_RES (1), (2), (35): Xaa is C or S
  MOD_RES (16), (17), (18), (19), (20): Xaa is A or G
  MOD_RES (21), (22), (23), (24): Xaa is A or G or is absent
XXVPQALRSVKIAKVXXXXXXXXXKEVQVMIVRSXK

SEQ ID NO: 28548 - protein, 40 aa, Artificial Sequence
  Non-cyclic GFR-binding peptide
  MOD_RES (6), (7), (39): Xaa is C or S
KIPKAXXVPTELRSVKMAKVDENEKVVKEVQVDMVVEGXG

SEQ ID NO: 28549 - protein, 37 aa, Artificial Sequence
  Non-cyclic GFR-binding peptide
  MOD_RES (1), (35), (37): Xaa is C or S
  MOD_RES (15), (16), (17), (18), (19): Xaa is A or G
  MOD_RES (20), (21), (22), (23): Xaa is A or G or is absent
XAPTKLSNITVQIMXXXXXXXXXIGEMSNMVVRSXGX

SEQ ID NO: 28550 - protein, 39 aa, Artificial Sequence
  Non-cyclic GFR-binding peptide
  MOD_RES (4), (5), (36), (38): Xaa is C or S
ASPXXVPQDLRPVQIRKIVGRTPKVKKATVMVVKSXKXS

SEQ ID NO: 28551 - protein, 37 aa, Artificial Sequence
  Non-cyclic GFR-binding peptide
  MOD_RES (2), (34), (36): Xaa is C or S
TXAPTKLRSVKVAKVDDSSNVIKEVQVNMVVRSXGXH

SEQ ID NO: 28552 - protein, 35 aa, Artificial Sequence
  Non-cyclic GFR-binding peptide
  MOD_RES (4), (5): Xaa is C or S
PKAXXVPTELSNITMQIMDENEKVVIGEMSDMVVE

SEQ ID NO: 28553 - protein, 34 aa, Artificial Sequence
  Non-cyclic GFR-binding peptide
  MOD_RES (1), (2): Xaa is C or S
  MOD_RES (16), (17), (18), (19), (20): Xaa is A or G
  MOD_RES (21), (22), (23), (24): Xaa is A or G or is absent
XXVPQALSNITIQIMXXXXXXXXXIGEMSMIVRS

SEQ ID NO: 28554 - protein, 35 aa, Artificial Sequence
  Non-cyclic GFR-binding peptide
  MOD_RES (1), (32), (34): Xaa is C or S
XVSQDLSNITIQIMIGKTPKIIGEMSMIVKSXKXS

SEQ ID NO: 28555 - protein, 37 aa, Artificial Sequence
  Non-cyclic GFR-binding peptide
  MOD_RES (4), (5), (36): Xaa is C or S
ASPXXVSQDLSNITIQIMIGKTPKIIGEMSMIVKSXK

SEQ ID NO: 28556 - protein, 37 aa, Artificial Sequence
  Non-cyclic GFR-binding peptide
  MOD_RES (5), (5): Xaa is C or S
  MOD_RES (19), (20), (21), (22), (23): Xaa is A or G
  MOD_RES (24), (25), (26), (27): Xaa is A or G or is absent
EGLEXVPTEEEPLTMLYYXXXXXXXXXEQLSNFLQHN

SEQ ID NO: 28557 - protein, 32 aa, Artificial Sequence
  Non-cyclic GFR-binding peptide
  MOD_RES (1), (1): Xaa is C or S
XAPTQLRPVQVRKIDDSSNVIKKATVNMVVRA

SEQ ID NO: 28558 - protein, 40 aa, Artificial Sequence
  Non-cyclic GFR-binding peptide
  MOD_RES (1), (38), (40): Xaa is C or S
XQPSRVHHEPLPVVYYEYVRKKPKLEQLSNRLEEHLEXAX

SEQ ID NO: 28559 - protein, 36 aa, Artificial Sequence
  Non-cyclic GFR-binding peptide
  MOD_RES (35), (35): Xaa is C or S
TQVQLEPLTVLYYEIVRKKPIFEQLSNTLEDHLAXK

SEQ ID NO: 28560 - protein, 37 aa, Artificial Sequence
  Non-cyclic GFR-binding peptide
  MOD_RES (1), (1): Xaa is C or S
XQPSRVHHEPLPVVYYEYVRKKPKLEQLSNRLEEHLE

SEQ ID NO: 28561 - protein, 35 aa, Artificial Sequence
  Non-cyclic GFR-binding peptide
  MOD_RES (2), (3), (35): Xaa is C or S
PXXAPTKLRPVQVRKIDDSSNVIKKATVNMVVRSX

SEQ ID NO: 28562 - protein, 38 aa, Artificial Sequence
  Non-cyclic GFR-binding peptide
  MOD_RES (4), (4): Xaa is C or S
  MOD_RES (20), (21), (22), (23), (24): Xaa is A or G
  MOD_RES (25), (26), (27), (28): Xaa is A or G or is absent
NVQXRPTQVQLEPLPVVYYXXXXXXXXXEQLSNTLEDH

SEQ ID NO: 28563 - protein, 40 aa, Artificial Sequence
  Non-cyclic GFR-binding peptide
  MOD_RES (5), (5): Xaa is C or S
  MOD_RES (21), (22), (23), (24), (25): Xaa is A or G
  MOD_RES (26), (27), (28), (29): Xaa is A or G or is absent
SSVKXQPSRVHHEPLTVLYYXXXXXXXXXEQLSNRLEEHL

SEQ ID NO: 28564 - protein, 31 aa, Artificial Sequence
  Non-cyclic GFR-binding peptide
APTQLSNITVQIMDDSSNVIIGEMSNMVVRA

SEQ ID NO: 28565 - protein, 42 aa, Artificial Sequence
  Non-cyclic GFR-binding peptide
  MOD_RES (5), (39), (41): Xaa is C or S
EGLEXVPTEEEPLPMVYYRIKPHQGQHEQLSNFLQHNKXEXR

SEQ ID NO: 28566 - protein, 40 aa, Artificial Sequence
  Non-cyclic GFR-binding peptide
  MOD_RES (37), (39): Xaa is C or S
  MOD_RES (16), (17), (18), (19), (20): Xaa is A or G
  MOD_RES (21), (22), (23), (24): Xaa is A or G or is absent
QPSRVHHEPLTVLYYXXXXXXXXXEQLSNRLEEHLEXAXA

SEQ ID NO: 28567 - protein, 40 aa, Artificial Sequence
  Non-cyclic GFR-binding peptide
  MOD_RES (6), (7), (40): Xaa is C or S
  MOD_RES (21), (22), (23), (24), (25): Xaa is A or G
  MOD_RES (26), (27), (28), (29): Xaa is A or G or is absent
ASASPXXVSQDLRSVKIAKVXXXXXXXXXKEVQVMIVKSX

SEQ ID NO: 28568 - protein, 39 aa, Artificial Sequence
  Non-cyclic GFR-binding peptide
  MOD_RES (1), (2), (36), (38): Xaa is C or S
  MOD_RES (16), (17), (18), (19), (20): Xaa is A or G
  MOD_RES (21), (22), (23), (24): Xaa is A or G or is absent
XXAPTQLSNITVQIMXXXXXXXXXIGEMSNMVVRAXGXH

SEQ ID NO: 28569 - protein, 40 aa, Artificial Sequence
  Non-cyclic GFR-binding peptide
  MOD_RES (4), (4): Xaa is C or S
  MOD_RES (20), (21), (22), (23), (24): Xaa is A or G
  MOD_RES (25), (26), (27), (28): Xaa is A or G or is absent
SVKXQPSRVHHEPLPVVYYXXXXXXXXXEQLSNRLEEHLE

SEQ ID NO: 28570 - protein, 42 aa, Artificial Sequence
  Non-cyclic GFR-binding peptide
  MOD_RES (5), (42): Xaa is C or S
  MOD_RES (21), (22), (23), (24), (25): Xaa is A or G
  MOD_RES (26), (27), (28), (29): Xaa is A or G or is absent
SSVKXQPSRVHHEPLTVLYYXXXXXXXXXEQLSNRLEEHLEX

SEQ ID NO: 28571 - protein, 34 aa, Artificial Sequence
  Non-cyclic GFR-binding peptide
  MOD_RES (1), (32), (34): Xaa is C or S
XVSQDLSNITIQIMIGKTPKIIGEMSMIVKSXKX

SEQ ID NO: 28572 - protein, 39 aa, Artificial Sequence
  Non-cyclic GFR-binding peptide
  MOD_RES (4), (38): Xaa is C or S
  MOD_RES (18), (19), (20), (21), (22): Xaa is A or G
  MOD_RES (23), (24), (25), (26): Xaa is A or G or is absent
GLEXVPTEEEPLPMVYYXXXXXXXXXEQLSNFLQHNKXE

SEQ ID NO: 28573 - protein, 35 aa, Artificial Sequence
  Non-cyclic GFR-binding peptide
  MOD_RES (34), (34): Xaa is C or S
  MOD_RES (14), (15), (16), (17), (18): Xaa is A or G
  MOD_RES (19), (20), (21), (22): Xaa is A or G or is absent
VPTELSNITMQIMXXXXXXXXXIGEMSEMVVEGXG

SEQ ID NO: 28574 - protein, 35 aa, Artificial Sequence
  Non-cyclic GFR-binding peptide
  MOD_RES (2), (3): Xaa is C or S
  MOD_RES (17), (18), (19), (20), (21): Xaa is A or G
  MOD_RES (22), (23), (24), (25): Xaa is A or G or is absent
PXXVPQDLRPVQIRKIXXXXXXXXXKKATVMVVKS

SEQ ID NO: 28575 - protein, 40 aa, Artificial Sequence
  Non-cyclic GFR-binding peptide
  MOD_RES (6), (7), (39): Xaa is C or S
YVPKPXXAPTKLSNITVQIMDDSSNVIIGEMSNMVVRSXG

SEQ ID NO: 28576 - protein, 40 aa, Artificial Sequence
  Non-cyclic GFR-binding peptide
  MOD_RES (6), (7), (38), (40): Xaa is C or S
ASASPXXVSQDLRSVKIAKVIGKTPKIKEVQVMIVKSXKX

SEQ ID NO: 28577 - protein, 35 aa, Artificial Sequence
  Non-cyclic GFR-binding peptide
  MOD_RES (1), (2): Xaa is C or S
  MOD_RES (16), (17), (18), (19), (20): Xaa is A or G
  MOD_RES (21), (22), (23), (24): Xaa is A or G or is absent
XXAPTKLSNITVQIMXXXXXXXXXIGEMSNMVVRS

SEQ ID NO: 28578 - protein, 34 aa, Artificial Sequence
  Non-cyclic GFR-binding peptide
  MOD_RES (3), (4): Xaa is C or S
APXXVPQALSNITIQIMVGRKPKVIGEMSMIVRS

SEQ ID NO: 28579 - protein, 39 aa, Artificial Sequence
  Non-cyclic GFR-binding peptide
  MOD_RES (2), (3), (37), (39): Xaa is C or S
  MOD_RES (17), (18), (19), (20), (21): Xaa is A or G
  MOD_RES (22), (23), (24), (25): Xaa is A or G or is absent
PXXAPTKLSNITVQIMXXXXXXXXXIGEMSNMVVRSXGX

SEQ ID NO: 28580 - protein, 40 aa, Artificial Sequence
  Non-cyclic GFR-binding peptide
  MOD_RES (5), (6), (40): Xaa is C or S
  MOD_RES (20), (21), (22), (23), (24): Xaa is A or G
  MOD_RES (25), (26), (27), (28): Xaa is A or G or is absent
VPKPXXAPTKLSNITVQIMXXXXXXXXXIGEMSNMVVRSX

SEQ ID NO: 28581 - protein, 35 aa, Artificial Sequence
  Non-cyclic GFR-binding peptide
  MOD_RES (2), (3): Xaa is C or S
  MOD_RES (17), (18), (19), (20), (21): Xaa is A or G
  MOD_RES (22), (23), (24), (25): Xaa is A or G or is absent
PXXVPQDLRSVKIAKVXXXXXXXXXKEVQVMVVKS

SEQ ID NO: 28582 - protein, 42 aa, Artificial Sequence
  Non-cyclic GFR-binding peptide
  MOD_RES (5), (6), (40), (42): Xaa is C or S
  MOD_RES (20), (21), (22), (23), (24): Xaa is A or G
  MOD_RES (25), (26), (27), (28): Xaa is A or G or is absent
VPKPXXAPTQLRPVQVRKIXXXXXXXXXKKATVNMVVRAXGX

SEQ ID NO: 28583 - protein, 32 aa, Artificial Sequence
  Non-cyclic GFR-binding peptide
  MOD_RES (1), (2): Xaa is C or S
XXAPTQLRPVQVRKIDDSSNVIKKATVNMVVR

SEQ ID NO: 28584 - protein, 42 aa, Artificial Sequence
  Non-cyclic GFR-binding peptide
  MOD_RES (4), (5), (39), (41): Xaa is C or S
  MOD_RES (19), (20), (21), (22), (23): Xaa is A or G
  MOD_RES (24), (25), (26), (27): Xaa is A or G or is absent
PKPXXAPTQLRPVQVRKIXXXXXXXXXKKATVNMVVRAXGXH

SEQ ID NO: 28585 - protein, 37 aa, Artificial Sequence
  Non-cyclic GFR-binding peptide
  MOD_RES (2), (3), (36): Xaa is C or S
  MOD_RES (17), (18), (19), (20), (21): Xaa is A or G
  MOD_RES (22), (23), (24), (25): Xaa is A or G or is absent
PXXVSQDLSNITIQIMXXXXXXXXXIGEMSMIVKSXK

SEQ ID NO: 28586 - protein, 34 aa, Artificial Sequence
  Non-cyclic GFR-binding peptide
  MOD_RES (1), (2), (33): Xaa is C or S
XXVPQALRPVQIRKIVGRKPKVKKATVMIVRSXK

SEQ ID NO: 28587 - protein, 38 aa, Artificial Sequence
  Non-cyclic GFR-binding peptide
  MOD_RES (5), (6): Xaa is C or S
  MOD_RES (20), (21), (22), (23), (24): Xaa is A or G
  MOD_RES (25), (26), (27), (28): Xaa is A or G or is absent
SASPXXVPQDLSNITIQIMXXXXXXXXXIGEMSMVVKS

SEQ ID NO: 28588 - protein, 40 aa, Artificial Sequence
  Non-cyclic GFR-binding peptide
  MOD_RES (3), (4), (38), (40): Xaa is C or S
  MOD_RES (18), (19), (20), (21), (22): Xaa is A or G
  MOD_RES (23), (24), (25), (26): Xaa is A or G or is absent
KAXXVPTELRPVQMRKIXXXXXXXXXKKATVDMVVEGXGX

SEQ ID NO: 28589 - protein, 35 aa, Artificial Sequence
  Non-cyclic GFR-binding peptide
  MOD_RES (3), (4), (35): Xaa is C or S
APXXVPQALRSVKIAKVVGRKPKVKEVQVMIVRSX

SEQ ID NO: 28590 - protein, 32 aa, Artificial Sequence
  Non-cyclic GFR-binding peptide
  MOD_RES (14), (15), (16), (17), (18): Xaa is A or G
  MOD_RES (19), (20), (21), (22): Xaa is A or G or is absent
APTKLRPVQVRKIXXXXXXXXXKKATVNMVVR

SEQ ID NO: 28591 - protein, 38 aa, Artificial Sequence
  Non-cyclic GFR-binding peptide
  MOD_RES (2), (36), (38): Xaa is C or S
  MOD_RES (16), (17), (18), (19), (20): Xaa is A or G
  MOD_RES (21), (22), (23), (24): Xaa is A or G or is absent
TXAPTKLRPVQVRKIXXXXXXXXXKKATVNMVVRSXGX

SEQ ID NO: 28592 - protein, 38 aa, Artificial Sequence
  Non-cyclic GFR-binding peptide
  MOD_RES (1), (38): Xaa is C or S
XQPSRVHHEPLPVVYYEYVRKKPKLEQLSNRLEEHLEX

SEQ ID NO: 28593 - protein, 37 aa, Artificial Sequence
  Non-cyclic GFR-binding peptide
  MOD_RES (34), (36): Xaa is C or S
  MOD_RES (14), (15), (16), (17), (18): Xaa is A or G
  MOD_RES (19), (20), (21), (22): Xaa is A or G or is absent
VPTEEEPLTMLYYXXXXXXXXXEQLSNFLQHNKXEXR

SEQ ID NO: 28594 - protein, 39 aa, Artificial Sequence
  Non-cyclic GFR-binding peptide
  MOD_RES (5), (6), (37), (39): Xaa is C or S
SASPXXVPQDLRSVKIAKVVGRTPKVKEVQVMVVKSXKX

SEQ ID NO: 28595 - protein, 38 aa, Artificial Sequence
  Non-cyclic GFR-binding peptide
  MOD_RES (2), (2): Xaa is C or S
  MOD_RES (18), (19), (20), (21), (22): Xaa is A or G
  MOD_RES (23), (24), (25), (26): Xaa is A or G or is absent
KXQPSRVHHEPLPVVYYXXXXXXXXXEQLSNRLEEHLE

SEQ ID NO: 28596 - protein, 34 aa, Artificial Sequence
  Non-cyclic GFR-binding peptide
  MOD_RES (4), (4): Xaa is C or S
KPTXAPTKLRSVKVAKVDDSSNVIKEVQVNMVVR

SEQ ID NO: 28597 - protein, 39 aa, Artificial Sequence
  Non-cyclic GFR-binding peptide
  MOD_RES (5), (39): Xaa is C or S
EGLEXVPTEEEPLTMLYYRIKPHQGQHEQLSNFLQHNKX

SEQ ID NO: 28598 - protein, 38 aa, Artificial Sequence
  Non-cyclic GFR-binding peptide
  MOD_RES (3), (4), (36), (38): Xaa is C or S
KPXXAPTQLRSVKVAKVDDSSNVIKEVQVNMVVRAXGX

SEQ ID NO: 28599 - protein, 41 aa, Artificial Sequence
  Non-cyclic GFR-binding peptide
  MOD_RES (2), (39), (41): Xaa is C or S
KXQPSRVHHEPLTVLYYEYVRKKPKLEQLSNRLEEHLEXAX

SEQ ID NO: 28600 - protein, 40 aa, Artificial Sequence
  Non-cyclic GFR-binding peptide
  MOD_RES (6), (38), (40): Xaa is C or S
VTKPTXAPTKLRSVKVAKVDDSSNVIKEVQVNMVVRSXGX

SEQ ID NO: 28601 - protein, 36 aa, Artificial Sequence
  Non-cyclic GFR-binding peptide
  MOD_RES (33), (35): Xaa is C or S
  MOD_RES (14), (15), (16), (17), (18): Xaa is A or G
  MOD_RES (19), (20), (21), (22): Xaa is A or G or is absent
VSQDLRSVKIAKVXXXXXXXXXKEVQVMIVKSXKXS

SEQ ID NO: 28602 - protein, 37 aa, Artificial Sequence
  Non-cyclic GFR-binding peptide
  MOD_RES (3), (4): Xaa is C or S
  MOD_RES (18), (19), (20), (21), (22): Xaa is A or G
  MOD_RES (23), (24), (25), (26): Xaa is A or G or is absent
KAXXVPTELSNITMQIMXXXXXXXXXIGEMSDMVVEG

SEQ ID NO: 28603 - protein, 37 aa, Artificial Sequence
  Non-cyclic GFR-binding peptide
  MOD_RES (3), (4): Xaa is C or S
  MOD_RES (18), (19), (20), (21), (22): Xaa is A or G
  MOD_RES (23), (24), (25), (26): Xaa is A or G or is absent
KAXXVPTELRSVKMAKVXXXXXXXXXKEVQVEMVVEG

SEQ ID NO: 28604 - protein, 33 aa, Artificial Sequence
  Non-cyclic GFR-binding peptide
SRVHHEPLPVVYYEYVRKKPKLEQLSNRLEEHL

SEQ ID NO: 28605 - protein, 42 aa, Artificial Sequence
  Non-cyclic GFR-binding peptide
  MOD_RES (6), (7), (41): Xaa is C or S
  MOD_RES (21), (22), (23), (24), (25): Xaa is A or G
  MOD_RES (26), (27), (28), (29): Xaa is A or G or is absent
SIPKAXXVPTELRPVQMRKIXXXXXXXXXKKATVEMVVEGXG

SEQ ID NO: 28606 - protein, 38 aa, Artificial Sequence
  Non-cyclic GFR-binding peptide
  MOD_RES (2), (3), (37): Xaa is C or S
  MOD_RES (17), (18), (19), (20), (21): Xaa is A or G
  MOD_RES (22), (23), (24), (25): Xaa is A or G or is absent
AXXVPTELRPVQMRKIXXXXXXXXXKKATVEMVVEGXG

SEQ ID NO: 28607 - protein, 42 aa, Artificial Sequence
  Non-cyclic GFR-binding peptide
  MOD_RES (4), (5), (39), (41): Xaa is C or S
  MOD_RES (19), (20), (21), (22), (23): Xaa is A or G
  MOD_RES (24), (25), (26), (27): Xaa is A or G or is absent
PKPXXAPTQLSNITVQIMXXXXXXXXXIGEMSNMVVRAXGXH

SEQ ID NO: 28608 - protein, 35 aa, Artificial Sequence
  Non-cyclic GFR-binding peptide
  MOD_RES (4), (5): Xaa is C or S
ASPXXVSQDLRPVQIRKIIGKTPKIKKATVMIVKS

SEQ ID NO: 28609 - protein, 37 aa, Artificial Sequence
  Non-cyclic GFR-binding peptide
  MOD_RES (1), (2), (36): Xaa is C or S
  MOD_RES (16), (17), (18), (19), (20): Xaa is A or G
  MOD_RES (21), (22), (23), (24): Xaa is A or G or is absent
XXAPTKLRSVKVAKVXXXXXXXXXKEVQVNMVVRSXG

SEQ ID NO: 28610 - protein, 32 aa, Artificial Sequence
  Non-cyclic GFR-binding peptide
  MOD_RES (1), (2): Xaa is C or S
XXVPQDLRSVKIAKVVGRTPKVKEVQVMVVKS

SEQ ID NO: 28611 - protein, 35 aa, Artificial Sequence
  Non-cyclic GFR-binding peptide
  MOD_RES (32), (34): Xaa is C or S
VPTELRPVQMRKIDEYDKVVKKATVEMVVEGXGXR

SEQ ID NO: 28612 - protein, 42 aa, Artificial Sequence
  Non-cyclic GFR-binding peptide
  MOD_RES (6), (7), (40), (42): Xaa is C or S
  MOD_RES (21), (22), (23), (24), (25): Xaa is A or G
  MOD_RES (26), (27), (28), (29): Xaa is A or G or is absent
ASASPXXVPQDLRSVKIAKVXXXXXXXXXKEVQVMVVKSXKX

SEQ ID NO: 28613 - protein, 37 aa, Artificial Sequence
  Non-cyclic GFR-binding peptide
  MOD_RES (34), (36): Xaa is C or S
  MOD_RES (14), (15), (16), (17), (18): Xaa is A or G
  MOD_RES (19), (20), (21), (22): Xaa is A or G or is absent
APTQLRPVQVRKIXXXXXXXXXKKATVNMVVRAXGXH

SEQ ID NO: 28614 - protein, 34 aa, Artificial Sequence
  Non-cyclic GFR-binding peptide
  MOD_RES (32), (34): Xaa is C or S
APTKLSNITVQIMDDSSNVIIGEMSNMVVRSXGX

SEQ ID NO: 28615 - protein, 39 aa, Artificial Sequence
  Non-cyclic GFR-binding peptide
  MOD_RES (4), (5), (39): Xaa is C or S
  MOD_RES (19), (20), (21), (22), (23): Xaa is A or G
  MOD_RES (24), (25), (26), (27): Xaa is A or G or is absent
PKPXXAPTQLRPVQVRKIXXXXXXXXXKKATVNMVVRAX

SEQ ID NO: 28616 - protein, 31 aa, Artificial Sequence
  Non-cyclic GFR-binding peptide
  MOD_RES (31), (31): Xaa is C or S
VPQALRSVKIAKVVGRKPKVKEVQVMIVRSX

SEQ ID NO: 28617 - protein, 37 aa, Artificial Sequence
  Non-cyclic GFR-binding peptide
  MOD_RES (1), (2), (34), (36): Xaa is C or S
XXVPTELRPVQMRKIDEYDKVVKKATVEMVVEGXGXR

SEQ ID NO: 28618 - protein, 32 aa, Artificial Sequence
  Non-cyclic GFR-binding peptide
  MOD_RES (14), (15), (16), (17), (18): Xaa is A or G
  MOD_RES (19), (20), (21), (22): Xaa is A or G or is absent
VSQDLRPVQIRKIXXXXXXXXXKKATVMIVKS

SEQ ID NO: 28619 - protein, 35 aa, Artificial Sequence
  Non-cyclic GFR-binding peptide
  MOD_RES (2), (34): Xaa is C or S
TXAPTKLRPVQVRKIDDSSNVIKKATVNMVVRSXG

SEQ ID NO: 28620 - protein, 35 aa, Artificial Sequence
  Non-cyclic GFR-binding peptide
  MOD_RES (34), (34): Xaa is C or S
  MOD_RES (14), (15), (16), (17), (18): Xaa is A or G
  MOD_RES (19), (20), (21), (22): Xaa is A or G or is absent
VPTELRPVQMRKIXXXXXXXXXKKATVDMVVEGXG

SEQ ID NO: 28621 - protein, 36 aa, Artificial Sequence
  Non-cyclic GFR-binding peptide
  MOD_RES (2), (3): Xaa is C or S
  MOD_RES (17), (18), (19), (20), (21): Xaa is A or G
  MOD_RES (22), (23), (24), (25): Xaa is A or G or is absent
AXXVPTELRPVQMRKIXXXXXXXXXKKATVDMVVEG

SEQ ID NO: 28622 - protein, 39 aa, Artificial Sequence
  Non-cyclic GFR-binding peptide
  MOD_RES (5), (6), (39): Xaa is C or S
  MOD_RES (20), (21), (22), (23), (24): Xaa is A or G
  MOD_RES (25), (26), (27), (28): Xaa is A or G or is absent
SAAPXXVPQALRSVKIAKVXXXXXXXXXKEVQVMIVRSX

SEQ ID NO: 28623 - protein, 34 aa, Artificial Sequence
  Non-cyclic GFR-binding peptide
  MOD_RES (3), (4): Xaa is C or S
SPXXVPQDLRSVKIAKVVGRTPKVKEVQVMVVKS

SEQ ID NO: 28624 - protein, 40 aa, Artificial Sequence
  Non-cyclic GFR-binding peptide
  MOD_RES (5), (39): Xaa is C or S
  MOD_RES (19), (20), (21), (22), (23): Xaa is A or G
  MOD_RES (24), (25), (26), (27): Xaa is A or G or is absent
EGLEXVPTEEEPLTMLYYXXXXXXXXXEQLSNFLQHNKXE

SEQ ID NO: 28625 - protein, 38 aa, Artificial Sequence
  Non-cyclic GFR-binding peptide
  MOD_RES (2), (36), (38): Xaa is C or S
  MOD_RES (16), (17), (18), (19), (20): Xaa is A or G
  MOD_RES (21), (22), (23), (24): Xaa is A or G or is absent
EXVPTEEEPLTMLYYXXXXXXXXXEQLSNFLQHNKXEX

SEQ ID NO: 28626 - protein, 36 aa, Artificial Sequence
  Non-cyclic GFR-binding peptide
  MOD_RES (3), (4): Xaa is C or S
  MOD_RES (18), (19), (20), (21), (22): Xaa is A or G
  MOD_RES (23), (24), (25), (26): Xaa is A or G or is absent
KPXXAPTKLSNITVQIMXXXXXXXXXIGEMSNMVVR

SEQ ID NO: 28627 - protein, 33 aa, Artificial Sequence
  Non-cyclic GFR-binding peptide
  MOD_RES (14), (15), (16), (17), (18): Xaa is A or G
  MOD_RES (19), (20), (21), (22): Xaa is A or G or is absent
VPTELRSVKMAKVXXXXXXXXXKEVQVEMVVEG

SEQ ID NO: 28628 - protein, 32 aa, Artificial Sequence
  Non-cyclic GFR-binding peptide
  MOD_RES (14), (15), (16), (17), (18): Xaa is A or G
  MOD_RES (19), (20), (21), (22): Xaa is A or G or is absent
VSQDLRSVKIAKVXXXXXXXXXKEVQVMIVKS

SEQ ID NO: 28629 - protein, 37 aa, Artificial Sequence
  Non-cyclic GFR-binding peptide
  MOD_RES (36), (36): Xaa is C or S
  MOD_RES (15), (16), (17), (18), (19): Xaa is A or G
  MOD_RES (20), (21), (22), (23): Xaa is A or G or is absent
PSRVHHEPLTVLYYXXXXXXXXXEQLSNRLEEHLEXA

SEQ ID NO: 28630 - protein, 38 aa, Artificial Sequence
  Non-cyclic GFR-binding peptide
  MOD_RES (6), (6): Xaa is C or S
DEGLEXVPTEEEPLPMVYYRIKPHQGQHEQLSNFLQHN

SEQ ID NO: 28631 - protein, 34 aa, Artificial Sequence
  Non-cyclic GFR-binding peptide
  MOD_RES (1), (34): Xaa is C or S
  MOD_RES (15), (16), (17), (18), (19): Xaa is A or G
  MOD_RES (20), (21), (22), (23): Xaa is A or G or is absent
XVPQDLSNITIQIMXXXXXXXXXIGEMSMVVKSX

SEQ ID NO: 28632 - protein, 39 aa, Artificial Sequence
  Non-cyclic GFR-binding peptide
  MOD_RES (2), (36), (38): Xaa is C or S
EXVPTEEEPLTMLYYRIKPHQGQHEQLSNFLQHNKXEXR

SEQ ID NO: 28633 - protein, 38 aa, Artificial Sequence
  Non-cyclic GFR-binding peptide
  MOD_RES (5), (6), (38): Xaa is C or S
IPKAXXVPTELRPVQMRKIDEYDKVVKKATVEMVVEGX

SEQ ID NO: 28634 - protein, 40 aa, Artificial Sequence
  Non-cyclic GFR-binding peptide
  MOD_RES (5), (6), (38), (40): Xaa is C or S
VPKPXXAPTQLRPVQVRKIDDSSNVIKKATVNMVVRAXGX

SEQ ID NO: 28635 - protein, 34 aa, Artificial Sequence
  Non-cyclic GFR-binding peptide
  MOD_RES (14), (15), (16), (17), (18): Xaa is A or G
  MOD_RES (19), (20), (21), (22): Xaa is A or G or is absent
SRVHHEPLPVVYYXXXXXXXXXEQLSNRLEEHLE

SEQ ID NO: 28636 - protein, 37 aa, Artificial Sequence
  Non-cyclic GFR-binding peptide
  MOD_RES (3), (4): Xaa is C or S
  MOD_RES (18), (19), (20), (21), (22): Xaa is A or G
  MOD_RES (23), (24), (25), (26): Xaa is A or G or is absent
KPXXAPTQLRPVQVRKIXXXXXXXXXKKATVNMVVRA

SEQ ID NO: 28637 - protein, 33 aa, Artificial Sequence
  Non-cyclic GFR-binding peptide
  MOD_RES (2), (3): Xaa is C or S
PXXAPTQLSNITVQIMDDSSNVIIGEMSNMVVR

SEQ ID NO: 28638 - protein, 32 aa, Artificial Sequence
  Non-cyclic GFR-binding peptide
  MOD_RES (14), (15), (16), (17), (18): Xaa is A or G
  MOD_RES (19), (20), (21), (22): Xaa is A or G or is absent
VPTELRSVKMAKVXXXXXXXXXKEVQVDMVVE

SEQ ID NO: 28639 - protein, 38 aa, Artificial Sequence
  Non-cyclic GFR-binding peptide
  MOD_RES (3), (4), (37): Xaa is C or S
  MOD_RES (18), (19), (20), (21), (22): Xaa is A or G
  MOD_RES (23), (24), (25), (26): Xaa is A or G or is absent
APXXVPQALSNITIQIMXXXXXXXXXIGEMSMIVRSXK

SEQ ID NO: 28640 - protein, 35 aa, Artificial Sequence
  Non-cyclic GFR-binding peptide
  MOD_RES (3), (4): Xaa is C or S
KAXXVPTELSNITMQIMDENEKVVIGEMSDMVVEG

SEQ ID NO: 28641 - protein, 39 aa, Artificial Sequence
  Non-cyclic GFR-binding peptide
  MOD_RES (3), (4), (38): Xaa is C or S
  MOD_RES (18), (19), (20), (21), (22): Xaa is A or G
  MOD_RES (23), (24), (25), (26): Xaa is A or G or is absent
KPXXAPTQLSNITVQIMXXXXXXXXXIGEMSNMVVRAXG

SEQ ID NO: 28642 - protein, 35 aa, Artificial Sequence
  Non-cyclic GFR-binding peptide
  MOD_RES (2), (3), (34): Xaa is C or S
PXXVPQDLRSVKIAKVVGRTPKVKEVQVMVVKSXK

SEQ ID NO: 28643 - protein, 34 aa, Artificial Sequence
  Non-cyclic GFR-binding peptide
  MOD_RES (1), (1): Xaa is C or S
  MOD_RES (15), (16), (17), (18), (19): Xaa is A or G
  MOD_RES (20), (21), (22), (23): Xaa is A or G or is absent
XVPTELSNITMQIMXXXXXXXXXIGEMSEMVVEG

SEQ ID NO: 28644 - protein, 36 aa, Artificial Sequence
  Non-cyclic GFR-binding peptide
  MOD_RES (4), (4): Xaa is C or S
GLEXVPTEEEPLTMLYYRIKPHQGQHEQLSNFLQHN

SEQ ID NO: 28645 - protein, 35 aa, Artificial Sequence
  Non-cyclic GFR-binding peptide
  MOD_RES (2), (3), (34): Xaa is C or S
PXXVSQDLRSVKIAKVIGKTPKIKEVQVMIVKSXK

SEQ ID NO: 28646 - protein, 30 aa, Artificial Sequence
  Non-cyclic GFR-binding peptide
VSQDLRSVKIAKVIGKTPKIKEVQVMIVKS

SEQ ID NO: 28647 - protein, 40 aa, Artificial Sequence
  Non-cyclic GFR-binding peptide
  MOD_RES (3), (4), (38), (40): Xaa is C or S
  MOD_RES (18), (19), (20), (21), (22): Xaa is A or G
  MOD_RES (23), (24), (25), (26): Xaa is A or G or is absent
KAXXVPTELRPVQMRKIXXXXXXXXXKKATVEMVVEGXGX

SEQ ID NO: 28648 - protein, 35 aa, Artificial Sequence
  Non-cyclic GFR-binding peptide
  MOD_RES (34), (34): Xaa is C or S
  MOD_RES (14), (15), (16), (17), (18): Xaa is A or G
  MOD_RES (19), (20), (21), (22): Xaa is A or G or is absent
APTKLRPVQVRKIXXXXXXXXXKKATVNMVVRSXG

SEQ ID NO: 28649 - protein, 43 aa, Artificial Sequence
  Non-cyclic GFR-binding peptide
  MOD_RES (6), (7), (41), (43): Xaa is C or S
  MOD_RES (21), (22), (23), (24), (25): Xaa is A or G
  MOD_RES (26), (27), (28), (29): Xaa is A or G or is absent
KIPKAXXVPTELRPVQMRKIXXXXXXXXXKKATVDMVVEGXGX

SEQ ID NO: 28650 - protein, 37 aa, Artificial Sequence
  Non-cyclic GFR-binding peptide
  MOD_RES (6), (7): Xaa is C or S
YVPKPXXAPTKLRSVKVAKVDDSSNVIKEVQVNMVVR

SEQ ID NO: 28651 - protein, 34 aa, Artificial Sequence
  Non-cyclic GFR-binding peptide
  MOD_RES (1), (32), (34): Xaa is C or S
XVPQDLSNITIQIMVGRTPKVIGEMSMVVKSXKX

SEQ ID NO: 28652 - protein, 33 aa, Artificial Sequence
  Non-cyclic GFR-binding peptide
  MOD_RES (1), (2), (33): Xaa is C or S
XXVSQDLSNITIQIMIGKTPKIIGEMSMIVKSX

SEQ ID NO: 28653 - protein, 39 aa, Artificial Sequence
  Non-cyclic GFR-binding peptide
  MOD_RES (5), (5): Xaa is C or S
  MOD_RES (21), (22), (23), (24), (25): Xaa is A or G
  MOD_RES (26), (27), (28), (29): Xaa is A or G or is absent
RNVQXRPTQVQLEPLPVVYYXXXXXXXXXEQLSNTLEDH

SEQ ID NO: 28654 - protein, 37 aa, Artificial Sequence
  Non-cyclic GFR-binding peptide
  MOD_RES (3), (37): Xaa is C or S
  MOD_RES (17), (18), (19), (20), (21): Xaa is A or G
  MOD_RES (22), (23), (24), (25): Xaa is A or G or is absent
PTXAPTKLRSVKVAKVXXXXXXXXXKEVQVNMVVRSX

SEQ ID NO: 28655 - protein, 35 aa, Artificial Sequence
  Non-cyclic GFR-binding peptide
  MOD_RES (1), (2), (35): Xaa is C or S
  MOD_RES (16), (17), (18), (19), (20): Xaa is A or G
  MOD_RES (21), (22), (23), (24): Xaa is A or G or is absent
XXVSQDLRSVKIAKVXXXXXXXXXKEVQVMIVKSX

SEQ ID NO: 28656 - protein, 40 aa, Artificial Sequence
  Non-cyclic GFR-binding peptide
  MOD_RES (3), (40): Xaa is C or S
VQXRPTQVQLEPLPVVYYEIVRKKPIFEQLSNTLEDHLAX

SEQ ID NO: 28657 - protein, 36 aa, Artificial Sequence
  Non-cyclic GFR-binding peptide
  MOD_RES (3), (4): Xaa is C or S
  MOD_RES (18), (19), (20), (21), (22): Xaa is A or G
  MOD_RES (23), (24), (25), (26): Xaa is A or G or is absent
APXXVPQALSNITIQIMXXXXXXXXXIGEMSMIVRS

SEQ ID NO: 28658 - protein, 38 aa, Artificial Sequence
  Non-cyclic GFR-binding peptide
  MOD_RES (3), (4), (37): Xaa is C or S
  MOD_RES (18), (19), (20), (21), (22): Xaa is A or G
  MOD_RES (23), (24), (25), (26): Xaa is A or G or is absent
SPXXVPQDLRPVQIRKIXXXXXXXXXKKATVMVVKSXK

SEQ ID NO: 28659 - protein, 37 aa, Artificial Sequence
  Non-cyclic GFR-binding peptide
  MOD_RES (4), (5), (36): Xaa is C or S
ASPXXVPQDLSNITIQIMVGRTPKVIGEMSMVVKSXK

SEQ ID NO: 28660 - protein, 38 aa, Artificial Sequence
  Non-cyclic GFR-binding peptide
  MOD_RES (1), (2), (36), (38): Xaa is C or S
  MOD_RES (16), (17), (18), (19), (20): Xaa is A or G
  MOD_RES (21), (22), (23), (24): Xaa is A or G or is absent
XXAPTQLSNITVQIMXXXXXXXXXIGEMSNMVVRAXGX

SEQ ID NO: 28661 - protein, 39 aa, Artificial Sequence
  Non-cyclic GFR-binding peptide
  MOD_RES (4), (5), (39): Xaa is C or S
  MOD_RES (19), (20), (21), (22), (23): Xaa is A or G
  MOD_RES (24), (25), (26), (27): Xaa is A or G or is absent
PKPXXAPTQLRSVKVAKVXXXXXXXXXKEVQVNMVVRAX

SEQ ID NO: 28662 - protein, 41 aa, Artificial Sequence
  Non-cyclic GFR-binding peptide
  MOD_RES (3), (40): Xaa is C or S
VQXRPTQVQLEPLPVVYYEIVRKKPIFEQLSNTLEDHLAXK

SEQ ID NO: 28663 - protein, 36 aa, Artificial Sequence
  Non-cyclic GFR-binding peptide
  MOD_RES (3), (4): Xaa is C or S
  MOD_RES (18), (19), (20), (21), (22): Xaa is A or G
  MOD_RES (23), (24), (25), (26): Xaa is A or G or is absent
KAXXVPTELSNITMQIMXXXXXXXXXIGEMSDMVVE

SEQ ID NO: 28664 - protein, 39 aa, Artificial Sequence
  Non-cyclic GFR-binding peptide
  MOD_RES (6), (7): Xaa is C or S
  MOD_RES (21), (22), (23), (24), (25): Xaa is A or G
  MOD_RES (26), (27), (28), (29): Xaa is A or G or is absent
YVPKPXXAPTKLRSVKVAKVXXXXXXXXXKEVQVNMVVR

SEQ ID NO: 28665 - protein, 35 aa, Artificial Sequence
  Non-cyclic GFR-binding peptide
  MOD_RES (35), (35): Xaa is C or S
TQVQLEPLPVVYYEIVRKKPIFEQLSNTLEDHLAX

SEQ ID NO: 28666 - protein, 39 aa, Artificial Sequence
  Non-cyclic GFR-binding peptide
  MOD_RES (5), (6), (38): Xaa is C or S
IPKAXXVPTELSNITMQIMDENEKVVIGEMSDMVVEGXG

SEQ ID NO: 28667 - protein, 37 aa, Artificial Sequence
  Non-cyclic GFR-binding peptide
  MOD_RES (2), (3), (36): Xaa is C or S
  MOD_RES (17), (18), (19), (20), (21): Xaa is A or G
  MOD_RES (22), (23), (24), (25): Xaa is A or G or is absent
PXXVPQDLRSVKIAKVXXXXXXXXXKEVQVMVVKSXK

SEQ ID NO: 28668 - protein, 40 aa, Artificial Sequence
  Non-cyclic GFR-binding peptide
  MOD_RES (37), (39): Xaa is C or S
RPTQVQLEPLPVVYYEIVRKKPIFEQLSNTLEDHLAXKXE

SEQ ID NO: 28669 - protein, 33 aa, Artificial Sequence
  Non-cyclic GFR-binding peptide
  MOD_RES (1), (2): Xaa is C or S
XXVPTELSNITMQIMDENEKVVIGEMSDMVVEG

SEQ ID NO: 28670 - protein, 39 aa, Artificial Sequence
  Non-cyclic GFR-binding peptide
  MOD_RES (4), (5), (38): Xaa is C or S
  MOD_RES (19), (20), (21), (22), (23): Xaa is A or G
  MOD_RES (24), (25), (26), (27): Xaa is A or G or is absent
AAPXXVPQALRPVQIRKIXXXXXXXXXKKATVMIVRSXK

SEQ ID NO: 28671 - protein, 34 aa, Artificial Sequence
  Non-cyclic GFR-binding peptide
  MOD_RES (2), (3), (34): Xaa is C or S
PXXVPQDLRSVKIAKVVGRTPKVKEVQVMVVKSX

SEQ ID NO: 28672 - protein, 36 aa, Artificial Sequence
  Non-cyclic GFR-binding peptide
  MOD_RES (1), (2), (36): Xaa is C or S
  MOD_RES (16), (17), (18), (19), (20): Xaa is A or G
  MOD_RES (21), (22), (23), (24): Xaa is A or G or is absent
XXAPTQLSNITVQIMXXXXXXXXXIGEMSNMVVRAX

SEQ ID NO: 28673 - protein, 39 aa, Artificial Sequence
  Non-cyclic GFR-binding peptide
  MOD_RES (4), (4): Xaa is C or S
  MOD_RES (20), (21), (22), (23), (24): Xaa is A or G
  MOD_RES (25), (26), (27), (28): Xaa is A or G or is absent
NVQXRPTQVQLEPLTVLYYXXXXXXXXXEQLSNTLEDHL

SEQ ID NO: 28674 - protein, 39 aa, Artificial Sequence
  Non-cyclic GFR-binding peptide
  MOD_RES (5), (6): Xaa is C or S
  MOD_RES (20), (21), (22), (23), (24): Xaa is A or G
  MOD_RES (25), (26), (27), (28): Xaa is A or G or is absent
IPKAXXVPTELRSVKMAKVXXXXXXXXXKEVQVDMVVEG

SEQ ID NO: 28675 - protein, 31 aa, Artificial Sequence
  Non-cyclic GFR-binding peptide
  MOD_RES (1), (1): Xaa is C or S
XAPTKLSNITVQIMDDSSNVIIGEMSNMVVR

SEQ ID NO: 28676 - protein, 35 aa, Artificial Sequence
  Non-cyclic GFR-binding peptide
  MOD_RES (1), (35): Xaa is C or S
  MOD_RES (15), (16), (17), (18), (19): Xaa is A or G
  MOD_RES (20), (21), (22), (23): Xaa is A or G or is absent
XAPTQLSNITVQIMXXXXXXXXXIGEMSNMVVRAX

SEQ ID NO: 28677 - protein, 37 aa, Artificial Sequence
  Non-cyclic GFR-binding peptide
  MOD_RES (37), (37): Xaa is C or S
  MOD_RES (16), (17), (18), (19), (20): Xaa is A or G
  MOD_RES (21), (22), (23), (24): Xaa is A or G or is absent
QPSRVHHEPLTVLYYXXXXXXXXXEQLSNRLEEHLEX

SEQ ID NO: 28678 - protein, 39 aa, Artificial Sequence
  Non-cyclic GFR-binding peptide
  MOD_RES (2), (3), (37), (39): Xaa is C or S
  MOD_RES (17), (18), (19), (20), (21): Xaa is A or G
  MOD_RES (22), (23), (24), (25): Xaa is A or G or is absent
PXXAPTQLRPVQVRKIXXXXXXXXXKKATVNMVVRAXGX

SEQ ID NO: 28679 - protein, 40 aa, Artificial Sequence
  Non-cyclic GFR-binding peptide
  MOD_RES (4), (5), (39): Xaa is C or S
  MOD_RES (19), (20), (21), (22), (23): Xaa is A or G
  MOD_RES (24), (25), (26), (27): Xaa is A or G or is absent
PKAXXVPTELRPVQMRKIXXXXXXXXXKKATVDMVVEGXG

SEQ ID NO: 28680 - protein, 39 aa, Artificial Sequence
  Non-cyclic GFR-binding peptide
  MOD_RES (1), (2), (36), (38): Xaa is C or S
  MOD_RES (16), (17), (18), (19), (20): Xaa is A or G
  MOD_RES (21), (22), (23), (24): Xaa is A or G or is absent
XXAPTQLRSVKVAKVXXXXXXXXXKEVQVNMVVRAXGXH

SEQ ID NO: 28681 - protein, 33 aa, Artificial Sequence
  Non-cyclic GFR-binding peptide
  MOD_RES (1), (1): Xaa is C or S
  MOD_RES (15), (16), (17), (18), (19): Xaa is A or G
  MOD_RES (20), (21), (22), (23): Xaa is A or G or is absent
XVPQDLRSVKIAKVXXXXXXXXXKEVQVMVVKS

SEQ ID NO: 28682 - protein, 40 aa, Artificial Sequence
  Non-cyclic GFR-binding peptide
  MOD_RES (6), (7): Xaa is C or S
  MOD_RES (21), (22), (23), (24), (25): Xaa is A or G
  MOD_RES (26), (27), (28), (29): Xaa is A or G or is absent
TVPKPXXAPTQLRSVKVAKVXXXXXXXXXKEVQVNMVVRA

SEQ ID NO: 28683 - protein, 33 aa, Artificial Sequence
  Non-cyclic GFR-binding peptide
  MOD_RES (1), (1): Xaa is C or S
  MOD_RES (15), (16), (17), (18), (19): Xaa is A or G
  MOD_RES (20), (21), (22), (23): Xaa is A or G or is absent
XVPQALRPVQIRKIXXXXXXXXXKKATVMIVRS

SEQ ID NO: 28684 - protein, 39 aa, Artificial Sequence
  Non-cyclic GFR-binding peptide
  MOD_RES (3), (4), (38): Xaa is C or S
  MOD_RES (18), (19), (20), (21), (22): Xaa is A or G
  MOD_RES (23), (24), (25), (26): Xaa is A or G or is absent
KPXXAPTKLRSVKVAKVXXXXXXXXXKEVQVNMVVRSXG

SEQ ID NO: 28685 - protein, 42 aa, Artificial Sequence
  Non-cyclic GFR-binding peptide
  MOD_RES (7), (39), (41): Xaa is C or S
HVTKPTXAPTKLRSVKVAKVDDSSNVIKEVQVNMVVRSXGXH

SEQ ID NO: 28686 - protein, 35 aa, Artificial Sequence
  Non-cyclic GFR-binding peptide
  MOD_RES (1), (1): Xaa is C or S
XRPTQVQLEPLTVLYYEIVRKKPIFEQLSNTLEDH

SEQ ID NO: 28687 - protein, 42 aa, Artificial Sequence
  Non-cyclic GFR-binding peptide
  MOD_RES (6), (7), (41): Xaa is C or S
  MOD_RES (21), (22), (23), (24), (25): Xaa is A or G
  MOD_RES (26), (27), (28), (29): Xaa is A or G or is absent
YVPKPXXAPTKLRSVKVAKVXXXXXXXXXKEVQVNMVVRSXG

SEQ ID NO: 28688 - protein, 40 aa, Artificial Sequence
  Non-cyclic GFR-binding peptide
  MOD_RES (3), (4), (37), (39): Xaa is C or S
  MOD_RES (18), (19), (20), (21), (22): Xaa is A or G
  MOD_RES (23), (24), (25), (26): Xaa is A or G or is absent
SPXXVPQDLRSVKIAKVXXXXXXXXXKEVQVMVVKSXKXS

SEQ ID NO: 28689 - protein, 40 aa, Artificial Sequence
  Non-cyclic GFR-binding peptide
  MOD_RES (4), (4): Xaa is C or S
NVQXRPTQVQLEPLPVVYYEIVRKKPIFEQLSNTLEDHLA

SEQ ID NO: 28690 - protein, 33 aa, Artificial Sequence
  Non-cyclic GFR-binding peptide
  MOD_RES (1), (2), (33): Xaa is C or S
XXVPQALRSVKIAKVVGRKPKVKEVQVMIVRSX

SEQ ID NO: 28691 - protein, 38 aa, Artificial Sequence
  Non-cyclic GFR-binding peptide
  MOD_RES (3), (4), (35), (37): Xaa is C or S
SPXXVPQDLSNITIQIMVGRTPKVIGEMSMVVKSXKXS

SEQ ID NO: 28692 - protein, 34 aa, Artificial Sequence
  Non-cyclic GFR-binding peptide
  MOD_RES (34), (34): Xaa is C or S
  MOD_RES (14), (15), (16), (17), (18): Xaa is A or G
  MOD_RES (19), (20), (21), (22): Xaa is A or G or is absent
APTQLSNITVQIMXXXXXXXXXIGEMSNMVVRAX

SEQ ID NO: 28693 - protein, 39 aa, Artificial Sequence
  Non-cyclic GFR-binding peptide
  MOD_RES (3), (37), (39): Xaa is C or S
  MOD_RES (17), (18), (19), (20), (21): Xaa is A or G
  MOD_RES (22), (23), (24), (25): Xaa is A or G or is absent
PTXAPTKLSNITVQIMXXXXXXXXXIGEMSNMVVRSXGX

SEQ ID NO: 28694 - protein, 38 aa, Artificial Sequence
  Non-cyclic GFR-binding peptide
  MOD_RES (5), (6): Xaa is C or S
  MOD_RES (20), (21), (22), (23), (24): Xaa is A or G
  MOD_RES (25), (26), (27), (28): Xaa is A or G or is absent
IPKAXXVPTELSNITMQIMXXXXXXXXXIGEMSEMVVE

SEQ ID NO: 28695 - protein, 39 aa, Artificial Sequence
  Non-cyclic GFR-binding peptide
  MOD_RES (3), (37), (39): Xaa is C or S
LEXVPTEEEPLTMLYYRIKPHQGQHEQLSNFLQHNKXEX

SEQ ID NO: 28696 - protein, 32 aa, Artificial Sequence
  Non-cyclic GFR-binding peptide
  MOD_RES (31), (31): Xaa is C or S
VPQALSNITIQIMVGRKPKVIGEMSMIVRSXK

SEQ ID NO: 28697 - protein, 40 aa, Artificial Sequence
  Non-cyclic GFR-binding peptide
  MOD_RES (1), (38), (40): Xaa is C or S
XQPSRVHHEPLTVLYYEYVRKKPKLEQLSNRLEEHLEXAX

SEQ ID NO: 28698 - protein, 38 aa, Artificial Sequence
  Non-cyclic GFR-binding peptide
  MOD_RES (6), (38): Xaa is C or S
VTKPTXAPTKLSNITVQIMDDSSNVIIGEMSNMVVRSX

SEQ ID NO: 28699 - protein, 43 aa, Artificial Sequence
  Non-cyclic GFR-binding peptide
  MOD_RES (5), (6), (40), (42): Xaa is C or S
  MOD_RES (20), (21), (22), (23), (24): Xaa is A or G
  MOD_RES (25), (26), (27), (28): Xaa is A or G or is absent
VPKPXXAPTQLSNITVQIMXXXXXXXXXIGEMSNMVVRAXGXH

SEQ ID NO: 28700 - protein, 37 aa, Artificial Sequence
  Non-cyclic GFR-binding peptide
  MOD_RES (4), (4): Xaa is C or S
GLEXVPTEEEPLPMVYYRIKPHQGQHEQLSNFLQHNK

SEQ ID NO: 28701 - protein, 40 aa, Artificial Sequence
  Non-cyclic GFR-binding peptide
  MOD_RES (5), (6), (38), (40): Xaa is C or S
IPKAXXVPTELSNITMQIMDENEKVVIGEMSDMVVEGXGX

SEQ ID NO: 28702 - protein, 43 aa, Artificial Sequence
  Non-cyclic GFR-binding peptide
  MOD_RES (6), (7), (41), (43): Xaa is C or S
  MOD_RES (21), (22), (23), (24), (25): Xaa is A or G
  MOD_RES (26), (27), (28), (29): Xaa is A or G or is absent
TVPKPXXAPTQLRPVQVRKIXXXXXXXXXKKATVNMVVRAXGX

SEQ ID NO: 28703 - protein, 32 aa, Artificial Sequence
  Non-cyclic GFR-binding peptide
  MOD_RES (32), (32): Xaa is C or S
APTQLRSVKVAKVDDSSNVIKEVQVNMVVRAX

SEQ ID NO: 28704 - protein, 38 aa, Artificial Sequence
  Non-cyclic GFR-binding peptide
  MOD_RES (6), (7): Xaa is C or S
KIPKAXXVPTELRSVKMAKVDENEKVVKEVQVDMVVEG

SEQ ID NO: 28705 - protein, 41 aa, Artificial Sequence
  Non-cyclic GFR-binding peptide
  MOD_RES (7), (41): Xaa is C or S
  MOD_RES (21), (22), (23), (24), (25): Xaa is A or G
  MOD_RES (26), (27), (28), (29): Xaa is A or G or is absent
NDEGLEXVPTEEEPLPMVYYXXXXXXXXXEQLSNFLQHNKX

SEQ ID NO: 28706 - protein, 34 aa, Artificial Sequence
  Non-cyclic GFR-binding peptide
  MOD_RES (1), (2): Xaa is C or S
  MOD_RES (16), (17), (18), (19), (20): Xaa is A or G
  MOD_RES (21), (22), (23), (24): Xaa is A or G or is absent
XXAPTQLRPVQVRKIXXXXXXXXXKKATVNMVVR

SEQ ID NO: 28707 - protein, 40 aa, Artificial Sequence
  Non-cyclic GFR-binding peptide
  MOD_RES (7), (39): Xaa is C or S
HVTKPTXAPTKLRSVKVAKVDDSSNVIKEVQVNMVVRSXG

SEQ ID NO: 28708 - protein, 36 aa, Artificial Sequence
  Non-cyclic GFR-binding peptide
  MOD_RES (1), (2), (34), (36): Xaa is C or S
XXVPTELRSVKMAKVDEYDKVVKEVQVEMVVEGXGX

SEQ ID NO: 28709 - protein, 38 aa, Artificial Sequence
  Non-cyclic GFR-binding peptide
  MOD_RES (6), (7): Xaa is C or S
YVPKPXXAPTKLRPVQVRKIDDSSNVIKKATVNMVVRS

SEQ ID NO: 28710 - protein, 38 aa, Artificial Sequence
  Non-cyclic GFR-binding peptide
  MOD_RES (3), (35), (37): Xaa is C or S
PTXAPTKLRSVKVAKVDDSSNVIKEVQVNMVVRSXGXH

SEQ ID NO: 28711 - protein, 33 aa, Artificial Sequence
  Non-cyclic GFR-binding peptide
  MOD_RES (14), (15), (16), (17), (18): Xaa is A or G
  MOD_RES (19), (20), (21), (22): Xaa is A or G or is absent
APTKLRSVKVAKVXXXXXXXXXKEVQVNMVVRS

SEQ ID NO: 28712 - protein, 36 aa, Artificial Sequence
  Non-cyclic GFR-binding peptide
  MOD_RES (2), (3), (35): Xaa is C or S
PXXAPTKLRSVKVAKVDDSSNVIKEVQVNMVVRSXG

SEQ ID NO: 28713 - protein, 38 aa, Artificial Sequence
  Non-cyclic GFR-binding peptide
  MOD_RES (4), (4): Xaa is C or S
  MOD_RES (20), (21), (22), (23), (24): Xaa is A or G
  MOD_RES (25), (26), (27), (28): Xaa is A or G or is absent
SVKXQPSRVHHEPLTVLYYXXXXXXXXXEQLSNRLEEH

SEQ ID NO: 28714 - protein, 39 aa, Artificial Sequence
  Non-cyclic GFR-binding peptide
  MOD_RES (4), (5), (36), (38): Xaa is C or S
AAPXXVPQALSNITIQIMVGRKPKVIGEMSMIVRSXKXS

SEQ ID NO: 28715 - protein, 36 aa, Artificial Sequence
  Non-cyclic GFR-binding peptide
  MOD_RES (2), (3), (35): Xaa is C or S
AXXVPTELRSVKMAKVDEYDKVVKEVQVEMVVEGXG

SEQ ID NO: 28716 - protein, 38 aa, Artificial Sequence
  Non-cyclic GFR-binding peptide
  MOD_RES (2), (3), (36), (38): Xaa is C or S
  MOD_RES (17), (18), (19), (20), (21): Xaa is A or G
  MOD_RES (22), (23), (24), (25): Xaa is A or G or is absent
PXXVPQDLRSVKIAKVXXXXXXXXXKEVQVMVVKSXKX

SEQ ID NO: 28717 - protein, 36 aa, Artificial Sequence
  Non-cyclic GFR-binding peptide
  MOD_RES (16), (17), (18), (19), (20): Xaa is A or G
  MOD_RES (21), (22), (23), (24): Xaa is A or G or is absent
RPTQVQLEPLTVLYYXXXXXXXXXEQLSNTLEDHLA

SEQ ID NO: 28718 - protein, 39 aa, Artificial Sequence
  Non-cyclic GFR-binding peptide
  MOD_RES (5), (6), (38): Xaa is C or S
VPKPXXAPTKLRPVQVRKIDDSSNVIKKATVNMVVRSXG

SEQ ID NO: 28719 - protein, 39 aa, Artificial Sequence
  Non-cyclic GFR-binding peptide
  MOD_RES (6), (7): Xaa is C or S
  MOD_RES (21), (22), (23), (24), (25): Xaa is A or G
  MOD_RES (26), (27), (28), (29): Xaa is A or G or is absent
KIPKAXXVPTELRPVQMRKIXXXXXXXXXKKATVDMVVE

SEQ ID NO: 28720 - protein, 36 aa, Artificial Sequence
  Non-cyclic GFR-binding peptide
  MOD_RES (1), (35): Xaa is C or S
  MOD_RES (15), (16), (17), (18), (19): Xaa is A or G
  MOD_RES (20), (21), (22), (23): Xaa is A or G or is absent
XVPTELSNITMQIMXXXXXXXXXIGEMSDMVVEGXG

SEQ ID NO: 28721 - protein, 43 aa, Artificial Sequence
  Non-cyclic GFR-binding peptide
  MOD_RES (5), (42): Xaa is C or S
RNVQXRPTQVQLEPLTVLYYEIVRKKPIFEQLSNTLEDHLAXK

SEQ ID NO: 28722 - protein, 36 aa, Artificial Sequence
  Non-cyclic GFR-binding peptide
  MOD_RES (4), (5), (36): Xaa is C or S
AAPXXVPQALSNITIQIMVGRKPKVIGEMSMIVRSX

SEQ ID NO: 28723 - protein, 37 aa, Artificial Sequence
  Non-cyclic GFR-binding peptide
  MOD_RES (1), (2), (34), (36): Xaa is C or S
XXVPTELRSVKMAKVDENEKVVKEVQVDMVVEGXGXR

SEQ ID NO: 28724 - protein, 34 aa, Artificial Sequence
  Non-cyclic GFR-binding peptide
  MOD_RES (3), (4): Xaa is C or S
APXXVPQALRSVKIAKVVGRKPKVKEVQVMIVRS

SEQ ID NO: 28725 - protein, 33 aa, Artificial Sequence
  Non-cyclic GFR-binding peptide
  MOD_RES (1), (2), (33): Xaa is C or S
XXVPQALSNITIQIMVGRKPKVIGEMSMIVRSX

SEQ ID NO: 28726 - protein, 39 aa, Artificial Sequence
  Non-cyclic GFR-binding peptide
  MOD_RES (6), (7): Xaa is C or S
  MOD_RES (21), (22), (23), (24), (25): Xaa is A or G
  MOD_RES (26), (27), (28), (29): Xaa is A or G or is absent
ASAAPXXVPQALRPVQIRKIXXXXXXXXXKKATVMIVRS

SEQ ID NO: 28727 - protein, 33 aa, Artificial Sequence
  Non-cyclic GFR-binding peptide
  MOD_RES (2), (3): Xaa is C or S
AXXVPTELRPVQMRKIDENEKVVKKATVDMVVE

SEQ ID NO: 28728 - protein, 40 aa, Artificial Sequence
  Non-cyclic GFR-binding peptide
  MOD_RES (3), (4), (38), (40): Xaa is C or S
  MOD_RES (18), (19), (20), (21), (22): Xaa is A or G
  MOD_RES (23), (24), (25), (26): Xaa is A or G or is absent
KPXXAPTQLSNITVQIMXXXXXXXXXIGEMSNMVVRAXGX

SEQ ID NO: 28729 - protein, 41 aa, Artificial Sequence
  Non-cyclic GFR-binding peptide
  MOD_RES (6), (7), (39), (41): Xaa is C or S
TVPKPXXAPTQLSNITVQIMDDSSNVIIGEMSNMVVRAXGX

SEQ ID NO: 28730 - protein, 37 aa, Artificial Sequence
  Non-cyclic GFR-binding peptide
  MOD_RES (2), (3), (37): Xaa is C or S
  MOD_RES (17), (18), (19), (20), (21): Xaa is A or G
  MOD_RES (22), (23), (24), (25): Xaa is A or G or is absent
PXXAPTKLRSVKVAKVXXXXXXXXXKEVQVNMVVRSX

SEQ ID NO: 28731 - protein, 45 aa, Artificial Sequence
  Non-cyclic GFR-binding peptide
  MOD_RES (5), (42), (44): Xaa is C or S
RNVQXRPTQVQLEPLPVVYYEIVRKKPIFEQLSNTLEDHLAXKXE

SEQ ID NO: 28732 - protein, 36 aa, Artificial Sequence
  Non-cyclic GFR-binding peptide
  MOD_RES (4), (5), (36): Xaa is C or S
AAPXXVPQALRSVKIAKVVGRKPKVKEVQVMIVRSX

SEQ ID NO: 28733 - protein, 34 aa, Artificial Sequence
  Non-cyclic GFR-binding peptide
  MOD_RES (31), (33): Xaa is C or S
VPQDLSNITIQIMVGRTPKVIGEMSMVVKSXKXS

SEQ ID NO: 28734 - protein, 33 aa, Artificial Sequence
  Non-cyclic GFR-binding peptide
  MOD_RES (32), (32): Xaa is C or S
APTKLRSVKVAKVDDSSNVIKEVQVNMVVRSXG

SEQ ID NO: 28735 - protein, 39 aa, Artificial Sequence
  Non-cyclic GFR-binding peptide
  MOD_RES (3), (4), (36), (38): Xaa is C or S
KAXXVPTELRPVQMRKIDEYDKVVKKATVEMVVEGXGXR

SEQ ID NO: 28736 - protein, 40 aa, Artificial Sequence
  Non-cyclic GFR-binding peptide
  MOD_RES (6), (7): Xaa is C or S
  MOD_RES (21), (22), (23), (24), (25): Xaa is A or G
  MOD_RES (26), (27), (28), (29): Xaa is A or G or is absent
TVPKPXXAPTQLRPVQVRKIXXXXXXXXXKKATVNMVVRA

SEQ ID NO: 28737 - protein, 33 aa, Artificial Sequence
  Non-cyclic GFR-binding peptide
  MOD_RES (1), (1): Xaa is C or S
  MOD_RES (15), (16), (17), (18), (19): Xaa is A or G
  MOD_RES (20), (21), (22), (23): Xaa is A or G or is absent
XVPTEEEPLPMVYYXXXXXXXXXEQLSNFLQHN

SEQ ID NO: 28738 - protein, 37 aa, Artificial Sequence
  Non-cyclic GFR-binding peptide
  MOD_RES (1), (35), (37): Xaa is C or S
  MOD_RES (15), (16), (17), (18), (19): Xaa is A or G
  MOD_RES (20), (21), (22), (23): Xaa is A or G or is absent
XAPTQLRSVKVAKVXXXXXXXXXKEVQVNMVVRAXGX

SEQ ID NO: 28739 - protein, 40 aa, Artificial Sequence
  Non-cyclic GFR-binding peptide
  MOD_RES (6), (40): Xaa is C or S
DEGLEXVPTEEEPLPMVYYRIKPHQGQHEQLSNFLQHNKX

SEQ ID NO: 28740 - protein, 37 aa, Artificial Sequence
  Non-cyclic GFR-binding peptide
  MOD_RES (2), (3), (37): Xaa is C or S
  MOD_RES (17), (18), (19), (20), (21): Xaa is A or G
  MOD_RES (22), (23), (24), (25): Xaa is A or G or is absent
AXXVPTELRPVQMRKIXXXXXXXXXKKATVDMVVEGX

SEQ ID NO: 28741 - protein, 42 aa, Artificial Sequence
  Non-cyclic GFR-binding peptide
  MOD_RES (4), (5), (39), (41): Xaa is C or S
  MOD_RES (19), (20), (21), (22), (23): Xaa is A or G
  MOD_RES (24), (25), (26), (27): Xaa is A or G or is absent
PKPXXAPTQLRSVKVAKVXXXXXXXXXKEVQVNMVVRAXGXH

SEQ ID NO: 28742 - protein, 41 aa, Artificial Sequence
  Non-cyclic GFR-binding peptide
  MOD_RES (5), (6), (38), (40): Xaa is C or S
VPKPXXAPTQLSNITVQIMDDSSNVIIGEMSNMVVRAXGXH

SEQ ID NO: 28743 - protein, 31 aa, Artificial Sequence
  Non-cyclic GFR-binding peptide
  MOD_RES (31), (31): Xaa is C or S
VPQALSNITIQIMVGRKPKVIGEMSMIVRSX

SEQ ID NO: 28744 - protein, 36 aa, Artificial Sequence
  Non-cyclic GFR-binding peptide
  MOD_RES (1), (2), (35): Xaa is C or S
  MOD_RES (16), (17), (18), (19), (20): Xaa is A or G
  MOD_RES (21), (22), (23), (24): Xaa is A or G or is absent
XXVPQALSNITIQIMXXXXXXXXXIGEMSMIVRSXK

SEQ ID NO: 28745 - protein, 39 aa, Artificial Sequence
  Non-cyclic GFR-binding peptide
  MOD_RES (4), (5), (36), (38): Xaa is C or S
ASPXXVPQDLRSVKIAKVVGRTPKVKEVQVMVVKSXKXS

SEQ ID NO: 28746 - protein, 35 aa, Artificial Sequence
  Non-cyclic GFR-binding peptide
  MOD_RES (1), (33), (35): Xaa is C or S
XVPTELSNITMQIMDENEKVVIGEMSDMVVEGXGX

SEQ ID NO: 28747 - protein, 38 aa, Artificial Sequence
  Non-cyclic GFR-binding peptide
  MOD_RES (2), (3), (37): Xaa is C or S
  MOD_RES (17), (18), (19), (20), (21): Xaa is A or G
  MOD_RES (22), (23), (24), (25): Xaa is A or G or is absent
PXXAPTQLRSVKVAKVXXXXXXXXXKEVQVNMVVRAXG

SEQ ID NO: 28748 - protein, 36 aa, Artificial Sequence
  Non-cyclic GFR-binding peptide
  MOD_RES (3), (4), (35): Xaa is C or S
SPXXVPQDLRSVKIAKVVGRTPKVKEVQVMVVKSXK

SEQ ID NO: 28749 - protein, 37 aa, Artificial Sequence
  Non-cyclic GFR-binding peptide
  MOD_RES (36), (36): Xaa is C or S
  MOD_RES (15), (16), (17), (18), (19): Xaa is A or G
  MOD_RES (20), (21), (22), (23): Xaa is A or G or is absent
PSRVHHEPLPVVYYXXXXXXXXXEQLSNRLEEHLEXA

SEQ ID NO: 28750 - protein, 37 aa, Artificial Sequence
  Non-cyclic GFR-binding peptide
  MOD_RES (3), (4), (37): Xaa is C or S
  MOD_RES (18), (19), (20), (21), (22): Xaa is A or G
  MOD_RES (23), (24), (25), (26): Xaa is A or G or is absent
SPXXVPQDLRPVQIRKIXXXXXXXXXKKATVMVVKSX

SEQ ID NO: 28751 - protein, 37 aa, Artificial Sequence
  Non-cyclic GFR-binding peptide
  MOD_RES (2), (3), (35), (37): Xaa is C or S
PXXAPTKLRPVQVRKIDDSSNVIKKATVNMVVRSXGX

SEQ ID NO: 28752 - protein, 41 aa, Artificial Sequence
  Non-cyclic GFR-binding peptide
  MOD_RES (1), (38), (40): Xaa is C or S
XQPSRVHHEPLPVVYYEYVRKKPKLEQLSNRLEEHLEXAXA

SEQ ID NO: 28753 - protein, 38 aa, Artificial Sequence
  Non-cyclic GFR-binding peptide
  MOD_RES (2), (3), (36), (38): Xaa is C or S
  MOD_RES (17), (18), (19), (20), (21): Xaa is A or G
  MOD_RES (22), (23), (24), (25): Xaa is A or G or is absent
PXXVPQALSNITIQIMXXXXXXXXXIGEMSMIVRSXKX

SEQ ID NO: 28754 - protein, 36 aa, Artificial Sequence
  Non-cyclic GFR-binding peptide
  MOD_RES (3), (4): Xaa is C or S
  MOD_RES (18), (19), (20), (21), (22): Xaa is A or G
  MOD_RES (23), (24), (25), (26): Xaa is A or G or is absent
KPXXAPTQLSNITVQIMXXXXXXXXXIGEMSNMVVR

SEQ ID NO: 28755 - protein, 34 aa, Artificial Sequence
  Non-cyclic GFR-binding peptide
  MOD_RES (2), (3): Xaa is C or S
AXXVPTELRPVQMRKIDENEKVVKKATVDMVVEG

SEQ ID NO: 28756 - protein, 40 aa, Artificial Sequence
  Non-cyclic GFR-binding peptide
  MOD_RES (5), (5): Xaa is C or S
  MOD_RES (21), (22), (23), (24), (25): Xaa is A or G
  MOD_RES (26), (27), (28), (29): Xaa is A or G or is absent
RNVQXRPTQVQLEPLTVLYYXXXXXXXXXEQLSNTLEDHL

SEQ ID NO: 28757 - protein, 32 aa, Artificial Sequence
  Non-cyclic GFR-binding peptide
  MOD_RES (1), (1): Xaa is C or S
XAPTKLSNITVQIMDDSSNVIIGEMSNMVVRS

SEQ ID NO: 28758 - protein, 39 aa, Artificial Sequence
  Non-cyclic GFR-binding peptide
  MOD_RES (4), (5), (38): Xaa is C or S
  MOD_RES (19), (20), (21), (22), (23): Xaa is A or G
  MOD_RES (24), (25), (26), (27): Xaa is A or G or is absent
AAPXXVPQALRSVKIAKVXXXXXXXXXKEVQVMIVRSXK

SEQ ID NO: 28759 - protein, 36 aa, Artificial Sequence
  Non-cyclic GFR-binding peptide
  MOD_RES (1), (33), (35): Xaa is C or S
XVPTELRPVQMRKIDEYDKVVKKATVEMVVEGXGXR

SEQ ID NO: 28760 - protein, 34 aa, Artificial Sequence
  Non-cyclic GFR-binding peptide
  MOD_RES (1), (33): Xaa is C or S
XVPTELRPVQMRKIDEYDKVVKKATVEMVVEGXG

SEQ ID NO: 28761 - protein, 35 aa, Artificial Sequence
  Non-cyclic GFR-binding peptide
  MOD_RES (2), (3), (35): Xaa is C or S
PXXAPTQLSNITVQIMDDSSNVIIGEMSNMVVRAX

SEQ ID NO: 28762 - protein, 40 aa, Artificial Sequence
  Non-cyclic GFR-binding peptide
  MOD_RES (5), (5): Xaa is C or S
RNVQXRPTQVQLEPLPVVYYEIVRKKPIFEQLSNTLEDHL

SEQ ID NO: 28763 - protein, 35 aa, Artificial Sequence
  Non-cyclic GFR-binding peptide
  MOD_RES (4), (5): Xaa is C or S
PKPXXAPTKLSNITVQIMDDSSNVIIGEMSNMVVR

SEQ ID NO: 28764 - protein, 40 aa, Artificial Sequence
  Non-cyclic GFR-binding peptide
  MOD_RES (4), (5), (38), (40): Xaa is C or S
  MOD_RES (19), (20), (21), (22), (23): Xaa is A or G
  MOD_RES (24), (25), (26), (27): Xaa is A or G or is absent
ASPXXVPQDLSNITIQIMXXXXXXXXXIGEMSMVVKSXKX

SEQ ID NO: 28765 - protein, 35 aa, Artificial Sequence
  Non-cyclic GFR-binding peptide
  MOD_RES (1), (2), (33), (35): Xaa is C or S
XXVSQDLSNITIQIMIGKTPKIIGEMSMIVKSXKX

SEQ ID NO: 28766 - protein, 36 aa, Artificial Sequence
  Non-cyclic GFR-binding peptide
  MOD_RES (1), (35): Xaa is C or S
  MOD_RES (15), (16), (17), (18), (19): Xaa is A or G
  MOD_RES (20), (21), (22), (23): Xaa is A or G or is absent
XAPTQLRPVQVRKIXXXXXXXXXKKATVNMVVRAXG

SEQ ID NO: 28767 - protein, 43 aa, Artificial Sequence
  Non-cyclic GFR-binding peptide
  MOD_RES (5), (6), (40), (42): Xaa is C or S
  MOD_RES (20), (21), (22), (23), (24): Xaa is A or G
  MOD_RES (25), (26), (27), (28): Xaa is A or G or is absent
VPKPXXAPTKLRSVKVAKVXXXXXXXXXKEVQVNMVVRSXGXH

SEQ ID NO: 28768 - protein, 36 aa, Artificial Sequence
  Non-cyclic GFR-binding peptide
  MOD_RES (2), (2): Xaa is C or S
  MOD_RES (18), (19), (20), (21), (22): Xaa is A or G
  MOD_RES (23), (24), (25), (26): Xaa is A or G or is absent
QXRPTQVQLEPLPVVYYXXXXXXXXXEQLSNTLEDH

SEQ ID NO: 28769 - protein, 40 aa, Artificial Sequence
  Non-cyclic GFR-binding peptide
  MOD_RES (5), (6), (37), (39): Xaa is C or S
SASPXXVPQDLSNITIQIMVGRTPKVIGEMSMVVKSXKXS

SEQ ID NO: 28770 - protein, 38 aa, Artificial Sequence
  Non-cyclic GFR-binding peptide
  MOD_RES (3), (4), (38): Xaa is C or S
  MOD_RES (18), (19), (20), (21), (22): Xaa is A or G
  MOD_RES (23), (24), (25), (26): Xaa is A or G or is absent
KAXXVPTELSNITMQIMXXXXXXXXXIGEMSDMVVEGX

SEQ ID NO: 28771 - protein, 41 aa, Artificial Sequence
  Non-cyclic GFR-binding peptide
  MOD_RES (6), (7), (41): Xaa is C or S
  MOD_RES (21), (22), (23), (24), (25): Xaa is A or G
  MOD_RES (26), (27), (28), (29): Xaa is A or G or is absent
KIPKAXXVPTELSNITMQIMXXXXXXXXXIGEMSDMVVEGX

SEQ ID NO: 28772 - protein, 35 aa, Artificial Sequence
  Non-cyclic GFR-binding peptide
  MOD_RES (35), (35): Xaa is C or S
  MOD_RES (14), (15), (16), (17), (18): Xaa is A or G
  MOD_RES (19), (20), (21), (22): Xaa is A or G or is absent
TQVQLEPLPVVYYXXXXXXXXXEQLSNTLEDHLAX

SEQ ID NO: 28773 - protein, 36 aa, Artificial Sequence
  Non-cyclic GFR-binding peptide
  MOD_RES (3), (4), (36): Xaa is C or S
KAXXVPTELRSVKMAKVDENEKVVKEVQVDMVVEGX

SEQ ID NO: 28774 - protein, 32 aa, Artificial Sequence
  Non-cyclic GFR-binding peptide
  MOD_RES (32), (32): Xaa is C or S
VPTELRSVKMAKVDEYDKVVKEVQVEMVVEGX

SEQ ID NO: 28775 - protein, 35 aa, Artificial Sequence
  Non-cyclic GFR-binding peptide
  MOD_RES (1), (2), (33), (35): Xaa is C or S
XXVPQDLSNITIQIMVGRTPKVIGEMSMVVKSXKX

SEQ ID NO: 28776 - protein, 39 aa, Artificial Sequence
  Non-cyclic GFR-binding peptide
  MOD_RES (4), (5), (38): Xaa is C or S
  MOD_RES (19), (20), (21), (22), (23): Xaa is A or G
  MOD_RES (24), (25), (26), (27): Xaa is A or G or is absent
ASPXXVSQDLRPVQIRKIXXXXXXXXXKKATVMIVKSXK

SEQ ID NO: 28777 - protein, 37 aa, Artificial Sequence
  Non-cyclic GFR-binding peptide
  MOD_RES (4), (5), (37): Xaa is C or S
PKAXXVPTELSNITMQIMDEYDKVVIGEMSEMVVEGX

SEQ ID NO: 28778 - protein, 35 aa, Artificial Sequence
  Non-cyclic GFR-binding peptide
  MOD_RES (3), (4), (35): Xaa is C or S
APXXVPQALSNITIQIMVGRKPKVIGEMSMIVRSX

SEQ ID NO: 28779 - protein, 36 aa, Artificial Sequence
  Non-cyclic GFR-binding peptide
  MOD_RES (1), (33), (35): Xaa is C or S
XVPTELRSVKMAKVDENEKVVKEVQVDMVVEGXGXR

SEQ ID NO: 28780 - protein, 38 aa, Artificial Sequence
  Non-cyclic GFR-binding peptide
  MOD_RES (5), (6), (37): Xaa is C or S
SASPXXVPQDLRSVKIAKVVGRTPKVKEVQVMVVKSXK

SEQ ID NO: 28781 - protein, 41 aa, Artificial Sequence
  Non-cyclic GFR-binding peptide
  MOD_RES (4), (5), (38), (40): Xaa is C or S
  MOD_RES (19), (20), (21), (22), (23): Xaa is A or G
  MOD_RES (24), (25), (26), (27): Xaa is A or G or is absent
ASPXXVPQDLRPVQIRKIXXXXXXXXXKKATVMVVKSXKXS

SEQ ID NO: 28782 - protein, 35 aa, Artificial Sequence
  Non-cyclic GFR-binding peptide
  MOD_RES (2), (3): Xaa is C or S
  MOD_RES (17), (18), (19), (20), (21): Xaa is A or G
  MOD_RES (22), (23), (24), (25): Xaa is A or G or is absent
AXXVPTELSNITMQIMXXXXXXXXXIGEMSDMVVE

SEQ ID NO: 28783 - protein, 38 aa, Artificial Sequence
  Non-cyclic GFR-binding peptide
  MOD_RES (3), (37): Xaa is C or S
  MOD_RES (17), (18), (19), (20), (21): Xaa is A or G
  MOD_RES (22), (23), (24), (25): Xaa is A or G or is absent
LEXVPTEEEPLTMLYYXXXXXXXXXEQLSNFLQHNKXE

SEQ ID NO: 28784 - protein, 34 aa, Artificial Sequence
  Non-cyclic GFR-binding peptide
  MOD_RES (1), (2): Xaa is C or S
  MOD_RES (16), (17), (18), (19), (20): Xaa is A or G
  MOD_RES (21), (22), (23), (24): Xaa is A or G or is absent
XXVSQDLRPVQIRKIXXXXXXXXXKKATVMIVKS

SEQ ID NO: 28785 - protein, 36 aa, Artificial Sequence
  Non-cyclic GFR-binding peptide
  MOD_RES (1), (1): Xaa is C or S
XRPTQVQLEPLPVVYYEIVRKKPIFEQLSNTLEDHL

SEQ ID NO: 28786 - protein, 33 aa, Artificial Sequence
  Non-cyclic GFR-binding peptide
  MOD_RES (1), (1): Xaa is C or S
  MOD_RES (15), (16), (17), (18), (19): Xaa is A or G
  MOD_RES (20), (21), (22), (23): Xaa is A or G or is absent
XVPTEEEPLTMLYYXXXXXXXXXEQLSNFLQHN

SEQ ID NO: 28787 - protein, 37 aa, Artificial Sequence
  Non-cyclic GFR-binding peptide
  MOD_RES (3), (37): Xaa is C or S
  MOD_RES (17), (18), (19), (20), (21): Xaa is A or G
  MOD_RES (22), (23), (24), (25): Xaa is A or G or is absent
LEXVPTEEEPLPMVYYXXXXXXXXXEQLSNFLQHNKX

SEQ ID NO: 28788 - protein, 35 aa, Artificial Sequence
  Non-cyclic GFR-binding peptide
  MOD_RES (3), (4): Xaa is C or S
KPXXAPTKLRSVKVAKVDDSSNVIKEVQVNMVVRS

SEQ ID NO: 28789 - protein, 41 aa, Artificial Sequence
  Non-cyclic GFR-binding peptide
  MOD_RES (5), (6), (40): Xaa is C or S
  MOD_RES (20), (21), (22), (23), (24): Xaa is A or G
  MOD_RES (25), (26), (27), (28): Xaa is A or G or is absent
VPKPXXAPTKLSNITVQIMXXXXXXXXXIGEMSNMVVRSXG

SEQ ID NO: 28790 - protein, 35 aa, Artificial Sequence
  Non-cyclic GFR-binding peptide
  MOD_RES (4), (5): Xaa is C or S
PKPXXAPTKLRSVKVAKVDDSSNVIKEVQVNMVVR

SEQ ID NO: 28791 - protein, 35 aa, Artificial Sequence
  Non-cyclic GFR-binding peptide
  MOD_RES (4), (5): Xaa is C or S
AAPXXVPQALRPVQIRKIVGRKPKVKKATVMIVRS

SEQ ID NO: 28792 - protein, 34 aa, Artificial Sequence
  Non-cyclic GFR-binding peptide
  MOD_RES (1), (2): Xaa is C or S
  MOD_RES (16), (17), (18), (19), (20): Xaa is A or G
  MOD_RES (21), (22), (23), (24): Xaa is A or G or is absent
XXVPTELRSVKMAKVXXXXXXXXXKEVQVDMVVE

SEQ ID NO: 28793 - protein, 37 aa, Artificial Sequence
  Non-cyclic GFR-binding peptide
  MOD_RES (4), (5), (37): Xaa is C or S
PKAXXVPTELSNITMQIMDENEKVVIGEMSDMVVEGX

SEQ ID NO: 28794 - protein, 39 aa, Artificial Sequence
  Non-cyclic GFR-binding peptide
  MOD_RES (4), (5), (37), (39): Xaa is C or S
PKAXXVPTELSNITMQIMDEYDKVVIGEMSEMVVEGXGX

SEQ ID NO: 28795 - protein, 38 aa, Artificial Sequence
  Non-cyclic GFR-binding peptide
  MOD_RES (2), (3), (35), (37): Xaa is C or S
PXXAPTKLRPVQVRKIDDSSNVIKKATVNMVVRSXGXH

SEQ ID NO: 28796 - protein, 43 aa, Artificial Sequence
  Non-cyclic GFR-binding peptide
  MOD_RES (5), (6), (40), (42): Xaa is C or S
  MOD_RES (20), (21), (22), (23), (24): Xaa is A or G
  MOD_RES (25), (26), (27), (28): Xaa is A or G or is absent
IPKAXXVPTELRSVKMAKVXXXXXXXXXKEVQVDMVVEGXGXR

SEQ ID NO: 28797 - protein, 34 aa, Artificial Sequence
  Non-cyclic GFR-binding peptide
  MOD_RES (1), (2): Xaa is C or S
  MOD_RES (16), (17), (18), (19), (20): Xaa is A or G
  MOD_RES (21), (22), (23), (24): Xaa is A or G or is absent
XXVSQDLRSVKIAKVXXXXXXXXXKEVQVMIVKS

SEQ ID NO: 28798 - protein, 37 aa, Artificial Sequence
  Non-cyclic GFR-binding peptide
  MOD_RES (35), (37): Xaa is C or S
  MOD_RES (14), (15), (16), (17), (18): Xaa is A or G
  MOD_RES (19), (20), (21), (22): Xaa is A or G or is absent
SRVHHEPLPVVYYXXXXXXXXXEQLSNRLEEHLEXAX

SEQ ID NO: 28799 - protein, 43 aa, Artificial Sequence
  Non-cyclic GFR-binding peptide
  MOD_RES (5), (42): Xaa is C or S
  MOD_RES (21), (22), (23), (24), (25): Xaa is A or G
  MOD_RES (26), (27), (28), (29): Xaa is A or G or is absent
SSVKXQPSRVHHEPLTVLYYXXXXXXXXXEQLSNRLEEHLEXA

SEQ ID NO: 28800 - protein, 35 aa, Artificial Sequence
  Non-cyclic GFR-binding peptide
  MOD_RES (1), (2): Xaa is C or S
  MOD_RES (16), (17), (18), (19), (20): Xaa is A or G
  MOD_RES (21), (22), (23), (24): Xaa is A or G or is absent
XXVPTELRSVKMAKVXXXXXXXXXKEVQVEMVVEG

SEQ ID NO: 28801 - protein, 36 aa, Artificial Sequence
  Non-cyclic GFR-binding peptide
  MOD_RES (35), (35): Xaa is C or S
SRVHHEPLTVLYYEYVRKKPKLEQLSNRLEEHLEXA

SEQ ID NO: 28802 - protein, 41 aa, Artificial Sequence
  Non-cyclic GFR-binding peptide
  MOD_RES (3), (40): Xaa is C or S
VKXQPSRVHHEPLPVVYYEYVRKKPKLEQLSNRLEEHLEXA

SEQ ID NO: 28803 - protein, 35 aa, Artificial Sequence
  Non-cyclic GFR-binding peptide
  MOD_RES (5), (5): Xaa is C or S
TKPTXAPTKLRPVQVRKIDDSSNVIKKATVNMVVR

SEQ ID NO: 28804 - protein, 36 aa, Artificial Sequence
  Non-cyclic GFR-binding peptide
  MOD_RES (1), (1): Xaa is C or S
  MOD_RES (17), (18), (19), (20), (21): Xaa is A or G
  MOD_RES (22), (23), (24), (25): Xaa is A or G or is absent
XRPTQVQLEPLTVLYYXXXXXXXXXEQLSNTLEDHL

SEQ ID NO: 28805 - protein, 34 aa, Artificial Sequence
  Non-cyclic GFR-binding peptide
  MOD_RES (33), (33): Xaa is C or S
  MOD_RES (14), (15), (16), (17), (18): Xaa is A or G
  MOD_RES (19), (20), (21), (22): Xaa is A or G or is absent
VSQDLRPVQIRKIXXXXXXXXXKKATVMIVKSXK

SEQ ID NO: 28806 - protein, 35 aa, Artificial Sequence
  Non-cyclic GFR-binding peptide
  MOD_RES (2), (3): Xaa is C or S
  MOD_RES (17), (18), (19), (20), (21): Xaa is A or G
  MOD_RES (22), (23), (24), (25): Xaa is A or G or is absent
PXXAPTKLSNITVQIMXXXXXXXXXIGEMSNMVVR

SEQ ID NO: 28807 - protein, 41 aa, Artificial Sequence
  Non-cyclic GFR-binding peptide
  MOD_RES (6), (7), (41): Xaa is C or S
  MOD_RES (21), (22), (23), (24), (25): Xaa is A or G
  MOD_RES (26), (27), (28), (29): Xaa is A or G or is absent
YVPKPXXAPTKLSNITVQIMXXXXXXXXXIGEMSNMVVRSX

SEQ ID NO: 28808 - protein, 38 aa, Artificial Sequence
  Non-cyclic GFR-binding peptide
  MOD_RES (7), (7): Xaa is C or S
HVTKPTXAPTKLRPVQVRKIDDSSNVIKKATVNMVVRS

SEQ ID NO: 28809 - protein, 39 aa, Artificial Sequence
  Non-cyclic GFR-binding peptide
  MOD_RES (2), (3), (36), (38): Xaa is C or S
  MOD_RES (17), (18), (19), (20), (21): Xaa is A or G
  MOD_RES (22), (23), (24), (25): Xaa is A or G or is absent
PXXVPQDLSNITIQIMXXXXXXXXXIGEMSMVVKSXKXS

SEQ ID NO: 28810 - protein, 40 aa, Artificial Sequence
  Non-cyclic GFR-binding peptide
  MOD_RES (4), (5), (37), (39): Xaa is C or S
PKPXXAPTKLSNITVQIMDDSSNVIIGEMSNMVVRSXGXH

SEQ ID NO: 28811 - protein, 34 aa, Artificial Sequence
  Non-cyclic GFR-binding peptide
  MOD_RES (14), (15), (16), (17), (18): Xaa is A or G
  MOD_RES (19), (20), (21), (22): Xaa is A or G or is absent
TQVQLEPLTVLYYXXXXXXXXXEQLSNTLEDHLA

SEQ ID NO: 28812 - protein, 36 aa, Artificial Sequence
  Non-cyclic GFR-binding peptide
  MOD_RES (1), (1): Xaa is C or S
  MOD_RES (17), (18), (19), (20), (21): Xaa is A or G
  MOD_RES (22), (23), (24), (25): Xaa is A or G or is absent
XQPSRVHHEPLTVLYYXXXXXXXXXEQLSNRLEEHL

SEQ ID NO: 28813 - protein, 37 aa, Artificial Sequence
  Non-cyclic GFR-binding peptide
  MOD_RES (3), (4), (37): Xaa is C or S
  MOD_RES (18), (19), (20), (21), (22): Xaa is A or G
  MOD_RES (23), (24), (25), (26): Xaa is A or G or is absent
APXXVPQALRPVQIRKIXXXXXXXXXKKATVMIVRSX

SEQ ID NO: 28814 - protein, 40 aa, Artificial Sequence
  Non-cyclic GFR-binding peptide
  MOD_RES (2), (39): Xaa is C or S
  MOD_RES (18), (19), (20), (21), (22): Xaa is A or G
  MOD_RES (23), (24), (25), (26): Xaa is A or G or is absent
QXRPTQVQLEPLPVVYYXXXXXXXXXEQLSNTLEDHLAXK

SEQ ID NO: 28815 - protein, 38 aa, Artificial Sequence
  Non-cyclic GFR-binding peptide
  MOD_RES (5), (6): Xaa is C or S
  MOD_RES (20), (21), (22), (23), (24): Xaa is A or G
  MOD_RES (25), (26), (27), (28): Xaa is A or G or is absent
IPKAXXVPTELRPVQMRKIXXXXXXXXXKKATVDMVVE

SEQ ID NO: 28816 - protein, 37 aa, Artificial Sequence
  Non-cyclic GFR-binding peptide
  MOD_RES (3), (4): Xaa is C or S
  MOD_RES (18), (19), (20), (21), (22): Xaa is A or G
  MOD_RES (23), (24), (25), (26): Xaa is A or G or is absent
KPXXAPTQLRSVKVAKVXXXXXXXXXKEVQVNMVVRA

SEQ ID NO: 28817 - protein, 38 aa, Artificial Sequence
  Non-cyclic GFR-binding peptide
  MOD_RES (3), (3): Xaa is C or S
VQXRPTQVQLEPLTVLYYEIVRKKPIFEQLSNTLEDHL

SEQ ID NO: 28818 - protein, 39 aa, Artificial Sequence
  Non-cyclic GFR-binding peptide
  MOD_RES (5), (5): Xaa is C or S
  MOD_RES (21), (22), (23), (24), (25): Xaa is A or G
  MOD_RES (26), (27), (28), (29): Xaa is A or G or is absent
SSVKXQPSRVHHEPLTVLYYXXXXXXXXXEQLSNRLEEH

SEQ ID NO: 28819 - protein, 33 aa, Artificial Sequence
  Non-cyclic GFR-binding peptide
  MOD_RES (14), (15), (16), (17), (18): Xaa is A or G
  MOD_RES (19), (20), (21), (22): Xaa is A or G or is absent
APTQLRSVKVAKVXXXXXXXXXKEVQVNMVVRA

SEQ ID NO: 28820 - protein, 40 aa, Artificial Sequence
  Non-cyclic GFR-binding peptide
  MOD_RES (6), (7), (38), (40): Xaa is C or S
ASASPXXVPQDLRSVKIAKVVGRTPKVKEVQVMVVKSXKX

SEQ ID NO: 28821 - protein, 36 aa, Artificial Sequence
  Non-cyclic GFR-binding peptide
  MOD_RES (1), (35): Xaa is C or S
  MOD_RES (15), (16), (17), (18), (19): Xaa is A or G
  MOD_RES (20), (21), (22), (23): Xaa is A or G or is absent
XVPTELSNITMQIMXXXXXXXXXIGEMSEMVVEGXG

SEQ ID NO: 28822 - protein, 40 aa, Artificial Sequence
  Non-cyclic GFR-binding peptide
  MOD_RES (5), (39): Xaa is C or S
  MOD_RES (19), (20), (21), (22), (23): Xaa is A or G
  MOD_RES (24), (25), (26), (27): Xaa is A or G or is absent
TKPTXAPTKLRPVQVRKIXXXXXXXXXKKATVNMVVRSXG

SEQ ID NO: 28823 - protein, 38 aa, Artificial Sequence
  Non-cyclic GFR-binding peptide
  MOD_RES (6), (6): Xaa is C or S
DEGLEXVPTEEEPLTMLYYRIKPHQGQHEQLSNFLQHN

SEQ ID NO: 28824 - protein, 35 aa, Artificial Sequence
  Non-cyclic GFR-binding peptide
  MOD_RES (1), (32), (34): Xaa is C or S
XVPQDLSNITIQIMVGRTPKVIGEMSMVVKSXKXS

SEQ ID NO: 28825 - protein, 34 aa, Artificial Sequence
  Non-cyclic GFR-binding peptide
  MOD_RES (33), (33): Xaa is C or S
  MOD_RES (14), (15), (16), (17), (18): Xaa is A or G
  MOD_RES (19), (20), (21), (22): Xaa is A or G or is absent
VPQDLRPVQIRKIXXXXXXXXXKKATVMVVKSXK

SEQ ID NO: 28826 - protein, 37 aa, Artificial Sequence
  Non-cyclic GFR-binding peptide
  MOD_RES (4), (4): Xaa is C or S
  MOD_RES (18), (19), (20), (21), (22): Xaa is A or G
  MOD_RES (23), (24), (25), (26): Xaa is A or G or is absent
KPTXAPTKLRPVQVRKIXXXXXXXXXKKATVNMVVRS

SEQ ID NO: 28827 - protein, 41 aa, Artificial Sequence
  Non-cyclic GFR-binding peptide
  MOD_RES (6), (7), (41): Xaa is C or S
  MOD_RES (21), (22), (23), (24), (25): Xaa is A or G
  MOD_RES (26), (27), (28), (29): Xaa is A or G or is absent
KIPKAXXVPTELRSVKMAKVXXXXXXXXXKEVQVDMVVEGX

SEQ ID NO: 28828 - protein, 36 aa, Artificial Sequence
  Non-cyclic GFR-binding peptide
  MOD_RES (1), (2), (36): Xaa is C or S
  MOD_RES (16), (17), (18), (19), (20): Xaa is A or G
  MOD_RES (21), (22), (23), (24): Xaa is A or G or is absent
XXAPTQLRPVQVRKIXXXXXXXXXKKATVNMVVRAX

SEQ ID NO: 28829 - protein, 38 aa, Artificial Sequence
  Non-cyclic GFR-binding peptide
  MOD_RES (6), (7), (38): Xaa is C or S
ASASPXXVSQDLRSVKIAKVIGKTPKIKEVQVMIVKSX

SEQ ID NO: 28830 - protein, 39 aa, Artificial Sequence
  Non-cyclic GFR-binding peptide
  MOD_RES (6), (6): Xaa is C or S
  MOD_RES (20), (21), (22), (23), (24): Xaa is A or G
  MOD_RES (25), (26), (27), (28): Xaa is A or G or is absent
DEGLEXVPTEEEPLTMLYYXXXXXXXXXEQLSNFLQHNK

SEQ ID NO: 28831 - protein, 41 aa, Artificial Sequence
  Non-cyclic GFR-binding peptide
  MOD_RES (4), (5), (38), (40): Xaa is C or S
  MOD_RES (19), (20), (21), (22), (23): Xaa is A or G
  MOD_RES (24), (25), (26), (27): Xaa is A or G or is absent
ASPXXVSQDLSNITIQIMXXXXXXXXXIGEMSMIVKSXKXS

SEQ ID NO: 28832 - protein, 33 aa, Artificial Sequence
  Non-cyclic GFR-binding peptide
  MOD_RES (1), (2): Xaa is C or S
XXVPTELSNITMQIMDEYDKVVIGEMSEMVVEG

SEQ ID NO: 28833 - protein, 37 aa, Artificial Sequence
  Non-cyclic GFR-binding peptide
  MOD_RES (1), (1): Xaa is C or S
XRPTQVQLEPLTVLYYEIVRKKPIFEQLSNTLEDHLA

SEQ ID NO: 28834 - protein, 43 aa, Artificial Sequence
  Non-cyclic GFR-binding peptide
  MOD_RES (6), (7), (41), (43): Xaa is C or S
  MOD_RES (21), (22), (23), (24), (25): Xaa is A or G
  MOD_RES (26), (27), (28), (29): Xaa is A or G or is absent
YVPKPXXAPTKLRSVKVAKVXXXXXXXXXKEVQVNMVVRSXGX

SEQ ID NO: 28835 - protein, 35 aa, Artificial Sequence
  Non-cyclic GFR-binding peptide
  MOD_RES (4), (5): Xaa is C or S
PKPXXAPTKLRPVQVRKIDDSSNVIKKATVNMVVR

SEQ ID NO: 28836 - protein, 35 aa, Artificial Sequence
  Non-cyclic GFR-binding peptide
  MOD_RES (32), (34): Xaa is C or S
APTQLRSVKVAKVDDSSNVIKEVQVNMVVRAXGXH

SEQ ID NO: 28837 - protein, 45 aa, Artificial Sequence
  Non-cyclic GFR-binding peptide
  MOD_RES (5), (42), (44): Xaa is C or S
  MOD_RES (21), (22), (23), (24), (25): Xaa is A or G
  MOD_RES (26), (27), (28), (29): Xaa is A or G or is absent
RNVQXRPTQVQLEPLPVVYYXXXXXXXXXEQLSNTLEDHLAXKXE

SEQ ID NO: 28838 - protein, 39 aa, Artificial Sequence
  Non-cyclic GFR-binding peptide
  MOD_RES (3), (4), (37), (39): Xaa is C or S
  MOD_RES (18), (19), (20), (21), (22): Xaa is A or G
  MOD_RES (23), (24), (25), (26): Xaa is A or G or is absent
SPXXVPQDLSNITIQIMXXXXXXXXXIGEMSMVVKSXKX

SEQ ID NO: 28839 - protein, 34 aa, Artificial Sequence
  Non-cyclic GFR-binding peptide
  MOD_RES (32), (34): Xaa is C or S
VPTELRPVQMRKIDENEKVVKKATVDMVVEGXGX

SEQ ID NO: 28840 - protein, 35 aa, Artificial Sequence
  Non-cyclic GFR-binding peptide
  MOD_RES (1), (35): Xaa is C or S
  MOD_RES (15), (16), (17), (18), (19): Xaa is A or G
  MOD_RES (20), (21), (22), (23): Xaa is A or G or is absent
XAPTQLRPVQVRKIXXXXXXXXXKKATVNMVVRAX

SEQ ID NO: 28841 - protein, 40 aa, Artificial Sequence
  Non-cyclic GFR-binding peptide
  MOD_RES (3), (4), (37), (39): Xaa is C or S
  MOD_RES (18), (19), (20), (21), (22): Xaa is A or G
  MOD_RES (23), (24), (25), (26): Xaa is A or G or is absent
SPXXVSQDLSNITIQIMXXXXXXXXXIGEMSMIVKSXKXS

SEQ ID NO: 28842 - protein, 43 aa, Artificial Sequence
  Non-cyclic GFR-binding peptide
  MOD_RES (4), (41), (43): Xaa is C or S
  MOD_RES (20), (21), (22), (23), (24): Xaa is A or G
  MOD_RES (25), (26), (27), (28): Xaa is A or G or is absent
NVQXRPTQVQLEPLTVLYYXXXXXXXXXEQLSNTLEDHLAXKX

SEQ ID NO: 28843 - protein, 40 aa, Artificial Sequence
  Non-cyclic GFR-binding peptide
  MOD_RES (5), (39): Xaa is C or S
  MOD_RES (19), (20), (21), (22), (23): Xaa is A or G
  MOD_RES (24), (25), (26), (27): Xaa is A or G or is absent
TKPTXAPTKLSNITVQIMXXXXXXXXXIGEMSNMVVRSXG

SEQ ID NO: 28844 - protein, 42 aa, Artificial Sequence
  Non-cyclic GFR-binding peptide
  MOD_RES (5), (6), (39), (41): Xaa is C or S
  MOD_RES (20), (21), (22), (23), (24): Xaa is A or G
  MOD_RES (25), (26), (27), (28): Xaa is A or G or is absent
SASPXXVPQDLSNITIQIMXXXXXXXXXIGEMSMVVKSXKXS

SEQ ID NO: 28845 - protein, 43 aa, Artificial Sequence
  Non-cyclic GFR-binding peptide
  MOD_RES (7), (41), (43): Xaa is C or S
  MOD_RES (21), (22), (23), (24), (25): Xaa is A or G
  MOD_RES (26), (27), (28), (29): Xaa is A or G or is absent
NDEGLEXVPTEEEPLPMVYYXXXXXXXXXEQLSNFLQHNKXEX

SEQ ID NO: 28846 - protein, 39 aa, Artificial Sequence
  Non-cyclic GFR-binding peptide
  MOD_RES (4), (5), (36), (38): Xaa is C or S
ASPXXVSQDLRPVQIRKIIGKTPKIKKATVMIVKSXKXS

SEQ ID NO: 28847 - protein, 33 aa, Artificial Sequence
  Non-cyclic GFR-binding peptide
  MOD_RES (2), (2): Xaa is C or S
TXAPTKLRPVQVRKIDDSSNVIKKATVNMVVRS

SEQ ID NO: 28848 - protein, 31 aa, Artificial Sequence
  Non-cyclic GFR-binding peptide
  MOD_RES (1), (1): Xaa is C or S
XVPTELRSVKMAKVDEYDKVVKEVQVEMVVE

SEQ ID NO: 28849 - protein, 38 aa, Artificial Sequence
  Non-cyclic GFR-binding peptide
  MOD_RES (1), (2), (35), (37): Xaa is C or S
  MOD_RES (16), (17), (18), (19), (20): Xaa is A or G
  MOD_RES (21), (22), (23), (24): Xaa is A or G or is absent
XXVSQDLRSVKIAKVXXXXXXXXXKEVQVMIVKSXKXS

SEQ ID NO: 28850 - protein, 39 aa, Artificial Sequence
  Non-cyclic GFR-binding peptide
  MOD_RES (6), (7): Xaa is C or S
  MOD_RES (21), (22), (23), (24), (25): Xaa is A or G
  MOD_RES (26), (27), (28), (29): Xaa is A or G or is absent
YVPKPXXAPTKLRPVQVRKIXXXXXXXXXKKATVNMVVR

SEQ ID NO: 28851 - protein, 35 aa, Artificial Sequence
  Non-cyclic GFR-binding peptide
  MOD_RES (1), (1): Xaa is C or S
XRPTQVQLEPLPVVYYEIVRKKPIFEQLSNTLEDH

SEQ ID NO: 28852 - protein, 34 aa, Artificial Sequence
  Non-cyclic GFR-binding peptide
  MOD_RES (3), (4): Xaa is C or S
SPXXVSQDLRSVKIAKVIGKTPKIKEVQVMIVKS

SEQ ID NO: 28853 - protein, 44 aa, Artificial Sequence
  Non-cyclic GFR-binding peptide
  MOD_RES (5), (42), (44): Xaa is C or S
  MOD_RES (21), (22), (23), (24), (25): Xaa is A or G
  MOD_RES (26), (27), (28), (29): Xaa is A or G or is absent
RNVQXRPTQVQLEPLTVLYYXXXXXXXXXEQLSNTLEDHLAXKX

SEQ ID NO: 28854 - protein, 40 aa, Artificial Sequence
  Non-cyclic GFR-binding peptide
  MOD_RES (3), (4), (38), (40): Xaa is C or S
  MOD_RES (18), (19), (20), (21), (22): Xaa is A or G
  MOD_RES (23), (24), (25), (26): Xaa is A or G or is absent
KPXXAPTKLSNITVQIMXXXXXXXXXIGEMSNMVVRSXGX

SEQ ID NO: 28855 - protein, 41 aa, Artificial Sequence
  Non-cyclic GFR-binding peptide
  MOD_RES (6), (40): Xaa is C or S
  MOD_RES (20), (21), (22), (23), (24): Xaa is A or G
  MOD_RES (25), (26), (27), (28): Xaa is A or G or is absent
VTKPTXAPTKLRSVKVAKVXXXXXXXXXKEVQVNMVVRSXG

SEQ ID NO: 28856 - protein, 38 aa, Artificial Sequence
  Non-cyclic GFR-binding peptide
  MOD_RES (36), (38): Xaa is C or S
PSRVHHEPLTVLYYEYVRKKPKLEQLSNRLEEHLEXAX

SEQ ID NO: 28857 - protein, 35 aa, Artificial Sequence
  Non-cyclic GFR-binding peptide
  MOD_RES (2), (2): Xaa is C or S
  MOD_RES (16), (17), (18), (19), (20): Xaa is A or G
  MOD_RES (21), (22), (23), (24): Xaa is A or G or is absent
TXAPTKLSNITVQIMXXXXXXXXXIGEMSNMVVRS

SEQ ID NO: 28858 - protein, 41 aa, Artificial Sequence
  Non-cyclic GFR-binding peptide
  MOD_RES (5), (6), (39), (41): Xaa is C or S
  MOD_RES (20), (21), (22), (23), (24): Xaa is A or G
  MOD_RES (25), (26), (27), (28): Xaa is A or G or is absent
SASPXXVPQDLRSVKIAKVXXXXXXXXXKEVQVMVVKSXKX

SEQ ID NO: 28859 - protein, 38 aa, Artificial Sequence
  Non-cyclic GFR-binding peptide
  MOD_RES (1), (35), (37): Xaa is C or S
  MOD_RES (15), (16), (17), (18), (19): Xaa is A or G
  MOD_RES (20), (21), (22), (23): Xaa is A or G or is absent
XAPTQLSNITVQIMXXXXXXXXXIGEMSNMVVRAXGXH

SEQ ID NO: 28860 - protein, 36 aa, Artificial Sequence
  Non-cyclic GFR-binding peptide
  MOD_RES (1), (33), (35): Xaa is C or S
XAPTQLRSVKVAKVDDSSNVIKEVQVNMVVRAXGXH

SEQ ID NO: 28861 - protein, 39 aa, Artificial Sequence
  Non-cyclic GFR-binding peptide
  MOD_RES (4), (4): Xaa is C or S
SVKXQPSRVHHEPLTVLYYEYVRKKPKLEQLSNRLEEHL

SEQ ID NO: 28862 - protein, 39 aa, Artificial Sequence
  Non-cyclic GFR-binding peptide
  MOD_RES (7), (7): Xaa is C or S
  MOD_RES (21), (22), (23), (24), (25): Xaa is A or G
  MOD_RES (26), (27), (28), (29): Xaa is A or G or is absent
HVTKPTXAPTKLSNITVQIMXXXXXXXXXIGEMSNMVVR

SEQ ID NO: 28863 - protein, 35 aa, Artificial Sequence
  Non-cyclic GFR-binding peptide
  MOD_RES (2), (3), (35): Xaa is C or S
PXXAPTKLSNITVQIMDDSSNVIIGEMSNMVVRSX

SEQ ID NO: 28864 - protein, 39 aa, Artificial Sequence
  Non-cyclic GFR-binding peptide
  MOD_RES (3), (3): Xaa is C or S
VQXRPTQVQLEPLPVVYYEIVRKKPIFEQLSNTLEDHLA

SEQ ID NO: 28865 - protein, 40 aa, Artificial Sequence
  Non-cyclic GFR-binding peptide
  MOD_RES (4), (5), (37), (39): Xaa is C or S
PKPXXAPTQLSNITVQIMDDSSNVIIGEMSNMVVRAXGXH

SEQ ID NO: 28866 - protein, 37 aa, Artificial Sequence
  Non-cyclic GFR-binding peptide
  MOD_RES (2), (3), (36): Xaa is C or S
  MOD_RES (17), (18), (19), (20), (21): Xaa is A or G
  MOD_RES (22), (23), (24), (25): Xaa is A or G or is absent
PXXVSQDLRSVKIAKVXXXXXXXXXKEVQVMIVKSXK

SEQ ID NO: 28867 - protein, 42 aa, Artificial Sequence
  Non-cyclic GFR-binding peptide
  MOD_RES (2), (39), (41): Xaa is C or S
  MOD_RES (18), (19), (20), (21), (22): Xaa is A or G
  MOD_RES (23), (24), (25), (26): Xaa is A or G or is absent
QXRPTQVQLEPLPVVYYXXXXXXXXXEQLSNTLEDHLAXKXE

SEQ ID NO: 28868 - protein, 35 aa, Artificial Sequence
  Non-cyclic GFR-binding peptide
  MOD_RES (1), (2), (33), (35): Xaa is C or S
XXVSQDLRPVQIRKIIGKTPKIKKATVMIVKSXKX

SEQ ID NO: 28869 - protein, 35 aa, Artificial Sequence
  Non-cyclic GFR-binding peptide
  MOD_RES (3), (4): Xaa is C or S
KPXXAPTQLRPVQVRKIDDSSNVIKKATVNMVVRA

SEQ ID NO: 28870 - protein, 36 aa, Artificial Sequence
  Non-cyclic GFR-binding peptide
QPSRVHHEPLPVVYYEYVRKKPKLEQLSNRLEEHLE

SEQ ID NO: 28871 - protein, 37 aa, Artificial Sequence
  Non-cyclic GFR-binding peptide
  MOD_RES (1), (2), (36): Xaa is C or S
  MOD_RES (16), (17), (18), (19), (20): Xaa is A or G
  MOD_RES (21), (22), (23), (24): Xaa is A or G or is absent
XXVPTELRSVKMAKVXXXXXXXXXKEVQVDMVVEGXG

SEQ ID NO: 28872 - protein, 41 aa, Artificial Sequence
  Non-cyclic GFR-binding peptide
  MOD_RES (4), (41): Xaa is C or S
  MOD_RES (20), (21), (22), (23), (24): Xaa is A or G
  MOD_RES (25), (26), (27), (28): Xaa is A or G or is absent
SVKXQPSRVHHEPLPVVYYXXXXXXXXXEQLSNRLEEHLEX

SEQ ID NO: 28873 - protein, 37 aa, Artificial Sequence
  Non-cyclic GFR-binding peptide
  MOD_RES (4), (5): Xaa is C or S
  MOD_RES (19), (20), (21), (22), (23): Xaa is A or G
  MOD_RES (24), (25), (26), (27): Xaa is A or G or is absent
PKAXXVPTELRPVQMRKIXXXXXXXXXKKATVEMVVE

SEQ ID NO: 28874 - protein, 39 aa, Artificial Sequence
  Non-cyclic GFR-binding peptide
  MOD_RES (37), (39): Xaa is C or S
QPSRVHHEPLPVVYYEYVRKKPKLEQLSNRLEEHLEXAX

SEQ ID NO: 28875 - protein, 35 aa, Artificial Sequence
  Non-cyclic GFR-binding peptide
  MOD_RES (1), (2), (33), (35): Xaa is C or S
XXVPQALRPVQIRKIVGRKPKVKKATVMIVRSXKX

SEQ ID NO: 28876 - protein, 40 aa, Artificial Sequence
  Non-cyclic GFR-binding peptide
  MOD_RES (6), (40): Xaa is C or S
  MOD_RES (20), (21), (22), (23), (24): Xaa is A or G
  MOD_RES (25), (26), (27), (28): Xaa is A or G or is absent
VTKPTXAPTKLSNITVQIMXXXXXXXXXIGEMSNMVVRSX

SEQ ID NO: 28877 - protein, 35 aa, Artificial Sequence
  Non-cyclic GFR-binding peptide
  MOD_RES (2), (3), (35): Xaa is C or S
AXXVPTELSNITMQIMDEYDKVVIGEMSEMVVEGX

SEQ ID NO: 28878 - protein, 38 aa, Artificial Sequence
  Non-cyclic GFR-binding peptide
  MOD_RES (4), (5), (36), (38): Xaa is C or S
AAPXXVPQALRPVQIRKIVGRKPKVKKATVMIVRSXKX

SEQ ID NO: 28879 - protein, 39 aa, Artificial Sequence
  Non-cyclic GFR-binding peptide
  MOD_RES (3), (4), (36), (38): Xaa is C or S
KAXXVPTELRSVKMAKVDENEKVVKEVQVDMVVEGXGXR

SEQ ID NO: 28880 - protein, 42 aa, Artificial Sequence
  Non-cyclic GFR-binding peptide
  MOD_RES (2), (39), (41): Xaa is C or S
KXQPSRVHHEPLTVLYYEYVRKKPKLEQLSNRLEEHLEXAXA

SEQ ID NO: 28881 - protein, 34 aa, Artificial Sequence
  Non-cyclic GFR-binding peptide
  MOD_RES (1), (1): Xaa is C or S
  MOD_RES (15), (16), (17), (18), (19): Xaa is A or G
  MOD_RES (20), (21), (22), (23): Xaa is A or G or is absent
XAPTQLSNITVQIMXXXXXXXXXIGEMSNMVVRA

SEQ ID NO: 28882 - protein, 34 aa, Artificial Sequence
  Non-cyclic GFR-binding peptide
  MOD_RES (1), (32), (34): Xaa is C or S
XVPQALRPVQIRKIVGRKPKVKKATVMIVRSXKX

SEQ ID NO: 28883 - protein, 39 aa, Artificial Sequence
  Non-cyclic GFR-binding peptide
  MOD_RES (5), (6): Xaa is C or S
  MOD_RES (20), (21), (22), (23), (24): Xaa is A or G
  MOD_RES (25), (26), (27), (28): Xaa is A or G or is absent
VPKPXXAPTQLRSVKVAKVXXXXXXXXXKEVQVNMVVRA

SEQ ID NO: 28884 - protein, 37 aa, Artificial Sequence
  Non-cyclic GFR-binding peptide
  MOD_RES (6), (6): Xaa is C or S
VTKPTXAPTKLRSVKVAKVDDSSNVIKEVQVNMVVRS

SEQ ID NO: 28885 - protein, 38 aa, Artificial Sequence
  Non-cyclic GFR-binding peptide
  MOD_RES (37), (37): Xaa is C or S
  MOD_RES (16), (17), (18), (19), (20): Xaa is A or G
  MOD_RES (21), (22), (23), (24): Xaa is A or G or is absent
QPSRVHHEPLTVLYYXXXXXXXXXEQLSNRLEEHLEXA

SEQ ID NO: 28886 - protein, 39 aa, Artificial Sequence
  Non-cyclic GFR-binding peptide
  MOD_RES (6), (7), (39): Xaa is C or S
TVPKPXXAPTQLRSVKVAKVDDSSNVIKEVQVNMVVRAX

SEQ ID NO: 28887 - protein, 40 aa, Artificial Sequence
  Non-cyclic GFR-binding peptide
  MOD_RES (6), (7), (40): Xaa is C or S
  MOD_RES (21), (22), (23), (24), (25): Xaa is A or G
  MOD_RES (26), (27), (28), (29): Xaa is A or G or is absent
ASASPXXVPQDLSNITIQIMXXXXXXXXXIGEMSMVVKSX

SEQ ID NO: 28888 - protein, 32 aa, Artificial Sequence
  Non-cyclic GFR-binding peptide
  MOD_RES (32), (32): Xaa is C or S
APTKLRSVKVAKVDDSSNVIKEVQVNMVVRSX

SEQ ID NO: 28889 - protein, 43 aa, Artificial Sequence
  Non-cyclic GFR-binding peptide
  MOD_RES (5), (6), (40), (42): Xaa is C or S
  MOD_RES (20), (21), (22), (23), (24): Xaa is A or G
  MOD_RES (25), (26), (27), (28): Xaa is A or G or is absent
VPKPXXAPTQLRPVQVRKIXXXXXXXXXKKATVNMVVRAXGXH

SEQ ID NO: 28890 - protein, 39 aa, Artificial Sequence
  Non-cyclic GFR-binding peptide
  MOD_RES (6), (7), (39): Xaa is C or S
SIPKAXXVPTELRSVKMAKVDEYDKVVKEVQVEMVVEGX

SEQ ID NO: 28891 - protein, 39 aa, Artificial Sequence
  Non-cyclic GFR-binding peptide
  MOD_RES (7), (7): Xaa is C or S
NDEGLEXVPTEEEPLTMLYYRIKPHQGQHEQLSNFLQHN

SEQ ID NO: 28892 - protein, 39 aa, Artificial Sequence
  Non-cyclic GFR-binding peptide
  MOD_RES (6), (7): Xaa is C or S
  MOD_RES (21), (22), (23), (24), (25): Xaa is A or G
  MOD_RES (26), (27), (28), (29): Xaa is A or G or is absent
ASAAPXXVPQALRSVKIAKVXXXXXXXXXKEVQVMIVRS

SEQ ID NO: 28893 - protein, 34 aa, Artificial Sequence
  Non-cyclic GFR-binding peptide
  MOD_RES (34), (34): Xaa is C or S
  MOD_RES (14), (15), (16), (17), (18): Xaa is A or G
  MOD_RES (19), (20), (21), (22): Xaa is A or G or is absent
VPTELRPVQMRKIXXXXXXXXXKKATVEMVVEGX

SEQ ID NO: 28894 - protein, 31 aa, Artificial Sequence
  Non-cyclic GFR-binding peptide
APTQLRSVKVAKVDDSSNVIKEVQVNMVVRA

SEQ ID NO: 28895 - protein, 34 aa, Artificial Sequence
  Non-cyclic GFR-binding peptide
  MOD_RES (1), (2): Xaa is C or S
  MOD_RES (16), (17), (18), (19), (20): Xaa is A or G
  MOD_RES (21), (22), (23), (24): Xaa is A or G or is absent
XXAPTQLRSVKVAKVXXXXXXXXXKEVQVNMVVR

SEQ ID NO: 28896 - protein, 36 aa, Artificial Sequence
  Non-cyclic GFR-binding peptide
  MOD_RES (2), (3), (35): Xaa is C or S
AXXVPTELRSVKMAKVDENEKVVKEVQVDMVVEGXG

SEQ ID NO: 28897 - protein, 38 aa, Artificial Sequence
  Non-cyclic GFR-binding peptide
  MOD_RES (5), (5): Xaa is C or S
  MOD_RES (19), (20), (21), (22), (23): Xaa is A or G
  MOD_RES (24), (25), (26), (27): Xaa is A or G or is absent
TKPTXAPTKLRSVKVAKVXXXXXXXXXKEVQVNMVVRS

SEQ ID NO: 28898 - protein, 43 aa, Artificial Sequence
  Non-cyclic GFR-binding peptide
  MOD_RES (5), (6), (40), (42): Xaa is C or S
  MOD_RES (20), (21), (22), (23), (24): Xaa is A or G
  MOD_RES (25), (26), (27), (28): Xaa is A or G or is absent
VPKPXXAPTQLRSVKVAKVXXXXXXXXXKEVQVNMVVRAXGXH

SEQ ID NO: 28899 - protein, 43 aa, Artificial Sequence
  Non-cyclic GFR-binding peptide
  MOD_RES (6), (7), (41), (43): Xaa is C or S
  MOD_RES (21), (22), (23), (24), (25): Xaa is A or G
  MOD_RES (26), (27), (28), (29): Xaa is A or G or is absent
SIPKAXXVPTELSNITMQIMXXXXXXXXXIGEMSEMVVEGXGX

SEQ ID NO: 28900 - protein, 43 aa, Artificial Sequence
  Non-cyclic GFR-binding peptide
  MOD_RES (6), (7), (41), (43): Xaa is C or S
  MOD_RES (21), (22), (23), (24), (25): Xaa is A or G
  MOD_RES (26), (27), (28), (29): Xaa is A or G or is absent
SIPKAXXVPTELRSVKMAKVXXXXXXXXXKEVQVEMVVEGXGX

SEQ ID NO: 28901 - protein, 37 aa, Artificial Sequence
  Non-cyclic GFR-binding peptide
  MOD_RES (34), (36): Xaa is C or S
  MOD_RES (14), (15), (16), (17), (18): Xaa is A or G
  MOD_RES (19), (20), (21), (22): Xaa is A or G or is absent
VPTEEEPLPMVYYXXXXXXXXXEQLSNFLQHNKXEXR

SEQ ID NO: 28902 - protein, 35 aa, Artificial Sequence
  Non-cyclic GFR-binding peptide
  MOD_RES (2), (3): Xaa is C or S
  MOD_RES (17), (18), (19), (20), (21): Xaa is A or G
  MOD_RES (22), (23), (24), (25): Xaa is A or G or is absent
PXXAPTQLSNITVQIMXXXXXXXXXIGEMSNMVVR

SEQ ID NO: 28903 - protein, 34 aa, Artificial Sequence
  Non-cyclic GFR-binding peptide
  MOD_RES (2), (2): Xaa is C or S
  MOD_RES (16), (17), (18), (19), (20): Xaa is A or G
  MOD_RES (21), (22), (23), (24): Xaa is A or G or is absent
TXAPTKLRPVQVRKIXXXXXXXXXKKATVNMVVR

SEQ ID NO: 28904 - protein, 40 aa, Artificial Sequence
  Non-cyclic GFR-binding peptide
  MOD_RES (5), (6), (37), (39): Xaa is C or S
SASPXXVSQDLRSVKIAKVIGKTPKIKEVQVMIVKSXKXS

SEQ ID NO: 28905 - protein, 41 aa, Artificial Sequence
  Non-cyclic GFR-binding peptide
  MOD_RES (4), (5), (38), (40): Xaa is C or S
  MOD_RES (19), (20), (21), (22), (23): Xaa is A or G
  MOD_RES (24), (25), (26), (27): Xaa is A or G or is absent
ASPXXVPQDLSNITIQIMXXXXXXXXXIGEMSMVVKSXKXS

SEQ ID NO: 28906 - protein, 36 aa, Artificial Sequence
  Non-cyclic GFR-binding peptide
  MOD_RES (5), (6): Xaa is C or S
VPKPXXAPTQLRPVQVRKIDDSSNVIKKATVNMVVR

SEQ ID NO: 28907 - protein, 32 aa, Artificial Sequence
  Non-cyclic GFR-binding peptide
  MOD_RES (1), (2): Xaa is C or S
XXVPTELSNITMQIMDENEKVVIGEMSDMVVE

SEQ ID NO: 28908 - protein, 36 aa, Artificial Sequence
  Non-cyclic GFR-binding peptide
  MOD_RES (4), (4): Xaa is C or S
  MOD_RES (18), (19), (20), (21), (22): Xaa is A or G
  MOD_RES (23), (24), (25), (26): Xaa is A or G or is absent
GLEXVPTEEEPLTMLYYXXXXXXXXXEQLSNFLQHN

SEQ ID NO: 28909 - protein, 43 aa, Artificial Sequence
  Non-cyclic GFR-binding peptide
  MOD_RES (5), (42): Xaa is C or S
SSVKXQPSRVHHEPLTVLYYEYVRKKPKLEQLSNRLEEHLEXA

SEQ ID NO: 28910 - protein, 37 aa, Artificial Sequence
  Non-cyclic GFR-binding peptide
  MOD_RES (1), (34), (36): Xaa is C or S
  MOD_RES (15), (16), (17), (18), (19): Xaa is A or G
  MOD_RES (20), (21), (22), (23): Xaa is A or G or is absent
XVPQDLSNITIQIMXXXXXXXXXIGEMSMVVKSXKXS

SEQ ID NO: 28911 - protein, 41 aa, Artificial Sequence
  Non-cyclic GFR-binding peptide
  MOD_RES (2), (39), (41): Xaa is C or S
KXQPSRVHHEPLPVVYYEYVRKKPKLEQLSNRLEEHLEXAX

SEQ ID NO: 28912 - protein, 36 aa, Artificial Sequence
  Non-cyclic GFR-binding peptide
  MOD_RES (4), (5): Xaa is C or S
PKPXXAPTKLRPVQVRKIDDSSNVIKKATVNMVVRS

SEQ ID NO: 28913 - protein, 33 aa, Artificial Sequence
  Non-cyclic GFR-binding peptide
  MOD_RES (14), (15), (16), (17), (18): Xaa is A or G
  MOD_RES (19), (20), (21), (22): Xaa is A or G or is absent
APTQLSNITVQIMXXXXXXXXXIGEMSNMVVRA

SEQ ID NO: 28914 - protein, 36 aa, Artificial Sequence
  Non-cyclic GFR-binding peptide
  MOD_RES (4), (5), (36): Xaa is C or S
ASPXXVSQDLRPVQIRKIIGKTPKIKKATVMIVKSX

SEQ ID NO: 28915 - protein, 41 aa, Artificial Sequence
  Non-cyclic GFR-binding peptide
  MOD_RES (7), (41): Xaa is C or S
  MOD_RES (21), (22), (23), (24), (25): Xaa is A or G
  MOD_RES (26), (27), (28), (29): Xaa is A or G or is absent
NDEGLEXVPTEEEPLTMLYYXXXXXXXXXEQLSNFLQHNKX

SEQ ID NO: 28916 - protein, 36 aa, Artificial Sequence
  Non-cyclic GFR-binding peptide
  MOD_RES (1), (35): Xaa is C or S
  MOD_RES (15), (16), (17), (18), (19): Xaa is A or G
  MOD_RES (20), (21), (22), (23): Xaa is A or G or is absent
XAPTKLSNITVQIMXXXXXXXXXIGEMSNMVVRSXG

SEQ ID NO: 28917 - protein, 42 aa, Artificial Sequence
  Non-cyclic GFR-binding peptide
  MOD_RES (5), (42): Xaa is C or S
SSVKXQPSRVHHEPLTVLYYEYVRKKPKLEQLSNRLEEHLEX

SEQ ID NO: 28918 - protein, 37 aa, Artificial Sequence
  Non-cyclic GFR-binding peptide
  MOD_RES (1), (2), (36): Xaa is C or S
  MOD_RES (16), (17), (18), (19), (20): Xaa is A or G
  MOD_RES (21), (22), (23), (24): Xaa is A or G or is absent
XXAPTQLRSVKVAKVXXXXXXXXXKEVQVNMVVRAXG

SEQ ID NO: 28919 - protein, 34 aa, Artificial Sequence
  Non-cyclic GFR-binding peptide
  MOD_RES (3), (4): Xaa is C or S
KPXXAPTQLRPVQVRKIDDSSNVIKKATVNMVVR

SEQ ID NO: 28920 - protein, 35 aa, Artificial Sequence
  Non-cyclic GFR-binding peptide
  MOD_RES (3), (3): Xaa is C or S
  MOD_RES (17), (18), (19), (20), (21): Xaa is A or G
  MOD_RES (22), (23), (24), (25): Xaa is A or G or is absent
PTXAPTKLRPVQVRKIXXXXXXXXXKKATVNMVVR

SEQ ID NO: 28921 - protein, 39 aa, Artificial Sequence
  Non-cyclic GFR-binding peptide
  MOD_RES (6), (7): Xaa is C or S
  MOD_RES (21), (22), (23), (24), (25): Xaa is A or G
  MOD_RES (26), (27), (28), (29): Xaa is A or G or is absent
SIPKAXXVPTELSNITMQIMXXXXXXXXXIGEMSEMVVE

SEQ ID NO: 28922 - protein, 35 aa, Artificial Sequence
  Non-cyclic GFR-binding peptide
  MOD_RES (3), (4): Xaa is C or S
KPXXAPTKLRPVQVRKIDDSSNVIKKATVNMVVRS

SEQ ID NO: 28923 - protein, 33 aa, Artificial Sequence
  Non-cyclic GFR-binding peptide
  MOD_RES (2), (3): Xaa is C or S
PXXAPTKLRPVQVRKIDDSSNVIKKATVNMVVR

SEQ ID NO: 28924 - protein, 35 aa, Artificial Sequence
  Non-cyclic GFR-binding peptide
  MOD_RES (35), (35): Xaa is C or S
SRVHHEPLTVLYYEYVRKKPKLEQLSNRLEEHLEX

SEQ ID NO: 28925 - protein, 33 aa, Artificial Sequence
  Non-cyclic GFR-binding peptide
  MOD_RES (33), (33): Xaa is C or S
  MOD_RES (14), (15), (16), (17), (18): Xaa is A or G
  MOD_RES (19), (20), (21), (22): Xaa is A or G or is absent
VPQALSNITIQIMXXXXXXXXXIGEMSMIVRSX

SEQ ID NO: 28926 - protein, 38 aa, Artificial Sequence
  Non-cyclic GFR-binding peptide
  MOD_RES (1), (38): Xaa is C or S
  MOD_RES (17), (18), (19), (20), (21): Xaa is A or G
  MOD_RES (22), (23), (24), (25): Xaa is A or G or is absent
XQPSRVHHEPLPVVYYXXXXXXXXXEQLSNRLEEHLEX

SEQ ID NO: 28927 - protein, 34 aa, Artificial Sequence
  Non-cyclic GFR-binding peptide
  MOD_RES (34), (34): Xaa is C or S
  MOD_RES (14), (15), (16), (17), (18): Xaa is A or G
  MOD_RES (19), (20), (21), (22): Xaa is A or G or is absent
APTKLRPVQVRKIXXXXXXXXXKKATVNMVVRSX

SEQ ID NO: 28928 - protein, 43 aa, Artificial Sequence
  Non-cyclic GFR-binding peptide
  MOD_RES (6), (7), (40), (42): Xaa is C or S
  MOD_RES (21), (22), (23), (24), (25): Xaa is A or G
  MOD_RES (26), (27), (28), (29): Xaa is A or G or is absent
ASAAPXXVPQALRSVKIAKVXXXXXXXXXKEVQVMIVRSXKXS

SEQ ID NO: 28929 - protein, 35 aa, Artificial Sequence
  Non-cyclic GFR-binding peptide
  MOD_RES (1), (2): Xaa is C or S
  MOD_RES (16), (17), (18), (19), (20): Xaa is A or G
  MOD_RES (21), (22), (23), (24): Xaa is A or G or is absent
XXVPTELSNITMQIMXXXXXXXXXIGEMSEMVVEG

SEQ ID NO: 28930 - protein, 36 aa, Artificial Sequence
  Non-cyclic GFR-binding peptide
  MOD_RES (1), (2), (34), (36): Xaa is C or S
XXAPTQLRSVKVAKVDDSSNVIKEVQVNMVVRAXGX

SEQ ID NO: 28931 - protein, 42 aa, Artificial Sequence
  Non-cyclic GFR-binding peptide
  MOD_RES (6), (7), (39), (41): Xaa is C or S
TVPKPXXAPTQLRSVKVAKVDDSSNVIKEVQVNMVVRAXGXH

SEQ ID NO: 28932 - protein, 31 aa, Artificial Sequence
  Non-cyclic GFR-binding peptide
  MOD_RES (1), (1): Xaa is C or S
XAPTKLRPVQVRKIDDSSNVIKKATVNMVVR

SEQ ID NO: 28933 - protein, 33 aa, Artificial Sequence
  Non-cyclic GFR-binding peptide
  MOD_RES (31), (33): Xaa is C or S
VPQALRSVKIAKVVGRKPKVKEVQVMIVRSXKX

SEQ ID NO: 28934 - protein, 39 aa, Artificial Sequence
  Non-cyclic GFR-binding peptide
  MOD_RES (5), (6): Xaa is C or S
  MOD_RES (20), (21), (22), (23), (24): Xaa is A or G
  MOD_RES (25), (26), (27), (28): Xaa is A or G or is absent
IPKAXXVPTELRPVQMRKIXXXXXXXXXKKATVDMVVEG

SEQ ID NO: 28935 - protein, 37 aa, Artificial Sequence
  Non-cyclic GFR-binding peptide
  MOD_RES (6), (7): Xaa is C or S
KIPKAXXVPTELRPVQMRKIDENEKVVKKATVDMVVE

SEQ ID NO: 28936 - protein, 39 aa, Artificial Sequence
  Non-cyclic GFR-binding peptide
  MOD_RES (3), (4), (36), (38): Xaa is C or S
KPXXAPTQLRPVQVRKIDDSSNVIKKATVNMVVRAXGXH

SEQ ID NO: 28937 - protein, 37 aa, Artificial Sequence
  Non-cyclic GFR-binding peptide
  MOD_RES (6), (7): Xaa is C or S
YVPKPXXAPTKLSNITVQIMDDSSNVIIGEMSNMVVR

SEQ ID NO: 28938 - protein, 31 aa, Artificial Sequence
  Non-cyclic GFR-binding peptide
  MOD_RES (31), (31): Xaa is C or S
VSQDLRSVKIAKVIGKTPKIKEVQVMIVKSX

SEQ ID NO: 28939 - protein, 37 aa, Artificial Sequence
  Non-cyclic GFR-binding peptide
  MOD_RES (5), (6), (37): Xaa is C or S
SASPXXVSQDLRSVKIAKVIGKTPKIKEVQVMIVKSX

SEQ ID NO: 28940 - protein, 38 aa, Artificial Sequence
  Non-cyclic GFR-binding peptide
  MOD_RES (6), (38): Xaa is C or S
VTKPTXAPTKLRPVQVRKIDDSSNVIKKATVNMVVRSX

SEQ ID NO: 28941 - protein, 41 aa, Artificial Sequence
  Non-cyclic GFR-binding peptide
  MOD_RES (6), (7), (38), (40): Xaa is C or S
ASASPXXVSQDLRPVQIRKIIGKTPKIKKATVMIVKSXKXS

SEQ ID NO: 28942 - protein, 37 aa, Artificial Sequence
  Non-cyclic GFR-binding peptide
  MOD_RES (2), (3), (35), (37): Xaa is C or S
PXXAPTKLRSVKVAKVDDSSNVIKEVQVNMVVRSXGX

SEQ ID NO: 28943 - protein, 33 aa, Artificial Sequence
  Non-cyclic GFR-binding peptide
  MOD_RES (31), (33): Xaa is C or S
VPQDLSNITIQIMVGRTPKVIGEMSMVVKSXKX

SEQ ID NO: 28944 - protein, 35 aa, Artificial Sequence
  Non-cyclic GFR-binding peptide
  MOD_RES (1), (1): Xaa is C or S
XQPSRVHHEPLTVLYYEYVRKKPKLEQLSNRLEEH

SEQ ID NO: 28945 - protein, 43 aa, Artificial Sequence
  Non-cyclic GFR-binding peptide
  MOD_RES (4), (41), (43): Xaa is C or S
  MOD_RES (20), (21), (22), (23), (24): Xaa is A or G
  MOD_RES (25), (26), (27), (28): Xaa is A or G or is absent
SVKXQPSRVHHEPLTVLYYXXXXXXXXXEQLSNRLEEHLEXAX

SEQ ID NO: 28946 - protein, 37 aa, Artificial Sequence
  Non-cyclic GFR-binding peptide
  MOD_RES (5), (5): Xaa is C or S
  MOD_RES (19), (20), (21), (22), (23): Xaa is A or G
  MOD_RES (24), (25), (26), (27): Xaa is A or G or is absent
TKPTXAPTKLSNITVQIMXXXXXXXXXIGEMSNMVVR

SEQ ID NO: 28947 - protein, 37 aa, Artificial Sequence
  Non-cyclic GFR-binding peptide
  MOD_RES (2), (2): Xaa is C or S
  MOD_RES (18), (19), (20), (21), (22): Xaa is A or G
  MOD_RES (23), (24), (25), (26): Xaa is A or G or is absent
KXQPSRVHHEPLTVLYYXXXXXXXXXEQLSNRLEEHL

SEQ ID NO: 28948 - protein, 35 aa, Artificial Sequence
  Non-cyclic GFR-binding peptide
  MOD_RES (1), (34): Xaa is C or S
  MOD_RES (15), (16), (17), (18), (19): Xaa is A or G
  MOD_RES (20), (21), (22), (23): Xaa is A or G or is absent
XVPQALRPVQIRKIXXXXXXXXXKKATVMIVRSXK

SEQ ID NO: 28949 - protein, 38 aa, Artificial Sequence
  Non-cyclic GFR-binding peptide
  MOD_RES (3), (37): Xaa is C or S
  MOD_RES (17), (18), (19), (20), (21): Xaa is A or G
  MOD_RES (22), (23), (24), (25): Xaa is A or G or is absent
PTXAPTKLRSVKVAKVXXXXXXXXXKEVQVNMVVRSXG

SEQ ID NO: 28950 - protein, 40 aa, Artificial Sequence
  Non-cyclic GFR-binding peptide
  MOD_RES (2), (3), (37), (39): Xaa is C or S
  MOD_RES (17), (18), (19), (20), (21): Xaa is A or G
  MOD_RES (22), (23), (24), (25): Xaa is A or G or is absent
PXXAPTKLSNITVQIMXXXXXXXXXIGEMSNMVVRSXGXH

SEQ ID NO: 28951 - protein, 31 aa, Artificial Sequence
  Non-cyclic GFR-binding peptide
  MOD_RES (1), (1): Xaa is C or S
XVPQALSNITIQIMVGRKPKVIGEMSMIVRS

SEQ ID NO: 28952 - protein, 43 aa, Artificial Sequence
  Non-cyclic GFR-binding peptide
  MOD_RES (5), (6), (40), (42): Xaa is C or S
  MOD_RES (20), (21), (22), (23), (24): Xaa is A or G
  MOD_RES (25), (26), (27), (28): Xaa is A or G or is absent
VPKPXXAPTKLSNITVQIMXXXXXXXXXIGEMSNMVVRSXGXH

SEQ ID NO: 28953 - protein, 40 aa, Artificial Sequence
  Non-cyclic GFR-binding peptide
  MOD_RES (3), (4), (37), (39): Xaa is C or S
  MOD_RES (18), (19), (20), (21), (22): Xaa is A or G
  MOD_RES (23), (24), (25), (26): Xaa is A or G or is absent
SPXXVPQDLSNITIQIMXXXXXXXXXIGEMSMVVKSXKXS

SEQ ID NO: 28954 - protein, 38 aa, Artificial Sequence
  Non-cyclic GFR-binding peptide
  MOD_RES (4), (5), (38): Xaa is C or S
  MOD_RES (19), (20), (21), (22), (23): Xaa is A or G
  MOD_RES (24), (25), (26), (27): Xaa is A or G or is absent
ASPXXVSQDLRSVKIAKVXXXXXXXXXKEVQVMIVKSX

SEQ ID NO: 28955 - protein, 33 aa, Artificial Sequence
  Non-cyclic GFR-binding peptide
  MOD_RES (1), (2), (33): Xaa is C or S
XXVPQDLRPVQIRKIVGRTPKVKKATVMVVKSX

SEQ ID NO: 28956 - protein, 32 aa, Artificial Sequence
  Non-cyclic GFR-binding peptide
  MOD_RES (31), (31): Xaa is C or S
VPQDLRPVQIRKIVGRTPKVKKATVMVVKSXK

SEQ ID NO: 28957 - protein, 39 aa, Artificial Sequence
  Non-cyclic GFR-binding peptide
  MOD_RES (2), (3), (37), (39): Xaa is C or S
  MOD_RES (17), (18), (19), (20), (21): Xaa is A or G
  MOD_RES (22), (23), (24), (25): Xaa is A or G or is absent
AXXVPTELRSVKMAKVXXXXXXXXXKEVQVDMVVEGXGX

SEQ ID NO: 28958 - protein, 39 aa, Artificial Sequence
  Non-cyclic GFR-binding peptide
  MOD_RES (3), (3): Xaa is C or S
VKXQPSRVHHEPLTVLYYEYVRKKPKLEQLSNRLEEHLE

SEQ ID NO: 28959 - protein, 40 aa, Artificial Sequence
  Non-cyclic GFR-binding peptide
  MOD_RES (6), (7), (39): Xaa is C or S
TVPKPXXAPTQLRPVQVRKIDDSSNVIKKATVNMVVRAXG

SEQ ID NO: 28960 - protein, 37 aa, Artificial Sequence
  Non-cyclic GFR-binding peptide
  MOD_RES (3), (4), (35), (37): Xaa is C or S
APXXVPQALRSVKIAKVVGRKPKVKEVQVMIVRSXKX

SEQ ID NO: 28961 - protein, 37 aa, Artificial Sequence
  Non-cyclic GFR-binding peptide
  MOD_RES (5), (37): Xaa is C or S
TKPTXAPTKLSNITVQIMDDSSNVIIGEMSNMVVRSX

SEQ ID NO: 28962 - protein, 30 aa, Artificial Sequence
  Non-cyclic GFR-binding peptide
VPTELRPVQMRKIDENEKVVKKATVDMVVE

SEQ ID NO: 28963 - protein, 38 aa, Artificial Sequence
  Non-cyclic GFR-binding peptide
  MOD_RES (35), (37): Xaa is C or S
SRVHHEPLPVVYYEYVRKKPKLEQLSNRLEEHLEXAXA

SEQ ID NO: 28964 - protein, 42 aa, Artificial Sequence
  Non-cyclic GFR-binding peptide
  MOD_RES (5), (42): Xaa is C or S
  MOD_RES (21), (22), (23), (24), (25): Xaa is A or G
  MOD_RES (26), (27), (28), (29): Xaa is A or G or is absent
RNVQXRPTQVQLEPLTVLYYXXXXXXXXXEQLSNTLEDHLAX

SEQ ID NO: 28965 - protein, 40 aa, Artificial Sequence
  Non-cyclic GFR-binding peptide
  MOD_RES (3), (4), (37), (39): Xaa is C or S
  MOD_RES (18), (19), (20), (21), (22): Xaa is A or G
  MOD_RES (23), (24), (25), (26): Xaa is A or G or is absent
SPXXVPQDLRPVQIRKIXXXXXXXXXKKATVMVVKSXKXS

SEQ ID NO: 28966 - protein, 34 aa, Artificial Sequence
  Non-cyclic GFR-binding peptide
  MOD_RES (1), (2), (34): Xaa is C or S
XXAPTKLSNITVQIMDDSSNVIIGEMSNMVVRSX

SEQ ID NO: 28967 - protein, 39 aa, Artificial Sequence
  Non-cyclic GFR-binding peptide
  MOD_RES (4), (5), (39): Xaa is C or S
  MOD_RES (19), (20), (21), (22), (23): Xaa is A or G
  MOD_RES (24), (25), (26), (27): Xaa is A or G or is absent
PKPXXAPTQLSNITVQIMXXXXXXXXXIGEMSNMVVRAX

SEQ ID NO: 28968 - protein, 39 aa, Artificial Sequence
  Non-cyclic GFR-binding peptide
  MOD_RES (5), (6), (39): Xaa is C or S
  MOD_RES (20), (21), (22), (23), (24): Xaa is A or G
  MOD_RES (25), (26), (27), (28): Xaa is A or G or is absent
SASPXXVSQDLRPVQIRKIXXXXXXXXXKKATVMIVKSX

SEQ ID NO: 28969 - protein, 40 aa, Artificial Sequence
  Non-cyclic GFR-binding peptide
  MOD_RES (1), (38), (40): Xaa is C or S
XRPTQVQLEPLTVLYYEIVRKKPIFEQLSNTLEDHLAXKX

SEQ ID NO: 28970 - protein, 37 aa, Artificial Sequence
  Non-cyclic GFR-binding peptide
  MOD_RES (6), (7): Xaa is C or S
TVPKPXXAPTQLSNITVQIMDDSSNVIIGEMSNMVVR

SEQ ID NO: 28971 - protein, 36 aa, Artificial Sequence
  Non-cyclic GFR-binding peptide
  MOD_RES (36), (36): Xaa is C or S
PTQVQLEPLTVLYYEIVRKKPIFEQLSNTLEDHLAX

SEQ ID NO: 28972 - protein, 32 aa, Artificial Sequence
  Non-cyclic GFR-binding peptide
  MOD_RES (1), (32): Xaa is C or S
XVPQDLRSVKIAKVVGRTPKVKEVQVMVVKSX

SEQ ID NO: 28973 - protein, 33 aa, Artificial Sequence
  Non-cyclic GFR-binding peptide
  MOD_RES (14), (15), (16), (17), (18): Xaa is A or G
  MOD_RES (19), (20), (21), (22): Xaa is A or G or is absent
VPTELSNITMQIMXXXXXXXXXIGEMSDMVVEG

SEQ ID NO: 28974 - protein, 37 aa, Artificial Sequence
  Non-cyclic GFR-binding peptide
  MOD_RES (3), (4), (36): Xaa is C or S
KAXXVPTELRPVQMRKIDEYDKVVKKATVEMVVEGXG

SEQ ID NO: 28975 - protein, 36 aa, Artificial Sequence
  Non-cyclic GFR-binding peptide
  MOD_RES (3), (3): Xaa is C or S
  MOD_RES (17), (18), (19), (20), (21): Xaa is A or G
  MOD_RES (22), (23), (24), (25): Xaa is A or G or is absent
LEXVPTEEEPLTMLYYXXXXXXXXXEQLSNFLQHNK

SEQ ID NO: 28976 - protein, 38 aa, Artificial Sequence
  Non-cyclic GFR-binding peptide
  MOD_RES (3), (4), (37): Xaa is C or S
  MOD_RES (18), (19), (20), (21), (22): Xaa is A or G
  MOD_RES (23), (24), (25), (26): Xaa is A or G or is absent
APXXVPQALRPVQIRKIXXXXXXXXXKKATVMIVRSXK

SEQ ID NO: 28977 - protein, 39 aa, Artificial Sequence
  Non-cyclic GFR-binding peptide
  MOD_RES (4), (38): Xaa is C or S
  MOD_RES (18), (19), (20), (21), (22): Xaa is A or G
  MOD_RES (23), (24), (25), (26): Xaa is A or G or is absent
KPTXAPTKLSNITVQIMXXXXXXXXXIGEMSNMVVRSXG

SEQ ID NO: 28978 - protein, 38 aa, Artificial Sequence
  Non-cyclic GFR-binding peptide
  MOD_RES (3), (37): Xaa is C or S
LEXVPTEEEPLTMLYYRIKPHQGQHEQLSNFLQHNKXE

SEQ ID NO: 28979 - protein, 39 aa, Artificial Sequence
  Non-cyclic GFR-binding peptide
  MOD_RES (1), (2), (36), (38): Xaa is C or S
  MOD_RES (16), (17), (18), (19), (20): Xaa is A or G
  MOD_RES (21), (22), (23), (24): Xaa is A or G or is absent
XXAPTKLRPVQVRKIXXXXXXXXXKKATVNMVVRSXGXH

SEQ ID NO: 28980 - protein, 35 aa, Artificial Sequence
  Non-cyclic GFR-binding peptide
QPSRVHHEPLTVLYYEYVRKKPKLEQLSNRLEEHL

SEQ ID NO: 28981 - protein, 43 aa, Artificial Sequence
  Non-cyclic GFR-binding peptide
  MOD_RES (5), (6), (40), (42): Xaa is C or S
  MOD_RES (20), (21), (22), (23), (24): Xaa is A or G
  MOD_RES (25), (26), (27), (28): Xaa is A or G or is absent
IPKAXXVPTELRPVQMRKIXXXXXXXXXKKATVDMVVEGXGXR

SEQ ID NO: 28982 - protein, 39 aa, Artificial Sequence
  Non-cyclic GFR-binding peptide
  MOD_RES (5), (6), (37), (39): Xaa is C or S
SASPXXVSQDLRSVKIAKVIGKTPKIKEVQVMIVKSXKX

SEQ ID NO: 28983 - protein, 41 aa, Artificial Sequence
  Non-cyclic GFR-binding peptide
  MOD_RES (5), (39), (41): Xaa is C or S
EGLEXVPTEEEPLTMLYYRIKPHQGQHEQLSNFLQHNKXEX

SEQ ID NO: 28984 - protein, 35 aa, Artificial Sequence
  Non-cyclic GFR-binding peptide
  MOD_RES (3), (4): Xaa is C or S
KAXXVPTELRSVKMAKVDENEKVVKEVQVDMVVEG

SEQ ID NO: 28985 - protein, 43 aa, Artificial Sequence
  Non-cyclic GFR-binding peptide
  MOD_RES (3), (40), (42): Xaa is C or S
VQXRPTQVQLEPLTVLYYEIVRKKPIFEQLSNTLEDHLAXKXE

SEQ ID NO: 28986 - protein, 32 aa, Artificial Sequence
  Non-cyclic GFR-binding peptide
  MOD_RES (14), (15), (16), (17), (18): Xaa is A or G
  MOD_RES (19), (20), (21), (22): Xaa is A or G or is absent
VPTELRPVQMRKIXXXXXXXXXKKATVDMVVE

SEQ ID NO: 28987 - protein, 36 aa, Artificial Sequence
  Non-cyclic GFR-binding peptide
  MOD_RES (1), (35): Xaa is C or S
XVPTEEEPLPMVYYRIKPHQGQHEQLSNFLQHNKXE

SEQ ID NO: 28988 - protein, 40 aa, Artificial Sequence
  Non-cyclic GFR-binding peptide
  MOD_RES (5), (6), (40): Xaa is C or S
  MOD_RES (20), (21), (22), (23), (24): Xaa is A or G
  MOD_RES (25), (26), (27), (28): Xaa is A or G or is absent
IPKAXXVPTELRPVQMRKIXXXXXXXXXKKATVDMVVEGX

SEQ ID NO: 28989 - protein, 36 aa, Artificial Sequence
  Non-cyclic GFR-binding peptide
  MOD_RES (4), (4): Xaa is C or S
GLEXVPTEEEPLPMVYYRIKPHQGQHEQLSNFLQHN

SEQ ID NO: 28990 - protein, 39 aa, Artificial Sequence
  Non-cyclic GFR-binding peptide
  MOD_RES (6), (7): Xaa is C or S
  MOD_RES (21), (22), (23), (24), (25): Xaa is A or G
  MOD_RES (26), (27), (28), (29): Xaa is A or G or is absent
ASASPXXVSQDLRSVKIAKVXXXXXXXXXKEVQVMIVKS

SEQ ID NO: 28991 - protein, 39 aa, Artificial Sequence
  Non-cyclic GFR-binding peptide
  MOD_RES (5), (6), (38): Xaa is C or S
IPKAXXVPTELSNITMQIMDEYDKVVIGEMSEMVVEGXG

SEQ ID NO: 28992 - protein, 38 aa, Artificial Sequence
  Non-cyclic GFR-binding peptide
  MOD_RES (5), (6): Xaa is C or S
  MOD_RES (20), (21), (22), (23), (24): Xaa is A or G
  MOD_RES (25), (26), (27), (28): Xaa is A or G or is absent
SASPXXVSQDLRSVKIAKVXXXXXXXXXKEVQVMIVKS

SEQ ID NO: 28993 - protein, 37 aa, Artificial Sequence
  Non-cyclic GFR-binding peptide
  MOD_RES (36), (36): Xaa is C or S
PTQVQLEPLPVVYYEIVRKKPIFEQLSNTLEDHLAXK

SEQ ID NO: 28994 - protein, 38 aa, Artificial Sequence
  Non-cyclic GFR-binding peptide
  MOD_RES (3), (4), (35), (37): Xaa is C or S
SPXXVSQDLRSVKIAKVIGKTPKIKEVQVMIVKSXKXS

SEQ ID NO: 28995 - protein, 39 aa, Artificial Sequence
  Non-cyclic GFR-binding peptide
  MOD_RES (1), (38): Xaa is C or S
  MOD_RES (17), (18), (19), (20), (21): Xaa is A or G
  MOD_RES (22), (23), (24), (25): Xaa is A or G or is absent
XRPTQVQLEPLPVVYYXXXXXXXXXEQLSNTLEDHLAXK

SEQ ID NO: 28996 - protein, 38 aa, Artificial Sequence
  Non-cyclic GFR-binding peptide
  MOD_RES (4), (36), (38): Xaa is C or S
KPTXAPTKLSNITVQIMDDSSNVIIGEMSNMVVRSXGX

SEQ ID NO: 28997 - protein, 36 aa, Artificial Sequence
  Non-cyclic GFR-binding peptide
  MOD_RES (35), (35): Xaa is C or S
SRVHHEPLPVVYYEYVRKKPKLEQLSNRLEEHLEXA

SEQ ID NO: 28998 - protein, 38 aa, Artificial Sequence
  Non-cyclic GFR-binding peptide
  MOD_RES (5), (6), (38): Xaa is C or S
IPKAXXVPTELSNITMQIMDEYDKVVIGEMSEMVVEGX

SEQ ID NO: 28999 - protein, 40 aa, Artificial Sequence
  Non-cyclic GFR-binding peptide
  MOD_RES (6), (7): Xaa is C or S
  MOD_RES (21), (22), (23), (24), (25): Xaa is A or G
  MOD_RES (26), (27), (28), (29): Xaa is A or G or is absent
YVPKPXXAPTKLSNITVQIMXXXXXXXXXIGEMSNMVVRS

SEQ ID NO: 29000 - protein, 40 aa, Artificial Sequence
  Non-cyclic GFR-binding peptide
  MOD_RES (2), (3), (37), (39): Xaa is C or S
  MOD_RES (17), (18), (19), (20), (21): Xaa is A or G
  MOD_RES (22), (23), (24), (25): Xaa is A or G or is absent
PXXAPTQLRPVQVRKIXXXXXXXXXKKATVNMVVRAXGXH

SEQ ID NO: 29001 - protein, 32 aa, Artificial Sequence
  Non-cyclic GFR-binding peptide
TQVQLEPLPVVYYEIVRKKPIFEQLSNTLEDH

SEQ ID NO: 29002 - protein, 36 aa, Artificial Sequence
  Non-cyclic GFR-binding peptide
  MOD_RES (1), (34), (36): Xaa is C or S
  MOD_RES (15), (16), (17), (18), (19): Xaa is A or G
  MOD_RES (20), (21), (22), (23): Xaa is A or G or is absent
XVPQDLSNITIQIMXXXXXXXXXIGEMSMVVKSXKX

SEQ ID NO: 29003 - protein, 38 aa, Artificial Sequence
  Non-cyclic GFR-binding peptide
  MOD_RES (5), (6): Xaa is C or S
  MOD_RES (20), (21), (22), (23), (24): Xaa is A or G
  MOD_RES (25), (26), (27), (28): Xaa is A or G or is absent
SASPXXVSQDLRPVQIRKIXXXXXXXXXKKATVMIVKS

SEQ ID NO: 29004 - protein, 32 aa, Artificial Sequence
  Non-cyclic GFR-binding peptide
  MOD_RES (1), (2): Xaa is C or S
XXAPTQLRSVKVAKVDDSSNVIKEVQVNMVVR

SEQ ID NO: 29005 - protein, 41 aa, Artificial Sequence
  Non-cyclic GFR-binding peptide
  MOD_RES (4), (41): Xaa is C or S
SVKXQPSRVHHEPLTVLYYEYVRKKPKLEQLSNRLEEHLEX

SEQ ID NO: 29006 - protein, 35 aa, Artificial Sequence
  Non-cyclic GFR-binding peptide
  MOD_RES (4), (5): Xaa is C or S
ASPXXVSQDLRSVKIAKVIGKTPKIKEVQVMIVKS

SEQ ID NO: 29007 - protein, 33 aa, Artificial Sequence
  Non-cyclic GFR-binding peptide
  MOD_RES (1), (2): Xaa is C or S
XXAPTKLRSVKVAKVDDSSNVIKEVQVNMVVRS

SEQ ID NO: 29008 - protein, 41 aa, Artificial Sequence
  Non-cyclic GFR-binding peptide
  MOD_RES (6), (40): Xaa is C or S
DEGLEXVPTEEEPLPMVYYRIKPHQGQHEQLSNFLQHNKXE

SEQ ID NO: 29009 - protein, 34 aa, Artificial Sequence
  Non-cyclic GFR-binding peptide
  MOD_RES (1), (33): Xaa is C or S
XAPTQLSNITVQIMDDSSNVIIGEMSNMVVRAXG

SEQ ID NO: 29010 - protein, 36 aa, Artificial Sequence
  Non-cyclic GFR-binding peptide
  MOD_RES (2), (3), (36): Xaa is C or S
  MOD_RES (17), (18), (19), (20), (21): Xaa is A or G
  MOD_RES (22), (23), (24), (25): Xaa is A or G or is absent
PXXVPQDLRSVKIAKVXXXXXXXXXKEVQVMVVKSX

SEQ ID NO: 29011 - protein, 38 aa, Artificial Sequence
  Non-cyclic GFR-binding peptide
  MOD_RES (6), (7), (38): Xaa is C or S
ASASPXXVPQDLRSVKIAKVVGRTPKVKEVQVMVVKSX

SEQ ID NO: 29012 - protein, 41 aa, Artificial Sequence
  Non-cyclic GFR-binding peptide
  MOD_RES (6), (7), (41): Xaa is C or S
  MOD_RES (21), (22), (23), (24), (25): Xaa is A or G
  MOD_RES (26), (27), (28), (29): Xaa is A or G or is absent
YVPKPXXAPTKLRSVKVAKVXXXXXXXXXKEVQVNMVVRSX

SEQ ID NO: 29013 - protein, 35 aa, Artificial Sequence
  Non-cyclic GFR-binding peptide
  MOD_RES (1), (2), (34): Xaa is C or S
XXVPTELRSVKMAKVDENEKVVKEVQVDMVVEGXG

SEQ ID NO: 29014 - protein, 39 aa, Artificial Sequence
  Non-cyclic GFR-binding peptide
  MOD_RES (5), (6): Xaa is C or S
  MOD_RES (20), (21), (22), (23), (24): Xaa is A or G
  MOD_RES (25), (26), (27), (28): Xaa is A or G or is absent
VPKPXXAPTQLRPVQVRKIXXXXXXXXXKKATVNMVVRA

SEQ ID NO: 29015 - protein, 40 aa, Artificial Sequence
  Non-cyclic GFR-binding peptide
  MOD_RES (5), (6), (40): Xaa is C or S
  MOD_RES (20), (21), (22), (23), (24): Xaa is A or G
  MOD_RES (25), (26), (27), (28): Xaa is A or G or is absent
IPKAXXVPTELSNITMQIMXXXXXXXXXIGEMSEMVVEGX

SEQ ID NO: 29016 - protein, 34 aa, Artificial Sequence
  Non-cyclic GFR-binding peptide
  MOD_RES (31), (33): Xaa is C or S
VPQALRPVQIRKIVGRKPKVKKATVMIVRSXKXS

SEQ ID NO: 29017 - protein, 38 aa, Artificial Sequence
  Non-cyclic GFR-binding peptide
  MOD_RES (5), (6): Xaa is C or S
  MOD_RES (20), (21), (22), (23), (24): Xaa is A or G
  MOD_RES (25), (26), (27), (28): Xaa is A or G or is absent
IPKAXXVPTELRSVKMAKVXXXXXXXXXKEVQVDMVVE

SEQ ID NO: 29018 - protein, 42 aa, Artificial Sequence
  Non-cyclic GFR-binding peptide
  MOD_RES (4), (41): Xaa is C or S
  MOD_RES (20), (21), (22), (23), (24): Xaa is A or G
  MOD_RES (25), (26), (27), (28): Xaa is A or G or is absent
NVQXRPTQVQLEPLTVLYYXXXXXXXXXEQLSNTLEDHLAXK

SEQ ID NO: 29019 - protein, 34 aa, Artificial Sequence
  Non-cyclic GFR-binding peptide
  MOD_RES (1), (34): Xaa is C or S
  MOD_RES (15), (16), (17), (18), (19): Xaa is A or G
  MOD_RES (20), (21), (22), (23): Xaa is A or G or is absent
XVPQALRSVKIAKVXXXXXXXXXKEVQVMIVRSX

SEQ ID NO: 29020 - protein, 33 aa, Artificial Sequence
  Non-cyclic GFR-binding peptide
  MOD_RES (2), (3): Xaa is C or S
AXXVPTELRPVQMRKIDEYDKVVKKATVEMVVE

SEQ ID NO: 29021 - protein, 35 aa, Artificial Sequence
  Non-cyclic GFR-binding peptide
  MOD_RES (4), (5): Xaa is C or S
PKAXXVPTELRSVKMAKVDEYDKVVKEVQVEMVVE

SEQ ID NO: 29022 - protein, 33 aa, Artificial Sequence
  Non-cyclic GFR-binding peptide
  MOD_RES (1), (2): Xaa is C or S
XXVPTELRSVKMAKVDENEKVVKEVQVDMVVEG

SEQ ID NO: 29023 - protein, 40 aa, Artificial Sequence
  Non-cyclic GFR-binding peptide
  MOD_RES (3), (4), (38), (40): Xaa is C or S
  MOD_RES (18), (19), (20), (21), (22): Xaa is A or G
  MOD_RES (23), (24), (25), (26): Xaa is A or G or is absent
KAXXVPTELRSVKMAKVXXXXXXXXXKEVQVEMVVEGXGX

SEQ ID NO: 29024 - protein, 33 aa, Artificial Sequence
  Non-cyclic GFR-binding peptide
  MOD_RES (31), (33): Xaa is C or S
VSQDLSNITIQIMIGKTPKIIGEMSMIVKSXKX

SEQ ID NO: 29025 - protein, 36 aa, Artificial Sequence
  Non-cyclic GFR-binding peptide
  MOD_RES (1), (34), (36): Xaa is C or S
  MOD_RES (15), (16), (17), (18), (19): Xaa is A or G
  MOD_RES (20), (21), (22), (23): Xaa is A or G or is absent
XVSQDLRSVKIAKVXXXXXXXXXKEVQVMIVKSXKX

SEQ ID NO: 29026 - protein, 40 aa, Artificial Sequence
  Non-cyclic GFR-binding peptide
  MOD_RES (6), (7), (38), (40): Xaa is C or S
ASASPXXVSQDLRPVQIRKIIGKTPKIKKATVMIVKSXKX

SEQ ID NO: 29027 - protein, 41 aa, Artificial Sequence
  Non-cyclic GFR-binding peptide
  MOD_RES (5), (6), (38), (40): Xaa is C or S
VPKPXXAPTQLRSVKVAKVDDSSNVIKEVQVNMVVRAXGXH

SEQ ID NO: 29028 - protein, 39 aa, Artificial Sequence
  Non-cyclic GFR-binding peptide
  MOD_RES (37), (39): Xaa is C or S
RPTQVQLEPLPVVYYEIVRKKPIFEQLSNTLEDHLAXKX

SEQ ID NO: 29029 - protein, 37 aa, Artificial Sequence
  Non-cyclic GFR-binding peptide
  MOD_RES (35), (37): Xaa is C or S
  MOD_RES (14), (15), (16), (17), (18): Xaa is A or G
  MOD_RES (19), (20), (21), (22): Xaa is A or G or is absent
SRVHHEPLTVLYYXXXXXXXXXEQLSNRLEEHLEXAX

SEQ ID NO: 29030 - protein, 34 aa, Artificial Sequence
  Non-cyclic GFR-binding peptide
  MOD_RES (1), (2): Xaa is C or S
  MOD_RES (16), (17), (18), (19), (20): Xaa is A or G
  MOD_RES (21), (22), (23), (24): Xaa is A or G or is absent
XXAPTKLRPVQVRKIXXXXXXXXXKKATVNMVVR

SEQ ID NO: 29031 - protein, 35 aa, Artificial Sequence
  Non-cyclic GFR-binding peptide
  MOD_RES (1), (33), (35): Xaa is C or S
XAPTKLSNITVQIMDDSSNVIIGEMSNMVVRSXGX

SEQ ID NO: 29032 - protein, 39 aa, Artificial Sequence
  Non-cyclic GFR-binding peptide
  MOD_RES (7), (7): Xaa is C or S
  MOD_RES (21), (22), (23), (24), (25): Xaa is A or G
  MOD_RES (26), (27), (28), (29): Xaa is A or G or is absent
NDEGLEXVPTEEEPLTMLYYXXXXXXXXXEQLSNFLQHN

SEQ ID NO: 29033 - protein, 35 aa, Artificial Sequence
  Non-cyclic GFR-binding peptide
  MOD_RES (1), (1): Xaa is C or S
XQPSRVHHEPLPVVYYEYVRKKPKLEQLSNRLEEH

SEQ ID NO: 29034 - protein, 38 aa, Artificial Sequence
  Non-cyclic GFR-binding peptide
  MOD_RES (2), (3), (35), (37): Xaa is C or S
AXXVPTELSNITMQIMDENEKVVIGEMSDMVVEGXGXR

SEQ ID NO: 29035 - protein, 39 aa, Artificial Sequence
  Non-cyclic GFR-binding peptide
  MOD_RES (3), (3): Xaa is C or S
  MOD_RES (19), (20), (21), (22), (23): Xaa is A or G
  MOD_RES (24), (25), (26), (27): Xaa is A or G or is absent
VQXRPTQVQLEPLPVVYYXXXXXXXXXEQLSNTLEDHLA

SEQ ID NO: 29036 - protein, 38 aa, Artificial Sequence
  Non-cyclic GFR-binding peptide
  MOD_RES (4), (5), (37): Xaa is C or S
PKAXXVPTELRPVQMRKIDEYDKVVKKATVEMVVEGXG

SEQ ID NO: 29037 - protein, 42 aa, Artificial Sequence
  Non-cyclic GFR-binding peptide
  MOD_RES (6), (7), (39), (41): Xaa is C or S
TVPKPXXAPTQLSNITVQIMDDSSNVIIGEMSNMVVRAXGXH

SEQ ID NO: 29038 - protein, 38 aa, Artificial Sequence
  Non-cyclic GFR-binding peptide
  MOD_RES (1), (35), (37): Xaa is C or S
  MOD_RES (15), (16), (17), (18), (19): Xaa is A or G
  MOD_RES (20), (21), (22), (23): Xaa is A or G or is absent
XAPTQLRPVQVRKIXXXXXXXXXKKATVNMVVRAXGXH

SEQ ID NO: 29039 - protein, 36 aa, Artificial Sequence
  Non-cyclic GFR-binding peptide
  MOD_RES (1), (33), (35): Xaa is C or S
XAPTQLSNITVQIMDDSSNVIIGEMSNMVVRAXGXH

SEQ ID NO: 29040 - protein, 37 aa, Artificial Sequence
  Non-cyclic GFR-binding peptide
  MOD_RES (2), (3), (35), (37): Xaa is C or S
PXXAPTQLSNITVQIMDDSSNVIIGEMSNMVVRAXGX

SEQ ID NO: 29041 - protein, 40 aa, Artificial Sequence
  Non-cyclic GFR-binding peptide
  MOD_RES (6), (7): Xaa is C or S
  MOD_RES (21), (22), (23), (24), (25): Xaa is A or G
  MOD_RES (26), (27), (28), (29): Xaa is A or G or is absent
YVPKPXXAPTKLRPVQVRKIXXXXXXXXXKKATVNMVVRS

SEQ ID NO: 29042 - protein, 34 aa, Artificial Sequence
  Non-cyclic GFR-binding peptide
  MOD_RES (15), (16), (17), (18), (19): Xaa is A or G
  MOD_RES (20), (21), (22), (23): Xaa is A or G or is absent
PTQVQLEPLTVLYYXXXXXXXXXEQLSNTLEDHL

SEQ ID NO: 29043 - protein, 38 aa, Artificial Sequence
  Non-cyclic GFR-binding peptide
  MOD_RES (1), (35), (37): Xaa is C or S
  MOD_RES (15), (16), (17), (18), (19): Xaa is A or G
  MOD_RES (20), (21), (22), (23): Xaa is A or G or is absent
XAPTQLRSVKVAKVXXXXXXXXXKEVQVNMVVRAXGXH

SEQ ID NO: 29044 - protein, 36 aa, Artificial Sequence
  Non-cyclic GFR-binding peptide
  MOD_RES (1), (1): Xaa is C or S
XQPSRVHHEPLTVLYYEYVRKKPKLEQLSNRLEEHL

SEQ ID NO: 29045 - protein, 35 aa, Artificial Sequence
  Non-cyclic GFR-binding peptide
  MOD_RES (33), (35): Xaa is C or S
  MOD_RES (14), (15), (16), (17), (18): Xaa is A or G
  MOD_RES (19), (20), (21), (22): Xaa is A or G or is absent
VPQDLSNITIQIMXXXXXXXXXIGEMSMVVKSXKX

SEQ ID NO: 29046 - protein, 35 aa, Artificial Sequence
  Non-cyclic GFR-binding peptide
  MOD_RES (35), (35): Xaa is C or S
  MOD_RES (14), (15), (16), (17), (18): Xaa is A or G
  MOD_RES (19), (20), (21), (22): Xaa is A or G or is absent
SRVHHEPLPVVYYXXXXXXXXXEQLSNRLEEHLEX

SEQ ID NO: 29047 - protein, 37 aa, Artificial Sequence
  Non-cyclic GFR-binding peptide
  MOD_RES (1), (35), (37): Xaa is C or S
  MOD_RES (15), (16), (17), (18), (19): Xaa is A or G
  MOD_RES (20), (21), (22), (23): Xaa is A or G or is absent
XAPTQLRPVQVRKIXXXXXXXXXKKATVNMVVRAXGX

SEQ ID NO: 29048 - protein, 41 aa, Artificial Sequence
  Non-cyclic GFR-binding peptide
  MOD_RES (5), (6), (40): Xaa is C or S
  MOD_RES (20), (21), (22), (23), (24): Xaa is A or G
  MOD_RES (25), (26), (27), (28): Xaa is A or G or is absent
IPKAXXVPTELRSVKMAKVXXXXXXXXXKEVQVEMVVEGXG

SEQ ID NO: 29049 - protein, 38 aa, Artificial Sequence
  Non-cyclic GFR-binding peptide
  MOD_RES (35), (37): Xaa is C or S
TQVQLEPLPVVYYEIVRKKPIFEQLSNTLEDHLAXKXE

SEQ ID NO: 29050 - protein, 38 aa, Artificial Sequence
  Non-cyclic GFR-binding peptide
  MOD_RES (4), (5): Xaa is C or S
  MOD_RES (19), (20), (21), (22), (23): Xaa is A or G
  MOD_RES (24), (25), (26), (27): Xaa is A or G or is absent
PKAXXVPTELRPVQMRKIXXXXXXXXXKKATVDMVVEG

SEQ ID NO: 29051 - protein, 38 aa, Artificial Sequence
  Non-cyclic GFR-binding peptide
  MOD_RES (5), (6), (37): Xaa is C or S
SAAPXXVPQALRSVKIAKVVGRKPKVKEVQVMIVRSXK

SEQ ID NO: 29052 - protein, 31 aa, Artificial Sequence
  Non-cyclic GFR-binding peptide
  MOD_RES (1), (1): Xaa is C or S
XVPTELRPVQMRKIDEYDKVVKKATVEMVVE

SEQ ID NO: 29053 - protein, 35 aa, Artificial Sequence
  Non-cyclic GFR-binding peptide
  MOD_RES (2), (3): Xaa is C or S
  MOD_RES (17), (18), (19), (20), (21): Xaa is A or G
  MOD_RES (22), (23), (24), (25): Xaa is A or G or is absent
PXXVPQALRPVQIRKIXXXXXXXXXKKATVMIVRS

SEQ ID NO: 29054 - protein, 37 aa, Artificial Sequence
  Non-cyclic GFR-binding peptide
  MOD_RES (1), (2), (34), (36): Xaa is C or S
XXVPTELSNITMQIMDENEKVVIGEMSDMVVEGXGXR

SEQ ID NO: 29055 - protein, 32 aa, Artificial Sequence
  Non-cyclic GFR-binding peptide
  MOD_RES (1), (1): Xaa is C or S
XAPTQLRSVKVAKVDDSSNVIKEVQVNMVVRA

SEQ ID NO: 29056 - protein, 39 aa, Artificial Sequence
  Non-cyclic GFR-binding peptide
  MOD_RES (1), (38): Xaa is C or S
  MOD_RES (17), (18), (19), (20), (21): Xaa is A or G
  MOD_RES (22), (23), (24), (25): Xaa is A or G or is absent
XRPTQVQLEPLTVLYYXXXXXXXXXEQLSNTLEDHLAXK

SEQ ID NO: 29057 - protein, 38 aa, Artificial Sequence
  Non-cyclic GFR-binding peptide
  MOD_RES (37), (37): Xaa is C or S
  MOD_RES (16), (17), (18), (19), (20): Xaa is A or G
  MOD_RES (21), (22), (23), (24): Xaa is A or G or is absent
QPSRVHHEPLPVVYYXXXXXXXXXEQLSNRLEEHLEXA

SEQ ID NO: 29058 - protein, 42 aa, Artificial Sequence
  Non-cyclic GFR-binding peptide
  MOD_RES (7), (41): Xaa is C or S
NDEGLEXVPTEEEPLTMLYYRIKPHQGQHEQLSNFLQHNKXE

SEQ ID NO: 29059 - protein, 41 aa, Artificial Sequence
  Non-cyclic GFR-binding peptide
  MOD_RES (6), (7), (38), (40): Xaa is C or S
ASASPXXVPQDLSNITIQIMVGRTPKVIGEMSMVVKSXKXS

SEQ ID NO: 29060 - protein, 35 aa, Artificial Sequence
  Non-cyclic GFR-binding peptide
  MOD_RES (4), (4): Xaa is C or S
KPTXAPTKLRPVQVRKIDDSSNVIKKATVNMVVRS

SEQ ID NO: 29061 - protein, 38 aa, Artificial Sequence
  Non-cyclic GFR-binding peptide
  MOD_RES (2), (3), (35), (37): Xaa is C or S
PXXAPTQLRPVQVRKIDDSSNVIKKATVNMVVRAXGXH

SEQ ID NO: 29062 - protein, 35 aa, Artificial Sequence
  Non-cyclic GFR-binding peptide
  MOD_RES (1), (32), (34): Xaa is C or S
XVPQALRSVKIAKVVGRKPKVKEVQVMIVRSXKXS

SEQ ID NO: 29063 - protein, 40 aa, Artificial Sequence
  Non-cyclic GFR-binding peptide
  MOD_RES (5), (39): Xaa is C or S
EGLEXVPTEEEPLTMLYYRIKPHQGQHEQLSNFLQHNKXE

SEQ ID NO: 29064 - protein, 35 aa, Artificial Sequence
  Non-cyclic GFR-binding peptide
  MOD_RES (33), (35): Xaa is C or S
  MOD_RES (14), (15), (16), (17), (18): Xaa is A or G
  MOD_RES (19), (20), (21), (22): Xaa is A or G or is absent
VPQALSNITIQIMXXXXXXXXXIGEMSMIVRSXKX

SEQ ID NO: 29065 - protein, 32 aa, Artificial Sequence
  Non-cyclic GFR-binding peptide
  MOD_RES (1), (32): Xaa is C or S
XVPQDLSNITIQIMVGRTPKVIGEMSMVVKSX

SEQ ID NO: 29066 - protein, 37 aa, Artificial Sequence
  Non-cyclic GFR-binding peptide
  MOD_RES (1), (35), (37): Xaa is C or S
  MOD_RES (15), (16), (17), (18), (19): Xaa is A or G
  MOD_RES (20), (21), (22), (23): Xaa is A or G or is absent
XVPTELSNITMQIMXXXXXXXXXIGEMSEMVVEGXGX

SEQ ID NO: 29067 - protein, 38 aa, Artificial Sequence
  Non-cyclic GFR-binding peptide
  MOD_RES (4), (5): Xaa is C or S
  MOD_RES (19), (20), (21), (22), (23): Xaa is A or G
  MOD_RES (24), (25), (26), (27): Xaa is A or G or is absent
PKPXXAPTQLSNITVQIMXXXXXXXXXIGEMSNMVVRA

SEQ ID NO: 29068 - protein, 38 aa, Artificial Sequence
  Non-cyclic GFR-binding peptide
  MOD_RES (3), (4), (38): Xaa is C or S
  MOD_RES (18), (19), (20), (21), (22): Xaa is A or G
  MOD_RES (23), (24), (25), (26): Xaa is A or G or is absent
KAXXVPTELSNITMQIMXXXXXXXXXIGEMSEMVVEGX

SEQ ID NO: 29069 - protein, 38 aa, Artificial Sequence
  Non-cyclic GFR-binding peptide
  MOD_RES (6), (7): Xaa is C or S
KIPKAXXVPTELSNITMQIMDENEKVVIGEMSDMVVEG

SEQ ID NO: 29070 - protein, 42 aa, Artificial Sequence
  Non-cyclic GFR-binding peptide
  MOD_RES (7), (41): Xaa is C or S
  MOD_RES (21), (22), (23), (24), (25): Xaa is A or G
  MOD_RES (26), (27), (28), (29): Xaa is A or G or is absent
NDEGLEXVPTEEEPLTMLYYXXXXXXXXXEQLSNFLQHNKXE

SEQ ID NO: 29071 - protein, 38 aa, Artificial Sequence
  Non-cyclic GFR-binding peptide
  MOD_RES (4), (5), (38): Xaa is C or S
  MOD_RES (19), (20), (21), (22), (23): Xaa is A or G
  MOD_RES (24), (25), (26), (27): Xaa is A or G or is absent
AAPXXVPQALSNITIQIMXXXXXXXXXIGEMSMIVRSX

SEQ ID NO: 29072 - protein, 37 aa, Artificial Sequence
  Non-cyclic GFR-binding peptide
  MOD_RES (37), (37): Xaa is C or S
  MOD_RES (16), (17), (18), (19), (20): Xaa is A or G
  MOD_RES (21), (22), (23), (24): Xaa is A or G or is absent
RPTQVQLEPLTVLYYXXXXXXXXXEQLSNTLEDHLAX

SEQ ID NO: 29073 - protein, 37 aa, Artificial Sequence
  Non-cyclic GFR-binding peptide
  MOD_RES (4), (5): Xaa is C or S
  MOD_RES (19), (20), (21), (22), (23): Xaa is A or G
  MOD_RES (24), (25), (26), (27): Xaa is A or G or is absent
PKAXXVPTELRSVKMAKVXXXXXXXXXKEVQVEMVVE

SEQ ID NO: 29074 - protein, 39 aa, Artificial Sequence
  Non-cyclic GFR-binding peptide
  MOD_RES (7), (7): Xaa is C or S
NDEGLEXVPTEEEPLPMVYYRIKPHQGQHEQLSNFLQHN

SEQ ID NO: 29075 - protein, 37 aa, Artificial Sequence
  Non-cyclic GFR-binding peptide
  MOD_RES (1), (35), (37): Xaa is C or S
XVPTEEEPLTMLYYRIKPHQGQHEQLSNFLQHNKXEX

SEQ ID NO: 29076 - protein, 40 aa, Artificial Sequence
  Non-cyclic GFR-binding peptide
  MOD_RES (5), (6), (37), (39): Xaa is C or S
SASPXXVSQDLSNITIQIMIGKTPKIIGEMSMIVKSXKXS

SEQ ID NO: 29077 - protein, 33 aa, Artificial Sequence
  Non-cyclic GFR-binding peptide
  MOD_RES (2), (3): Xaa is C or S
PXXAPTQLRSVKVAKVDDSSNVIKEVQVNMVVR

SEQ ID NO: 29078 - protein, 39 aa, Artificial Sequence
  Non-cyclic GFR-binding peptide
  MOD_RES (2), (3), (37), (39): Xaa is C or S
  MOD_RES (17), (18), (19), (20), (21): Xaa is A or G
  MOD_RES (22), (23), (24), (25): Xaa is A or G or is absent
PXXAPTQLRSVKVAKVXXXXXXXXXKEVQVNMVVRAXGX

SEQ ID NO: 29079 - protein, 36 aa, Artificial Sequence
  Non-cyclic GFR-binding peptide
  MOD_RES (4), (4): Xaa is C or S
  MOD_RES (18), (19), (20), (21), (22): Xaa is A or G
  MOD_RES (23), (24), (25), (26): Xaa is A or G or is absent
GLEXVPTEEEPLPMVYYXXXXXXXXXEQLSNFLQHN

SEQ ID NO: 29080 - protein, 37 aa, Artificial Sequence
  Non-cyclic GFR-binding peptide
  MOD_RES (1), (35), (37): Xaa is C or S
  MOD_RES (15), (16), (17), (18), (19): Xaa is A or G
  MOD_RES (20), (21), (22), (23): Xaa is A or G or is absent
XAPTQLSNITVQIMXXXXXXXXXIGEMSNMVVRAXGX

SEQ ID NO: 29081 - protein, 41 aa, Artificial Sequence
  Non-cyclic GFR-binding peptide
  MOD_RES (4), (5), (38), (40): Xaa is C or S
  MOD_RES (19), (20), (21), (22), (23): Xaa is A or G
  MOD_RES (24), (25), (26), (27): Xaa is A or G or is absent
ASPXXVPQDLRSVKIAKVXXXXXXXXXKEVQVMVVKSXKXS

SEQ ID NO: 29082 - protein, 32 aa, Artificial Sequence
  Non-cyclic GFR-binding peptide
  MOD_RES (1), (2): Xaa is C or S
XXVPQDLSNITIQIMVGRTPKVIGEMSMVVKS

SEQ ID NO: 29083 - protein, 43 aa, Artificial Sequence
  Non-cyclic GFR-binding peptide
  MOD_RES (6), (40), (42): Xaa is C or S
DEGLEXVPTEEEPLPMVYYRIKPHQGQHEQLSNFLQHNKXEXR

SEQ ID NO: 29084 - protein, 33 aa, Artificial Sequence
  Non-cyclic GFR-binding peptide
  MOD_RES (3), (3): Xaa is C or S
PTXAPTKLRPVQVRKIDDSSNVIKKATVNMVVR

SEQ ID NO: 29085 - protein, 35 aa, Artificial Sequence
  Non-cyclic GFR-binding peptide
  MOD_RES (5), (5): Xaa is C or S
TKPTXAPTKLSNITVQIMDDSSNVIIGEMSNMVVR

SEQ ID NO: 29086 - protein, 37 aa, Artificial Sequence
  Non-cyclic GFR-binding peptide
  MOD_RES (5), (5): Xaa is C or S
  MOD_RES (19), (20), (21), (22), (23): Xaa is A or G
  MOD_RES (24), (25), (26), (27): Xaa is A or G or is absent
EGLEXVPTEEEPLPMVYYXXXXXXXXXEQLSNFLQHN

SEQ ID NO: 29087 - protein, 37 aa, Artificial Sequence
  Non-cyclic GFR-binding peptide
  MOD_RES (1), (2), (35), (37): Xaa is C or S
  MOD_RES (16), (17), (18), (19), (20): Xaa is A or G
  MOD_RES (21), (22), (23), (24): Xaa is A or G or is absent
XXVSQDLRPVQIRKIXXXXXXXXXKKATVMIVKSXKX

SEQ ID NO: 29088 - protein, 44 aa, Artificial Sequence
  Non-cyclic GFR-binding peptide
  MOD_RES (6), (7), (41), (43): Xaa is C or S
  MOD_RES (21), (22), (23), (24), (25): Xaa is A or G
  MOD_RES (26), (27), (28), (29): Xaa is A or G or is absent
SIPKAXXVPTELRSVKMAKVXXXXXXXXXKEVQVEMVVEGXGXR

SEQ ID NO: 29089 - protein, 36 aa, Artificial Sequence
  Non-cyclic GFR-binding peptide
  MOD_RES (2), (3), (35): Xaa is C or S
AXXVPTELRPVQMRKIDENEKVVKKATVDMVVEGXG

SEQ ID NO: 29090 - protein, 35 aa, Artificial Sequence
  Non-cyclic GFR-binding peptide
  MOD_RES (1), (2), (35): Xaa is C or S
  MOD_RES (16), (17), (18), (19), (20): Xaa is A or G
  MOD_RES (21), (22), (23), (24): Xaa is A or G or is absent
XXVPQALRPVQIRKIXXXXXXXXXKKATVMIVRSX

SEQ ID NO: 29091 - protein, 41 aa, Artificial Sequence
  Non-cyclic GFR-binding peptide
  MOD_RES (6), (7), (41): Xaa is C or S
  MOD_RES (21), (22), (23), (24), (25): Xaa is A or G
  MOD_RES (26), (27), (28), (29): Xaa is A or G or is absent
SIPKAXXVPTELRPVQMRKIXXXXXXXXXKKATVEMVVEGX

SEQ ID NO: 29092 - protein, 41 aa, Artificial Sequence
  Non-cyclic GFR-binding peptide
  MOD_RES (2), (39), (41): Xaa is C or S
  MOD_RES (18), (19), (20), (21), (22): Xaa is A or G
  MOD_RES (23), (24), (25), (26): Xaa is A or G or is absent
QXRPTQVQLEPLPVVYYXXXXXXXXXEQLSNTLEDHLAXKX

SEQ ID NO: 29093 - protein, 34 aa, Artificial Sequence
  Non-cyclic GFR-binding peptide
  MOD_RES (2), (2): Xaa is C or S
  MOD_RES (16), (17), (18), (19), (20): Xaa is A or G
  MOD_RES (21), (22), (23), (24): Xaa is A or G or is absent
TXAPTKLRSVKVAKVXXXXXXXXXKEVQVNMVVR

SEQ ID NO: 29094 - protein, 38 aa, Artificial Sequence
  Non-cyclic GFR-binding peptide
  MOD_RES (2), (3), (35), (37): Xaa is C or S
AXXVPTELRSVKMAKVDENEKVVKEVQVDMVVEGXGXR

SEQ ID NO: 29095 - protein, 36 aa, Artificial Sequence
  Non-cyclic GFR-binding peptide
  MOD_RES (2), (3), (36): Xaa is C or S
  MOD_RES (17), (18), (19), (20), (21): Xaa is A or G
  MOD_RES (22), (23), (24), (25): Xaa is A or G or is absent
PXXVSQDLSNITIQIMXXXXXXXXXIGEMSMIVKSX

SEQ ID NO: 29096 - protein, 40 aa, Artificial Sequence
  Non-cyclic GFR-binding peptide
  MOD_RES (5), (6), (38), (40): Xaa is C or S
VPKPXXAPTQLRSVKVAKVDDSSNVIKEVQVNMVVRAXGX

SEQ ID NO: 29097 - protein, 37 aa, Artificial Sequence
  Non-cyclic GFR-binding peptide
  MOD_RES (3), (3): Xaa is C or S
  MOD_RES (19), (20), (21), (22), (23): Xaa is A or G
  MOD_RES (24), (25), (26), (27): Xaa is A or G or is absent
VKXQPSRVHHEPLPVVYYXXXXXXXXXEQLSNRLEEH

SEQ ID NO: 29098 - protein, 36 aa, Artificial Sequence
  Non-cyclic GFR-binding peptide
  MOD_RES (2), (3), (35): Xaa is C or S
PXXAPTKLRPVQVRKIDDSSNVIKKATVNMVVRSXG

SEQ ID NO: 29099 - protein, 33 aa, Artificial Sequence
  Non-cyclic GFR-binding peptide
  MOD_RES (2), (3): Xaa is C or S
AXXVPTELRSVKMAKVDEYDKVVKEVQVEMVVE

SEQ ID NO: 29100 - protein, 32 aa, Artificial Sequence
  Non-cyclic GFR-binding peptide
  MOD_RES (1), (2): Xaa is C or S
XXVSQDLSNITIQIMIGKTPKIIGEMSMIVKS

SEQ ID NO: 29101 - protein, 43 aa, Artificial Sequence
  Non-cyclic GFR-binding peptide
  MOD_RES (6), (7), (41), (43): Xaa is C or S
  MOD_RES (21), (22), (23), (24), (25): Xaa is A or G
  MOD_RES (26), (27), (28), (29): Xaa is A or G or is absent
SIPKAXXVPTELRPVQMRKIXXXXXXXXXKKATVEMVVEGXGX

SEQ ID NO: 29102 - protein, 39 aa, Artificial Sequence
  Non-cyclic GFR-binding peptide
  MOD_RES (4), (38): Xaa is C or S
GLEXVPTEEEPLPMVYYRIKPHQGQHEQLSNFLQHNKXE

SEQ ID NO: 29103 - protein, 37 aa, Artificial Sequence
  Non-cyclic GFR-binding peptide
  MOD_RES (3), (4), (37): Xaa is C or S
  MOD_RES (18), (19), (20), (21), (22): Xaa is A or G
  MOD_RES (23), (24), (25), (26): Xaa is A or G or is absent
APXXVPQALSNITIQIMXXXXXXXXXIGEMSMIVRSX

SEQ ID NO: 29104 - protein, 36 aa, Artificial Sequence
  Non-cyclic GFR-binding peptide
  MOD_RES (4), (5): Xaa is C or S
PKAXXVPTELRPVQMRKIDEYDKVVKKATVEMVVEG

SEQ ID NO: 29105 - protein, 39 aa, Artificial Sequence
  Non-cyclic GFR-binding peptide
  MOD_RES (4), (38): Xaa is C or S
  MOD_RES (18), (19), (20), (21), (22): Xaa is A or G
  MOD_RES (23), (24), (25), (26): Xaa is A or G or is absent
KPTXAPTKLRPVQVRKIXXXXXXXXXKKATVNMVVRSXG

SEQ ID NO: 29106 - protein, 38 aa, Artificial Sequence
  Non-cyclic GFR-binding peptide
  MOD_RES (5), (6), (38): Xaa is C or S
VPKPXXAPTKLRSVKVAKVDDSSNVIKEVQVNMVVRSX

SEQ ID NO: 29107 - protein, 32 aa, Artificial Sequence
  Non-cyclic GFR-binding peptide
  MOD_RES (32), (32): Xaa is C or S
APTKLSNITVQIMDDSSNVIIGEMSNMVVRSX

SEQ ID NO: 29108 - protein, 36 aa, Artificial Sequence
  Non-cyclic GFR-binding peptide
  MOD_RES (1), (2), (35): Xaa is C or S
  MOD_RES (16), (17), (18), (19), (20): Xaa is A or G
  MOD_RES (21), (22), (23), (24): Xaa is A or G or is absent
XXVPQALRPVQIRKIXXXXXXXXXKKATVMIVRSXK

SEQ ID NO: 29109 - protein, 37 aa, Artificial Sequence
  Non-cyclic GFR-binding peptide
  MOD_RES (5), (5): Xaa is C or S
EGLEXVPTEEEPLTMLYYRIKPHQGQHEQLSNFLQHN

SEQ ID NO: 29110 - protein, 35 aa, Artificial Sequence
  Non-cyclic GFR-binding peptide
  MOD_RES (1), (33), (35): Xaa is C or S
XVPTELRSVKMAKVDENEKVVKEVQVDMVVEGXGX

SEQ ID NO: 29111 - protein, 35 aa, Artificial Sequence
  Non-cyclic GFR-binding peptide
  MOD_RES (3), (4), (35): Xaa is C or S
SPXXVSQDLRPVQIRKIIGKTPKIKKATVMIVKSX

SEQ ID NO: 29112 - protein, 38 aa, Artificial Sequence
  Non-cyclic GFR-binding peptide
  MOD_RES (2), (2): Xaa is C or S
  MOD_RES (18), (19), (20), (21), (22): Xaa is A or G
  MOD_RES (23), (24), (25), (26): Xaa is A or G or is absent
KXQPSRVHHEPLTVLYYXXXXXXXXXEQLSNRLEEHLE

SEQ ID NO: 29113 - protein, 39 aa, Artificial Sequence
  Non-cyclic GFR-binding peptide
  MOD_RES (6), (7), (39): Xaa is C or S
SIPKAXXVPTELSNITMQIMDEYDKVVIGEMSEMVVEGX

SEQ ID NO: 29114 - protein, 40 aa, Artificial Sequence
  Non-cyclic GFR-binding peptide
  MOD_RES (6), (7): Xaa is C or S
  MOD_RES (21), (22), (23), (24), (25): Xaa is A or G
  MOD_RES (26), (27), (28), (29): Xaa is A or G or is absent
YVPKPXXAPTKLRSVKVAKVXXXXXXXXXKEVQVNMVVRS

SEQ ID NO: 29115 - protein, 43 aa, Artificial Sequence
  Non-cyclic GFR-binding peptide
  MOD_RES (5), (42): Xaa is C or S
RNVQXRPTQVQLEPLPVVYYEIVRKKPIFEQLSNTLEDHLAXK

SEQ ID NO: 29116 - protein, 41 aa, Artificial Sequence
  Non-cyclic GFR-binding peptide
  MOD_RES (4), (38), (40): Xaa is C or S
GLEXVPTEEEPLTMLYYRIKPHQGQHEQLSNFLQHNKXEXR

SEQ ID NO: 29117 - protein, 39 aa, Artificial Sequence
  Non-cyclic GFR-binding peptide
  MOD_RES (6), (7): Xaa is C or S
  MOD_RES (21), (22), (23), (24), (25): Xaa is A or G
  MOD_RES (26), (27), (28), (29): Xaa is A or G or is absent
ASASPXXVPQDLRPVQIRKIXXXXXXXXXKKATVMVVKS

SEQ ID NO: 29118 - protein, 39 aa, Artificial Sequence
  Non-cyclic GFR-binding peptide
  MOD_RES (5), (6), (37), (39): Xaa is C or S
SASPXXVSQDLRPVQIRKIIGKTPKIKKATVMIVKSXKX

SEQ ID NO: 29119 - protein, 33 aa, Artificial Sequence
  Non-cyclic GFR-binding peptide
VPTEEEPLTMLYYRIKPHQGQHEQLSNFLQHNK

SEQ ID NO: 29120 - protein, 41 aa, Artificial Sequence
  Non-cyclic GFR-binding peptide
  MOD_RES (6), (7), (39), (41): Xaa is C or S
TVPKPXXAPTQLRSVKVAKVDDSSNVIKEVQVNMVVRAXGX

SEQ ID NO: 29121 - protein, 43 aa, Artificial Sequence
  Non-cyclic GFR-binding peptide
  MOD_RES (6), (7), (41), (43): Xaa is C or S
  MOD_RES (21), (22), (23), (24), (25): Xaa is A or G
  MOD_RES (26), (27), (28), (29): Xaa is A or G or is absent
TVPKPXXAPTQLRSVKVAKVXXXXXXXXXKEVQVNMVVRAXGX

SEQ ID NO: 29122 - protein, 38 aa, Artificial Sequence
  Non-cyclic GFR-binding peptide
  MOD_RES (2), (3), (36), (38): Xaa is C or S
  MOD_RES (17), (18), (19), (20), (21): Xaa is A or G
  MOD_RES (22), (23), (24), (25): Xaa is A or G or is absent
PXXVPQDLSNITIQIMXXXXXXXXXIGEMSMVVKSXKX

SEQ ID NO: 29123 - protein, 39 aa, Artificial Sequence
  Non-cyclic GFR-binding peptide
  MOD_RES (36), (38): Xaa is C or S
PSRVHHEPLPVVYYEYVRKKPKLEQLSNRLEEHLEXAXA

SEQ ID NO: 29124 - protein, 35 aa, Artificial Sequence
  Non-cyclic GFR-binding peptide
  MOD_RES (1), (33), (35): Xaa is C or S
XAPTQLRPVQVRKIDDSSNVIKKATVNMVVRAXGX

SEQ ID NO: 29125 - protein, 37 aa, Artificial Sequence
  Non-cyclic GFR-binding peptide
  MOD_RES (2), (3), (36): Xaa is C or S
  MOD_RES (17), (18), (19), (20), (21): Xaa is A or G
  MOD_RES (22), (23), (24), (25): Xaa is A or G or is absent
PXXVPQDLSNITIQIMXXXXXXXXXIGEMSMVVKSXK

SEQ ID NO: 29126 - protein, 32 aa, Artificial Sequence
  Non-cyclic GFR-binding peptide
  MOD_RES (1), (1): Xaa is C or S
XAPTKLRSVKVAKVDDSSNVIKEVQVNMVVRS

SEQ ID NO: 29127 - protein, 37 aa, Artificial Sequence
  Non-cyclic GFR-binding peptide
  MOD_RES (3), (3): Xaa is C or S
  MOD_RES (19), (20), (21), (22), (23): Xaa is A or G
  MOD_RES (24), (25), (26), (27): Xaa is A or G or is absent
VKXQPSRVHHEPLTVLYYXXXXXXXXXEQLSNRLEEH

SEQ ID NO: 29128 - protein, 40 aa, Artificial Sequence
  Non-cyclic GFR-binding peptide
  MOD_RES (4), (5), (39): Xaa is C or S
  MOD_RES (19), (20), (21), (22), (23): Xaa is A or G
  MOD_RES (24), (25), (26), (27): Xaa is A or G or is absent
PKPXXAPTQLRSVKVAKVXXXXXXXXXKEVQVNMVVRAXG

SEQ ID NO: 29129 - protein, 36 aa, Artificial Sequence
  Non-cyclic GFR-binding peptide
  MOD_RES (1), (2), (34), (36): Xaa is C or S
XXAPTKLRSVKVAKVDDSSNVIKEVQVNMVVRSXGX

SEQ ID NO: 29130 - protein, 34 aa, Artificial Sequence
  Non-cyclic GFR-binding peptide
  MOD_RES (1), (33): Xaa is C or S
XAPTKLSNITVQIMDDSSNVIIGEMSNMVVRSXG

SEQ ID NO: 29131 - protein, 42 aa, Artificial Sequence
  Non-cyclic GFR-binding peptide
  MOD_RES (6), (7), (41): Xaa is C or S
  MOD_RES (21), (22), (23), (24), (25): Xaa is A or G
  MOD_RES (26), (27), (28), (29): Xaa is A or G or is absent
TVPKPXXAPTQLRSVKVAKVXXXXXXXXXKEVQVNMVVRAXG

SEQ ID NO: 29132 - protein, 39 aa, Artificial Sequence
  Non-cyclic GFR-binding peptide
  MOD_RES (2), (39): Xaa is C or S
QXRPTQVQLEPLPVVYYEIVRKKPIFEQLSNTLEDHLAX

SEQ ID NO: 29133 - protein, 31 aa, Artificial Sequence
  Non-cyclic GFR-binding peptide
  MOD_RES (31), (31): Xaa is C or S
VSQDLSNITIQIMIGKTPKIIGEMSMIVKSX

SEQ ID NO: 29134 - protein, 37 aa, Artificial Sequence
  Non-cyclic GFR-binding peptide
  MOD_RES (2), (3), (37): Xaa is C or S
  MOD_RES (17), (18), (19), (20), (21): Xaa is A or G
  MOD_RES (22), (23), (24), (25): Xaa is A or G or is absent
AXXVPTELRSVKMAKVXXXXXXXXXKEVQVEMVVEGX

SEQ ID NO: 29135 - protein, 44 aa, Artificial Sequence
  Non-cyclic GFR-binding peptide
  MOD_RES (4), (41), (43): Xaa is C or S
NVQXRPTQVQLEPLPVVYYEIVRKKPIFEQLSNTLEDHLAXKXE

SEQ ID NO: 29136 - protein, 36 aa, Artificial Sequence
  Non-cyclic GFR-binding peptide
  MOD_RES (1), (34), (36): Xaa is C or S
  MOD_RES (15), (16), (17), (18), (19): Xaa is A or G
  MOD_RES (20), (21), (22), (23): Xaa is A or G or is absent
XVPQALRPVQIRKIXXXXXXXXXKKATVMIVRSXKX

SEQ ID NO: 29137 - protein, 32 aa, Artificial Sequence
  Non-cyclic GFR-binding peptide
  MOD_RES (2), (2): Xaa is C or S
TXAPTKLRSVKVAKVDDSSNVIKEVQVNMVVR

SEQ ID NO: 29138 - protein, 39 aa, Artificial Sequence
  Non-cyclic GFR-binding peptide
  MOD_RES (5), (6), (37), (39): Xaa is C or S
SASPXXVPQDLRPVQIRKIVGRTPKVKKATVMVVKSXKX

SEQ ID NO: 29139 - protein, 45 aa, Artificial Sequence
  Non-cyclic GFR-binding peptide
  MOD_RES (5), (42), (44): Xaa is C or S
  MOD_RES (21), (22), (23), (24), (25): Xaa is A or G
  MOD_RES (26), (27), (28), (29): Xaa is A or G or is absent
SSVKXQPSRVHHEPLPVVYYXXXXXXXXXEQLSNRLEEHLEXAXA

SEQ ID NO: 29140 - protein, 38 aa, Artificial Sequence
  Non-cyclic GFR-binding peptide
  MOD_RES (4), (5), (38): Xaa is C or S
  MOD_RES (19), (20), (21), (22), (23): Xaa is A or G
  MOD_RES (24), (25), (26), (27): Xaa is A or G or is absent
ASPXXVPQDLSNITIQIMXXXXXXXXXIGEMSMVVKSX

SEQ ID NO: 29141 - protein, 36 aa, Artificial Sequence
  Non-cyclic GFR-binding peptide
  MOD_RES (2), (36): Xaa is C or S
  MOD_RES (16), (17), (18), (19), (20): Xaa is A or G
  MOD_RES (21), (22), (23), (24): Xaa is A or G or is absent
EXVPTEEEPLPMVYYXXXXXXXXXEQLSNFLQHNKX

SEQ ID NO: 29142 - protein, 37 aa, Artificial Sequence
  Non-cyclic GFR-binding peptide
  MOD_RES (3), (4), (35), (37): Xaa is C or S
APXXVPQALRPVQIRKIVGRKPKVKKATVMIVRSXKX

SEQ ID NO: 29143 - protein, 40 aa, Artificial Sequence
  Non-cyclic GFR-binding peptide
  MOD_RES (4), (5), (37), (39): Xaa is C or S
PKPXXAPTKLRSVKVAKVDDSSNVIKEVQVNMVVRSXGXH

SEQ ID NO: 29144 - protein, 39 aa, Artificial Sequence
  Non-cyclic GFR-binding peptide
  MOD_RES (4), (4): Xaa is C or S
  MOD_RES (20), (21), (22), (23), (24): Xaa is A or G
  MOD_RES (25), (26), (27), (28): Xaa is A or G or is absent
SVKXQPSRVHHEPLTVLYYXXXXXXXXXEQLSNRLEEHL

SEQ ID NO: 29145 - protein, 37 aa, Artificial Sequence
  Non-cyclic GFR-binding peptide
  MOD_RES (5), (5): Xaa is C or S
EGLEXVPTEEEPLPMVYYRIKPHQGQHEQLSNFLQHN

SEQ ID NO: 29146 - protein, 37 aa, Artificial Sequence
  Non-cyclic GFR-binding peptide
  MOD_RES (35), (37): Xaa is C or S
  MOD_RES (14), (15), (16), (17), (18): Xaa is A or G
  MOD_RES (19), (20), (21), (22): Xaa is A or G or is absent
TQVQLEPLTVLYYXXXXXXXXXEQLSNTLEDHLAXKX

SEQ ID NO: 29147 - protein, 37 aa, Artificial Sequence
  Non-cyclic GFR-binding peptide
  MOD_RES (4), (5), (37): Xaa is C or S
PKPXXAPTKLSNITVQIMDDSSNVIIGEMSNMVVRSX

SEQ ID NO: 29148 - protein, 35 aa, Artificial Sequence
  Non-cyclic GFR-binding peptide
  MOD_RES (1), (2), (34): Xaa is C or S
XXVPTELRPVQMRKIDENEKVVKKATVDMVVEGXG

SEQ ID NO: 29149 - protein, 38 aa, Artificial Sequence
  Non-cyclic GFR-binding peptide
  MOD_RES (2), (36), (38): Xaa is C or S
  MOD_RES (16), (17), (18), (19), (20): Xaa is A or G
  MOD_RES (21), (22), (23), (24): Xaa is A or G or is absent
TXAPTKLRSVKVAKVXXXXXXXXXKEVQVNMVVRSXGX

SEQ ID NO: 29150 - protein, 34 aa, Artificial Sequence
  Non-cyclic GFR-binding peptide
  MOD_RES (4), (4): Xaa is C or S
KPTXAPTKLRPVQVRKIDDSSNVIKKATVNMVVR

SEQ ID NO: 29151 - protein, 35 aa, Artificial Sequence
  Non-cyclic GFR-binding peptide
  MOD_RES (2), (2): Xaa is C or S
  MOD_RES (16), (17), (18), (19), (20): Xaa is A or G
  MOD_RES (21), (22), (23), (24): Xaa is A or G or is absent
EXVPTEEEPLPMVYYXXXXXXXXXEQLSNFLQHNK

SEQ ID NO: 29152 - protein, 37 aa, Artificial Sequence
  Non-cyclic GFR-binding peptide
  MOD_RES (2), (3), (34), (36): Xaa is C or S
PXXVPQDLRSVKIAKVVGRTPKVKEVQVMVVKSXKXS

SEQ ID NO: 29153 - protein, 36 aa, Artificial Sequence
  Non-cyclic GFR-binding peptide
  MOD_RES (4), (5): Xaa is C or S
PKAXXVPTELRPVQMRKIDENEKVVKKATVDMVVEG

SEQ ID NO: 29154 - protein, 38 aa, Artificial Sequence
  Non-cyclic GFR-binding peptide
  MOD_RES (36), (38): Xaa is C or S
PTQVQLEPLPVVYYEIVRKKPIFEQLSNTLEDHLAXKX

SEQ ID NO: 29155 - protein, 36 aa, Artificial Sequence
  Non-cyclic GFR-binding peptide
  MOD_RES (5), (5): Xaa is C or S
TKPTXAPTKLSNITVQIMDDSSNVIIGEMSNMVVRS

SEQ ID NO: 29156 - protein, 39 aa, Artificial Sequence
  Non-cyclic GFR-binding peptide
  MOD_RES (2), (3), (37), (39): Xaa is C or S
  MOD_RES (17), (18), (19), (20), (21): Xaa is A or G
  MOD_RES (22), (23), (24), (25): Xaa is A or G or is absent
AXXVPTELRPVQMRKIXXXXXXXXXKKATVDMVVEGXGX

SEQ ID NO: 29157 - protein, 43 aa, Artificial Sequence
  Non-cyclic GFR-binding peptide
  MOD_RES (3), (40), (42): Xaa is C or S
  MOD_RES (19), (20), (21), (22), (23): Xaa is A or G
  MOD_RES (24), (25), (26), (27): Xaa is A or G or is absent
VKXQPSRVHHEPLTVLYYXXXXXXXXXEQLSNRLEEHLEXAXA

SEQ ID NO: 29158 - protein, 36 aa, Artificial Sequence
  Non-cyclic GFR-binding peptide
  MOD_RES (3), (4), (36): Xaa is C or S
KPXXAPTKLRSVKVAKVDDSSNVIKEVQVNMVVRSX

SEQ ID NO: 29159 - protein, 43 aa, Artificial Sequence
  Non-cyclic GFR-binding peptide
  MOD_RES (6), (7), (41), (43): Xaa is C or S
  MOD_RES (21), (22), (23), (24), (25): Xaa is A or G
  MOD_RES (26), (27), (28), (29): Xaa is A or G or is absent
YVPKPXXAPTKLRPVQVRKIXXXXXXXXXKKATVNMVVRSXGX

SEQ ID NO: 29160 - protein, 33 aa, Artificial Sequence
  Non-cyclic GFR-binding peptide
  MOD_RES (15), (16), (17), (18), (19): Xaa is A or G
  MOD_RES (20), (21), (22), (23): Xaa is A or G or is absent
PTQVQLEPLPVVYYXXXXXXXXXEQLSNTLEDH

SEQ ID NO: 29161 - protein, 37 aa, Artificial Sequence
  Non-cyclic GFR-binding peptide
  MOD_RES (3), (37): Xaa is C or S
  MOD_RES (17), (18), (19), (20), (21): Xaa is A or G
  MOD_RES (22), (23), (24), (25): Xaa is A or G or is absent
LEXVPTEEEPLTMLYYXXXXXXXXXEQLSNFLQHNKX

SEQ ID NO: 29162 - protein, 34 aa, Artificial Sequence
  Non-cyclic GFR-binding peptide
  MOD_RES (33), (33): Xaa is C or S
  MOD_RES (14), (15), (16), (17), (18): Xaa is A or G
  MOD_RES (19), (20), (21), (22): Xaa is A or G or is absent
VSQDLSNITIQIMXXXXXXXXXIGEMSMIVKSXK

SEQ ID NO: 29163 - protein, 35 aa, Artificial Sequence
  Non-cyclic GFR-binding peptide
  MOD_RES (2), (3): Xaa is C or S
  MOD_RES (17), (18), (19), (20), (21): Xaa is A or G
  MOD_RES (22), (23), (24), (25): Xaa is A or G or is absent
PXXVSQDLSNITIQIMXXXXXXXXXIGEMSMIVKS

SEQ ID NO: 29164 - protein, 34 aa, Artificial Sequence
  Non-cyclic GFR-binding peptide
  MOD_RES (1), (1): Xaa is C or S
XVPTEEEPLPMVYYRIKPHQGQHEQLSNFLQHNK

SEQ ID NO: 29165 - protein, 32 aa, Artificial Sequence
  Non-cyclic GFR-binding peptide
TQVQLEPLTVLYYEIVRKKPIFEQLSNTLEDH

SEQ ID NO: 29166 - protein, 38 aa, Artificial Sequence
  Non-cyclic GFR-binding peptide
  MOD_RES (1), (2), (35), (37): Xaa is C or S
  MOD_RES (16), (17), (18), (19), (20): Xaa is A or G
  MOD_RES (21), (22), (23), (24): Xaa is A or G or is absent
XXVSQDLRPVQIRKIXXXXXXXXXKKATVMIVKSXKXS

SEQ ID NO: 29167 - protein, 30 aa, Artificial Sequence
  Non-cyclic GFR-binding peptide
VPTELRSVKMAKVDENEKVVKEVQVDMVVE

SEQ ID NO: 29168 - protein, 38 aa, Artificial Sequence
  Non-cyclic GFR-binding peptide
  MOD_RES (3), (4), (38): Xaa is C or S
  MOD_RES (18), (19), (20), (21), (22): Xaa is A or G
  MOD_RES (23), (24), (25), (26): Xaa is A or G or is absent
KAXXVPTELRPVQMRKIXXXXXXXXXKKATVDMVVEGX

SEQ ID NO: 29169 - protein, 33 aa, Artificial Sequence
  Non-cyclic GFR-binding peptide
  MOD_RES (15), (16), (17), (18), (19): Xaa is A or G
  MOD_RES (20), (21), (22), (23): Xaa is A or G or is absent
PTQVQLEPLTVLYYXXXXXXXXXEQLSNTLEDH

SEQ ID NO: 29170 - protein, 36 aa, Artificial Sequence
  Non-cyclic GFR-binding peptide
  MOD_RES (1), (35): Xaa is C or S
  MOD_RES (15), (16), (17), (18), (19): Xaa is A or G
  MOD_RES (20), (21), (22), (23): Xaa is A or G or is absent
XAPTKLRPVQVRKIXXXXXXXXXKKATVNMVVRSXG

SEQ ID NO: 29171 - protein, 35 aa, Artificial Sequence
  Non-cyclic GFR-binding peptide
  MOD_RES (2), (3), (34): Xaa is C or S
PXXVPQALRSVKIAKVVGRKPKVKEVQVMIVRSXK

SEQ ID NO: 29172 - protein, 38 aa, Artificial Sequence
  Non-cyclic GFR-binding peptide
  MOD_RES (4), (5), (36), (38): Xaa is C or S
AAPXXVPQALRSVKIAKVVGRKPKVKEVQVMIVRSXKX

SEQ ID NO: 29173 - protein, 41 aa, Artificial Sequence
  Non-cyclic GFR-binding peptide
  MOD_RES (6), (7), (39), (41): Xaa is C or S
YVPKPXXAPTKLRSVKVAKVDDSSNVIKEVQVNMVVRSXGX

SEQ ID NO: 29174 - protein, 37 aa, Artificial Sequence
  Non-cyclic GFR-binding peptide
  MOD_RES (3), (4): Xaa is C or S
  MOD_RES (18), (19), (20), (21), (22): Xaa is A or G
  MOD_RES (23), (24), (25), (26): Xaa is A or G or is absent
KAXXVPTELRSVKMAKVXXXXXXXXXKEVQVDMVVEG

SEQ ID NO: 29175 - protein, 37 aa, Artificial Sequence
  Non-cyclic GFR-binding peptide
  MOD_RES (36), (36): Xaa is C or S
PTQVQLEPLTVLYYEIVRKKPIFEQLSNTLEDHLAXK

SEQ ID NO: 29176 - protein, 35 aa, Artificial Sequence
  Non-cyclic GFR-binding peptide
  MOD_RES (1), (35): Xaa is C or S
  MOD_RES (15), (16), (17), (18), (19): Xaa is A or G
  MOD_RES (20), (21), (22), (23): Xaa is A or G or is absent
XVPTEEEPLPMVYYXXXXXXXXXEQLSNFLQHNKX

SEQ ID NO: 29177 - protein, 34 aa, Artificial Sequence
  Non-cyclic GFR-binding peptide
  MOD_RES (1), (2), (34): Xaa is C or S
XXAPTKLRPVQVRKIDDSSNVIKKATVNMVVRSX

SEQ ID NO: 29178 - protein, 40 aa, Artificial Sequence
  Non-cyclic GFR-binding peptide
  MOD_RES (6), (7): Xaa is C or S
  MOD_RES (21), (22), (23), (24), (25): Xaa is A or G
  MOD_RES (26), (27), (28), (29): Xaa is A or G or is absent
SIPKAXXVPTELRSVKMAKVXXXXXXXXXKEVQVEMVVEG

SEQ ID NO: 29179 - protein, 42 aa, Artificial Sequence
  Non-cyclic GFR-binding peptide
  MOD_RES (5), (42): Xaa is C or S
  MOD_RES (21), (22), (23), (24), (25): Xaa is A or G
  MOD_RES (26), (27), (28), (29): Xaa is A or G or is absent
RNVQXRPTQVQLEPLPVVYYXXXXXXXXXEQLSNTLEDHLAX

SEQ ID NO: 29180 - protein, 35 aa, Artificial Sequence
  Non-cyclic GFR-binding peptide
  MOD_RES (34), (34): Xaa is C or S
  MOD_RES (14), (15), (16), (17), (18): Xaa is A or G
  MOD_RES (19), (20), (21), (22): Xaa is A or G or is absent
VPTELRSVKMAKVXXXXXXXXXKEVQVEMVVEGXG

SEQ ID NO: 29181 - protein, 37 aa, Artificial Sequence
  Non-cyclic GFR-binding peptide
  MOD_RES (1), (35), (37): Xaa is C or S
  MOD_RES (15), (16), (17), (18), (19): Xaa is A or G
  MOD_RES (20), (21), (22), (23): Xaa is A or G or is absent
XAPTKLRSVKVAKVXXXXXXXXXKEVQVNMVVRSXGX

SEQ ID NO: 29182 - protein, 40 aa, Artificial Sequence
  Non-cyclic GFR-binding peptide
  MOD_RES (3), (40): Xaa is C or S
  MOD_RES (19), (20), (21), (22), (23): Xaa is A or G
  MOD_RES (24), (25), (26), (27): Xaa is A or G or is absent
VKXQPSRVHHEPLPVVYYXXXXXXXXXEQLSNRLEEHLEX

SEQ ID NO: 29183 - protein, 36 aa, Artificial Sequence
  Non-cyclic GFR-binding peptide
  MOD_RES (5), (5): Xaa is C or S
TKPTXAPTKLRSVKVAKVDDSSNVIKEVQVNMVVRS

SEQ ID NO: 29184 - protein, 40 aa, Artificial Sequence
  Non-cyclic GFR-binding peptide
  MOD_RES (5), (6), (38), (40): Xaa is C or S
IPKAXXVPTELRSVKMAKVDENEKVVKEVQVDMVVEGXGX

SEQ ID NO: 29185 - protein, 36 aa, Artificial Sequence
  Non-cyclic GFR-binding peptide
  MOD_RES (3), (4): Xaa is C or S
  MOD_RES (18), (19), (20), (21), (22): Xaa is A or G
  MOD_RES (23), (24), (25), (26): Xaa is A or G or is absent
SPXXVSQDLSNITIQIMXXXXXXXXXIGEMSMIVKS

SEQ ID NO: 29186 - protein, 38 aa, Artificial Sequence
  Non-cyclic GFR-binding peptide
  MOD_RES (3), (4), (36), (38): Xaa is C or S
KPXXAPTKLRSVKVAKVDDSSNVIKEVQVNMVVRSXGX

SEQ ID NO: 29187 - protein, 38 aa, Artificial Sequence
  Non-cyclic GFR-binding peptide
  MOD_RES (37), (37): Xaa is C or S
QPSRVHHEPLPVVYYEYVRKKPKLEQLSNRLEEHLEXA

SEQ ID NO: 29188 - protein, 38 aa, Artificial Sequence
  Non-cyclic GFR-binding peptide
  MOD_RES (4), (5), (37): Xaa is C or S
PKAXXVPTELRSVKMAKVDEYDKVVKEVQVEMVVEGXG

SEQ ID NO: 29189 - protein, 40 aa, Artificial Sequence
  Non-cyclic GFR-binding peptide
  MOD_RES (5), (6), (40): Xaa is C or S
  MOD_RES (20), (21), (22), (23), (24): Xaa is A or G
  MOD_RES (25), (26), (27), (28): Xaa is A or G or is absent
IPKAXXVPTELRPVQMRKIXXXXXXXXXKKATVEMVVEGX

SEQ ID NO: 29190 - protein, 39 aa, Artificial Sequence
  Non-cyclic GFR-binding peptide
  MOD_RES (5), (6), (38): Xaa is C or S
IPKAXXVPTELRSVKMAKVDENEKVVKEVQVDMVVEGXG

SEQ ID NO: 29191 - protein, 40 aa, Artificial Sequence
  Non-cyclic GFR-binding peptide
  MOD_RES (5), (6), (37), (39): Xaa is C or S
SASPXXVPQDLRSVKIAKVVGRTPKVKEVQVMVVKSXKXS

SEQ ID NO: 29192 - protein, 44 aa, Artificial Sequence
  Non-cyclic GFR-binding peptide
  MOD_RES (7), (41), (43): Xaa is C or S
  MOD_RES (21), (22), (23), (24), (25): Xaa is A or G
  MOD_RES (26), (27), (28), (29): Xaa is A or G or is absent
NDEGLEXVPTEEEPLPMVYYXXXXXXXXXEQLSNFLQHNKXEXR

SEQ ID NO: 29193 - protein, 36 aa, Artificial Sequence
  Non-cyclic GFR-binding peptide
  MOD_RES (1), (2), (34), (36): Xaa is C or S
XXVPTELSNITMQIMDENEKVVIGEMSDMVVEGXGX

SEQ ID NO: 29194 - protein, 38 aa, Artificial Sequence
  Non-cyclic GFR-binding peptide
  MOD_RES (3), (4), (37): Xaa is C or S
  MOD_RES (18), (19), (20), (21), (22): Xaa is A or G
  MOD_RES (23), (24), (25), (26): Xaa is A or G or is absent
SPXXVPQDLSNITIQIMXXXXXXXXXIGEMSMVVKSXK

SEQ ID NO: 29195 - protein, 40 aa, Artificial Sequence
  Non-cyclic GFR-binding peptide
  MOD_RES (7), (39): Xaa is C or S
HVTKPTXAPTKLRPVQVRKIDDSSNVIKKATVNMVVRSXG

SEQ ID NO: 29196 - protein, 32 aa, Artificial Sequence
  Non-cyclic GFR-binding peptide
  MOD_RES (1), (2): Xaa is C or S
XXAPTQLSNITVQIMDDSSNVIIGEMSNMVVR

SEQ ID NO: 29197 - protein, 39 aa, Artificial Sequence
  Non-cyclic GFR-binding peptide
  MOD_RES (1), (38): Xaa is C or S
XRPTQVQLEPLTVLYYEIVRKKPIFEQLSNTLEDHLAXK

SEQ ID NO: 29198 - protein, 39 aa, Artificial Sequence
  Non-cyclic GFR-binding peptide
  MOD_RES (3), (4), (36), (38): Xaa is C or S
KPXXAPTQLSNITVQIMDDSSNVIIGEMSNMVVRAXGXH

SEQ ID NO: 29199 - protein, 37 aa, Artificial Sequence
  Non-cyclic GFR-binding peptide
  MOD_RES (4), (5), (37): Xaa is C or S
PKAXXVPTELRPVQMRKIDEYDKVVKKATVEMVVEGX

SEQ ID NO: 29200 - protein, 36 aa, Artificial Sequence
  Non-cyclic GFR-binding peptide
  MOD_RES (4), (4): Xaa is C or S
  MOD_RES (18), (19), (20), (21), (22): Xaa is A or G
  MOD_RES (23), (24), (25), (26): Xaa is A or G or is absent
KPTXAPTKLSNITVQIMXXXXXXXXXIGEMSNMVVR

SEQ ID NO: 29201 - protein, 37 aa, Artificial Sequence
  Non-cyclic GFR-binding peptide
  MOD_RES (2), (36): Xaa is C or S
  MOD_RES (16), (17), (18), (19), (20): Xaa is A or G
  MOD_RES (21), (22), (23), (24): Xaa is A or G or is absent
TXAPTKLRPVQVRKIXXXXXXXXXKKATVNMVVRSXG

SEQ ID NO: 29202 - protein, 38 aa, Artificial Sequence
  Non-cyclic GFR-binding peptide
  MOD_RES (5), (37): Xaa is C or S
TKPTXAPTKLSNITVQIMDDSSNVIIGEMSNMVVRSXG

SEQ ID NO: 29203 - protein, 38 aa, Artificial Sequence
  Non-cyclic GFR-binding peptide
  MOD_RES (3), (4), (35), (37): Xaa is C or S
APXXVPQALSNITIQIMVGRKPKVIGEMSMIVRSXKXS

SEQ ID NO: 29204 - protein, 37 aa, Artificial Sequence
  Non-cyclic GFR-binding peptide
  MOD_RES (1), (2), (36): Xaa is C or S
  MOD_RES (16), (17), (18), (19), (20): Xaa is A or G
  MOD_RES (21), (22), (23), (24): Xaa is A or G or is absent
XXAPTKLSNITVQIMXXXXXXXXXIGEMSNMVVRSXG

SEQ ID NO: 29205 - protein, 39 aa, Artificial Sequence
  Non-cyclic GFR-binding peptide
  MOD_RES (3), (4), (37), (39): Xaa is C or S
  MOD_RES (18), (19), (20), (21), (22): Xaa is A or G
  MOD_RES (23), (24), (25), (26): Xaa is A or G or is absent
APXXVPQALRPVQIRKIXXXXXXXXXKKATVMIVRSXKX

SEQ ID NO: 29206 - protein, 38 aa, Artificial Sequence
  Non-cyclic GFR-binding peptide
  MOD_RES (4), (5), (37): Xaa is C or S
PKAXXVPTELRPVQMRKIDENEKVVKKATVDMVVEGXG

SEQ ID NO: 29207 - protein, 39 aa, Artificial Sequence
  Non-cyclic GFR-binding peptide
  MOD_RES (36), (38): Xaa is C or S
  MOD_RES (15), (16), (17), (18), (19): Xaa is A or G
  MOD_RES (20), (21), (22), (23): Xaa is A or G or is absent
PTQVQLEPLTVLYYXXXXXXXXXEQLSNTLEDHLAXKXE

SEQ ID NO: 29208 - protein, 43 aa, Artificial Sequence
  Non-cyclic GFR-binding peptide
  MOD_RES (5), (6), (40), (42): Xaa is C or S
  MOD_RES (20), (21), (22), (23), (24): Xaa is A or G
  MOD_RES (25), (26), (27), (28): Xaa is A or G or is absent
IPKAXXVPTELSNITMQIMXXXXXXXXXIGEMSEMVVEGXGXR

SEQ ID NO: 29209 - protein, 42 aa, Artificial Sequence
  Non-cyclic GFR-binding peptide
  MOD_RES (6), (7), (39), (41): Xaa is C or S
YVPKPXXAPTKLRSVKVAKVDDSSNVIKEVQVNMVVRSXGXH

SEQ ID NO: 29210 - protein, 35 aa, Artificial Sequence
  Non-cyclic GFR-binding peptide
  MOD_RES (4), (5): Xaa is C or S
ASPXXVSQDLSNITIQIMIGKTPKIIGEMSMIVKS

SEQ ID NO: 29211 - protein, 43 aa, Artificial Sequence
  Non-cyclic GFR-binding peptide
  MOD_RES (3), (40), (42): Xaa is C or S
VKXQPSRVHHEPLTVLYYEYVRKKPKLEQLSNRLEEHLEXAXA

SEQ ID NO: 29212 - protein, 34 aa, Artificial Sequence
  Non-cyclic GFR-binding peptide
  MOD_RES (3), (4): Xaa is C or S
KPXXAPTQLRSVKVAKVDDSSNVIKEVQVNMVVR

SEQ ID NO: 29213 - protein, 35 aa, Artificial Sequence
  Non-cyclic GFR-binding peptide
  MOD_RES (1), (2), (33), (35): Xaa is C or S
XXVSQDLRSVKIAKVIGKTPKIKEVQVMIVKSXKX

SEQ ID NO: 29214 - protein, 40 aa, Artificial Sequence
  Non-cyclic GFR-binding peptide
  MOD_RES (2), (39): Xaa is C or S
  MOD_RES (18), (19), (20), (21), (22): Xaa is A or G
  MOD_RES (23), (24), (25), (26): Xaa is A or G or is absent
KXQPSRVHHEPLTVLYYXXXXXXXXXEQLSNRLEEHLEXA

SEQ ID NO: 29215 - protein, 42 aa, Artificial Sequence
  Non-cyclic GFR-binding peptide
  MOD_RES (5), (6), (39), (41): Xaa is C or S
  MOD_RES (20), (21), (22), (23), (24): Xaa is A or G
  MOD_RES (25), (26), (27), (28): Xaa is A or G or is absent
SAAPXXVPQALRSVKIAKVXXXXXXXXXKEVQVMIVRSXKXS

SEQ ID NO: 29216 - protein, 37 aa, Artificial Sequence
  Non-cyclic GFR-binding peptide
  MOD_RES (4), (5), (37): Xaa is C or S
PKAXXVPTELRSVKMAKVDEYDKVVKEVQVEMVVEGX

SEQ ID NO: 29217 - protein, 34 aa, Artificial Sequence
  Non-cyclic GFR-binding peptide
  MOD_RES (2), (3): Xaa is C or S
PXXAPTKLRPVQVRKIDDSSNVIKKATVNMVVRS

SEQ ID NO: 29218 - protein, 43 aa, Artificial Sequence
  Non-cyclic GFR-binding peptide
  MOD_RES (6), (7), (41), (43): Xaa is C or S
  MOD_RES (21), (22), (23), (24), (25): Xaa is A or G
  MOD_RES (26), (27), (28), (29): Xaa is A or G or is absent
KIPKAXXVPTELSNITMQIMXXXXXXXXXIGEMSDMVVEGXGX

SEQ ID NO: 29219 - protein, 41 aa, Artificial Sequence
  Non-cyclic GFR-binding peptide
  MOD_RES (5), (39), (41): Xaa is C or S
  MOD_RES (19), (20), (21), (22), (23): Xaa is A or G
  MOD_RES (24), (25), (26), (27): Xaa is A or G or is absent
TKPTXAPTKLSNITVQIMXXXXXXXXXIGEMSNMVVRSXGX

SEQ ID NO: 29220 - protein, 36 aa, Artificial Sequence
  Non-cyclic GFR-binding peptide
  MOD_RES (5), (6): Xaa is C or S
VPKPXXAPTQLRSVKVAKVDDSSNVIKEVQVNMVVR

SEQ ID NO: 29221 - protein, 42 aa, Artificial Sequence
  Non-cyclic GFR-binding peptide
  MOD_RES (5), (42): Xaa is C or S
RNVQXRPTQVQLEPLPVVYYEIVRKKPIFEQLSNTLEDHLAX

SEQ ID NO: 29222 - protein, 33 aa, Artificial Sequence
  Non-cyclic GFR-binding peptide
  MOD_RES (1), (1): Xaa is C or S
XVPTEEEPLPMVYYRIKPHQGQHEQLSNFLQHN

SEQ ID NO: 29223 - protein, 37 aa, Artificial Sequence
  Non-cyclic GFR-binding peptide
  MOD_RES (1), (2), (36): Xaa is C or S
  MOD_RES (16), (17), (18), (19), (20): Xaa is A or G
  MOD_RES (21), (22), (23), (24): Xaa is A or G or is absent
XXVPTELRSVKMAKVXXXXXXXXXKEVQVEMVVEGXG

SEQ ID NO: 29224 - protein, 33 aa, Artificial Sequence
  Non-cyclic GFR-binding peptide
TQVQLEPLTVLYYEIVRKKPIFEQLSNTLEDHL

SEQ ID NO: 29225 - protein, 35 aa, Artificial Sequence
  Non-cyclic GFR-binding peptide
  MOD_RES (2), (3): Xaa is C or S
  MOD_RES (17), (18), (19), (20), (21): Xaa is A or G
  MOD_RES (22), (23), (24), (25): Xaa is A or G or is absent
PXXVPQALRSVKIAKVXXXXXXXXXKEVQVMIVRS

SEQ ID NO: 29226 - protein, 40 aa, Artificial Sequence
  Non-cyclic GFR-binding peptide
  MOD_RES (4), (4): Xaa is C or S
  MOD_RES (20), (21), (22), (23), (24): Xaa is A or G
  MOD_RES (25), (26), (27), (28): Xaa is A or G or is absent
SVKXQPSRVHHEPLTVLYYXXXXXXXXXEQLSNRLEEHLE

SEQ ID NO: 29227 - protein, 39 aa, Artificial Sequence
  Non-cyclic GFR-binding peptide
  MOD_RES (2), (36), (38): Xaa is C or S
  MOD_RES (16), (17), (18), (19), (20): Xaa is A or G
  MOD_RES (21), (22), (23), (24): Xaa is A or G or is absent
TXAPTKLRSVKVAKVXXXXXXXXXKEVQVNMVVRSXGXH

SEQ ID NO: 29228 - protein, 39 aa, Artificial Sequence
  Non-cyclic GFR-binding peptide
  MOD_RES (4), (5), (37), (39): Xaa is C or S
PKPXXAPTQLRSVKVAKVDDSSNVIKEVQVNMVVRAXGX

SEQ ID NO: 29229 - protein, 39 aa, Artificial Sequence
  Non-cyclic GFR-binding peptide
  MOD_RES (36), (38): Xaa is C or S
PTQVQLEPLPVVYYEIVRKKPIFEQLSNTLEDHLAXKXE

SEQ ID NO: 29230 - protein, 34 aa, Artificial Sequence
  Non-cyclic GFR-binding peptide
  MOD_RES (1), (2), (33): Xaa is C or S
XXVPQDLRPVQIRKIVGRTPKVKKATVMVVKSXK

SEQ ID NO: 29231 - protein, 35 aa, Artificial Sequence
  Non-cyclic GFR-binding peptide
  MOD_RES (3), (4), (35): Xaa is C or S
SPXXVPQDLSNITIQIMVGRTPKVIGEMSMVVKSX

SEQ ID NO: 29232 - protein, 41 aa, Artificial Sequence
  Non-cyclic GFR-binding peptide
  MOD_RES (4), (5), (39), (41): Xaa is C or S
  MOD_RES (19), (20), (21), (22), (23): Xaa is A or G
  MOD_RES (24), (25), (26), (27): Xaa is A or G or is absent
PKAXXVPTELRPVQMRKIXXXXXXXXXKKATVDMVVEGXGX

SEQ ID NO: 29233 - protein, 41 aa, Artificial Sequence
  Non-cyclic GFR-binding peptide
  MOD_RES (3), (4), (38), (40): Xaa is C or S
  MOD_RES (18), (19), (20), (21), (22): Xaa is A or G
  MOD_RES (23), (24), (25), (26): Xaa is A or G or is absent
KAXXVPTELRPVQMRKIXXXXXXXXXKKATVDMVVEGXGXR

SEQ ID NO: 29234 - protein, 37 aa, Artificial Sequence
  Non-cyclic GFR-binding peptide
  MOD_RES (4), (5), (37): Xaa is C or S
PKPXXAPTKLRSVKVAKVDDSSNVIKEVQVNMVVRSX

SEQ ID NO: 29235 - protein, 34 aa, Artificial Sequence
  Non-cyclic GFR-binding peptide
  MOD_RES (1), (2), (34): Xaa is C or S
XXAPTKLRSVKVAKVDDSSNVIKEVQVNMVVRSX

SEQ ID NO: 29236 - protein, 32 aa, Artificial Sequence
  Non-cyclic GFR-binding peptide
  MOD_RES (1), (1): Xaa is C or S
XVPTELSNITMQIMDENEKVVIGEMSDMVVEG

SEQ ID NO: 29237 - protein, 38 aa, Artificial Sequence
  Non-cyclic GFR-binding peptide
  MOD_RES (3), (4), (38): Xaa is C or S
  MOD_RES (18), (19), (20), (21), (22): Xaa is A or G
  MOD_RES (23), (24), (25), (26): Xaa is A or G or is absent
KAXXVPTELRPVQMRKIXXXXXXXXXKKATVEMVVEGX

SEQ ID NO: 29238 - protein, 36 aa, Artificial Sequence
  Non-cyclic GFR-binding peptide
  MOD_RES (4), (5): Xaa is C or S
PKPXXAPTKLRSVKVAKVDDSSNVIKEVQVNMVVRS

SEQ ID NO: 29239 - protein, 39 aa, Artificial Sequence
  Non-cyclic GFR-binding peptide
  MOD_RES (4), (5), (39): Xaa is C or S
  MOD_RES (19), (20), (21), (22), (23): Xaa is A or G
  MOD_RES (24), (25), (26), (27): Xaa is A or G or is absent
PKAXXVPTELSNITMQIMXXXXXXXXXIGEMSDMVVEGX

SEQ ID NO: 29240 - protein, 44 aa, Artificial Sequence
  Non-cyclic GFR-binding peptide
  MOD_RES (4), (41), (43): Xaa is C or S
NVQXRPTQVQLEPLTVLYYEIVRKKPIFEQLSNTLEDHLAXKXE

SEQ ID NO: 29241 - protein, 33 aa, Artificial Sequence
  Non-cyclic GFR-binding peptide
  MOD_RES (2), (3): Xaa is C or S
PXXAPTQLRPVQVRKIDDSSNVIKKATVNMVVR

SEQ ID NO: 29242 - protein, 38 aa, Artificial Sequence
  Non-cyclic GFR-binding peptide
  MOD_RES (6), (6): Xaa is C or S
  MOD_RES (20), (21), (22), (23), (24): Xaa is A or G
  MOD_RES (25), (26), (27), (28): Xaa is A or G or is absent
VTKPTXAPTKLRPVQVRKIXXXXXXXXXKKATVNMVVR

SEQ ID NO: 29243 - protein, 34 aa, Artificial Sequence
  Non-cyclic GFR-binding peptide
  MOD_RES (1), (2), (34): Xaa is C or S
XXVPTELSNITMQIMDENEKVVIGEMSDMVVEGX

SEQ ID NO: 29244 - protein, 38 aa, Artificial Sequence
  Non-cyclic GFR-binding peptide
  MOD_RES (4), (5): Xaa is C or S
  MOD_RES (19), (20), (21), (22), (23): Xaa is A or G
  MOD_RES (24), (25), (26), (27): Xaa is A or G or is absent
PKPXXAPTQLRSVKVAKVXXXXXXXXXKEVQVNMVVRA

SEQ ID NO: 29245 - protein, 39 aa, Artificial Sequence
  Non-cyclic GFR-binding peptide
  MOD_RES (36), (38): Xaa is C or S
  MOD_RES (15), (16), (17), (18), (19): Xaa is A or G
  MOD_RES (20), (21), (22), (23): Xaa is A or G or is absent
PSRVHHEPLTVLYYXXXXXXXXXEQLSNRLEEHLEXAXA

SEQ ID NO: 29246 - protein, 35 aa, Artificial Sequence
  Non-cyclic GFR-binding peptide
  MOD_RES (1), (33), (35): Xaa is C or S
XVPTELRPVQMRKIDEYDKVVKKATVEMVVEGXGX

SEQ ID NO: 29247 - protein, 39 aa, Artificial Sequence
  Non-cyclic GFR-binding peptide
  MOD_RES (2), (3), (37), (39): Xaa is C or S
  MOD_RES (17), (18), (19), (20), (21): Xaa is A or G
  MOD_RES (22), (23), (24), (25): Xaa is A or G or is absent
PXXAPTKLRSVKVAKVXXXXXXXXXKEVQVNMVVRSXGX

SEQ ID NO: 29248 - protein, 42 aa, Artificial Sequence
  Non-cyclic GFR-binding peptide
  MOD_RES (5), (6), (40), (42): Xaa is C or S
  MOD_RES (20), (21), (22), (23), (24): Xaa is A or G
  MOD_RES (25), (26), (27), (28): Xaa is A or G or is absent
VPKPXXAPTQLSNITVQIMXXXXXXXXXIGEMSNMVVRAXGX

SEQ ID NO: 29249 - protein, 39 aa, Artificial Sequence
  Non-cyclic GFR-binding peptide
  MOD_RES (4), (4): Xaa is C or S
NVQXRPTQVQLEPLPVVYYEIVRKKPIFEQLSNTLEDHL

SEQ ID NO: 29250 - protein, 36 aa, Artificial Sequence
  Non-cyclic GFR-binding peptide
  MOD_RES (2), (3), (35): Xaa is C or S
AXXVPTELSNITMQIMDEYDKVVIGEMSEMVVEGXG

SEQ ID NO: 29251 - protein, 37 aa, Artificial Sequence
  Non-cyclic GFR-binding peptide
  MOD_RES (4), (5): Xaa is C or S
  MOD_RES (19), (20), (21), (22), (23): Xaa is A or G
  MOD_RES (24), (25), (26), (27): Xaa is A or G or is absent
ASPXXVSQDLRPVQIRKIXXXXXXXXXKKATVMIVKS

SEQ ID NO: 29252 - protein, 36 aa, Artificial Sequence
  Non-cyclic GFR-binding peptide
  MOD_RES (2), (3): Xaa is C or S
  MOD_RES (17), (18), (19), (20), (21): Xaa is A or G
  MOD_RES (22), (23), (24), (25): Xaa is A or G or is absent
PXXAPTQLSNITVQIMXXXXXXXXXIGEMSNMVVRA

SEQ ID NO: 29253 - protein, 35 aa, Artificial Sequence
  Non-cyclic GFR-binding peptide
  MOD_RES (1), (2), (33), (35): Xaa is C or S
XXVPQDLRPVQIRKIVGRTPKVKKATVMVVKSXKX

SEQ ID NO: 29254 - protein, 34 aa, Artificial Sequence
  Non-cyclic GFR-binding peptide
  MOD_RES (3), (4): Xaa is C or S
SPXXVSQDLRPVQIRKIIGKTPKIKKATVMIVKS

SEQ ID NO: 29255 - protein, 39 aa, Artificial Sequence
  Non-cyclic GFR-binding peptide
  MOD_RES (3), (4), (37), (39): Xaa is C or S
  MOD_RES (18), (19), (20), (21), (22): Xaa is A or G
  MOD_RES (23), (24), (25), (26): Xaa is A or G or is absent
SPXXVSQDLRPVQIRKIXXXXXXXXXKKATVMIVKSXKX

SEQ ID NO: 29256 - protein, 40 aa, Artificial Sequence
  Non-cyclic GFR-binding peptide
  MOD_RES (5), (6), (39): Xaa is C or S
  MOD_RES (20), (21), (22), (23), (24): Xaa is A or G
  MOD_RES (25), (26), (27), (28): Xaa is A or G or is absent
SASPXXVPQDLSNITIQIMXXXXXXXXXIGEMSMVVKSXK

SEQ ID NO: 29257 - protein, 38 aa, Artificial Sequence
  Non-cyclic GFR-binding peptide
  MOD_RES (4), (5), (38): Xaa is C or S
  MOD_RES (19), (20), (21), (22), (23): Xaa is A or G
  MOD_RES (24), (25), (26), (27): Xaa is A or G or is absent
ASPXXVSQDLRPVQIRKIXXXXXXXXXKKATVMIVKSX

SEQ ID NO: 29258 - protein, 36 aa, Artificial Sequence
  Non-cyclic GFR-binding peptide
  MOD_RES (1), (2), (34), (36): Xaa is C or S
XXAPTQLSNITVQIMDDSSNVIIGEMSNMVVRAXGX

SEQ ID NO: 29259 - protein, 42 aa, Artificial Sequence
  Non-cyclic GFR-binding peptide
  MOD_RES (4), (41): Xaa is C or S
SVKXQPSRVHHEPLTVLYYEYVRKKPKLEQLSNRLEEHLEXA

SEQ ID NO: 29260 - protein, 39 aa, Artificial Sequence
  Non-cyclic GFR-binding peptide
  MOD_RES (6), (6): Xaa is C or S
  MOD_RES (20), (21), (22), (23), (24): Xaa is A or G
  MOD_RES (25), (26), (27), (28): Xaa is A or G or is absent
DEGLEXVPTEEEPLPMVYYXXXXXXXXXEQLSNFLQHNK

SEQ ID NO: 29261 - protein, 35 aa, Artificial Sequence
  Non-cyclic GFR-binding peptide
  MOD_RES (1), (2): Xaa is C or S
  MOD_RES (16), (17), (18), (19), (20): Xaa is A or G
  MOD_RES (21), (22), (23), (24): Xaa is A or G or is absent
XXAPTQLRSVKVAKVXXXXXXXXXKEVQVNMVVRA

SEQ ID NO: 29262 - protein, 40 aa, Artificial Sequence
  Non-cyclic GFR-binding peptide
  MOD_RES (4), (5), (37), (39): Xaa is C or S
PKPXXAPTQLRSVKVAKVDDSSNVIKEVQVNMVVRAXGXH

SEQ ID NO: 29263 - protein, 34 aa, Artificial Sequence
  Non-cyclic GFR-binding peptide
  MOD_RES (1), (33): Xaa is C or S
XAPTQLRSVKVAKVDDSSNVIKEVQVNMVVRAXG

SEQ ID NO: 29264 - protein, 37 aa, Artificial Sequence
  Non-cyclic GFR-binding peptide
  MOD_RES (3), (35), (37): Xaa is C or S
PTXAPTKLRPVQVRKIDDSSNVIKKATVNMVVRSXGX

SEQ ID NO: 29265 - protein, 35 aa, Artificial Sequence
  Non-cyclic GFR-binding peptide
  MOD_RES (35), (35): Xaa is C or S
  MOD_RES (14), (15), (16), (17), (18): Xaa is A or G
  MOD_RES (19), (20), (21), (22): Xaa is A or G or is absent
SRVHHEPLTVLYYXXXXXXXXXEQLSNRLEEHLEX

SEQ ID NO: 29266 - protein, 41 aa, Artificial Sequence
  Non-cyclic GFR-binding peptide
  MOD_RES (6), (7), (39), (41): Xaa is C or S
TVPKPXXAPTQLRPVQVRKIDDSSNVIKKATVNMVVRAXGX

SEQ ID NO: 29267 - protein, 36 aa, Artificial Sequence
  Non-cyclic GFR-binding peptide
  MOD_RES (5), (6): Xaa is C or S
IPKAXXVPTELSNITMQIMDENEKVVIGEMSDMVVE

SEQ ID NO: 29268 - protein, 40 aa, Artificial Sequence
  Non-cyclic GFR-binding peptide
  MOD_RES (2), (3), (37), (39): Xaa is C or S
  MOD_RES (17), (18), (19), (20), (21): Xaa is A or G
  MOD_RES (22), (23), (24), (25): Xaa is A or G or is absent
AXXVPTELRPVQMRKIXXXXXXXXXKKATVDMVVEGXGXR

SEQ ID NO: 29269 - protein, 41 aa, Artificial Sequence
  Non-cyclic GFR-binding peptide
  MOD_RES (3), (40): Xaa is C or S
  MOD_RES (19), (20), (21), (22), (23): Xaa is A or G
  MOD_RES (24), (25), (26), (27): Xaa is A or G or is absent
VKXQPSRVHHEPLPVVYYXXXXXXXXXEQLSNRLEEHLEXA

SEQ ID NO: 29270 - protein, 37 aa, Artificial Sequence
  Non-cyclic GFR-binding peptide
  MOD_RES (2), (3), (36): Xaa is C or S
  MOD_RES (17), (18), (19), (20), (21): Xaa is A or G
  MOD_RES (22), (23), (24), (25): Xaa is A or G or is absent
PXXVSQDLRPVQIRKIXXXXXXXXXKKATVMIVKSXK

SEQ ID NO: 29271 - protein, 34 aa, Artificial Sequence
  Non-cyclic GFR-binding peptide
  MOD_RES (1), (32), (34): Xaa is C or S
XVPQALSNITIQIMVGRKPKVIGEMSMIVRSXKX

SEQ ID NO: 29272 - protein, 39 aa, Artificial Sequence
  Non-cyclic GFR-binding peptide
  MOD_RES (5), (6), (38): Xaa is C or S
VPKPXXAPTQLSNITVQIMDDSSNVIIGEMSNMVVRAXG

SEQ ID NO: 29273 - protein, 42 aa, Artificial Sequence
  Non-cyclic GFR-binding peptide
  MOD_RES (6), (7), (40), (42): Xaa is C or S
  MOD_RES (21), (22), (23), (24), (25): Xaa is A or G
  MOD_RES (26), (27), (28), (29): Xaa is A or G or is absent
ASASPXXVSQDLRPVQIRKIXXXXXXXXXKKATVMIVKSXKX

SEQ ID NO: 29274 - protein, 36 aa, Artificial Sequence
  Non-cyclic GFR-binding peptide
  MOD_RES (2), (3), (36): Xaa is C or S
  MOD_RES (17), (18), (19), (20), (21): Xaa is A or G
  MOD_RES (22), (23), (24), (25): Xaa is A or G or is absent
PXXVPQALSNITIQIMXXXXXXXXXIGEMSMIVRSX

SEQ ID NO: 29275 - protein, 44 aa, Artificial Sequence
  Non-cyclic GFR-binding peptide
  MOD_RES (4), (41), (43): Xaa is C or S
SVKXQPSRVHHEPLTVLYYEYVRKKPKLEQLSNRLEEHLEXAXA

SEQ ID NO: 29276 - protein, 40 aa, Artificial Sequence
  Non-cyclic GFR-binding peptide
  MOD_RES (3), (4), (38), (40): Xaa is C or S
  MOD_RES (18), (19), (20), (21), (22): Xaa is A or G
  MOD_RES (23), (24), (25), (26): Xaa is A or G or is absent
KAXXVPTELSNITMQIMXXXXXXXXXIGEMSDMVVEGXGX

SEQ ID NO: 29277 - protein, 33 aa, Artificial Sequence
  Non-cyclic GFR-binding peptide
  MOD_RES (1), (1): Xaa is C or S
  MOD_RES (15), (16), (17), (18), (19): Xaa is A or G
  MOD_RES (20), (21), (22), (23): Xaa is A or G or is absent
XVPTELSNITMQIMXXXXXXXXXIGEMSDMVVE

SEQ ID NO: 29278 - protein, 40 aa, Artificial Sequence
  Non-cyclic GFR-binding peptide
  MOD_RES (5), (6), (38), (40): Xaa is C or S
IPKAXXVPTELRSVKMAKVDEYDKVVKEVQVEMVVEGXGX

SEQ ID NO: 29279 - protein, 34 aa, Artificial Sequence
  Non-cyclic GFR-binding peptide
  MOD_RES (14), (15), (16), (17), (18): Xaa is A or G
  MOD_RES (19), (20), (21), (22): Xaa is A or G or is absent
SRVHHEPLTVLYYXXXXXXXXXEQLSNRLEEHLE

SEQ ID NO: 29280 - protein, 42 aa, Artificial Sequence
  Non-cyclic GFR-binding peptide
  MOD_RES (6), (7), (41): Xaa is C or S
  MOD_RES (21), (22), (23), (24), (25): Xaa is A or G
  MOD_RES (26), (27), (28), (29): Xaa is A or G or is absent
KIPKAXXVPTELRPVQMRKIXXXXXXXXXKKATVDMVVEGXG

SEQ ID NO: 29281 - protein, 35 aa, Artificial Sequence
  Non-cyclic GFR-binding peptide
  MOD_RES (1), (35): Xaa is C or S
  MOD_RES (15), (16), (17), (18), (19): Xaa is A or G
  MOD_RES (20), (21), (22), (23): Xaa is A or G or is absent
XAPTKLRSVKVAKVXXXXXXXXXKEVQVNMVVRSX

SEQ ID NO: 29282 - protein, 35 aa, Artificial Sequence
  Non-cyclic GFR-binding peptide
  MOD_RES (2), (3), (34): Xaa is C or S
PXXVPQALRPVQIRKIVGRKPKVKKATVMIVRSXK

SEQ ID NO: 29283 - protein, 35 aa, Artificial Sequence
  Non-cyclic GFR-binding peptide
  MOD_RES (15), (16), (17), (18), (19): Xaa is A or G
  MOD_RES (20), (21), (22), (23): Xaa is A or G or is absent
PSRVHHEPLPVVYYXXXXXXXXXEQLSNRLEEHLE

SEQ ID NO: 29284 - protein, 39 aa, Artificial Sequence
  Non-cyclic GFR-binding peptide
  MOD_RES (37), (39): Xaa is C or S
QPSRVHHEPLTVLYYEYVRKKPKLEQLSNRLEEHLEXAX

SEQ ID NO: 29285 - protein, 42 aa, Artificial Sequence
  Non-cyclic GFR-binding peptide
  MOD_RES (6), (7), (40), (42): Xaa is C or S
  MOD_RES (21), (22), (23), (24), (25): Xaa is A or G
  MOD_RES (26), (27), (28), (29): Xaa is A or G or is absent
ASAAPXXVPQALRPVQIRKIXXXXXXXXXKKATVMIVRSXKX

SEQ ID NO: 29286 - protein, 36 aa, Artificial Sequence
  Non-cyclic GFR-binding peptide
  MOD_RES (4), (36): Xaa is C or S
KPTXAPTKLRPVQVRKIDDSSNVIKKATVNMVVRSX

SEQ ID NO: 29287 - protein, 41 aa, Artificial Sequence
  Non-cyclic GFR-binding peptide
  MOD_RES (5), (6), (38), (40): Xaa is C or S
IPKAXXVPTELSNITMQIMDENEKVVIGEMSDMVVEGXGXR

SEQ ID NO: 29288 - protein, 39 aa, Artificial Sequence
  Non-cyclic GFR-binding peptide
  MOD_RES (36), (38): Xaa is C or S
  MOD_RES (15), (16), (17), (18), (19): Xaa is A or G
  MOD_RES (20), (21), (22), (23): Xaa is A or G or is absent
PTQVQLEPLPVVYYXXXXXXXXXEQLSNTLEDHLAXKXE

SEQ ID NO: 29289 - protein, 35 aa, Artificial Sequence
  Non-cyclic GFR-binding peptide
  MOD_RES (1), (33), (35): Xaa is C or S
XVPTELRPVQMRKIDENEKVVKKATVDMVVEGXGX

SEQ ID NO: 29290 - protein, 42 aa, Artificial Sequence
  Non-cyclic GFR-binding peptide
  MOD_RES (5), (39), (41): Xaa is C or S
  MOD_RES (19), (20), (21), (22), (23): Xaa is A or G
  MOD_RES (24), (25), (26), (27): Xaa is A or G or is absent
TKPTXAPTKLSNITVQIMXXXXXXXXXIGEMSNMVVRSXGXH

SEQ ID NO: 29291 - protein, 35 aa, Artificial Sequence
  Non-cyclic GFR-binding peptide
  MOD_RES (3), (3): Xaa is C or S
  MOD_RES (17), (18), (19), (20), (21): Xaa is A or G
  MOD_RES (22), (23), (24), (25): Xaa is A or G or is absent
PTXAPTKLRSVKVAKVXXXXXXXXXKEVQVNMVVR

SEQ ID NO: 29292 - protein, 39 aa, Artificial Sequence
  Non-cyclic GFR-binding peptide
  MOD_RES (5), (39): Xaa is C or S
  MOD_RES (19), (20), (21), (22), (23): Xaa is A or G
  MOD_RES (24), (25), (26), (27): Xaa is A or G or is absent
EGLEXVPTEEEPLTMLYYXXXXXXXXXEQLSNFLQHNKX

SEQ ID NO: 29293 - protein, 37 aa, Artificial Sequence
  Non-cyclic GFR-binding peptide
  MOD_RES (1), (35), (37): Xaa is C or S
  MOD_RES (15), (16), (17), (18), (19): Xaa is A or G
  MOD_RES (20), (21), (22), (23): Xaa is A or G or is absent
XVPTELRSVKMAKVXXXXXXXXXKEVQVEMVVEGXGX

SEQ ID NO: 29294 - protein, 35 aa, Artificial Sequence
  Non-cyclic GFR-binding peptide
  MOD_RES (4), (5): Xaa is C or S
AAPXXVPQALRSVKIAKVVGRKPKVKEVQVMIVRS

SEQ ID NO: 29295 - protein, 42 aa, Artificial Sequence
  Non-cyclic GFR-binding peptide
  MOD_RES (6), (7), (41): Xaa is C or S
  MOD_RES (21), (22), (23), (24), (25): Xaa is A or G
  MOD_RES (26), (27), (28), (29): Xaa is A or G or is absent
SIPKAXXVPTELSNITMQIMXXXXXXXXXIGEMSEMVVEGXG

SEQ ID NO: 29296 - protein, 35 aa, Artificial Sequence
  Non-cyclic GFR-binding peptide
  MOD_RES (1), (2), (34): Xaa is C or S
XXAPTKLSNITVQIMDDSSNVIIGEMSNMVVRSXG

SEQ ID NO: 29297 - protein, 39 aa, Artificial Sequence
  Non-cyclic GFR-binding peptide
  MOD_RES (4), (5), (36), (38): Xaa is C or S
AAPXXVPQALRSVKIAKVVGRKPKVKEVQVMIVRSXKXS

SEQ ID NO: 29298 - protein, 40 aa, Artificial Sequence
  Non-cyclic GFR-binding peptide
  MOD_RES (4), (5), (38), (40): Xaa is C or S
  MOD_RES (19), (20), (21), (22), (23): Xaa is A or G
  MOD_RES (24), (25), (26), (27): Xaa is A or G or is absent
AAPXXVPQALRSVKIAKVXXXXXXXXXKEVQVMIVRSXKX

SEQ ID NO: 29299 - protein, 37 aa, Artificial Sequence
  Non-cyclic GFR-binding peptide
  MOD_RES (4), (5): Xaa is C or S
  MOD_RES (19), (20), (21), (22), (23): Xaa is A or G
  MOD_RES (24), (25), (26), (27): Xaa is A or G or is absent
PKPXXAPTQLRPVQVRKIXXXXXXXXXKKATVNMVVR

SEQ ID NO: 29300 - protein, 35 aa, Artificial Sequence
  Non-cyclic GFR-binding peptide
  MOD_RES (3), (35): Xaa is C or S
PTXAPTKLRSVKVAKVDDSSNVIKEVQVNMVVRSX

SEQ ID NO: 29301 - protein, 32 aa, Artificial Sequence
  Non-cyclic GFR-binding peptide
  MOD_RES (14), (15), (16), (17), (18): Xaa is A or G
  MOD_RES (19), (20), (21), (22): Xaa is A or G or is absent
VPTELRSVKMAKVXXXXXXXXXKEVQVEMVVE

SEQ ID NO: 29302 - protein, 35 aa, Artificial Sequence
  Non-cyclic GFR-binding peptide
  MOD_RES (1), (34): Xaa is C or S
  MOD_RES (15), (16), (17), (18), (19): Xaa is A or G
  MOD_RES (20), (21), (22), (23): Xaa is A or G or is absent
XVPQDLRPVQIRKIXXXXXXXXXKKATVMVVKSXK

SEQ ID NO: 29303 - protein, 36 aa, Artificial Sequence
  Non-cyclic GFR-binding peptide
  MOD_RES (3), (35): Xaa is C or S
PTXAPTKLRPVQVRKIDDSSNVIKKATVNMVVRSXG

SEQ ID NO: 29304 - protein, 34 aa, Artificial Sequence
  Non-cyclic GFR-binding peptide
  MOD_RES (34), (34): Xaa is C or S
  MOD_RES (14), (15), (16), (17), (18): Xaa is A or G
  MOD_RES (19), (20), (21), (22): Xaa is A or G or is absent
VPTELRPVQMRKIXXXXXXXXXKKATVDMVVEGX

SEQ ID NO: 29305 - protein, 36 aa, Artificial Sequence
  Non-cyclic GFR-binding peptide
  MOD_RES (1), (35): Xaa is C or S
  MOD_RES (15), (16), (17), (18), (19): Xaa is A or G
  MOD_RES (20), (21), (22), (23): Xaa is A or G or is absent
XAPTQLSNITVQIMXXXXXXXXXIGEMSNMVVRAXG

SEQ ID NO: 29306 - protein, 34 aa, Artificial Sequence
  Non-cyclic GFR-binding peptide
  MOD_RES (1), (34): Xaa is C or S
  MOD_RES (15), (16), (17), (18), (19): Xaa is A or G
  MOD_RES (20), (21), (22), (23): Xaa is A or G or is absent
XVSQDLRPVQIRKIXXXXXXXXXKKATVMIVKSX

SEQ ID NO: 29307 - protein, 37 aa, Artificial Sequence
  Non-cyclic GFR-binding peptide
  MOD_RES (1), (2), (36): Xaa is C or S
  MOD_RES (16), (17), (18), (19), (20): Xaa is A or G
  MOD_RES (21), (22), (23), (24): Xaa is A or G or is absent
XXVPTELRPVQMRKIXXXXXXXXXKKATVEMVVEGXG

SEQ ID NO: 29308 - protein, 33 aa, Artificial Sequence
  Non-cyclic GFR-binding peptide
  MOD_RES (1), (33): Xaa is C or S
XAPTQLRPVQVRKIDDSSNVIKKATVNMVVRAX

SEQ ID NO: 29309 - protein, 35 aa, Artificial Sequence
  Non-cyclic GFR-binding peptide
  MOD_RES (2), (3), (35): Xaa is C or S
AXXVPTELSNITMQIMDENEKVVIGEMSDMVVEGX

SEQ ID NO: 29310 - protein, 42 aa, Artificial Sequence
  Non-cyclic GFR-binding peptide
  MOD_RES (3), (40), (42): Xaa is C or S
  MOD_RES (19), (20), (21), (22), (23): Xaa is A or G
  MOD_RES (24), (25), (26), (27): Xaa is A or G or is absent
VKXQPSRVHHEPLPVVYYXXXXXXXXXEQLSNRLEEHLEXAX

SEQ ID NO: 29311 - protein, 37 aa, Artificial Sequence
  Non-cyclic GFR-binding peptide
  MOD_RES (5), (6): Xaa is C or S
VPKPXXAPTQLRSVKVAKVDDSSNVIKEVQVNMVVRA

SEQ ID NO: 29312 - protein, 36 aa, Artificial Sequence
  Non-cyclic GFR-binding peptide
  MOD_RES (1), (1): Xaa is C or S
  MOD_RES (17), (18), (19), (20), (21): Xaa is A or G
  MOD_RES (22), (23), (24), (25): Xaa is A or G or is absent
XQPSRVHHEPLPVVYYXXXXXXXXXEQLSNRLEEHL

SEQ ID NO: 29313 - protein, 36 aa, Artificial Sequence
  Non-cyclic GFR-binding peptide
  MOD_RES (2), (3), (35): Xaa is C or S
PXXAPTQLRSVKVAKVDDSSNVIKEVQVNMVVRAXG

SEQ ID NO: 29314 - protein, 38 aa, Artificial Sequence
  Non-cyclic GFR-binding peptide
  MOD_RES (1), (35), (37): Xaa is C or S
  MOD_RES (15), (16), (17), (18), (19): Xaa is A or G
  MOD_RES (20), (21), (22), (23): Xaa is A or G or is absent
XAPTKLRSVKVAKVXXXXXXXXXKEVQVNMVVRSXGXH

SEQ ID NO: 29315 - protein, 42 aa, Artificial Sequence
  Non-cyclic GFR-binding peptide
  MOD_RES (5), (6), (39), (41): Xaa is C or S
  MOD_RES (20), (21), (22), (23), (24): Xaa is A or G
  MOD_RES (25), (26), (27), (28): Xaa is A or G or is absent
SAAPXXVPQALRPVQIRKIXXXXXXXXXKKATVMIVRSXKXS

SEQ ID NO: 29316 - protein, 36 aa, Artificial Sequence
  Non-cyclic GFR-binding peptide
RPTQVQLEPLPVVYYEIVRKKPIFEQLSNTLEDHLA

SEQ ID NO: 29317 - protein, 33 aa, Artificial Sequence
  Non-cyclic GFR-binding peptide
  MOD_RES (1), (33): Xaa is C or S
XVPTELRSVKMAKVDENEKVVKEVQVDMVVEGX

SEQ ID NO: 29318 - protein, 40 aa, Artificial Sequence
  Non-cyclic GFR-binding peptide
  MOD_RES (4), (5), (38), (40): Xaa is C or S
  MOD_RES (19), (20), (21), (22), (23): Xaa is A or G
  MOD_RES (24), (25), (26), (27): Xaa is A or G or is absent
ASPXXVSQDLRSVKIAKVXXXXXXXXXKEVQVMIVKSXKX

SEQ ID NO: 29319 - protein, 37 aa, Artificial Sequence
  Non-cyclic GFR-binding peptide
  MOD_RES (3), (4), (36): Xaa is C or S
KPXXAPTKLRPVQVRKIDDSSNVIKKATVNMVVRSXG

SEQ ID NO: 29320 - protein, 43 aa, Artificial Sequence
  Non-cyclic GFR-binding peptide
  MOD_RES (6), (7), (40), (42): Xaa is C or S
  MOD_RES (21), (22), (23), (24), (25): Xaa is A or G
  MOD_RES (26), (27), (28), (29): Xaa is A or G or is absent
ASASPXXVSQDLRPVQIRKIXXXXXXXXXKKATVMIVKSXKXS

SEQ ID NO: 29321 - protein, 39 aa, Artificial Sequence
  Non-cyclic GFR-binding peptide
  MOD_RES (2), (39): Xaa is C or S
KXQPSRVHHEPLPVVYYEYVRKKPKLEQLSNRLEEHLEX

SEQ ID NO: 29322 - protein, 38 aa, Artificial Sequence
  Non-cyclic GFR-binding peptide
  MOD_RES (2), (36), (38): Xaa is C or S
  MOD_RES (16), (17), (18), (19), (20): Xaa is A or G
  MOD_RES (21), (22), (23), (24): Xaa is A or G or is absent
EXVPTEEEPLPMVYYXXXXXXXXXEQLSNFLQHNKXEX

SEQ ID NO: 29323 - protein, 41 aa, Artificial Sequence
  Non-cyclic GFR-binding peptide
  MOD_RES (5), (6), (38), (40): Xaa is C or S
VPKPXXAPTKLRSVKVAKVDDSSNVIKEVQVNMVVRSXGXH

SEQ ID NO: 29324 - protein, 35 aa, Artificial Sequence
  Non-cyclic GFR-binding peptide
  MOD_RES (1), (33), (35): Xaa is C or S
XAPTQLRSVKVAKVDDSSNVIKEVQVNMVVRAXGX

SEQ ID NO: 29325 - protein, 32 aa, Artificial Sequence
  Non-cyclic GFR-binding peptide
  MOD_RES (14), (15), (16), (17), (18): Xaa is A or G
  MOD_RES (19), (20), (21), (22): Xaa is A or G or is absent
VPQALRSVKIAKVXXXXXXXXXKEVQVMIVRS

SEQ ID NO: 29326 - protein, 42 aa, Artificial Sequence
  Non-cyclic GFR-binding peptide
  MOD_RES (5), (6), (40), (42): Xaa is C or S
  MOD_RES (20), (21), (22), (23), (24): Xaa is A or G
  MOD_RES (25), (26), (27), (28): Xaa is A or G or is absent
IPKAXXVPTELRPVQMRKIXXXXXXXXXKKATVDMVVEGXGX

SEQ ID NO: 29327 - protein, 40 aa, Artificial Sequence
  Non-cyclic GFR-binding peptide
  MOD_RES (3), (37), (39): Xaa is C or S
  MOD_RES (17), (18), (19), (20), (21): Xaa is A or G
  MOD_RES (22), (23), (24), (25): Xaa is A or G or is absent
LEXVPTEEEPLPMVYYXXXXXXXXXEQLSNFLQHNKXEXR

SEQ ID NO: 29328 - protein, 39 aa, Artificial Sequence
  Non-cyclic GFR-binding peptide
  MOD_RES (3), (4), (37), (39): Xaa is C or S
  MOD_RES (18), (19), (20), (21), (22): Xaa is A or G
  MOD_RES (23), (24), (25), (26): Xaa is A or G or is absent
SPXXVPQDLRPVQIRKIXXXXXXXXXKKATVMVVKSXKX

SEQ ID NO: 29329 - protein, 38 aa, Artificial Sequence
  Non-cyclic GFR-binding peptide
  MOD_RES (3), (4), (35), (37): Xaa is C or S
SPXXVSQDLSNITIQIMIGKTPKIIGEMSMIVKSXKXS

SEQ ID NO: 29330 - protein, 41 aa, Artificial Sequence
  Non-cyclic GFR-binding peptide
  MOD_RES (5), (5): Xaa is C or S
  MOD_RES (21), (22), (23), (24), (25): Xaa is A or G
  MOD_RES (26), (27), (28), (29): Xaa is A or G or is absent
RNVQXRPTQVQLEPLTVLYYXXXXXXXXXEQLSNTLEDHLA

SEQ ID NO: 29331 - protein, 39 aa, Artificial Sequence
  Non-cyclic GFR-binding peptide
  MOD_RES (2), (3), (37), (39): Xaa is C or S
  MOD_RES (17), (18), (19), (20), (21): Xaa is A or G
  MOD_RES (22), (23), (24), (25): Xaa is A or G or is absent
PXXAPTKLRPVQVRKIXXXXXXXXXKKATVNMVVRSXGX

SEQ ID NO: 29332 - protein, 34 aa, Artificial Sequence
  Non-cyclic GFR-binding peptide
  MOD_RES (34), (34): Xaa is C or S
VPTEEEPLTMLYYRIKPHQGQHEQLSNFLQHNKX

SEQ ID NO: 29333 - protein, 41 aa, Artificial Sequence
  Non-cyclic GFR-binding peptide
  MOD_RES (4), (5), (39), (41): Xaa is C or S
  MOD_RES (19), (20), (21), (22), (23): Xaa is A or G
  MOD_RES (24), (25), (26), (27): Xaa is A or G or is absent
PKAXXVPTELRSVKMAKVXXXXXXXXXKEVQVDMVVEGXGX

SEQ ID NO: 29334 - protein, 32 aa, Artificial Sequence
  Non-cyclic GFR-binding peptide
  MOD_RES (32), (32): Xaa is C or S
APTQLSNITVQIMDDSSNVIIGEMSNMVVRAX

SEQ ID NO: 29335 - protein, 39 aa, Artificial Sequence
  Non-cyclic GFR-binding peptide
  MOD_RES (6), (7), (39): Xaa is C or S
YVPKPXXAPTKLSNITVQIMDDSSNVIIGEMSNMVVRSX

SEQ ID NO: 29336 - protein, 38 aa, Artificial Sequence
  Non-cyclic GFR-binding peptide
  MOD_RES (2), (3), (35), (37): Xaa is C or S
PXXAPTKLSNITVQIMDDSSNVIIGEMSNMVVRSXGXH

SEQ ID NO: 29337 - protein, 39 aa, Artificial Sequence
  Non-cyclic GFR-binding peptide
  MOD_RES (3), (4), (38): Xaa is C or S
  MOD_RES (18), (19), (20), (21), (22): Xaa is A or G
  MOD_RES (23), (24), (25), (26): Xaa is A or G or is absent
KAXXVPTELRPVQMRKIXXXXXXXXXKKATVDMVVEGXG

SEQ ID NO: 29338 - protein, 34 aa, Artificial Sequence
  Non-cyclic GFR-binding peptide
TQVQLEPLTVLYYEIVRKKPIFEQLSNTLEDHLA

SEQ ID NO: 29339 - protein, 40 aa, Artificial Sequence
  Non-cyclic GFR-binding peptide
  MOD_RES (7), (7): Xaa is C or S
  MOD_RES (21), (22), (23), (24), (25): Xaa is A or G
  MOD_RES (26), (27), (28), (29): Xaa is A or G or is absent
NDEGLEXVPTEEEPLPMVYYXXXXXXXXXEQLSNFLQHNK

SEQ ID NO: 29340 - protein, 36 aa, Artificial Sequence
  Non-cyclic GFR-binding peptide
  MOD_RES (33), (35): Xaa is C or S
  MOD_RES (14), (15), (16), (17), (18): Xaa is A or G
  MOD_RES (19), (20), (21), (22): Xaa is A or G or is absent
VPQDLRPVQIRKIXXXXXXXXXKKATVMVVKSXKXS

SEQ ID NO: 29341 - protein, 41 aa, Artificial Sequence
  Non-cyclic GFR-binding peptide
  MOD_RES (6), (40): Xaa is C or S
  MOD_RES (20), (21), (22), (23), (24): Xaa is A or G
  MOD_RES (25), (26), (27), (28): Xaa is A or G or is absent
DEGLEXVPTEEEPLPMVYYXXXXXXXXXEQLSNFLQHNKXE

SEQ ID NO: 29342 - protein, 33 aa, Artificial Sequence
  Non-cyclic GFR-binding peptide
  MOD_RES (1), (2): Xaa is C or S
XXAPTKLSNITVQIMDDSSNVIIGEMSNMVVRS

SEQ ID NO: 29343 - protein, 39 aa, Artificial Sequence
  Non-cyclic GFR-binding peptide
  MOD_RES (4), (5), (38): Xaa is C or S
  MOD_RES (19), (20), (21), (22), (23): Xaa is A or G
  MOD_RES (24), (25), (26), (27): Xaa is A or G or is absent
ASPXXVSQDLRSVKIAKVXXXXXXXXXKEVQVMIVKSXK

SEQ ID NO: 29344 - protein, 40 aa, Artificial Sequence
  Non-cyclic GFR-binding peptide
  MOD_RES (6), (7), (40): Xaa is C or S
  MOD_RES (21), (22), (23), (24), (25): Xaa is A or G
  MOD_RES (26), (27), (28), (29): Xaa is A or G or is absent
ASAAPXXVPQALRSVKIAKVXXXXXXXXXKEVQVMIVRSX

SEQ ID NO: 29345 - protein, 35 aa, Artificial Sequence
  Non-cyclic GFR-binding peptide
RPTQVQLEPLPVVYYEIVRKKPIFEQLSNTLEDHL

SEQ ID NO: 29346 - protein, 33 aa, Artificial Sequence
  Non-cyclic GFR-binding peptide
  MOD_RES (1), (1): Xaa is C or S
XVPTEEEPLTMLYYRIKPHQGQHEQLSNFLQHN

SEQ ID NO: 29347 - protein, 36 aa, Artificial Sequence
  Non-cyclic GFR-binding peptide
  MOD_RES (4), (5), (36): Xaa is C or S
ASPXXVPQDLRSVKIAKVVGRTPKVKEVQVMVVKSX

SEQ ID NO: 29348 - protein, 34 aa, Artificial Sequence
  Non-cyclic GFR-binding peptide
  MOD_RES (3), (4): Xaa is C or S
KPXXAPTQLSNITVQIMDDSSNVIIGEMSNMVVR

SEQ ID NO: 29349 - protein, 40 aa, Artificial Sequence
  Non-cyclic GFR-binding peptide
  MOD_RES (5), (5): Xaa is C or S
SSVKXQPSRVHHEPLTVLYYEYVRKKPKLEQLSNRLEEHL

SEQ ID NO: 29350 - protein, 37 aa, Artificial Sequence
  Non-cyclic GFR-binding peptide
  MOD_RES (5), (37): Xaa is C or S
TKPTXAPTKLRPVQVRKIDDSSNVIKKATVNMVVRSX

SEQ ID NO: 29351 - protein, 35 aa, Artificial Sequence
  Non-cyclic GFR-binding peptide
  MOD_RES (1), (35): Xaa is C or S
XVPTEEEPLTMLYYRIKPHQGQHEQLSNFLQHNKX

SEQ ID NO: 29352 - protein, 35 aa, Artificial Sequence
  Non-cyclic GFR-binding peptide
  MOD_RES (2), (3): Xaa is C or S
  MOD_RES (17), (18), (19), (20), (21): Xaa is A or G
  MOD_RES (22), (23), (24), (25): Xaa is A or G or is absent
AXXVPTELSNITMQIMXXXXXXXXXIGEMSEMVVE

SEQ ID NO: 29353 - protein, 38 aa, Artificial Sequence
  Non-cyclic GFR-binding peptide
  MOD_RES (5), (6): Xaa is C or S
  MOD_RES (20), (21), (22), (23), (24): Xaa is A or G
  MOD_RES (25), (26), (27), (28): Xaa is A or G or is absent
IPKAXXVPTELSNITMQIMXXXXXXXXXIGEMSDMVVE

SEQ ID NO: 29354 - protein, 35 aa, Artificial Sequence
  Non-cyclic GFR-binding peptide
  MOD_RES (33), (35): Xaa is C or S
  MOD_RES (14), (15), (16), (17), (18): Xaa is A or G
  MOD_RES (19), (20), (21), (22): Xaa is A or G or is absent
VPQDLRPVQIRKIXXXXXXXXXKKATVMVVKSXKX

SEQ ID NO: 29355 - protein, 43 aa, Artificial Sequence
  Non-cyclic GFR-binding peptide
  MOD_RES (3), (40), (42): Xaa is C or S
VQXRPTQVQLEPLPVVYYEIVRKKPIFEQLSNTLEDHLAXKXE

SEQ ID NO: 29356 - protein, 38 aa, Artificial Sequence
  Non-cyclic GFR-binding peptide
  MOD_RES (6), (7): Xaa is C or S
YVPKPXXAPTKLRSVKVAKVDDSSNVIKEVQVNMVVRS

SEQ ID NO: 29357 - protein, 33 aa, Artificial Sequence
  Non-cyclic GFR-binding peptide
  MOD_RES (1), (1): Xaa is C or S
  MOD_RES (15), (16), (17), (18), (19): Xaa is A or G
  MOD_RES (20), (21), (22), (23): Xaa is A or G or is absent
XVPQDLSNITIQIMXXXXXXXXXIGEMSMVVKS

SEQ ID NO: 29358 - protein, 38 aa, Artificial Sequence
  Non-cyclic GFR-binding peptide
  MOD_RES (6), (6): Xaa is C or S
  MOD_RES (20), (21), (22), (23), (24): Xaa is A or G
  MOD_RES (25), (26), (27), (28): Xaa is A or G or is absent
VTKPTXAPTKLRSVKVAKVXXXXXXXXXKEVQVNMVVR

SEQ ID NO: 29359 - protein, 42 aa, Artificial Sequence
  Non-cyclic GFR-binding peptide
  MOD_RES (6), (40), (42): Xaa is C or S
  MOD_RES (20), (21), (22), (23), (24): Xaa is A or G
  MOD_RES (25), (26), (27), (28): Xaa is A or G or is absent
VTKPTXAPTKLRPVQVRKIXXXXXXXXXKKATVNMVVRSXGX

SEQ ID NO: 29360 - protein, 35 aa, Artificial Sequence
  Non-cyclic GFR-binding peptide
  MOD_RES (33), (35): Xaa is C or S
  MOD_RES (14), (15), (16), (17), (18): Xaa is A or G
  MOD_RES (19), (20), (21), (22): Xaa is A or G or is absent
VSQDLRSVKIAKVXXXXXXXXXKEVQVMIVKSXKX

SEQ ID NO: 29361 - protein, 37 aa, Artificial Sequence
  Non-cyclic GFR-binding peptide
  MOD_RES (3), (4), (36): Xaa is C or S
KAXXVPTELRSVKMAKVDEYDKVVKEVQVEMVVEGXG

SEQ ID NO: 29362 - protein, 37 aa, Artificial Sequence
  Non-cyclic GFR-binding peptide
  MOD_RES (2), (2): Xaa is C or S
QXRPTQVQLEPLPVVYYEIVRKKPIFEQLSNTLEDHL

SEQ ID NO: 29363 - protein, 32 aa, Artificial Sequence
  Non-cyclic GFR-binding peptide
VPTEEEPLPMVYYRIKPHQGQHEQLSNFLQHN

SEQ ID NO: 29364 - protein, 34 aa, Artificial Sequence
  Non-cyclic GFR-binding peptide
  MOD_RES (1), (2), (34): Xaa is C or S
XXAPTQLRPVQVRKIDDSSNVIKKATVNMVVRAX

SEQ ID NO: 29365 - protein, 41 aa, Artificial Sequence
  Non-cyclic GFR-binding peptide
  MOD_RES (4), (41): Xaa is C or S
  MOD_RES (20), (21), (22), (23), (24): Xaa is A or G
  MOD_RES (25), (26), (27), (28): Xaa is A or G or is absent
SVKXQPSRVHHEPLTVLYYXXXXXXXXXEQLSNRLEEHLEX

SEQ ID NO: 29366 - protein, 35 aa, Artificial Sequence
  Non-cyclic GFR-binding peptide
  MOD_RES (33), (35): Xaa is C or S
  MOD_RES (14), (15), (16), (17), (18): Xaa is A or G
  MOD_RES (19), (20), (21), (22): Xaa is A or G or is absent
VPQALRPVQIRKIXXXXXXXXXKKATVMIVRSXKX

SEQ ID NO: 29367 - protein, 39 aa, Artificial Sequence
  Non-cyclic GFR-binding peptide
  MOD_RES (2), (39): Xaa is C or S
  MOD_RES (18), (19), (20), (21), (22): Xaa is A or G
  MOD_RES (23), (24), (25), (26): Xaa is A or G or is absent
QXRPTQVQLEPLPVVYYXXXXXXXXXEQLSNTLEDHLAX

SEQ ID NO: 29368 - protein, 32 aa, Artificial Sequence
  Non-cyclic GFR-binding peptide
  MOD_RES (1), (2): Xaa is C or S
XXVSQDLRPVQIRKIIGKTPKIKKATVMIVKS

SEQ ID NO: 29369 - protein, 33 aa, Artificial Sequence
  Non-cyclic GFR-binding peptide
  MOD_RES (31), (33): Xaa is C or S
VPQALSNITIQIMVGRKPKVIGEMSMIVRSXKX

SEQ ID NO: 29370 - protein, 38 aa, Artificial Sequence
  Non-cyclic GFR-binding peptide
  MOD_RES (6), (7): Xaa is C or S
SIPKAXXVPTELRSVKMAKVDEYDKVVKEVQVEMVVEG

SEQ ID NO: 29371 - protein, 40 aa, Artificial Sequence
  Non-cyclic GFR-binding peptide
  MOD_RES (3), (4), (38), (40): Xaa is C or S
  MOD_RES (18), (19), (20), (21), (22): Xaa is A or G
  MOD_RES (23), (24), (25), (26): Xaa is A or G or is absent
KPXXAPTQLRPVQVRKIXXXXXXXXXKKATVNMVVRAXGX

SEQ ID NO: 29372 - protein, 38 aa, Artificial Sequence
  Non-cyclic GFR-binding peptide
  MOD_RES (7), (7): Xaa is C or S
HVTKPTXAPTKLRSVKVAKVDDSSNVIKEVQVNMVVRS

SEQ ID NO: 29373 - protein, 37 aa, Artificial Sequence
  Non-cyclic GFR-binding peptide
  MOD_RES (2), (3), (37): Xaa is C or S
  MOD_RES (17), (18), (19), (20), (21): Xaa is A or G
  MOD_RES (22), (23), (24), (25): Xaa is A or G or is absent
PXXAPTKLRPVQVRKIXXXXXXXXXKKATVNMVVRSX

SEQ ID NO: 29374 - protein, 38 aa, Artificial Sequence
  Non-cyclic GFR-binding peptide
  MOD_RES (2), (36), (38): Xaa is C or S
EXVPTEEEPLTMLYYRIKPHQGQHEQLSNFLQHNKXEX

SEQ ID NO: 29375 - protein, 40 aa, Artificial Sequence
  Non-cyclic GFR-binding peptide
  MOD_RES (4), (38), (40): Xaa is C or S
  MOD_RES (18), (19), (20), (21), (22): Xaa is A or G
  MOD_RES (23), (24), (25), (26): Xaa is A or G or is absent
GLEXVPTEEEPLTMLYYXXXXXXXXXEQLSNFLQHNKXEX

SEQ ID NO: 29376 - protein, 38 aa, Artificial Sequence
  Non-cyclic GFR-binding peptide
  MOD_RES (1), (2), (36), (38): Xaa is C or S
  MOD_RES (16), (17), (18), (19), (20): Xaa is A or G
  MOD_RES (21), (22), (23), (24): Xaa is A or G or is absent
XXVPTELSNITMQIMXXXXXXXXXIGEMSEMVVEGXGX

SEQ ID NO: 29377 - protein, 36 aa, Artificial Sequence
  Non-cyclic GFR-binding peptide
  MOD_RES (34), (36): Xaa is C or S
VPTEEEPLTMLYYRIKPHQGQHEQLSNFLQHNKXEX

SEQ ID NO: 29378 - protein, 38 aa, Artificial Sequence
  Non-cyclic GFR-binding peptide
  MOD_RES (35), (37): Xaa is C or S
SRVHHEPLTVLYYEYVRKKPKLEQLSNRLEEHLEXAXA

SEQ ID NO: 29379 - protein, 31 aa, Artificial Sequence
  Non-cyclic GFR-binding peptide
  MOD_RES (31), (31): Xaa is C or S
VPQDLRPVQIRKIVGRTPKVKKATVMVVKSX

SEQ ID NO: 29380 - protein, 41 aa, Artificial Sequence
  Non-cyclic GFR-binding peptide
  MOD_RES (5), (6), (38), (40): Xaa is C or S
IPKAXXVPTELRSVKMAKVDENEKVVKEVQVDMVVEGXGXR

SEQ ID NO: 29381 - protein, 39 aa, Artificial Sequence
  Non-cyclic GFR-binding peptide
  MOD_RES (6), (7): Xaa is C or S
  MOD_RES (21), (22), (23), (24), (25): Xaa is A or G
  MOD_RES (26), (27), (28), (29): Xaa is A or G or is absent
YVPKPXXAPTKLSNITVQIMXXXXXXXXXIGEMSNMVVR

SEQ ID NO: 29382 - protein, 43 aa, Artificial Sequence
  Non-cyclic GFR-binding peptide
  MOD_RES (6), (7), (41), (43): Xaa is C or S
  MOD_RES (21), (22), (23), (24), (25): Xaa is A or G
  MOD_RES (26), (27), (28), (29): Xaa is A or G or is absent
TVPKPXXAPTQLSNITVQIMXXXXXXXXXIGEMSNMVVRAXGX

SEQ ID NO: 29383 - protein, 32 aa, Artificial Sequence
  Non-cyclic GFR-binding peptide
  MOD_RES (1), (32): Xaa is C or S
XVSQDLRPVQIRKIIGKTPKIKKATVMIVKSX

SEQ ID NO: 29384 - protein, 34 aa, Artificial Sequence
  Non-cyclic GFR-binding peptide
  MOD_RES (2), (34): Xaa is C or S
TXAPTKLSNITVQIMDDSSNVIIGEMSNMVVRSX

SEQ ID NO: 29385 - protein, 35 aa, Artificial Sequence
  Non-cyclic GFR-binding peptide
  MOD_RES (32), (34): Xaa is C or S
APTQLSNITVQIMDDSSNVIIGEMSNMVVRAXGXH

SEQ ID NO: 29386 - protein, 44 aa, Artificial Sequence
  Non-cyclic GFR-binding peptide
  MOD_RES (7), (41), (43): Xaa is C or S
  MOD_RES (21), (22), (23), (24), (25): Xaa is A or G
  MOD_RES (26), (27), (28), (29): Xaa is A or G or is absent
HVTKPTXAPTKLRPVQVRKIXXXXXXXXXKKATVNMVVRSXGXH

SEQ ID NO: 29387 - protein, 40 aa, Artificial Sequence
  Non-cyclic GFR-binding peptide
  MOD_RES (6), (7), (39): Xaa is C or S
SIPKAXXVPTELRSVKMAKVDEYDKVVKEVQVEMVVEGXG

SEQ ID NO: 29388 - protein, 31 aa, Artificial Sequence
  Non-cyclic GFR-binding peptide
  MOD_RES (1), (1): Xaa is C or S
XVPTELSNITMQIMDENEKVVIGEMSDMVVE

SEQ ID NO: 29389 - protein, 38 aa, Artificial Sequence
  Non-cyclic GFR-binding peptide
  MOD_RES (1), (38): Xaa is C or S
XRPTQVQLEPLTVLYYEIVRKKPIFEQLSNTLEDHLAX

SEQ ID NO: 29390 - protein, 39 aa, Artificial Sequence
  Non-cyclic GFR-binding peptide
  MOD_RES (5), (6), (39): Xaa is C or S
  MOD_RES (20), (21), (22), (23), (24): Xaa is A or G
  MOD_RES (25), (26), (27), (28): Xaa is A or G or is absent
SASPXXVPQDLRSVKIAKVXXXXXXXXXKEVQVMVVKSX

SEQ ID NO: 29391 - protein, 38 aa, Artificial Sequence
  Non-cyclic GFR-binding peptide
  MOD_RES (4), (5): Xaa is C or S
  MOD_RES (19), (20), (21), (22), (23): Xaa is A or G
  MOD_RES (24), (25), (26), (27): Xaa is A or G or is absent
PKPXXAPTKLRSVKVAKVXXXXXXXXXKEVQVNMVVRS

SEQ ID NO: 29392 - protein, 34 aa, Artificial Sequence
  Non-cyclic GFR-binding peptide
  MOD_RES (2), (34): Xaa is C or S
TXAPTKLRPVQVRKIDDSSNVIKKATVNMVVRSX

SEQ ID NO: 29393 - protein, 37 aa, Artificial Sequence
  Non-cyclic GFR-binding peptide
  MOD_RES (6), (7): Xaa is C or S
TVPKPXXAPTQLRPVQVRKIDDSSNVIKKATVNMVVR

SEQ ID NO: 29394 - protein, 42 aa, Artificial Sequence
  Non-cyclic GFR-binding peptide
  MOD_RES (4), (5), (39), (41): Xaa is C or S
  MOD_RES (19), (20), (21), (22), (23): Xaa is A or G
  MOD_RES (24), (25), (26), (27): Xaa is A or G or is absent
PKPXXAPTKLRPVQVRKIXXXXXXXXXKKATVNMVVRSXGXH

SEQ ID NO: 29395 - protein, 42 aa, Artificial Sequence
  Non-cyclic GFR-binding peptide
  MOD_RES (5), (39), (41): Xaa is C or S
  MOD_RES (19), (20), (21), (22), (23): Xaa is A or G
  MOD_RES (24), (25), (26), (27): Xaa is A or G or is absent
TKPTXAPTKLRSVKVAKVXXXXXXXXXKEVQVNMVVRSXGXH

SEQ ID NO: 29396 - protein, 37 aa, Artificial Sequence
  Non-cyclic GFR-binding peptide
  MOD_RES (1), (2), (34), (36): Xaa is C or S
XXAPTQLSNITVQIMDDSSNVIIGEMSNMVVRAXGXH

SEQ ID NO: 29397 - protein, 38 aa, Artificial Sequence
  Non-cyclic GFR-binding peptide
  MOD_RES (1), (38): Xaa is C or S
  MOD_RES (17), (18), (19), (20), (21): Xaa is A or G
  MOD_RES (22), (23), (24), (25): Xaa is A or G or is absent
XRPTQVQLEPLPVVYYXXXXXXXXXEQLSNTLEDHLAX

SEQ ID NO: 29398 - protein, 44 aa, Artificial Sequence
  Non-cyclic GFR-binding peptide
  MOD_RES (7), (41), (43): Xaa is C or S
  MOD_RES (21), (22), (23), (24), (25): Xaa is A or G
  MOD_RES (26), (27), (28), (29): Xaa is A or G or is absent
NDEGLEXVPTEEEPLTMLYYXXXXXXXXXEQLSNFLQHNKXEXR

SEQ ID NO: 29399 - protein, 39 aa, Artificial Sequence
  Non-cyclic GFR-binding peptide
  MOD_RES (37), (39): Xaa is C or S
  MOD_RES (16), (17), (18), (19), (20): Xaa is A or G
  MOD_RES (21), (22), (23), (24): Xaa is A or G or is absent
QPSRVHHEPLPVVYYXXXXXXXXXEQLSNRLEEHLEXAX

SEQ ID NO: 29400 - protein, 40 aa, Artificial Sequence
  Non-cyclic GFR-binding peptide
  MOD_RES (5), (6), (37), (39): Xaa is C or S
SASPXXVSQDLRPVQIRKIIGKTPKIKKATVMIVKSXKXS

SEQ ID NO: 29401 - protein, 36 aa, Artificial Sequence
  Non-cyclic GFR-binding peptide
  MOD_RES (2), (3): Xaa is C or S
  MOD_RES (17), (18), (19), (20), (21): Xaa is A or G
  MOD_RES (22), (23), (24), (25): Xaa is A or G or is absent
PXXAPTKLSNITVQIMXXXXXXXXXIGEMSNMVVRS

SEQ ID NO: 29402 - protein, 35 aa, Artificial Sequence
  Non-cyclic GFR-binding peptide
  MOD_RES (1), (32), (34): Xaa is C or S
XVSQDLRSVKIAKVIGKTPKIKEVQVMIVKSXKXS

SEQ ID NO: 29403 - protein, 37 aa, Artificial Sequence
  Non-cyclic GFR-binding peptide
  MOD_RES (36), (36): Xaa is C or S
PSRVHHEPLPVVYYEYVRKKPKLEQLSNRLEEHLEXA

SEQ ID NO: 29404 - protein, 41 aa, Artificial Sequence
  Non-cyclic GFR-binding peptide
  MOD_RES (5), (6), (38), (40): Xaa is C or S
IPKAXXVPTELRPVQMRKIDEYDKVVKKATVEMVVEGXGXR

SEQ ID NO: 29405 - protein, 39 aa, Artificial Sequence
  Non-cyclic GFR-binding peptide
  MOD_RES (4), (38): Xaa is C or S
  MOD_RES (18), (19), (20), (21), (22): Xaa is A or G
  MOD_RES (23), (24), (25), (26): Xaa is A or G or is absent
KPTXAPTKLRSVKVAKVXXXXXXXXXKEVQVNMVVRSXG

SEQ ID NO: 29406 - protein, 34 aa, Artificial Sequence
  Non-cyclic GFR-binding peptide
  MOD_RES (2), (34): Xaa is C or S
TXAPTKLRSVKVAKVDDSSNVIKEVQVNMVVRSX

SEQ ID NO: 29407 - protein, 37 aa, Artificial Sequence
  Non-cyclic GFR-binding peptide
  MOD_RES (5), (6): Xaa is C or S
VPKPXXAPTQLRPVQVRKIDDSSNVIKKATVNMVVRA

SEQ ID NO: 29408 - protein, 34 aa, Artificial Sequence
  Non-cyclic GFR-binding peptide
  MOD_RES (31), (33): Xaa is C or S
VSQDLRPVQIRKIIGKTPKIKKATVMIVKSXKXS

SEQ ID NO: 29409 - protein, 34 aa, Artificial Sequence
  Non-cyclic GFR-binding peptide
  MOD_RES (1), (34): Xaa is C or S
  MOD_RES (15), (16), (17), (18), (19): Xaa is A or G
  MOD_RES (20), (21), (22), (23): Xaa is A or G or is absent
XVPQALSNITIQIMXXXXXXXXXIGEMSMIVRSX

SEQ ID NO: 29410 - protein, 37 aa, Artificial Sequence
  Non-cyclic GFR-binding peptide
  MOD_RES (3), (3): Xaa is C or S
  MOD_RES (19), (20), (21), (22), (23): Xaa is A or G
  MOD_RES (24), (25), (26), (27): Xaa is A or G or is absent
VQXRPTQVQLEPLPVVYYXXXXXXXXXEQLSNTLEDH

SEQ ID NO: 29411 - protein, 39 aa, Artificial Sequence
  Non-cyclic GFR-binding peptide
  MOD_RES (5), (5): Xaa is C or S
SSVKXQPSRVHHEPLTVLYYEYVRKKPKLEQLSNRLEEH

SEQ ID NO: 29412 - protein, 39 aa, Artificial Sequence
  Non-cyclic GFR-binding peptide
  MOD_RES (6), (7): Xaa is C or S
  MOD_RES (21), (22), (23), (24), (25): Xaa is A or G
  MOD_RES (26), (27), (28), (29): Xaa is A or G or is absent
ASASPXXVSQDLSNITIQIMXXXXXXXXXIGEMSMIVKS

SEQ ID NO: 29413 - protein, 39 aa, Artificial Sequence
  Non-cyclic GFR-binding peptide
  MOD_RES (6), (7), (39): Xaa is C or S
KIPKAXXVPTELRSVKMAKVDENEKVVKEVQVDMVVEGX

SEQ ID NO: 29414 - protein, 35 aa, Artificial Sequence
  Non-cyclic GFR-binding peptide
  MOD_RES (34), (34): Xaa is C or S
  MOD_RES (14), (15), (16), (17), (18): Xaa is A or G
  MOD_RES (19), (20), (21), (22): Xaa is A or G or is absent
VPTELSNITMQIMXXXXXXXXXIGEMSDMVVEGXG

SEQ ID NO: 29415 - protein, 34 aa, Artificial Sequence
  Non-cyclic GFR-binding peptide
  MOD_RES (34), (34): Xaa is C or S
  MOD_RES (14), (15), (16), (17), (18): Xaa is A or G
  MOD_RES (19), (20), (21), (22): Xaa is A or G or is absent
VPTELSNITMQIMXXXXXXXXXIGEMSEMVVEGX

SEQ ID NO: 29416 - protein, 39 aa, Artificial Sequence
  Non-cyclic GFR-binding peptide
  MOD_RES (3), (4), (38): Xaa is C or S
  MOD_RES (18), (19), (20), (21), (22): Xaa is A or G
  MOD_RES (23), (24), (25), (26): Xaa is A or G or is absent
KPXXAPTQLRPVQVRKIXXXXXXXXXKKATVNMVVRAXG

SEQ ID NO: 29417 - protein, 39 aa, Artificial Sequence
  Non-cyclic GFR-binding peptide
  MOD_RES (6), (7), (38): Xaa is C or S
ASAAPXXVPQALRPVQIRKIVGRKPKVKKATVMIVRSXK

SEQ ID NO: 29418 - protein, 34 aa, Artificial Sequence
  Non-cyclic GFR-binding peptide
  MOD_RES (1), (2), (33): Xaa is C or S
XXVPQALSNITIQIMVGRKPKVIGEMSMIVRSXK

SEQ ID NO: 29419 - protein, 37 aa, Artificial Sequence
  Non-cyclic GFR-binding peptide
  MOD_RES (6), (7): Xaa is C or S
ASASPXXVSQDLRPVQIRKIIGKTPKIKKATVMIVKS

SEQ ID NO: 29420 - protein, 35 aa, Artificial Sequence
  Non-cyclic GFR-binding peptide
  MOD_RES (1), (2), (35): Xaa is C or S
  MOD_RES (16), (17), (18), (19), (20): Xaa is A or G
  MOD_RES (21), (22), (23), (24): Xaa is A or G or is absent
XXVSQDLSNITIQIMXXXXXXXXXIGEMSMIVKSX

SEQ ID NO: 29421 - protein, 40 aa, Artificial Sequence
  Non-cyclic GFR-binding peptide
  MOD_RES (4), (5), (37), (39): Xaa is C or S
PKAXXVPTELRSVKMAKVDEYDKVVKEVQVEMVVEGXGXR

SEQ ID NO: 29422 - protein, 40 aa, Artificial Sequence
  Non-cyclic GFR-binding peptide
  MOD_RES (5), (6), (38), (40): Xaa is C or S
VPKPXXAPTKLSNITVQIMDDSSNVIIGEMSNMVVRSXGX

SEQ ID NO: 29423 - protein, 41 aa, Artificial Sequence
  Non-cyclic GFR-binding peptide
  MOD_RES (6), (7), (41): Xaa is C or S
  MOD_RES (21), (22), (23), (24), (25): Xaa is A or G
  MOD_RES (26), (27), (28), (29): Xaa is A or G or is absent
SIPKAXXVPTELSNITMQIMXXXXXXXXXIGEMSEMVVEGX

SEQ ID NO: 29424 - protein, 37 aa, Artificial Sequence
  Non-cyclic GFR-binding peptide
  MOD_RES (2), (3), (35), (37): Xaa is C or S
AXXVPTELRSVKMAKVDEYDKVVKEVQVEMVVEGXGX

SEQ ID NO: 29425 - protein, 38 aa, Artificial Sequence
  Non-cyclic GFR-binding peptide
  MOD_RES (1), (35), (37): Xaa is C or S
  MOD_RES (15), (16), (17), (18), (19): Xaa is A or G
  MOD_RES (20), (21), (22), (23): Xaa is A or G or is absent
XAPTKLSNITVQIMXXXXXXXXXIGEMSNMVVRSXGXH

SEQ ID NO: 29426 - protein, 40 aa, Artificial Sequence
  Non-cyclic GFR-binding peptide
  MOD_RES (7), (7): Xaa is C or S
NDEGLEXVPTEEEPLTMLYYRIKPHQGQHEQLSNFLQHNK

SEQ ID NO: 29427 - protein, 37 aa, Artificial Sequence
  Non-cyclic GFR-binding peptide
  MOD_RES (1), (2), (35), (37): Xaa is C or S
  MOD_RES (16), (17), (18), (19), (20): Xaa is A or G
  MOD_RES (21), (22), (23), (24): Xaa is A or G or is absent
XXVPQDLRPVQIRKIXXXXXXXXXKKATVMVVKSXKX

SEQ ID NO: 29428 - protein, 37 aa, Artificial Sequence
  Non-cyclic GFR-binding peptide
  MOD_RES (1), (34), (36): Xaa is C or S
  MOD_RES (15), (16), (17), (18), (19): Xaa is A or G
  MOD_RES (20), (21), (22), (23): Xaa is A or G or is absent
XVPQALSNITIQIMXXXXXXXXXIGEMSMIVRSXKXS

SEQ ID NO: 29429 - protein, 30 aa, Artificial Sequence
  Non-cyclic GFR-binding peptide
VPQDLRSVKIAKVVGRTPKVKEVQVMVVKS

SEQ ID NO: 29430 - protein, 36 aa, Artificial Sequence
  Non-cyclic GFR-binding peptide
  MOD_RES (36), (36): Xaa is C or S
  MOD_RES (15), (16), (17), (18), (19): Xaa is A or G
  MOD_RES (20), (21), (22), (23): Xaa is A or G or is absent
PSRVHHEPLTVLYYXXXXXXXXXEQLSNRLEEHLEX

SEQ ID NO: 29431 - protein, 38 aa, Artificial Sequence
  Non-cyclic GFR-binding peptide
  MOD_RES (6), (7): Xaa is C or S
TVPKPXXAPTQLRPVQVRKIDDSSNVIKKATVNMVVRA

SEQ ID NO: 29432 - protein, 33 aa, Artificial Sequence
  Non-cyclic GFR-binding peptide
  MOD_RES (3), (3): Xaa is C or S
PTXAPTKLRSVKVAKVDDSSNVIKEVQVNMVVR

SEQ ID NO: 29433 - protein, 36 aa, Artificial Sequence
  Non-cyclic GFR-binding peptide
  MOD_RES (34), (36): Xaa is C or S
  MOD_RES (14), (15), (16), (17), (18): Xaa is A or G
  MOD_RES (19), (20), (21), (22): Xaa is A or G or is absent
VPTELRPVQMRKIXXXXXXXXXKKATVEMVVEGXGX

SEQ ID NO: 29434 - protein, 40 aa, Artificial Sequence
  Non-cyclic GFR-binding peptide
  MOD_RES (6), (7): Xaa is C or S
  MOD_RES (21), (22), (23), (24), (25): Xaa is A or G
  MOD_RES (26), (27), (28), (29): Xaa is A or G or is absent
TVPKPXXAPTQLSNITVQIMXXXXXXXXXIGEMSNMVVRA

SEQ ID NO: 29435 - protein, 38 aa, Artificial Sequence
  Non-cyclic GFR-binding peptide
  MOD_RES (3), (4), (36), (38): Xaa is C or S
KAXXVPTELSNITMQIMDEYDKVVIGEMSEMVVEGXGX

SEQ ID NO: 29436 - protein, 33 aa, Artificial Sequence
  Non-cyclic GFR-binding peptide
  MOD_RES (1), (32): Xaa is C or S
XVPQALSNITIQIMVGRKPKVIGEMSMIVRSXK

SEQ ID NO: 29437 - protein, 40 aa, Artificial Sequence
  Non-cyclic GFR-binding peptide
  MOD_RES (4), (5), (37), (39): Xaa is C or S
PKAXXVPTELRPVQMRKIDENEKVVKKATVDMVVEGXGXR

SEQ ID NO: 29438 - protein, 39 aa, Artificial Sequence
  Non-cyclic GFR-binding peptide
  MOD_RES (4), (5), (36), (38): Xaa is C or S
AAPXXVPQALRPVQIRKIVGRKPKVKKATVMIVRSXKXS

SEQ ID NO: 29439 - protein, 39 aa, Artificial Sequence
  Non-cyclic GFR-binding peptide
  MOD_RES (37), (39): Xaa is C or S
RPTQVQLEPLTVLYYEIVRKKPIFEQLSNTLEDHLAXKX

SEQ ID NO: 29440 - protein, 34 aa, Artificial Sequence
  Non-cyclic GFR-binding peptide
  MOD_RES (1), (2): Xaa is C or S
  MOD_RES (16), (17), (18), (19), (20): Xaa is A or G
  MOD_RES (21), (22), (23), (24): Xaa is A or G or is absent
XXVPQDLSNITIQIMXXXXXXXXXIGEMSMVVKS

SEQ ID NO: 29441 - protein, 43 aa, Artificial Sequence
  Non-cyclic GFR-binding peptide
  MOD_RES (6), (40), (42): Xaa is C or S
DEGLEXVPTEEEPLTMLYYRIKPHQGQHEQLSNFLQHNKXEXR

SEQ ID NO: 29442 - protein, 41 aa, Artificial Sequence
  Non-cyclic GFR-binding peptide
  MOD_RES (6), (7), (38), (40): Xaa is C or S
ASASPXXVSQDLSNITIQIMIGKTPKIIGEMSMIVKSXKXS

SEQ ID NO: 29443 - protein, 36 aa, Artificial Sequence
  Non-cyclic GFR-binding peptide
  MOD_RES (1), (2), (33), (35): Xaa is C or S
XXVSQDLSNITIQIMIGKTPKIIGEMSMIVKSXKXS

SEQ ID NO: 29444 - protein, 42 aa, Artificial Sequence
  Non-cyclic GFR-binding peptide
  MOD_RES (7), (41): Xaa is C or S
  MOD_RES (21), (22), (23), (24), (25): Xaa is A or G
  MOD_RES (26), (27), (28), (29): Xaa is A or G or is absent
HVTKPTXAPTKLSNITVQIMXXXXXXXXXIGEMSNMVVRSXG

SEQ ID NO: 29445 - protein, 36 aa, Artificial Sequence
  Non-cyclic GFR-binding peptide
  MOD_RES (16), (17), (18), (19), (20): Xaa is A or G
  MOD_RES (21), (22), (23), (24): Xaa is A or G or is absent
QPSRVHHEPLPVVYYXXXXXXXXXEQLSNRLEEHLE

SEQ ID NO: 29446 - protein, 44 aa, Artificial Sequence
  Non-cyclic GFR-binding peptide
  MOD_RES (4), (41), (43): Xaa is C or S
  MOD_RES (20), (21), (22), (23), (24): Xaa is A or G
  MOD_RES (25), (26), (27), (28): Xaa is A or G or is absent
NVQXRPTQVQLEPLPVVYYXXXXXXXXXEQLSNTLEDHLAXKXE

SEQ ID NO: 29447 - protein, 42 aa, Artificial Sequence
  Non-cyclic GFR-binding peptide
  MOD_RES (6), (7), (41): Xaa is C or S
  MOD_RES (21), (22), (23), (24), (25): Xaa is A or G
  MOD_RES (26), (27), (28), (29): Xaa is A or G or is absent
YVPKPXXAPTKLSNITVQIMXXXXXXXXXIGEMSNMVVRSXG

SEQ ID NO: 29448 - protein, 37 aa, Artificial Sequence
  Non-cyclic GFR-binding peptide
  MOD_RES (36), (36): Xaa is C or S
  MOD_RES (15), (16), (17), (18), (19): Xaa is A or G
  MOD_RES (20), (21), (22), (23): Xaa is A or G or is absent
PTQVQLEPLTVLYYXXXXXXXXXEQLSNTLEDHLAXK

SEQ ID NO: 29449 - protein, 38 aa, Artificial Sequence
  Non-cyclic GFR-binding peptide
  MOD_RES (2), (2): Xaa is C or S
KXQPSRVHHEPLTVLYYEYVRKKPKLEQLSNRLEEHLE

SEQ ID NO: 29450 - protein, 40 aa, Artificial Sequence
  Non-cyclic GFR-binding peptide
  MOD_RES (4), (5), (38), (40): Xaa is C or S
  MOD_RES (19), (20), (21), (22), (23): Xaa is A or G
  MOD_RES (24), (25), (26), (27): Xaa is A or G or is absent
AAPXXVPQALRPVQIRKIXXXXXXXXXKKATVMIVRSXKX

SEQ ID NO: 29451 - protein, 33 aa, Artificial Sequence
  Non-cyclic GFR-binding peptide
  MOD_RES (1), (33): Xaa is C or S
XVPTELRPVQMRKIDENEKVVKKATVDMVVEGX

SEQ ID NO: 29452 - protein, 42 aa, Artificial Sequence
  Non-cyclic GFR-binding peptide
  MOD_RES (4), (41): Xaa is C or S
NVQXRPTQVQLEPLPVVYYEIVRKKPIFEQLSNTLEDHLAXK

SEQ ID NO: 29453 - protein, 38 aa, Artificial Sequence
  Non-cyclic GFR-binding peptide
  MOD_RES (1), (2), (36), (38): Xaa is C or S
  MOD_RES (16), (17), (18), (19), (20): Xaa is A or G
  MOD_RES (21), (22), (23), (24): Xaa is A or G or is absent
XXAPTKLSNITVQIMXXXXXXXXXIGEMSNMVVRSXGX

SEQ ID NO: 29454 - protein, 34 aa, Artificial Sequence
  Non-cyclic GFR-binding peptide
  MOD_RES (1), (1): Xaa is C or S
  MOD_RES (15), (16), (17), (18), (19): Xaa is A or G
  MOD_RES (20), (21), (22), (23): Xaa is A or G or is absent
XVPTELRPVQMRKIXXXXXXXXXKKATVDMVVEG

SEQ ID NO: 29455 - protein, 41 aa, Artificial Sequence
  Non-cyclic GFR-binding peptide
  MOD_RES (4), (5), (39), (41): Xaa is C or S
  MOD_RES (19), (20), (21), (22), (23): Xaa is A or G
  MOD_RES (24), (25), (26), (27): Xaa is A or G or is absent
PKAXXVPTELRPVQMRKIXXXXXXXXXKKATVEMVVEGXGX

SEQ ID NO: 29456 - protein, 36 aa, Artificial Sequence
  Non-cyclic GFR-binding peptide
  MOD_RES (1), (2), (36): Xaa is C or S
  MOD_RES (16), (17), (18), (19), (20): Xaa is A or G
  MOD_RES (21), (22), (23), (24): Xaa is A or G or is absent
XXAPTKLRPVQVRKIXXXXXXXXXKKATVNMVVRSX

SEQ ID NO: 29457 - protein, 35 aa, Artificial Sequence
  Non-cyclic GFR-binding peptide
  MOD_RES (16), (17), (18), (19), (20): Xaa is A or G
  MOD_RES (21), (22), (23), (24): Xaa is A or G or is absent
QPSRVHHEPLTVLYYXXXXXXXXXEQLSNRLEEHL

SEQ ID NO: 29458 - protein, 36 aa, Artificial Sequence
  Non-cyclic GFR-binding peptide
  MOD_RES (1), (33), (35): Xaa is C or S
XAPTKLRPVQVRKIDDSSNVIKKATVNMVVRSXGXH

SEQ ID NO: 29459 - protein, 38 aa, Artificial Sequence
  Non-cyclic GFR-binding peptide
  MOD_RES (4), (5), (38): Xaa is C or S
  MOD_RES (19), (20), (21), (22), (23): Xaa is A or G
  MOD_RES (24), (25), (26), (27): Xaa is A or G or is absent
ASPXXVPQDLRPVQIRKIXXXXXXXXXKKATVMVVKSX

SEQ ID NO: 29460 - protein, 35 aa, Artificial Sequence
  Non-cyclic GFR-binding peptide
  MOD_RES (34), (34): Xaa is C or S
  MOD_RES (14), (15), (16), (17), (18): Xaa is A or G
  MOD_RES (19), (20), (21), (22): Xaa is A or G or is absent
APTQLRSVKVAKVXXXXXXXXXKEVQVNMVVRAXG

SEQ ID NO: 29461 - protein, 33 aa, Artificial Sequence
  Non-cyclic GFR-binding peptide
  MOD_RES (14), (15), (16), (17), (18): Xaa is A or G
  MOD_RES (19), (20), (21), (22): Xaa is A or G or is absent
VPTELSNITMQIMXXXXXXXXXIGEMSEMVVEG

SEQ ID NO: 29462 - protein, 35 aa, Artificial Sequence
  Non-cyclic GFR-binding peptide
  MOD_RES (1), (34): Xaa is C or S
  MOD_RES (15), (16), (17), (18), (19): Xaa is A or G
  MOD_RES (20), (21), (22), (23): Xaa is A or G or is absent
XVSQDLRSVKIAKVXXXXXXXXXKEVQVMIVKSXK

SEQ ID NO: 29463 - protein, 39 aa, Artificial Sequence
  Non-cyclic GFR-binding peptide
  MOD_RES (7), (7): Xaa is C or S
  MOD_RES (21), (22), (23), (24), (25): Xaa is A or G
  MOD_RES (26), (27), (28), (29): Xaa is A or G or is absent
HVTKPTXAPTKLRPVQVRKIXXXXXXXXXKKATVNMVVR

SEQ ID NO: 29464 - protein, 39 aa, Artificial Sequence
  Non-cyclic GFR-binding peptide
  MOD_RES (7), (7): Xaa is C or S
  MOD_RES (21), (22), (23), (24), (25): Xaa is A or G
  MOD_RES (26), (27), (28), (29): Xaa is A or G or is absent
HVTKPTXAPTKLRSVKVAKVXXXXXXXXXKEVQVNMVVR

SEQ ID NO: 29465 - protein, 36 aa, Artificial Sequence
  Non-cyclic GFR-binding peptide
  MOD_RES (1), (35): Xaa is C or S
  MOD_RES (15), (16), (17), (18), (19): Xaa is A or G
  MOD_RES (20), (21), (22), (23): Xaa is A or G or is absent
XVPTEEEPLPMVYYXXXXXXXXXEQLSNFLQHNKXE

SEQ ID NO: 29466 - protein, 38 aa, Artificial Sequence
  Non-cyclic GFR-binding peptide
  MOD_RES (3), (3): Xaa is C or S
  MOD_RES (19), (20), (21), (22), (23): Xaa is A or G
  MOD_RES (24), (25), (26), (27): Xaa is A or G or is absent
VQXRPTQVQLEPLTVLYYXXXXXXXXXEQLSNTLEDHL

SEQ ID NO: 29467 - protein, 35 aa, Artificial Sequence
  Non-cyclic GFR-binding peptide
  MOD_RES (3), (4): Xaa is C or S
KAXXVPTELRPVQMRKIDENEKVVKKATVDMVVEG

SEQ ID NO: 29468 - protein, 40 aa, Artificial Sequence
  Non-cyclic GFR-binding peptide
  MOD_RES (7), (7): Xaa is C or S
  MOD_RES (21), (22), (23), (24), (25): Xaa is A or G
  MOD_RES (26), (27), (28), (29): Xaa is A or G or is absent
NDEGLEXVPTEEEPLTMLYYXXXXXXXXXEQLSNFLQHNK

SEQ ID NO: 29469 - protein, 41 aa, Artificial Sequence
  Non-cyclic GFR-binding peptide
  MOD_RES (4), (41): Xaa is C or S
NVQXRPTQVQLEPLTVLYYEIVRKKPIFEQLSNTLEDHLAX

SEQ ID NO: 29470 - protein, 38 aa, Artificial Sequence
  Non-cyclic GFR-binding peptide
  MOD_RES (5), (6), (38): Xaa is C or S
VPKPXXAPTQLRPVQVRKIDDSSNVIKKATVNMVVRAX

SEQ ID NO: 29471 - protein, 33 aa, Artificial Sequence
  Non-cyclic GFR-binding peptide
  MOD_RES (32), (32): Xaa is C or S
VPTELSNITMQIMDENEKVVIGEMSDMVVEGXG

SEQ ID NO: 29472 - protein, 41 aa, Artificial Sequence
  Non-cyclic GFR-binding peptide
  MOD_RES (5), (6), (40): Xaa is C or S
  MOD_RES (20), (21), (22), (23), (24): Xaa is A or G
  MOD_RES (25), (26), (27), (28): Xaa is A or G or is absent
IPKAXXVPTELRPVQMRKIXXXXXXXXXKKATVDMVVEGXG

SEQ ID NO: 29473 - protein, 36 aa, Artificial Sequence
  Non-cyclic GFR-binding peptide
  MOD_RES (34), (36): Xaa is C or S
VPTEEEPLPMVYYRIKPHQGQHEQLSNFLQHNKXEX

SEQ ID NO: 29474 - protein, 40 aa, Artificial Sequence
  Non-cyclic GFR-binding peptide
  MOD_RES (6), (7), (40): Xaa is C or S
  MOD_RES (21), (22), (23), (24), (25): Xaa is A or G
  MOD_RES (26), (27), (28), (29): Xaa is A or G or is absent
ASAAPXXVPQALSNITIQIMXXXXXXXXXIGEMSMIVRSX

SEQ ID NO: 29475 - protein, 38 aa, Artificial Sequence
  Non-cyclic GFR-binding peptide
  MOD_RES (4), (4): Xaa is C or S
SVKXQPSRVHHEPLTVLYYEYVRKKPKLEQLSNRLEEH

SEQ ID NO: 29476 - protein, 36 aa, Artificial Sequence
  Non-cyclic GFR-binding peptide
  MOD_RES (2), (34), (36): Xaa is C or S
TXAPTKLRPVQVRKIDDSSNVIKKATVNMVVRSXGX

SEQ ID NO: 29477 - protein, 37 aa, Artificial Sequence
  Non-cyclic GFR-binding peptide
  MOD_RES (5), (6), (37): Xaa is C or S
SAAPXXVPQALSNITIQIMVGRKPKVIGEMSMIVRSX

SEQ ID NO: 29478 - protein, 37 aa, Artificial Sequence
  Non-cyclic GFR-binding peptide
  MOD_RES (3), (4): Xaa is C or S
  MOD_RES (18), (19), (20), (21), (22): Xaa is A or G
  MOD_RES (23), (24), (25), (26): Xaa is A or G or is absent
KAXXVPTELRPVQMRKIXXXXXXXXXKKATVEMVVEG

SEQ ID NO: 29479 - protein, 40 aa, Artificial Sequence
  Non-cyclic GFR-binding peptide
  MOD_RES (4), (5), (38), (40): Xaa is C or S
  MOD_RES (19), (20), (21), (22), (23): Xaa is A or G
  MOD_RES (24), (25), (26), (27): Xaa is A or G or is absent
ASPXXVSQDLRPVQIRKIXXXXXXXXXKKATVMIVKSXKX

SEQ ID NO: 29480 - protein, 38 aa, Artificial Sequence
  Non-cyclic GFR-binding peptide
  MOD_RES (4), (4): Xaa is C or S
SVKXQPSRVHHEPLPVVYYEYVRKKPKLEQLSNRLEEH

SEQ ID NO: 29481 - protein, 40 aa, Artificial Sequence
  Non-cyclic GFR-binding peptide
  MOD_RES (6), (7), (39): Xaa is C or S
TVPKPXXAPTQLRSVKVAKVDDSSNVIKEVQVNMVVRAXG

SEQ ID NO: 29482 - protein, 37 aa, Artificial Sequence
  Non-cyclic GFR-binding peptide
  MOD_RES (1), (35), (37): Xaa is C or S
  MOD_RES (15), (16), (17), (18), (19): Xaa is A or G
  MOD_RES (20), (21), (22), (23): Xaa is A or G or is absent
XVPTEEEPLPMVYYXXXXXXXXXEQLSNFLQHNKXEX

SEQ ID NO: 29483 - protein, 36 aa, Artificial Sequence
  Non-cyclic GFR-binding peptide
  MOD_RES (1), (2), (35): Xaa is C or S
  MOD_RES (16), (17), (18), (19), (20): Xaa is A or G
  MOD_RES (21), (22), (23), (24): Xaa is A or G or is absent
XXVPQDLRSVKIAKVXXXXXXXXXKEVQVMVVKSXK

SEQ ID NO: 29484 - protein, 33 aa, Artificial Sequence
  Non-cyclic GFR-binding peptide
  MOD_RES (1), (32): Xaa is C or S
XVPQALRSVKIAKVVGRKPKVKEVQVMIVRSXK

SEQ ID NO: 29485 - protein, 40 aa, Artificial Sequence
  Non-cyclic GFR-binding peptide
  MOD_RES (4), (4): Xaa is C or S
  MOD_RES (20), (21), (22), (23), (24): Xaa is A or G
  MOD_RES (25), (26), (27), (28): Xaa is A or G or is absent
NVQXRPTQVQLEPLTVLYYXXXXXXXXXEQLSNTLEDHLA

SEQ ID NO: 29486 - protein, 38 aa, Artificial Sequence
  Non-cyclic GFR-binding peptide
  MOD_RES (2), (3), (35), (37): Xaa is C or S
PXXAPTKLRSVKVAKVDDSSNVIKEVQVNMVVRSXGXH

SEQ ID NO: 29487 - protein, 39 aa, Artificial Sequence
  Non-cyclic GFR-binding peptide
  MOD_RES (5), (5): Xaa is C or S
  MOD_RES (21), (22), (23), (24), (25): Xaa is A or G
  MOD_RES (26), (27), (28), (29): Xaa is A or G or is absent
SSVKXQPSRVHHEPLPVVYYXXXXXXXXXEQLSNRLEEH

SEQ ID NO: 29488 - protein, 34 aa, Artificial Sequence
  Non-cyclic GFR-binding peptide
  MOD_RES (1), (2): Xaa is C or S
  MOD_RES (16), (17), (18), (19), (20): Xaa is A or G
  MOD_RES (21), (22), (23), (24): Xaa is A or G or is absent
XXVPTELRPVQMRKIXXXXXXXXXKKATVDMVVE

SEQ ID NO: 29489 - protein, 40 aa, Artificial Sequence
  Non-cyclic GFR-binding peptide
  MOD_RES (6), (7), (38), (40): Xaa is C or S
ASAAPXXVPQALRSVKIAKVVGRKPKVKEVQVMIVRSXKX

SEQ ID NO: 29490 - protein, 36 aa, Artificial Sequence
  Non-cyclic GFR-binding peptide
  MOD_RES (16), (17), (18), (19), (20): Xaa is A or G
  MOD_RES (21), (22), (23), (24): Xaa is A or G or is absent
RPTQVQLEPLPVVYYXXXXXXXXXEQLSNTLEDHLA

SEQ ID NO: 29491 - protein, 38 aa, Artificial Sequence
  Non-cyclic GFR-binding peptide
  MOD_RES (35), (37): Xaa is C or S
  MOD_RES (14), (15), (16), (17), (18): Xaa is A or G
  MOD_RES (19), (20), (21), (22): Xaa is A or G or is absent
TQVQLEPLPVVYYXXXXXXXXXEQLSNTLEDHLAXKXE

SEQ ID NO: 29492 - protein, 41 aa, Artificial Sequence
  Non-cyclic GFR-binding peptide
  MOD_RES (5), (5): Xaa is C or S
RNVQXRPTQVQLEPLTVLYYEIVRKKPIFEQLSNTLEDHLA

SEQ ID NO: 29493 - protein, 37 aa, Artificial Sequence
  Non-cyclic GFR-binding peptide
  MOD_RES (4), (5): Xaa is C or S
  MOD_RES (19), (20), (21), (22), (23): Xaa is A or G
  MOD_RES (24), (25), (26), (27): Xaa is A or G or is absent
AAPXXVPQALRSVKIAKVXXXXXXXXXKEVQVMIVRS

SEQ ID NO: 29494 - protein, 32 aa, Artificial Sequence
  Non-cyclic GFR-binding peptide
  MOD_RES (1), (2): Xaa is C or S
XXVPQDLRPVQIRKIVGRTPKVKKATVMVVKS

SEQ ID NO: 29495 - protein, 36 aa, Artificial Sequence
  Non-cyclic GFR-binding peptide
  MOD_RES (2), (3), (36): Xaa is C or S
  MOD_RES (17), (18), (19), (20), (21): Xaa is A or G
  MOD_RES (22), (23), (24), (25): Xaa is A or G or is absent
PXXVSQDLRPVQIRKIXXXXXXXXXKKATVMIVKSX

SEQ ID NO: 29496 - protein, 31 aa, Artificial Sequence
  Non-cyclic GFR-binding peptide
  MOD_RES (1), (1): Xaa is C or S
XVPQDLRPVQIRKIVGRTPKVKKATVMVVKS

SEQ ID NO: 29497 - protein, 36 aa, Artificial Sequence
  Non-cyclic GFR-binding peptide
  MOD_RES (3), (4), (36): Xaa is C or S
KAXXVPTELRSVKMAKVDEYDKVVKEVQVEMVVEGX

SEQ ID NO: 29498 - protein, 42 aa, Artificial Sequence
  Non-cyclic GFR-binding peptide
  MOD_RES (4), (5), (39), (41): Xaa is C or S
  MOD_RES (19), (20), (21), (22), (23): Xaa is A or G
  MOD_RES (24), (25), (26), (27): Xaa is A or G or is absent
PKAXXVPTELRPVQMRKIXXXXXXXXXKKATVDMVVEGXGXR

SEQ ID NO: 29499 - protein, 38 aa, Artificial Sequence
  Non-cyclic GFR-binding peptide
  MOD_RES (4), (5): Xaa is C or S
  MOD_RES (19), (20), (21), (22), (23): Xaa is A or G
  MOD_RES (24), (25), (26), (27): Xaa is A or G or is absent
PKPXXAPTKLRPVQVRKIXXXXXXXXXKKATVNMVVRS

SEQ ID NO: 29500 - protein, 37 aa, Artificial Sequence
  Non-cyclic GFR-binding peptide
  MOD_RES (3), (4), (36): Xaa is C or S
KPXXAPTQLRPVQVRKIDDSSNVIKKATVNMVVRAXG

SEQ ID NO: 29501 - protein, 36 aa, Artificial Sequence
  Non-cyclic GFR-binding peptide
  MOD_RES (34), (36): Xaa is C or S
  MOD_RES (14), (15), (16), (17), (18): Xaa is A or G
  MOD_RES (19), (20), (21), (22): Xaa is A or G or is absent
APTKLSNITVQIMXXXXXXXXXIGEMSNMVVRSXGX

SEQ ID NO: 29502 - protein, 41 aa, Artificial Sequence
  Non-cyclic GFR-binding peptide
  MOD_RES (6), (7), (40): Xaa is C or S
  MOD_RES (21), (22), (23), (24), (25): Xaa is A or G
  MOD_RES (26), (27), (28), (29): Xaa is A or G or is absent
ASASPXXVSQDLRPVQIRKIXXXXXXXXXKKATVMIVKSXK

SEQ ID NO: 29503 - protein, 41 aa, Artificial Sequence
  Non-cyclic GFR-binding peptide
  MOD_RES (7), (39), (41): Xaa is C or S
HVTKPTXAPTKLSNITVQIMDDSSNVIIGEMSNMVVRSXGX

SEQ ID NO: 29504 - protein, 37 aa, Artificial Sequence
  Non-cyclic GFR-binding peptide
  MOD_RES (2), (3), (35), (37): Xaa is C or S
AXXVPTELRSVKMAKVDENEKVVKEVQVDMVVEGXGX

SEQ ID NO: 29505 - protein, 34 aa, Artificial Sequence
  Non-cyclic GFR-binding peptide
  MOD_RES (32), (34): Xaa is C or S
APTQLRPVQVRKIDDSSNVIKKATVNMVVRAXGX

SEQ ID NO: 29506 - protein, 36 aa, Artificial Sequence
  Non-cyclic GFR-binding peptide
  MOD_RES (3), (4), (35): Xaa is C or S
SPXXVPQDLSNITIQIMVGRTPKVIGEMSMVVKSXK

SEQ ID NO: 29507 - protein, 38 aa, Artificial Sequence
  Non-cyclic GFR-binding peptide
  MOD_RES (2), (2): Xaa is C or S
  MOD_RES (18), (19), (20), (21), (22): Xaa is A or G
  MOD_RES (23), (24), (25), (26): Xaa is A or G or is absent
QXRPTQVQLEPLTVLYYXXXXXXXXXEQLSNTLEDHLA

SEQ ID NO: 29508 - protein, 40 aa, Artificial Sequence
  Non-cyclic GFR-binding peptide
  MOD_RES (4), (38), (40): Xaa is C or S
  MOD_RES (18), (19), (20), (21), (22): Xaa is A or G
  MOD_RES (23), (24), (25), (26): Xaa is A or G or is absent
GLEXVPTEEEPLPMVYYXXXXXXXXXEQLSNFLQHNKXEX

SEQ ID NO: 29509 - protein, 41 aa, Artificial Sequence
  Non-cyclic GFR-binding peptide
  MOD_RES (4), (5), (39), (41): Xaa is C or S
  MOD_RES (19), (20), (21), (22), (23): Xaa is A or G
  MOD_RES (24), (25), (26), (27): Xaa is A or G or is absent
PKPXXAPTQLRPVQVRKIXXXXXXXXXKKATVNMVVRAXGX

SEQ ID NO: 29510 - protein, 41 aa, Artificial Sequence
  Non-cyclic GFR-binding peptide
  MOD_RES (4), (5), (39), (41): Xaa is C or S
  MOD_RES (19), (20), (21), (22), (23): Xaa is A or G
  MOD_RES (24), (25), (26), (27): Xaa is A or G or is absent
PKAXXVPTELRSVKMAKVXXXXXXXXXKEVQVEMVVEGXGX

SEQ ID NO: 29511 - protein, 39 aa, Artificial Sequence
  Non-cyclic GFR-binding peptide
  MOD_RES (36), (38): Xaa is C or S
PSRVHHEPLTVLYYEYVRKKPKLEQLSNRLEEHLEXAXA

SEQ ID NO: 29512 - protein, 33 aa, Artificial Sequence
  Non-cyclic GFR-binding peptide
  MOD_RES (1), (1): Xaa is C or S
  MOD_RES (15), (16), (17), (18), (19): Xaa is A or G
  MOD_RES (20), (21), (22), (23): Xaa is A or G or is absent
XVPQALRSVKIAKVXXXXXXXXXKEVQVMIVRS

SEQ ID NO: 29513 - protein, 40 aa, Artificial Sequence
  Non-cyclic GFR-binding peptide
  MOD_RES (4), (4): Xaa is C or S
  MOD_RES (20), (21), (22), (23), (24): Xaa is A or G
  MOD_RES (25), (26), (27), (28): Xaa is A or G or is absent
NVQXRPTQVQLEPLPVVYYXXXXXXXXXEQLSNTLEDHLA

SEQ ID NO: 29514 - protein, 37 aa, Artificial Sequence
  Non-cyclic GFR-binding peptide
  MOD_RES (1), (35), (37): Xaa is C or S
  MOD_RES (15), (16), (17), (18), (19): Xaa is A or G
  MOD_RES (20), (21), (22), (23): Xaa is A or G or is absent
XVPTELRPVQMRKIXXXXXXXXXKKATVDMVVEGXGX

SEQ ID NO: 29515 - protein, 35 aa, Artificial Sequence
  Non-cyclic GFR-binding peptide
  MOD_RES (3), (4): Xaa is C or S
KPXXAPTQLSNITVQIMDDSSNVIIGEMSNMVVRA

SEQ ID NO: 29516 - protein, 37 aa, Artificial Sequence
  Non-cyclic GFR-binding peptide
  MOD_RES (1), (2), (35), (37): Xaa is C or S
  MOD_RES (16), (17), (18), (19), (20): Xaa is A or G
  MOD_RES (21), (22), (23), (24): Xaa is A or G or is absent
XXVPQDLRSVKIAKVXXXXXXXXXKEVQVMVVKSXKX

SEQ ID NO: 29517 - protein, 32 aa, Artificial Sequence
  Non-cyclic GFR-binding peptide
  MOD_RES (14), (15), (16), (17), (18): Xaa is A or G
  MOD_RES (19), (20), (21), (22): Xaa is A or G or is absent
VPQDLSNITIQIMXXXXXXXXXIGEMSMVVKS

SEQ ID NO: 29518 - protein, 38 aa, Artificial Sequence
  Non-cyclic GFR-binding peptide
  MOD_RES (2), (3), (36), (38): Xaa is C or S
  MOD_RES (17), (18), (19), (20), (21): Xaa is A or G
  MOD_RES (22), (23), (24), (25): Xaa is A or G or is absent
PXXVSQDLRPVQIRKIXXXXXXXXXKKATVMIVKSXKX

SEQ ID NO: 29519 - protein, 37 aa, Artificial Sequence
  Non-cyclic GFR-binding peptide
  MOD_RES (3), (4), (37): Xaa is C or S
  MOD_RES (18), (19), (20), (21), (22): Xaa is A or G
  MOD_RES (23), (24), (25), (26): Xaa is A or G or is absent
SPXXVPQDLRSVKIAKVXXXXXXXXXKEVQVMVVKSX

SEQ ID NO: 29520 - protein, 40 aa, Artificial Sequence
  Non-cyclic GFR-binding peptide
  MOD_RES (6), (7), (40): Xaa is C or S
  MOD_RES (21), (22), (23), (24), (25): Xaa is A or G
  MOD_RES (26), (27), (28), (29): Xaa is A or G or is absent
ASASPXXVSQDLSNITIQIMXXXXXXXXXIGEMSMIVKSX

SEQ ID NO: 29521 - protein, 40 aa, Artificial Sequence
  Non-cyclic GFR-binding peptide
  MOD_RES (5), (6), (40): Xaa is C or S
  MOD_RES (20), (21), (22), (23), (24): Xaa is A or G
  MOD_RES (25), (26), (27), (28): Xaa is A or G or is absent
VPKPXXAPTKLRSVKVAKVXXXXXXXXXKEVQVNMVVRSX

SEQ ID NO: 29522 - protein, 37 aa, Artificial Sequence
  Non-cyclic GFR-binding peptide
  MOD_RES (6), (7): Xaa is C or S
YVPKPXXAPTKLRPVQVRKIDDSSNVIKKATVNMVVR

SEQ ID NO: 29523 - protein, 39 aa, Artificial Sequence
  Non-cyclic GFR-binding peptide
  MOD_RES (4), (5), (38): Xaa is C or S
  MOD_RES (19), (20), (21), (22), (23): Xaa is A or G
  MOD_RES (24), (25), (26), (27): Xaa is A or G or is absent
ASPXXVPQDLSNITIQIMXXXXXXXXXIGEMSMVVKSXK

SEQ ID NO: 29524 - protein, 34 aa, Artificial Sequence
  Non-cyclic GFR-binding peptide
  MOD_RES (33), (33): Xaa is C or S
  MOD_RES (14), (15), (16), (17), (18): Xaa is A or G
  MOD_RES (19), (20), (21), (22): Xaa is A or G or is absent
VSQDLRSVKIAKVXXXXXXXXXKEVQVMIVKSXK

SEQ ID NO: 29525 - protein, 40 aa, Artificial Sequence
  Non-cyclic GFR-binding peptide
  MOD_RES (5), (6), (37), (39): Xaa is C or S
SAAPXXVPQALRPVQIRKIVGRKPKVKKATVMIVRSXKXS

SEQ ID NO: 29526 - protein, 40 aa, Artificial Sequence
  Non-cyclic GFR-binding peptide
  MOD_RES (37), (39): Xaa is C or S
QPSRVHHEPLTVLYYEYVRKKPKLEQLSNRLEEHLEXAXA

SEQ ID NO: 29527 - protein, 37 aa, Artificial Sequence
  Non-cyclic GFR-binding peptide
  MOD_RES (4), (36): Xaa is C or S
KPTXAPTKLSNITVQIMDDSSNVIIGEMSNMVVRSXG

SEQ ID NO: 29528 - protein, 42 aa, Artificial Sequence
  Non-cyclic GFR-binding peptide
  MOD_RES (4), (41): Xaa is C or S
  MOD_RES (20), (21), (22), (23), (24): Xaa is A or G
  MOD_RES (25), (26), (27), (28): Xaa is A or G or is absent
NVQXRPTQVQLEPLPVVYYXXXXXXXXXEQLSNTLEDHLAXK

SEQ ID NO: 29529 - protein, 41 aa, Artificial Sequence
  Non-cyclic GFR-binding peptide
  MOD_RES (6), (7), (38), (40): Xaa is C or S
ASASPXXVSQDLRSVKIAKVIGKTPKIKEVQVMIVKSXKXS

SEQ ID NO: 29530 - protein, 33 aa, Artificial Sequence
  Non-cyclic GFR-binding peptide
  MOD_RES (14), (15), (16), (17), (18): Xaa is A or G
  MOD_RES (19), (20), (21), (22): Xaa is A or G or is absent
VPTEEEPLTMLYYXXXXXXXXXEQLSNFLQHNK

SEQ ID NO: 29531 - protein, 37 aa, Artificial Sequence
  Non-cyclic GFR-binding peptide
  MOD_RES (4), (5): Xaa is C or S
  MOD_RES (19), (20), (21), (22), (23): Xaa is A or G
  MOD_RES (24), (25), (26), (27): Xaa is A or G or is absent
PKPXXAPTKLSNITVQIMXXXXXXXXXIGEMSNMVVR

SEQ ID NO: 29532 - protein, 40 aa, Artificial Sequence
  Non-cyclic GFR-binding peptide
  MOD_RES (3), (37), (39): Xaa is C or S
LEXVPTEEEPLTMLYYRIKPHQGQHEQLSNFLQHNKXEXR

SEQ ID NO: 29533 - protein, 38 aa, Artificial Sequence
  Non-cyclic GFR-binding peptide
  MOD_RES (5), (6): Xaa is C or S
  MOD_RES (20), (21), (22), (23), (24): Xaa is A or G
  MOD_RES (25), (26), (27), (28): Xaa is A or G or is absent
VPKPXXAPTKLRPVQVRKIXXXXXXXXXKKATVNMVVR

SEQ ID NO: 29534 - protein, 41 aa, Artificial Sequence
  Non-cyclic GFR-binding peptide
  MOD_RES (4), (5), (39), (41): Xaa is C or S
  MOD_RES (19), (20), (21), (22), (23): Xaa is A or G
  MOD_RES (24), (25), (26), (27): Xaa is A or G or is absent
PKPXXAPTQLSNITVQIMXXXXXXXXXIGEMSNMVVRAXGX

SEQ ID NO: 29535 - protein, 31 aa, Artificial Sequence
  Non-cyclic GFR-binding peptide
  MOD_RES (31), (31): Xaa is C or S
VSQDLRPVQIRKIIGKTPKIKKATVMIVKSX

SEQ ID NO: 29536 - protein, 37 aa, Artificial Sequence
  Non-cyclic GFR-binding peptide
  MOD_RES (2), (3), (37): Xaa is C or S
  MOD_RES (17), (18), (19), (20), (21): Xaa is A or G
  MOD_RES (22), (23), (24), (25): Xaa is A or G or is absent
AXXVPTELSNITMQIMXXXXXXXXXIGEMSEMVVEGX

SEQ ID NO: 29537 - protein, 30 aa, Artificial Sequence
  Non-cyclic GFR-binding peptide
VSQDLRPVQIRKIIGKTPKIKKATVMIVKS

SEQ ID NO: 29538 - protein, 39 aa, Artificial Sequence
  Non-cyclic GFR-binding peptide
  MOD_RES (3), (4), (37), (39): Xaa is C or S
  MOD_RES (18), (19), (20), (21), (22): Xaa is A or G
  MOD_RES (23), (24), (25), (26): Xaa is A or G or is absent
APXXVPQALRSVKIAKVXXXXXXXXXKEVQVMIVRSXKX

SEQ ID NO: 29539 - protein, 33 aa, Artificial Sequence
  Non-cyclic GFR-binding peptide
  MOD_RES (1), (2): Xaa is C or S
XXVPTELRPVQMRKIDEYDKVVKKATVEMVVEG

SEQ ID NO: 29540 - protein, 38 aa, Artificial Sequence
  Non-cyclic GFR-binding peptide
  MOD_RES (4), (38): Xaa is C or S
GLEXVPTEEEPLPMVYYRIKPHQGQHEQLSNFLQHNKX

SEQ ID NO: 29541 - protein, 33 aa, Artificial Sequence
  Non-cyclic GFR-binding peptide
  MOD_RES (1), (33): Xaa is C or S
XVPTELSNITMQIMDENEKVVIGEMSDMVVEGX

SEQ ID NO: 29542 - protein, 39 aa, Artificial Sequence
  Non-cyclic GFR-binding peptide
  MOD_RES (6), (7), (39): Xaa is C or S
TVPKPXXAPTQLRPVQVRKIDDSSNVIKKATVNMVVRAX

SEQ ID NO: 29543 - protein, 42 aa, Artificial Sequence
  Non-cyclic GFR-binding peptide
  MOD_RES (6), (7), (39), (41): Xaa is C or S
SIPKAXXVPTELSNITMQIMDEYDKVVIGEMSEMVVEGXGXR

SEQ ID NO: 29544 - protein, 37 aa, Artificial Sequence
  Non-cyclic GFR-binding peptide
  MOD_RES (6), (7): Xaa is C or S
TVPKPXXAPTQLRSVKVAKVDDSSNVIKEVQVNMVVR

SEQ ID NO: 29545 - protein, 40 aa, Artificial Sequence
  Non-cyclic GFR-binding peptide
  MOD_RES (5), (6), (40): Xaa is C or S
  MOD_RES (20), (21), (22), (23), (24): Xaa is A or G
  MOD_RES (25), (26), (27), (28): Xaa is A or G or is absent
VPKPXXAPTQLSNITVQIMXXXXXXXXXIGEMSNMVVRAX

SEQ ID NO: 29546 - protein, 34 aa, Artificial Sequence
  Non-cyclic GFR-binding peptide
  MOD_RES (3), (4): Xaa is C or S
SPXXVPQDLRPVQIRKIVGRTPKVKKATVMVVKS

SEQ ID NO: 29547 - protein, 41 aa, Artificial Sequence
  Non-cyclic GFR-binding peptide
  MOD_RES (5), (5): Xaa is C or S
RNVQXRPTQVQLEPLPVVYYEIVRKKPIFEQLSNTLEDHLA

SEQ ID NO: 29548 - protein, 39 aa, Artificial Sequence
  Non-cyclic GFR-binding peptide
  MOD_RES (3), (4), (37), (39): Xaa is C or S
  MOD_RES (18), (19), (20), (21), (22): Xaa is A or G
  MOD_RES (23), (24), (25), (26): Xaa is A or G or is absent
SPXXVSQDLRSVKIAKVXXXXXXXXXKEVQVMIVKSXKX

SEQ ID NO: 29549 - protein, 32 aa, Artificial Sequence
  Non-cyclic GFR-binding peptide
  MOD_RES (32), (32): Xaa is C or S
APTKLRPVQVRKIDDSSNVIKKATVNMVVRSX

SEQ ID NO: 29550 - protein, 32 aa, Artificial Sequence
  Non-cyclic GFR-binding peptide
VPTEEEPLTMLYYRIKPHQGQHEQLSNFLQHN

SEQ ID NO: 29551 - protein, 36 aa, Artificial Sequence
  Non-cyclic GFR-binding peptide
  MOD_RES (4), (5): Xaa is C or S
PKAXXVPTELSNITMQIMDEYDKVVIGEMSEMVVEG

SEQ ID NO: 29552 - protein, 38 aa, Artificial Sequence
  Non-cyclic GFR-binding peptide
  MOD_RES (3), (37): Xaa is C or S
  MOD_RES (17), (18), (19), (20), (21): Xaa is A or G
  MOD_RES (22), (23), (24), (25): Xaa is A or G or is absent
PTXAPTKLRPVQVRKIXXXXXXXXXKKATVNMVVRSXG

SEQ ID NO: 29553 - protein, 39 aa, Artificial Sequence
  Non-cyclic GFR-binding peptide
  MOD_RES (3), (4), (38): Xaa is C or S
  MOD_RES (18), (19), (20), (21), (22): Xaa is A or G
  MOD_RES (23), (24), (25), (26): Xaa is A or G or is absent
KAXXVPTELRPVQMRKIXXXXXXXXXKKATVEMVVEGXG

SEQ ID NO: 29554 - protein, 36 aa, Artificial Sequence
  Non-cyclic GFR-binding peptide
  MOD_RES (6), (6): Xaa is C or S
VTKPTXAPTKLSNITVQIMDDSSNVIIGEMSNMVVR

SEQ ID NO: 29555 - protein, 40 aa, Artificial Sequence
  Non-cyclic GFR-binding peptide
  MOD_RES (5), (37), (39): Xaa is C or S
TKPTXAPTKLSNITVQIMDDSSNVIIGEMSNMVVRSXGXH

SEQ ID NO: 29556 - protein, 39 aa, Artificial Sequence
  Non-cyclic GFR-binding peptide
  MOD_RES (5), (39): Xaa is C or S
EGLEXVPTEEEPLPMVYYRIKPHQGQHEQLSNFLQHNKX

SEQ ID NO: 29557 - protein, 40 aa, Artificial Sequence
  Non-cyclic GFR-binding peptide
  MOD_RES (37), (39): Xaa is C or S
  MOD_RES (16), (17), (18), (19), (20): Xaa is A or G
  MOD_RES (21), (22), (23), (24): Xaa is A or G or is absent
RPTQVQLEPLPVVYYXXXXXXXXXEQLSNTLEDHLAXKXE

SEQ ID NO: 29558 - protein, 34 aa, Artificial Sequence
  Non-cyclic GFR-binding peptide
  MOD_RES (2), (3), (34): Xaa is C or S
PXXVSQDLRSVKIAKVIGKTPKIKEVQVMIVKSX

SEQ ID NO: 29559 - protein, 42 aa, Artificial Sequence
  Non-cyclic GFR-binding peptide
  MOD_RES (2), (39), (41): Xaa is C or S
QXRPTQVQLEPLPVVYYEIVRKKPIFEQLSNTLEDHLAXKXE

SEQ ID NO: 29560 - protein, 37 aa, Artificial Sequence
  Non-cyclic GFR-binding peptide
  MOD_RES (2), (36): Xaa is C or S
  MOD_RES (16), (17), (18), (19), (20): Xaa is A or G
  MOD_RES (21), (22), (23), (24): Xaa is A or G or is absent
EXVPTEEEPLTMLYYXXXXXXXXXEQLSNFLQHNKXE

SEQ ID NO: 29561 - protein, 35 aa, Artificial Sequence
  Non-cyclic GFR-binding peptide
  MOD_RES (1), (35): Xaa is C or S
  MOD_RES (15), (16), (17), (18), (19): Xaa is A or G
  MOD_RES (20), (21), (22), (23): Xaa is A or G or is absent
XVPTELRPVQMRKIXXXXXXXXXKKATVDMVVEGX

SEQ ID NO: 29562 - protein, 43 aa, Artificial Sequence
  Non-cyclic GFR-binding peptide
  MOD_RES (6), (40), (42): Xaa is C or S
  MOD_RES (20), (21), (22), (23), (24): Xaa is A or G
  MOD_RES (25), (26), (27), (28): Xaa is A or G or is absent
VTKPTXAPTKLSNITVQIMXXXXXXXXXIGEMSNMVVRSXGXH

SEQ ID NO: 29563 - protein, 38 aa, Artificial Sequence
  Non-cyclic GFR-binding peptide
  MOD_RES (2), (3), (37): Xaa is C or S
  MOD_RES (17), (18), (19), (20), (21): Xaa is A or G
  MOD_RES (22), (23), (24), (25): Xaa is A or G or is absent
AXXVPTELRPVQMRKIXXXXXXXXXKKATVDMVVEGXG

SEQ ID NO: 29564 - protein, 36 aa, Artificial Sequence
  Non-cyclic GFR-binding peptide
  MOD_RES (4), (5), (36): Xaa is C or S
ASPXXVSQDLRSVKIAKVIGKTPKIKEVQVMIVKSX

SEQ ID NO: 29565 - protein, 34 aa, Artificial Sequence
  Non-cyclic GFR-binding peptide
  MOD_RES (14), (15), (16), (17), (18): Xaa is A or G
  MOD_RES (19), (20), (21), (22): Xaa is A or G or is absent
TQVQLEPLPVVYYXXXXXXXXXEQLSNTLEDHLA

SEQ ID NO: 29566 - protein, 36 aa, Artificial Sequence
  Non-cyclic GFR-binding peptide
  MOD_RES (1), (2), (33), (35): Xaa is C or S
XXVPQDLRPVQIRKIVGRTPKVKKATVMVVKSXKXS

SEQ ID NO: 29567 - protein, 35 aa, Artificial Sequence
  Non-cyclic GFR-binding peptide
  MOD_RES (1), (32), (34): Xaa is C or S
XVPQALRPVQIRKIVGRKPKVKKATVMIVRSXKXS

SEQ ID NO: 29568 - protein, 39 aa, Artificial Sequence
  Non-cyclic GFR-binding peptide
  MOD_RES (2), (36), (38): Xaa is C or S
EXVPTEEEPLPMVYYRIKPHQGQHEQLSNFLQHNKXEXR

SEQ ID NO: 29569 - protein, 41 aa, Artificial Sequence
  Non-cyclic GFR-binding peptide
  MOD_RES (3), (4), (38), (40): Xaa is C or S
  MOD_RES (18), (19), (20), (21), (22): Xaa is A or G
  MOD_RES (23), (24), (25), (26): Xaa is A or G or is absent
KPXXAPTQLRSVKVAKVXXXXXXXXXKEVQVNMVVRAXGXH

SEQ ID NO: 29570 - protein, 39 aa, Artificial Sequence
  Non-cyclic GFR-binding peptide
  MOD_RES (6), (7): Xaa is C or S
  MOD_RES (21), (22), (23), (24), (25): Xaa is A or G
  MOD_RES (26), (27), (28), (29): Xaa is A or G or is absent
KIPKAXXVPTELRSVKMAKVXXXXXXXXXKEVQVDMVVE

SEQ ID NO: 29571 - protein, 33 aa, Artificial Sequence
  Non-cyclic GFR-binding peptide
TQVQLEPLPVVYYEIVRKKPIFEQLSNTLEDHL

SEQ ID NO: 29572 - protein, 38 aa, Artificial Sequence
  Non-cyclic GFR-binding peptide
  MOD_RES (4), (38): Xaa is C or S
  MOD_RES (18), (19), (20), (21), (22): Xaa is A or G
  MOD_RES (23), (24), (25), (26): Xaa is A or G or is absent
KPTXAPTKLRSVKVAKVXXXXXXXXXKEVQVNMVVRSX

SEQ ID NO: 29573 - protein, 39 aa, Artificial Sequence
  Non-cyclic GFR-binding peptide
  MOD_RES (6), (7), (39): Xaa is C or S
SIPKAXXVPTELRPVQMRKIDEYDKVVKKATVEMVVEGX

SEQ ID NO: 29574 - protein, 38 aa, Artificial Sequence
  Non-cyclic GFR-binding peptide
  MOD_RES (4), (38): Xaa is C or S
  MOD_RES (18), (19), (20), (21), (22): Xaa is A or G
  MOD_RES (23), (24), (25), (26): Xaa is A or G or is absent
GLEXVPTEEEPLPMVYYXXXXXXXXXEQLSNFLQHNKX

SEQ ID NO: 29575 - protein, 34 aa, Artificial Sequence
  Non-cyclic GFR-binding peptide
  MOD_RES (3), (4): Xaa is C or S
KPXXAPTKLRSVKVAKVDDSSNVIKEVQVNMVVR

SEQ ID NO: 29576 - protein, 42 aa, Artificial Sequence
  Non-cyclic GFR-binding peptide
  MOD_RES (6), (7), (39), (41): Xaa is C or S
KIPKAXXVPTELRPVQMRKIDENEKVVKKATVDMVVEGXGXR

SEQ ID NO: 29577 - protein, 41 aa, Artificial Sequence
  Non-cyclic GFR-binding peptide
  MOD_RES (5), (6), (40): Xaa is C or S
  MOD_RES (20), (21), (22), (23), (24): Xaa is A or G
  MOD_RES (25), (26), (27), (28): Xaa is A or G or is absent
VPKPXXAPTQLRPVQVRKIXXXXXXXXXKKATVNMVVRAXG

SEQ ID NO: 29578 - protein, 32 aa, Artificial Sequence
  Non-cyclic GFR-binding peptide
  MOD_RES (32), (32): Xaa is C or S
VPTELSNITMQIMDENEKVVIGEMSDMVVEGX

SEQ ID NO: 29579 - protein, 41 aa, Artificial Sequence
  Non-cyclic GFR-binding peptide
  MOD_RES (6), (40): Xaa is C or S
  MOD_RES (20), (21), (22), (23), (24): Xaa is A or G
  MOD_RES (25), (26), (27), (28): Xaa is A or G or is absent
VTKPTXAPTKLRPVQVRKIXXXXXXXXXKKATVNMVVRSXG

SEQ ID NO: 29580 - protein, 37 aa, Artificial Sequence
  Non-cyclic GFR-binding peptide
  MOD_RES (2), (3), (34), (36): Xaa is C or S
PXXVPQALSNITIQIMVGRKPKVIGEMSMIVRSXKXS

SEQ ID NO: 29581 - protein, 34 aa, Artificial Sequence
  Non-cyclic GFR-binding peptide
  MOD_RES (2), (3): Xaa is C or S
AXXVPTELRSVKMAKVDEYDKVVKEVQVEMVVEG

SEQ ID NO: 29582 - protein, 40 aa, Artificial Sequence
  Non-cyclic GFR-binding peptide
  MOD_RES (3), (4), (38), (40): Xaa is C or S
  MOD_RES (18), (19), (20), (21), (22): Xaa is A or G
  MOD_RES (23), (24), (25), (26): Xaa is A or G or is absent
KPXXAPTQLRSVKVAKVXXXXXXXXXKEVQVNMVVRAXGX

SEQ ID NO: 29583 - protein, 39 aa, Artificial Sequence
  Non-cyclic GFR-binding peptide
  MOD_RES (5), (5): Xaa is C or S
  MOD_RES (21), (22), (23), (24), (25): Xaa is A or G
  MOD_RES (26), (27), (28), (29): Xaa is A or G or is absent
RNVQXRPTQVQLEPLTVLYYXXXXXXXXXEQLSNTLEDH

SEQ ID NO: 29584 - protein, 37 aa, Artificial Sequence
  Non-cyclic GFR-binding peptide
  MOD_RES (1), (34), (36): Xaa is C or S
  MOD_RES (15), (16), (17), (18), (19): Xaa is A or G
  MOD_RES (20), (21), (22), (23): Xaa is A or G or is absent
XVPQDLRSVKIAKVXXXXXXXXXKEVQVMVVKSXKXS

SEQ ID NO: 29585 - protein, 40 aa, Artificial Sequence
  Non-cyclic GFR-binding peptide
  MOD_RES (6), (7), (38), (40): Xaa is C or S
ASAAPXXVPQALRPVQIRKIVGRKPKVKKATVMIVRSXKX

SEQ ID NO: 29586 - protein, 37 aa, Artificial Sequence
  Non-cyclic GFR-binding peptide
  MOD_RES (1), (2), (35), (37): Xaa is C or S
  MOD_RES (16), (17), (18), (19), (20): Xaa is A or G
  MOD_RES (21), (22), (23), (24): Xaa is A or G or is absent
XXVSQDLRSVKIAKVXXXXXXXXXKEVQVMIVKSXKX

SEQ ID NO: 29587 - protein, 38 aa, Artificial Sequence
  Non-cyclic GFR-binding peptide
  MOD_RES (6), (7): Xaa is C or S
KIPKAXXVPTELRPVQMRKIDENEKVVKKATVDMVVEG

SEQ ID NO: 29588 - protein, 36 aa, Artificial Sequence
  Non-cyclic GFR-binding peptide
QPSRVHHEPLTVLYYEYVRKKPKLEQLSNRLEEHLE

SEQ ID NO: 29589 - protein, 33 aa, Artificial Sequence
  Non-cyclic GFR-binding peptide
  MOD_RES (1), (1): Xaa is C or S
  MOD_RES (15), (16), (17), (18), (19): Xaa is A or G
  MOD_RES (20), (21), (22), (23): Xaa is A or G or is absent
XVSQDLRPVQIRKIXXXXXXXXXKKATVMIVKS

SEQ ID NO: 29590 - protein, 39 aa, Artificial Sequence
  Non-cyclic GFR-binding peptide
  MOD_RES (4), (5), (37), (39): Xaa is C or S
PKPXXAPTQLSNITVQIMDDSSNVIIGEMSNMVVRAXGX

SEQ ID NO: 29591 - protein, 34 aa, Artificial Sequence
  Non-cyclic GFR-binding peptide
  MOD_RES (1), (33): Xaa is C or S
XVPTELSNITMQIMDENEKVVIGEMSDMVVEGXG

SEQ ID NO: 29592 - protein, 38 aa, Artificial Sequence
  Non-cyclic GFR-binding peptide
  MOD_RES (3), (3): Xaa is C or S
VKXQPSRVHHEPLTVLYYEYVRKKPKLEQLSNRLEEHL

SEQ ID NO: 29593 - protein, 33 aa, Artificial Sequence
  Non-cyclic GFR-binding peptide
  MOD_RES (32), (32): Xaa is C or S
APTKLSNITVQIMDDSSNVIIGEMSNMVVRSXG

SEQ ID NO: 29594 - protein, 38 aa, Artificial Sequence
  Non-cyclic GFR-binding peptide
  MOD_RES (3), (4), (36), (38): Xaa is C or S
KPXXAPTQLSNITVQIMDDSSNVIIGEMSNMVVRAXGX

SEQ ID NO: 29595 - protein, 40 aa, Artificial Sequence
  Non-cyclic GFR-binding peptide
  MOD_RES (7), (7): Xaa is C or S
  MOD_RES (21), (22), (23), (24), (25): Xaa is A or G
  MOD_RES (26), (27), (28), (29): Xaa is A or G or is absent
HVTKPTXAPTKLRPVQVRKIXXXXXXXXXKKATVNMVVRS

SEQ ID NO: 29596 - protein, 41 aa, Artificial Sequence
  Non-cyclic GFR-binding peptide
  MOD_RES (6), (7), (39), (41): Xaa is C or S
SIPKAXXVPTELRPVQMRKIDEYDKVVKKATVEMVVEGXGX

SEQ ID NO: 29597 - protein, 31 aa, Artificial Sequence
  Non-cyclic GFR-binding peptide
  MOD_RES (1), (1): Xaa is C or S
XVPQDLRSVKIAKVVGRTPKVKEVQVMVVKS

SEQ ID NO: 29598 - protein, 40 aa, Artificial Sequence
  Non-cyclic GFR-binding peptide
  MOD_RES (3), (4), (37), (39): Xaa is C or S
  MOD_RES (18), (19), (20), (21), (22): Xaa is A or G
  MOD_RES (23), (24), (25), (26): Xaa is A or G or is absent
SPXXVSQDLRSVKIAKVXXXXXXXXXKEVQVMIVKSXKXS

SEQ ID NO: 29599 - protein, 38 aa, Artificial Sequence
  Non-cyclic GFR-binding peptide
  MOD_RES (3), (4), (37): Xaa is C or S
  MOD_RES (18), (19), (20), (21), (22): Xaa is A or G
  MOD_RES (23), (24), (25), (26): Xaa is A or G or is absent
APXXVPQALRSVKIAKVXXXXXXXXXKEVQVMIVRSXK

SEQ ID NO: 29600 - protein, 38 aa, Artificial Sequence
  Non-cyclic GFR-binding peptide
  MOD_RES (4), (5), (37): Xaa is C or S
PKPXXAPTKLRSVKVAKVDDSSNVIKEVQVNMVVRSXG

SEQ ID NO: 29601 - protein, 38 aa, Artificial Sequence
  Non-cyclic GFR-binding peptide
  MOD_RES (1), (35), (37): Xaa is C or S
  MOD_RES (15), (16), (17), (18), (19): Xaa is A or G
  MOD_RES (20), (21), (22), (23): Xaa is A or G or is absent
XVPTELSNITMQIMXXXXXXXXXIGEMSEMVVEGXGXR

SEQ ID NO: 29602 - protein, 33 aa, Artificial Sequence
  Non-cyclic GFR-binding peptide
  MOD_RES (2), (3): Xaa is C or S
AXXVPTELSNITMQIMDEYDKVVIGEMSEMVVE

SEQ ID NO: 29603 - protein, 40 aa, Artificial Sequence
  Non-cyclic GFR-binding peptide
  MOD_RES (5), (5): Xaa is C or S
  MOD_RES (21), (22), (23), (24), (25): Xaa is A or G
  MOD_RES (26), (27), (28), (29): Xaa is A or G or is absent
SSVKXQPSRVHHEPLPVVYYXXXXXXXXXEQLSNRLEEHL

SEQ ID NO: 29604 - protein, 35 aa, Artificial Sequence
  Non-cyclic GFR-binding peptide
  MOD_RES (33), (35): Xaa is C or S
  MOD_RES (14), (15), (16), (17), (18): Xaa is A or G
  MOD_RES (19), (20), (21), (22): Xaa is A or G or is absent
VSQDLRPVQIRKIXXXXXXXXXKKATVMIVKSXKX

SEQ ID NO: 29605 - protein, 35 aa, Artificial Sequence
  Non-cyclic GFR-binding peptide
  MOD_RES (1), (34): Xaa is C or S
  MOD_RES (15), (16), (17), (18), (19): Xaa is A or G
  MOD_RES (20), (21), (22), (23): Xaa is A or G or is absent
XVPQALSNITIQIMXXXXXXXXXIGEMSMIVRSXK

SEQ ID NO: 29606 - protein, 39 aa, Artificial Sequence
  Non-cyclic GFR-binding peptide
  MOD_RES (5), (5): Xaa is C or S
RNVQXRPTQVQLEPLTVLYYEIVRKKPIFEQLSNTLEDH

SEQ ID NO: 29607 - protein, 37 aa, Artificial Sequence
  Non-cyclic GFR-binding peptide
  MOD_RES (2), (34), (36): Xaa is C or S
TXAPTKLRPVQVRKIDDSSNVIKKATVNMVVRSXGXH

SEQ ID NO: 29608 - protein, 38 aa, Artificial Sequence
  Non-cyclic GFR-binding peptide
  MOD_RES (5), (6), (38): Xaa is C or S
VPKPXXAPTQLRSVKVAKVDDSSNVIKEVQVNMVVRAX

SEQ ID NO: 29609 - protein, 39 aa, Artificial Sequence
  Non-cyclic GFR-binding peptide
  MOD_RES (4), (5), (36), (38): Xaa is C or S
ASPXXVSQDLRSVKIAKVIGKTPKIKEVQVMIVKSXKXS

SEQ ID NO: 29610 - protein, 39 aa, Artificial Sequence
  Non-cyclic GFR-binding peptide
  MOD_RES (6), (7), (39): Xaa is C or S
YVPKPXXAPTKLRSVKVAKVDDSSNVIKEVQVNMVVRSX

SEQ ID NO: 29611 - protein, 39 aa, Artificial Sequence
  Non-cyclic GFR-binding peptide
  MOD_RES (3), (37), (39): Xaa is C or S
LEXVPTEEEPLPMVYYRIKPHQGQHEQLSNFLQHNKXEX

SEQ ID NO: 29612 - protein, 38 aa, Artificial Sequence
  Non-cyclic GFR-binding peptide
  MOD_RES (3), (3): Xaa is C or S
  MOD_RES (19), (20), (21), (22), (23): Xaa is A or G
  MOD_RES (24), (25), (26), (27): Xaa is A or G or is absent
VQXRPTQVQLEPLPVVYYXXXXXXXXXEQLSNTLEDHL

SEQ ID NO: 29613 - protein, 39 aa, Artificial Sequence
  Non-cyclic GFR-binding peptide
  MOD_RES (5), (6), (39): Xaa is C or S
  MOD_RES (20), (21), (22), (23), (24): Xaa is A or G
  MOD_RES (25), (26), (27), (28): Xaa is A or G or is absent
SASPXXVPQDLRPVQIRKIXXXXXXXXXKKATVMVVKSX

SEQ ID NO: 29614 - protein, 35 aa, Artificial Sequence
  Non-cyclic GFR-binding peptide
  MOD_RES (1), (2), (34): Xaa is C or S
XXAPTQLSNITVQIMDDSSNVIIGEMSNMVVRAXG

SEQ ID NO: 29615 - protein, 32 aa, Artificial Sequence
  Non-cyclic GFR-binding peptide
  MOD_RES (14), (15), (16), (17), (18): Xaa is A or G
  MOD_RES (19), (20), (21), (22): Xaa is A or G or is absent
VPTELRPVQMRKIXXXXXXXXXKKATVEMVVE

SEQ ID NO: 29616 - protein, 37 aa, Artificial Sequence
  Non-cyclic GFR-binding peptide
  MOD_RES (3), (37): Xaa is C or S
  MOD_RES (17), (18), (19), (20), (21): Xaa is A or G
  MOD_RES (22), (23), (24), (25): Xaa is A or G or is absent
PTXAPTKLSNITVQIMXXXXXXXXXIGEMSNMVVRSX

SEQ ID NO: 29617 - protein, 37 aa, Artificial Sequence
  Non-cyclic GFR-binding peptide
  MOD_RES (2), (3), (34), (36): Xaa is C or S
PXXVPQDLRPVQIRKIVGRTPKVKKATVMVVKSXKXS

SEQ ID NO: 29618 - protein, 32 aa, Artificial Sequence
  Non-cyclic GFR-binding peptide
  MOD_RES (14), (15), (16), (17), (18): Xaa is A or G
  MOD_RES (19), (20), (21), (22): Xaa is A or G or is absent
APTKLRSVKVAKVXXXXXXXXXKEVQVNMVVR

SEQ ID NO: 29619 - protein, 34 aa, Artificial Sequence
  Non-cyclic GFR-binding peptide
  MOD_RES (1), (2), (34): Xaa is C or S
XXVPTELRSVKMAKVDENEKVVKEVQVDMVVEGX

SEQ ID NO: 29620 - protein, 39 aa, Artificial Sequence
  Non-cyclic GFR-binding peptide
  MOD_RES (5), (39): Xaa is C or S
  MOD_RES (19), (20), (21), (22), (23): Xaa is A or G
  MOD_RES (24), (25), (26), (27): Xaa is A or G or is absent
EGLEXVPTEEEPLPMVYYXXXXXXXXXEQLSNFLQHNKX

SEQ ID NO: 29621 - protein, 36 aa, Artificial Sequence
  Non-cyclic GFR-binding peptide
  MOD_RES (2), (3), (36): Xaa is C or S
  MOD_RES (17), (18), (19), (20), (21): Xaa is A or G
  MOD_RES (22), (23), (24), (25): Xaa is A or G or is absent
PXXVSQDLRSVKIAKVXXXXXXXXXKEVQVMIVKSX

SEQ ID NO: 29622 - protein, 41 aa, Artificial Sequence
  Non-cyclic GFR-binding peptide
  MOD_RES (4), (5), (39), (41): Xaa is C or S
  MOD_RES (19), (20), (21), (22), (23): Xaa is A or G
  MOD_RES (24), (25), (26), (27): Xaa is A or G or is absent
PKPXXAPTQLRSVKVAKVXXXXXXXXXKEVQVNMVVRAXGX

SEQ ID NO: 29623 - protein, 37 aa, Artificial Sequence
  Non-cyclic GFR-binding peptide
  MOD_RES (1), (35), (37): Xaa is C or S
  MOD_RES (15), (16), (17), (18), (19): Xaa is A or G
  MOD_RES (20), (21), (22), (23): Xaa is A or G or is absent
XVPTELRSVKMAKVXXXXXXXXXKEVQVDMVVEGXGX

SEQ ID NO: 29624 - protein, 39 aa, Artificial Sequence
  Non-cyclic GFR-binding peptide
  MOD_RES (5), (6): Xaa is C or S
  MOD_RES (20), (21), (22), (23), (24): Xaa is A or G
  MOD_RES (25), (26), (27), (28): Xaa is A or G or is absent
IPKAXXVPTELRSVKMAKVXXXXXXXXXKEVQVEMVVEG

SEQ ID NO: 29625 - protein, 37 aa, Artificial Sequence
  Non-cyclic GFR-binding peptide
  MOD_RES (3), (3): Xaa is C or S
VQXRPTQVQLEPLPVVYYEIVRKKPIFEQLSNTLEDH

SEQ ID NO: 29626 - protein, 37 aa, Artificial Sequence
  Non-cyclic GFR-binding peptide
  MOD_RES (1), (2), (35), (37): Xaa is C or S
  MOD_RES (16), (17), (18), (19), (20): Xaa is A or G
  MOD_RES (21), (22), (23), (24): Xaa is A or G or is absent
XXVPQALRPVQIRKIXXXXXXXXXKKATVMIVRSXKX

SEQ ID NO: 29627 - protein, 40 aa, Artificial Sequence
  Non-cyclic GFR-binding peptide
  MOD_RES (5), (6), (38), (40): Xaa is C or S
IPKAXXVPTELSNITMQIMDEYDKVVIGEMSEMVVEGXGX

SEQ ID NO: 29628 - protein, 42 aa, Artificial Sequence
  Non-cyclic GFR-binding peptide
  MOD_RES (5), (39), (41): Xaa is C or S
EGLEXVPTEEEPLTMLYYRIKPHQGQHEQLSNFLQHNKXEXR

SEQ ID NO: 29629 - protein, 35 aa, Artificial Sequence
  Non-cyclic GFR-binding peptide
  MOD_RES (4), (4): Xaa is C or S
KPTXAPTKLRSVKVAKVDDSSNVIKEVQVNMVVRS

SEQ ID NO: 29630 - protein, 38 aa, Artificial Sequence
  Non-cyclic GFR-binding peptide
  MOD_RES (5), (5): Xaa is C or S
  MOD_RES (19), (20), (21), (22), (23): Xaa is A or G
  MOD_RES (24), (25), (26), (27): Xaa is A or G or is absent
TKPTXAPTKLSNITVQIMXXXXXXXXXIGEMSNMVVRS

SEQ ID NO: 29631 - protein, 40 aa, Artificial Sequence
  Non-cyclic GFR-binding peptide
  MOD_RES (4), (5), (39): Xaa is C or S
  MOD_RES (19), (20), (21), (22), (23): Xaa is A or G
  MOD_RES (24), (25), (26), (27): Xaa is A or G or is absent
PKPXXAPTKLSNITVQIMXXXXXXXXXIGEMSNMVVRSXG

SEQ ID NO: 29632 - protein, 41 aa, Artificial Sequence
  Non-cyclic GFR-binding peptide
  MOD_RES (2), (39), (41): Xaa is C or S
  MOD_RES (18), (19), (20), (21), (22): Xaa is A or G
  MOD_RES (23), (24), (25), (26): Xaa is A or G or is absent
QXRPTQVQLEPLTVLYYXXXXXXXXXEQLSNTLEDHLAXKX

SEQ ID NO: 29633 - protein, 43 aa, Artificial Sequence
  Non-cyclic GFR-binding peptide
  MOD_RES (5), (42): Xaa is C or S
SSVKXQPSRVHHEPLPVVYYEYVRKKPKLEQLSNRLEEHLEXA

SEQ ID NO: 29634 - protein, 35 aa, Artificial Sequence
  Non-cyclic GFR-binding peptide
  MOD_RES (16), (17), (18), (19), (20): Xaa is A or G
  MOD_RES (21), (22), (23), (24): Xaa is A or G or is absent
QPSRVHHEPLPVVYYXXXXXXXXXEQLSNRLEEHL

SEQ ID NO: 29635 - protein, 31 aa, Artificial Sequence
  Non-cyclic GFR-binding peptide
  MOD_RES (1), (1): Xaa is C or S
XAPTQLSNITVQIMDDSSNVIIGEMSNMVVR

SEQ ID NO: 29636 - protein, 38 aa, Artificial Sequence
  Non-cyclic GFR-binding peptide
  MOD_RES (1), (35), (37): Xaa is C or S
  MOD_RES (15), (16), (17), (18), (19): Xaa is A or G
  MOD_RES (20), (21), (22), (23): Xaa is A or G or is absent
XVPTEEEPLPMVYYXXXXXXXXXEQLSNFLQHNKXEXR

SEQ ID NO: 29637 - protein, 41 aa, Artificial Sequence
  Non-cyclic GFR-binding peptide
  MOD_RES (3), (4), (38), (40): Xaa is C or S
  MOD_RES (18), (19), (20), (21), (22): Xaa is A or G
  MOD_RES (23), (24), (25), (26): Xaa is A or G or is absent
KAXXVPTELRSVKMAKVXXXXXXXXXKEVQVEMVVEGXGXR

SEQ ID NO: 29638 - protein, 38 aa, Artificial Sequence
  Non-cyclic GFR-binding peptide
  MOD_RES (5), (6), (38): Xaa is C or S
VPKPXXAPTKLRPVQVRKIDDSSNVIKKATVNMVVRSX

SEQ ID NO: 29639 - protein, 40 aa, Artificial Sequence
  Non-cyclic GFR-binding peptide
  MOD_RES (37), (39): Xaa is C or S
QPSRVHHEPLPVVYYEYVRKKPKLEQLSNRLEEHLEXAXA

SEQ ID NO: 29640 - protein, 33 aa, Artificial Sequence
  Non-cyclic GFR-binding peptide
  MOD_RES (1), (32): Xaa is C or S
XVPQALRPVQIRKIVGRKPKVKKATVMIVRSXK

SEQ ID NO: 29641 - protein, 35 aa, Artificial Sequence
  Non-cyclic GFR-binding peptide
  MOD_RES (3), (4): Xaa is C or S
KAXXVPTELSNITMQIMDEYDKVVIGEMSEMVVEG

SEQ ID NO: 29642 - protein, 37 aa, Artificial Sequence
  Non-cyclic GFR-binding peptide
  MOD_RES (2), (3), (36): Xaa is C or S
  MOD_RES (17), (18), (19), (20), (21): Xaa is A or G
  MOD_RES (22), (23), (24), (25): Xaa is A or G or is absent
PXXVPQALRSVKIAKVXXXXXXXXXKEVQVMIVRSXK

SEQ ID NO: 29643 - protein, 38 aa, Artificial Sequence
  Non-cyclic GFR-binding peptide
  MOD_RES (2), (3), (37): Xaa is C or S
  MOD_RES (17), (18), (19), (20), (21): Xaa is A or G
  MOD_RES (22), (23), (24), (25): Xaa is A or G or is absent
PXXAPTQLRPVQVRKIXXXXXXXXXKKATVNMVVRAXG

SEQ ID NO: 29644 - protein, 37 aa, Artificial Sequence
  Non-cyclic GFR-binding peptide
  MOD_RES (37), (37): Xaa is C or S
QPSRVHHEPLPVVYYEYVRKKPKLEQLSNRLEEHLEX

SEQ ID NO: 29645 - protein, 36 aa, Artificial Sequence
  Non-cyclic GFR-binding peptide
  MOD_RES (34), (36): Xaa is C or S
  MOD_RES (14), (15), (16), (17), (18): Xaa is A or G
  MOD_RES (19), (20), (21), (22): Xaa is A or G or is absent
APTKLRPVQVRKIXXXXXXXXXKKATVNMVVRSXGX

SEQ ID NO: 29646 - protein, 38 aa, Artificial Sequence
  Non-cyclic GFR-binding peptide
  MOD_RES (35), (37): Xaa is C or S
TQVQLEPLTVLYYEIVRKKPIFEQLSNTLEDHLAXKXE

SEQ ID NO: 29647 - protein, 33 aa, Artificial Sequence
  Non-cyclic GFR-binding peptide
  MOD_RES (1), (1): Xaa is C or S
  MOD_RES (15), (16), (17), (18), (19): Xaa is A or G
  MOD_RES (20), (21), (22), (23): Xaa is A or G or is absent
XVPTELRSVKMAKVXXXXXXXXXKEVQVEMVVE

SEQ ID NO: 29648 - protein, 36 aa, Artificial Sequence
  Non-cyclic GFR-binding peptide
  MOD_RES (3), (4): Xaa is C or S
  MOD_RES (18), (19), (20), (21), (22): Xaa is A or G
  MOD_RES (23), (24), (25), (26): Xaa is A or G or is absent
KAXXVPTELSNITMQIMXXXXXXXXXIGEMSEMVVE

SEQ ID NO: 29649 - protein, 39 aa, Artificial Sequence
  Non-cyclic GFR-binding peptide
  MOD_RES (5), (5): Xaa is C or S
RNVQXRPTQVQLEPLPVVYYEIVRKKPIFEQLSNTLEDH

SEQ ID NO: 29650 - protein, 39 aa, Artificial Sequence
  Non-cyclic GFR-binding peptide
  MOD_RES (4), (5), (37), (39): Xaa is C or S
PKPXXAPTKLSNITVQIMDDSSNVIIGEMSNMVVRSXGX

SEQ ID NO: 29651 - protein, 33 aa, Artificial Sequence
  Non-cyclic GFR-binding peptide
  MOD_RES (1), (1): Xaa is C or S
  MOD_RES (15), (16), (17), (18), (19): Xaa is A or G
  MOD_RES (20), (21), (22), (23): Xaa is A or G or is absent
XVPTELRPVQMRKIXXXXXXXXXKKATVEMVVE

SEQ ID NO: 29652 - protein, 31 aa, Artificial Sequence
  Non-cyclic GFR-binding peptide
  MOD_RES (1), (1): Xaa is C or S
XVSQDLRPVQIRKIIGKTPKIKKATVMIVKS

SEQ ID NO: 29653 - protein, 40 aa, Artificial Sequence
  Non-cyclic GFR-binding peptide
  MOD_RES (5), (39): Xaa is C or S
  MOD_RES (19), (20), (21), (22), (23): Xaa is A or G
  MOD_RES (24), (25), (26), (27): Xaa is A or G or is absent
TKPTXAPTKLRSVKVAKVXXXXXXXXXKEVQVNMVVRSXG

SEQ ID NO: 29654 - protein, 36 aa, Artificial Sequence
  Non-cyclic GFR-binding peptide
  MOD_RES (1), (2), (35): Xaa is C or S
  MOD_RES (16), (17), (18), (19), (20): Xaa is A or G
  MOD_RES (21), (22), (23), (24): Xaa is A or G or is absent
XXVSQDLRPVQIRKIXXXXXXXXXKKATVMIVKSXK

SEQ ID NO: 29655 - protein, 37 aa, Artificial Sequence
  Non-cyclic GFR-binding peptide
  MOD_RES (4), (5): Xaa is C or S
  MOD_RES (19), (20), (21), (22), (23): Xaa is A or G
  MOD_RES (24), (25), (26), (27): Xaa is A or G or is absent
PKPXXAPTQLRSVKVAKVXXXXXXXXXKEVQVNMVVR

SEQ ID NO: 29656 - protein, 32 aa, Artificial Sequence
  Non-cyclic GFR-binding peptide
  MOD_RES (14), (15), (16), (17), (18): Xaa is A or G
  MOD_RES (19), (20), (21), (22): Xaa is A or G or is absent
VPQALRPVQIRKIXXXXXXXXXKKATVMIVRS

SEQ ID NO: 29657 - protein, 37 aa, Artificial Sequence
  Non-cyclic GFR-binding peptide
  MOD_RES (35), (37): Xaa is C or S
SRVHHEPLPVVYYEYVRKKPKLEQLSNRLEEHLEXAX

SEQ ID NO: 29658 - protein, 36 aa, Artificial Sequence
  Non-cyclic GFR-binding peptide
  MOD_RES (3), (4), (36): Xaa is C or S
KAXXVPTELRPVQMRKIDEYDKVVKKATVEMVVEGX

SEQ ID NO: 29659 - protein, 39 aa, Artificial Sequence
  Non-cyclic GFR-binding peptide
  MOD_RES (3), (4), (38): Xaa is C or S
  MOD_RES (18), (19), (20), (21), (22): Xaa is A or G
  MOD_RES (23), (24), (25), (26): Xaa is A or G or is absent
KPXXAPTKLSNITVQIMXXXXXXXXXIGEMSNMVVRSXG

SEQ ID NO: 29660 - protein, 41 aa, Artificial Sequence
  Non-cyclic GFR-binding peptide
  MOD_RES (5), (6), (39), (41): Xaa is C or S
  MOD_RES (20), (21), (22), (23), (24): Xaa is A or G
  MOD_RES (25), (26), (27), (28): Xaa is A or G or is absent
SASPXXVSQDLSNITIQIMXXXXXXXXXIGEMSMIVKSXKX

SEQ ID NO: 29661 - protein, 38 aa, Artificial Sequence
  Non-cyclic GFR-binding peptide
  MOD_RES (4), (5), (38): Xaa is C or S
  MOD_RES (19), (20), (21), (22), (23): Xaa is A or G
  MOD_RES (24), (25), (26), (27): Xaa is A or G or is absent
ASPXXVPQDLRSVKIAKVXXXXXXXXXKEVQVMVVKSX

SEQ ID NO: 29662 - protein, 40 aa, Artificial Sequence
  Non-cyclic GFR-binding peptide
  MOD_RES (4), (5), (37), (39): Xaa is C or S
PKAXXVPTELSNITMQIMDEYDKVVIGEMSEMVVEGXGXR

SEQ ID NO: 29663 - protein, 34 aa, Artificial Sequence
  Non-cyclic GFR-binding peptide
  MOD_RES (34), (34): Xaa is C or S
  MOD_RES (14), (15), (16), (17), (18): Xaa is A or G
  MOD_RES (19), (20), (21), (22): Xaa is A or G or is absent
APTKLRSVKVAKVXXXXXXXXXKEVQVNMVVRSX

SEQ ID NO: 29664 - protein, 37 aa, Artificial Sequence
  Non-cyclic GFR-binding peptide
  MOD_RES (34), (36): Xaa is C or S
  MOD_RES (14), (15), (16), (17), (18): Xaa is A or G
  MOD_RES (19), (20), (21), (22): Xaa is A or G or is absent
APTQLSNITVQIMXXXXXXXXXIGEMSNMVVRAXGXH

SEQ ID NO: 29665 - protein, 42 aa, Artificial Sequence
  Non-cyclic GFR-binding peptide
  MOD_RES (6), (40), (42): Xaa is C or S
  MOD_RES (20), (21), (22), (23), (24): Xaa is A or G
  MOD_RES (25), (26), (27), (28): Xaa is A or G or is absent
VTKPTXAPTKLSNITVQIMXXXXXXXXXIGEMSNMVVRSXGX

SEQ ID NO: 29666 - protein, 39 aa, Artificial Sequence
  Non-cyclic GFR-binding peptide
  MOD_RES (6), (38): Xaa is C or S
VTKPTXAPTKLRSVKVAKVDDSSNVIKEVQVNMVVRSXG

SEQ ID NO: 29667 - protein, 37 aa, Artificial Sequence
  Non-cyclic GFR-binding peptide
  MOD_RES (3), (4): Xaa is C or S
  MOD_RES (18), (19), (20), (21), (22): Xaa is A or G
  MOD_RES (23), (24), (25), (26): Xaa is A or G or is absent
KPXXAPTKLRSVKVAKVXXXXXXXXXKEVQVNMVVRS

SEQ ID NO: 29668 - protein, 41 aa, Artificial Sequence
  Non-cyclic GFR-binding peptide
  MOD_RES (6), (38), (40): Xaa is C or S
VTKPTXAPTKLRSVKVAKVDDSSNVIKEVQVNMVVRSXGXH

SEQ ID NO: 29669 - protein, 38 aa, Artificial Sequence
  Non-cyclic GFR-binding peptide
  MOD_RES (3), (4), (37): Xaa is C or S
  MOD_RES (18), (19), (20), (21), (22): Xaa is A or G
  MOD_RES (23), (24), (25), (26): Xaa is A or G or is absent
SPXXVSQDLRSVKIAKVXXXXXXXXXKEVQVMIVKSXK

SEQ ID NO: 29670 - protein, 40 aa, Artificial Sequence
  Non-cyclic GFR-binding peptide
  MOD_RES (6), (7): Xaa is C or S
  MOD_RES (21), (22), (23), (24), (25): Xaa is A or G
  MOD_RES (26), (27), (28), (29): Xaa is A or G or is absent
KIPKAXXVPTELRSVKMAKVXXXXXXXXXKEVQVDMVVEG

SEQ ID NO: 29671 - protein, 35 aa, Artificial Sequence
  Non-cyclic GFR-binding peptide
  MOD_RES (32), (34): Xaa is C or S
APTKLRSVKVAKVDDSSNVIKEVQVNMVVRSXGXH

SEQ ID NO: 29672 - protein, 39 aa, Artificial Sequence
  Non-cyclic GFR-binding peptide
  MOD_RES (1), (38): Xaa is C or S
  MOD_RES (17), (18), (19), (20), (21): Xaa is A or G
  MOD_RES (22), (23), (24), (25): Xaa is A or G or is absent
XQPSRVHHEPLTVLYYXXXXXXXXXEQLSNRLEEHLEXA

SEQ ID NO: 29673 - protein, 37 aa, Artificial Sequence
  Non-cyclic GFR-binding peptide
  MOD_RES (7), (7): Xaa is C or S
HVTKPTXAPTKLRSVKVAKVDDSSNVIKEVQVNMVVR

SEQ ID NO: 29674 - protein, 37 aa, Artificial Sequence
  Non-cyclic GFR-binding peptide
  MOD_RES (37), (37): Xaa is C or S
RPTQVQLEPLPVVYYEIVRKKPIFEQLSNTLEDHLAX

SEQ ID NO: 29675 - protein, 40 aa, Artificial Sequence
  Non-cyclic GFR-binding peptide
  MOD_RES (4), (5), (39): Xaa is C or S
  MOD_RES (19), (20), (21), (22), (23): Xaa is A or G
  MOD_RES (24), (25), (26), (27): Xaa is A or G or is absent
PKAXXVPTELRPVQMRKIXXXXXXXXXKKATVEMVVEGXG

SEQ ID NO: 29676 - protein, 39 aa, Artificial Sequence
  Non-cyclic GFR-binding peptide
  MOD_RES (5), (39): Xaa is C or S
  MOD_RES (19), (20), (21), (22), (23): Xaa is A or G
  MOD_RES (24), (25), (26), (27): Xaa is A or G or is absent
TKPTXAPTKLRSVKVAKVXXXXXXXXXKEVQVNMVVRSX

SEQ ID NO: 29677 - protein, 38 aa, Artificial Sequence
  Non-cyclic GFR-binding peptide
  MOD_RES (2), (2): Xaa is C or S
QXRPTQVQLEPLTVLYYEIVRKKPIFEQLSNTLEDHLA

SEQ ID NO: 29678 - protein, 37 aa, Artificial Sequence
  Non-cyclic GFR-binding peptide
  MOD_RES (4), (5): Xaa is C or S
  MOD_RES (19), (20), (21), (22), (23): Xaa is A or G
  MOD_RES (24), (25), (26), (27): Xaa is A or G or is absent
PKAXXVPTELSNITMQIMXXXXXXXXXIGEMSDMVVE

SEQ ID NO: 29679 - protein, 34 aa, Artificial Sequence
  Non-cyclic GFR-binding peptide
  MOD_RES (2), (3), (34): Xaa is C or S
PXXVPQALSNITIQIMVGRKPKVIGEMSMIVRSX

SEQ ID NO: 29680 - protein, 36 aa, Artificial Sequence
  Non-cyclic GFR-binding peptide
  MOD_RES (1), (35): Xaa is C or S
  MOD_RES (15), (16), (17), (18), (19): Xaa is A or G
  MOD_RES (20), (21), (22), (23): Xaa is A or G or is absent
XAPTKLRSVKVAKVXXXXXXXXXKEVQVNMVVRSXG

SEQ ID NO: 29681 - protein, 37 aa, Artificial Sequence
  Non-cyclic GFR-binding peptide
  MOD_RES (5), (6): Xaa is C or S
VPKPXXAPTKLSNITVQIMDDSSNVIIGEMSNMVVRS

SEQ ID NO: 29682 - protein, 35 aa, Artificial Sequence
  Non-cyclic GFR-binding peptide
  MOD_RES (4), (5): Xaa is C or S
PKPXXAPTQLSNITVQIMDDSSNVIIGEMSNMVVR

SEQ ID NO: 29683 - protein, 38 aa, Artificial Sequence
  Non-cyclic GFR-binding peptide
  MOD_RES (37), (37): Xaa is C or S
RPTQVQLEPLPVVYYEIVRKKPIFEQLSNTLEDHLAXK

SEQ ID NO: 29684 - protein, 34 aa, Artificial Sequence
  Non-cyclic GFR-binding peptide
  MOD_RES (1), (1): Xaa is C or S
  MOD_RES (15), (16), (17), (18), (19): Xaa is A or G
  MOD_RES (20), (21), (22), (23): Xaa is A or G or is absent
XAPTKLSNITVQIMXXXXXXXXXIGEMSNMVVRS

SEQ ID NO: 29685 - protein, 37 aa, Artificial Sequence
  Non-cyclic GFR-binding peptide
  MOD_RES (1), (2), (36): Xaa is C or S
  MOD_RES (16), (17), (18), (19), (20): Xaa is A or G
  MOD_RES (21), (22), (23), (24): Xaa is A or G or is absent
XXAPTQLRPVQVRKIXXXXXXXXXKKATVNMVVRAXG

SEQ ID NO: 29686 - protein, 40 aa, Artificial Sequence
  Non-cyclic GFR-binding peptide
  MOD_RES (6), (7), (39): Xaa is C or S
KIPKAXXVPTELRPVQMRKIDENEKVVKKATVDMVVEGXG

SEQ ID NO: 29687 - protein, 42 aa, Artificial Sequence
  Non-cyclic GFR-binding peptide
  MOD_RES (6), (7), (41): Xaa is C or S
  MOD_RES (21), (22), (23), (24), (25): Xaa is A or G
  MOD_RES (26), (27), (28), (29): Xaa is A or G or is absent
KIPKAXXVPTELRSVKMAKVXXXXXXXXXKEVQVDMVVEGXG

SEQ ID NO: 29688 - protein, 39 aa, Artificial Sequence
  Non-cyclic GFR-binding peptide
  MOD_RES (1), (2), (36), (38): Xaa is C or S
  MOD_RES (16), (17), (18), (19), (20): Xaa is A or G
  MOD_RES (21), (22), (23), (24): Xaa is A or G or is absent
XXVPTELRPVQMRKIXXXXXXXXXKKATVDMVVEGXGXR

SEQ ID NO: 29689 - protein, 41 aa, Artificial Sequence
  Non-cyclic GFR-binding peptide
  MOD_RES (2), (39), (41): Xaa is C or S
QXRPTQVQLEPLTVLYYEIVRKKPIFEQLSNTLEDHLAXKX

SEQ ID NO: 29690 - protein, 33 aa, Artificial Sequence
  Non-cyclic GFR-binding peptide
  MOD_RES (1), (2): Xaa is C or S
XXAPTQLRPVQVRKIDDSSNVIKKATVNMVVRA

SEQ ID NO: 29691 - protein, 37 aa, Artificial Sequence
  Non-cyclic GFR-binding peptide
  MOD_RES (1), (2), (36): Xaa is C or S
  MOD_RES (16), (17), (18), (19), (20): Xaa is A or G
  MOD_RES (21), (22), (23), (24): Xaa is A or G or is absent
XXVPTELRPVQMRKIXXXXXXXXXKKATVDMVVEGXG

SEQ ID NO: 29692 - protein, 35 aa, Artificial Sequence
  Non-cyclic GFR-binding peptide
  MOD_RES (2), (3), (35): Xaa is C or S
PXXAPTQLRPVQVRKIDDSSNVIKKATVNMVVRAX

SEQ ID NO: 29693 - protein, 39 aa, Artificial Sequence
  Non-cyclic GFR-binding peptide
  MOD_RES (5), (6): Xaa is C or S
  MOD_RES (20), (21), (22), (23), (24): Xaa is A or G
  MOD_RES (25), (26), (27), (28): Xaa is A or G or is absent
IPKAXXVPTELRPVQMRKIXXXXXXXXXKKATVEMVVEG

SEQ ID NO: 29694 - protein, 38 aa, Artificial Sequence
  Non-cyclic GFR-binding peptide
  MOD_RES (35), (37): Xaa is C or S
  MOD_RES (14), (15), (16), (17), (18): Xaa is A or G
  MOD_RES (19), (20), (21), (22): Xaa is A or G or is absent
TQVQLEPLTVLYYXXXXXXXXXEQLSNTLEDHLAXKXE

SEQ ID NO: 29695 - protein, 33 aa, Artificial Sequence
  Non-cyclic GFR-binding peptide
  MOD_RES (1), (33): Xaa is C or S
XAPTQLSNITVQIMDDSSNVIIGEMSNMVVRAX

SEQ ID NO: 29696 - protein, 35 aa, Artificial Sequence
  Non-cyclic GFR-binding peptide
  MOD_RES (2), (3), (35): Xaa is C or S
AXXVPTELRPVQMRKIDENEKVVKKATVDMVVEGX

SEQ ID NO: 29697 - protein, 40 aa, Artificial Sequence
  Non-cyclic GFR-binding peptide
  MOD_RES (5), (6), (39): Xaa is C or S
  MOD_RES (20), (21), (22), (23), (24): Xaa is A or G
  MOD_RES (25), (26), (27), (28): Xaa is A or G or is absent
SAAPXXVPQALRPVQIRKIXXXXXXXXXKKATVMIVRSXK

SEQ ID NO: 29698 - protein, 44 aa, Artificial Sequence
  Non-cyclic GFR-binding peptide
  MOD_RES (5), (42), (44): Xaa is C or S
SSVKXQPSRVHHEPLPVVYYEYVRKKPKLEQLSNRLEEHLEXAX

SEQ ID NO: 29699 - protein, 40 aa, Artificial Sequence
  Non-cyclic GFR-binding peptide
  MOD_RES (7), (7): Xaa is C or S
  MOD_RES (21), (22), (23), (24), (25): Xaa is A or G
  MOD_RES (26), (27), (28), (29): Xaa is A or G or is absent
HVTKPTXAPTKLRSVKVAKVXXXXXXXXXKEVQVNMVVRS

SEQ ID NO: 29700 - protein, 35 aa, Artificial Sequence
  Non-cyclic GFR-binding peptide
  MOD_RES (34), (34): Xaa is C or S
  MOD_RES (14), (15), (16), (17), (18): Xaa is A or G
  MOD_RES (19), (20), (21), (22): Xaa is A or G or is absent
VPTEEEPLTMLYYXXXXXXXXXEQLSNFLQHNKXE

SEQ ID NO: 29701 - protein, 43 aa, Artificial Sequence
  Non-cyclic GFR-binding peptide
  MOD_RES (4), (41), (43): Xaa is C or S
SVKXQPSRVHHEPLPVVYYEYVRKKPKLEQLSNRLEEHLEXAX

SEQ ID NO: 29702 - protein, 35 aa, Artificial Sequence
  Non-cyclic GFR-binding peptide
  MOD_RES (1), (2), (34): Xaa is C or S
XXVPTELRPVQMRKIDEYDKVVKKATVEMVVEGXG

SEQ ID NO: 29703 - protein, 37 aa, Artificial Sequence
  Non-cyclic GFR-binding peptide
  MOD_RES (34), (36): Xaa is C or S
  MOD_RES (14), (15), (16), (17), (18): Xaa is A or G
  MOD_RES (19), (20), (21), (22): Xaa is A or G or is absent
VPTELRPVQMRKIXXXXXXXXXKKATVDMVVEGXGXR

SEQ ID NO: 29704 - protein, 40 aa, Artificial Sequence
  Non-cyclic GFR-binding peptide
  MOD_RES (2), (39): Xaa is C or S
  MOD_RES (18), (19), (20), (21), (22): Xaa is A or G
  MOD_RES (23), (24), (25), (26): Xaa is A or G or is absent
QXRPTQVQLEPLTVLYYXXXXXXXXXEQLSNTLEDHLAXK

SEQ ID NO: 29705 - protein, 37 aa, Artificial Sequence
  Non-cyclic GFR-binding peptide
  MOD_RES (3), (3): Xaa is C or S
VQXRPTQVQLEPLTVLYYEIVRKKPIFEQLSNTLEDH

SEQ ID NO: 29706 - protein, 38 aa, Artificial Sequence
  Non-cyclic GFR-binding peptide
  MOD_RES (5), (6): Xaa is C or S
  MOD_RES (20), (21), (22), (23), (24): Xaa is A or G
  MOD_RES (25), (26), (27), (28): Xaa is A or G or is absent
VPKPXXAPTKLRSVKVAKVXXXXXXXXXKEVQVNMVVR

SEQ ID NO: 29707 - protein, 42 aa, Artificial Sequence
  Non-cyclic GFR-binding peptide
  MOD_RES (5), (6), (40), (42): Xaa is C or S
  MOD_RES (20), (21), (22), (23), (24): Xaa is A or G
  MOD_RES (25), (26), (27), (28): Xaa is A or G or is absent
IPKAXXVPTELSNITMQIMXXXXXXXXXIGEMSDMVVEGXGX

SEQ ID NO: 29708 - protein, 43 aa, Artificial Sequence
  Non-cyclic GFR-binding peptide
  MOD_RES (7), (41), (43): Xaa is C or S
NDEGLEXVPTEEEPLPMVYYRIKPHQGQHEQLSNFLQHNKXEX

SEQ ID NO: 29709 - protein, 42 aa, Artificial Sequence
  Non-cyclic GFR-binding peptide
  MOD_RES (4), (41): Xaa is C or S
  MOD_RES (20), (21), (22), (23), (24): Xaa is A or G
  MOD_RES (25), (26), (27), (28): Xaa is A or G or is absent
SVKXQPSRVHHEPLPVVYYXXXXXXXXXEQLSNRLEEHLEXA

SEQ ID NO: 29710 - protein, 40 aa, Artificial Sequence
  Non-cyclic GFR-binding peptide
  MOD_RES (4), (4): Xaa is C or S
NVQXRPTQVQLEPLTVLYYEIVRKKPIFEQLSNTLEDHLA

SEQ ID NO: 29711 - protein, 41 aa, Artificial Sequence
  Non-cyclic GFR-binding peptide
  MOD_RES (7), (41): Xaa is C or S
  MOD_RES (21), (22), (23), (24), (25): Xaa is A or G
  MOD_RES (26), (27), (28), (29): Xaa is A or G or is absent
HVTKPTXAPTKLRPVQVRKIXXXXXXXXXKKATVNMVVRSX

SEQ ID NO: 29712 - protein, 42 aa, Artificial Sequence
  Non-cyclic GFR-binding peptide
  MOD_RES (6), (7), (40), (42): Xaa is C or S
  MOD_RES (21), (22), (23), (24), (25): Xaa is A or G
  MOD_RES (26), (27), (28), (29): Xaa is A or G or is absent
ASASPXXVPQDLRPVQIRKIXXXXXXXXXKKATVMVVKSXKX

SEQ ID NO: 29713 - protein, 33 aa, Artificial Sequence
  Non-cyclic GFR-binding peptide
  MOD_RES (1), (2), (33): Xaa is C or S
XXVPQDLRSVKIAKVVGRTPKVKEVQVMVVKSX

SEQ ID NO: 29714 - protein, 38 aa, Artificial Sequence
  Non-cyclic GFR-binding peptide
  MOD_RES (4), (5), (37): Xaa is C or S
PKAXXVPTELRSVKMAKVDENEKVVKEVQVDMVVEGXG

SEQ ID NO: 29715 - protein, 35 aa, Artificial Sequence
  Non-cyclic GFR-binding peptide
  MOD_RES (3), (4), (35): Xaa is C or S
APXXVPQALRPVQIRKIVGRKPKVKKATVMIVRSX

SEQ ID NO: 29716 - protein, 32 aa, Artificial Sequence
  Non-cyclic GFR-binding peptide
  MOD_RES (31), (31): Xaa is C or S
VPQALRPVQIRKIVGRKPKVKKATVMIVRSXK

SEQ ID NO: 29717 - protein, 38 aa, Artificial Sequence
  Non-cyclic GFR-binding peptide
  MOD_RES (3), (4), (35), (37): Xaa is C or S
SPXXVPQDLRPVQIRKIVGRTPKVKKATVMVVKSXKXS

SEQ ID NO: 29718 - protein, 34 aa, Artificial Sequence
  Non-cyclic GFR-binding peptide
  MOD_RES (1), (2), (34): Xaa is C or S
XXAPTQLRSVKVAKVDDSSNVIKEVQVNMVVRAX

SEQ ID NO: 29719 - protein, 33 aa, Artificial Sequence
  Non-cyclic GFR-binding peptide
  MOD_RES (2), (3): Xaa is C or S
PXXVPQALRPVQIRKIVGRKPKVKKATVMIVRS

SEQ ID NO: 29720 - protein, 39 aa, Artificial Sequence
  Non-cyclic GFR-binding peptide
  MOD_RES (3), (4), (36), (38): Xaa is C or S
KPXXAPTKLRSVKVAKVDDSSNVIKEVQVNMVVRSXGXH

SEQ ID NO: 29721 - protein, 41 aa, Artificial Sequence
  Non-cyclic GFR-binding peptide
  MOD_RES (5), (6), (39), (41): Xaa is C or S
  MOD_RES (20), (21), (22), (23), (24): Xaa is A or G
  MOD_RES (25), (26), (27), (28): Xaa is A or G or is absent
SAAPXXVPQALSNITIQIMXXXXXXXXXIGEMSMIVRSXKX

SEQ ID NO: 29722 - protein, 42 aa, Artificial Sequence
  Non-cyclic GFR-binding peptide
  MOD_RES (3), (40), (42): Xaa is C or S
VKXQPSRVHHEPLTVLYYEYVRKKPKLEQLSNRLEEHLEXAX

SEQ ID NO: 29723 - protein, 40 aa, Artificial Sequence
  Non-cyclic GFR-binding peptide
  MOD_RES (6), (40): Xaa is C or S
  MOD_RES (20), (21), (22), (23), (24): Xaa is A or G
  MOD_RES (25), (26), (27), (28): Xaa is A or G or is absent
VTKPTXAPTKLRPVQVRKIXXXXXXXXXKKATVNMVVRSX

SEQ ID NO: 29724 - protein, 36 aa, Artificial Sequence
  Non-cyclic GFR-binding peptide
  MOD_RES (4), (5): Xaa is C or S
PKAXXVPTELRSVKMAKVDENEKVVKEVQVDMVVEG

SEQ ID NO: 29725 - protein, 40 aa, Artificial Sequence
  Non-cyclic GFR-binding peptide
  MOD_RES (6), (7): Xaa is C or S
  MOD_RES (21), (22), (23), (24), (25): Xaa is A or G
  MOD_RES (26), (27), (28), (29): Xaa is A or G or is absent
SIPKAXXVPTELRPVQMRKIXXXXXXXXXKKATVEMVVEG

SEQ ID NO: 29726 - protein, 44 aa, Artificial Sequence
  Non-cyclic GFR-binding peptide
  MOD_RES (4), (41), (43): Xaa is C or S
  MOD_RES (20), (21), (22), (23), (24): Xaa is A or G
  MOD_RES (25), (26), (27), (28): Xaa is A or G or is absent
NVQXRPTQVQLEPLTVLYYXXXXXXXXXEQLSNTLEDHLAXKXE

SEQ ID NO: 29727 - protein, 38 aa, Artificial Sequence
  Non-cyclic GFR-binding peptide
  MOD_RES (3), (4), (36), (38): Xaa is C or S
KAXXVPTELRSVKMAKVDENEKVVKEVQVDMVVEGXGX

SEQ ID NO: 29728 - protein, 38 aa, Artificial Sequence
  Non-cyclic GFR-binding peptide
  MOD_RES (3), (4), (36), (38): Xaa is C or S
KAXXVPTELRSVKMAKVDEYDKVVKEVQVEMVVEGXGX

SEQ ID NO: 29729 - protein, 40 aa, Artificial Sequence
  Non-cyclic GFR-binding peptide
  MOD_RES (4), (5), (38), (40): Xaa is C or S
  MOD_RES (19), (20), (21), (22), (23): Xaa is A or G
  MOD_RES (24), (25), (26), (27): Xaa is A or G or is absent
ASPXXVPQDLRPVQIRKIXXXXXXXXXKKATVMVVKSXKX

SEQ ID NO: 29730 - protein, 40 aa, Artificial Sequence
  Non-cyclic GFR-binding peptide
  MOD_RES (7), (7): Xaa is C or S
NDEGLEXVPTEEEPLPMVYYRIKPHQGQHEQLSNFLQHNK

SEQ ID NO: 29731 - protein, 33 aa, Artificial Sequence
  Non-cyclic GFR-binding peptide
  MOD_RES (32), (32): Xaa is C or S
APTQLSNITVQIMDDSSNVIIGEMSNMVVRAXG

SEQ ID NO: 29732 - protein, 42 aa, Artificial Sequence
  Non-cyclic GFR-binding peptide
  MOD_RES (6), (7), (41): Xaa is C or S
  MOD_RES (21), (22), (23), (24), (25): Xaa is A or G
  MOD_RES (26), (27), (28), (29): Xaa is A or G or is absent
TVPKPXXAPTQLSNITVQIMXXXXXXXXXIGEMSNMVVRAXG

SEQ ID NO: 29733 - protein, 39 aa, Artificial Sequence
  Non-cyclic GFR-binding peptide
  MOD_RES (6), (7): Xaa is C or S
  MOD_RES (21), (22), (23), (24), (25): Xaa is A or G
  MOD_RES (26), (27), (28), (29): Xaa is A or G or is absent
TVPKPXXAPTQLSNITVQIMXXXXXXXXXIGEMSNMVVR

SEQ ID NO: 29734 - protein, 36 aa, Artificial Sequence
  Non-cyclic GFR-binding peptide
  MOD_RES (1), (2), (33), (35): Xaa is C or S
XXVPQALSNITIQIMVGRKPKVIGEMSMIVRSXKXS

SEQ ID NO: 29735 - protein, 34 aa, Artificial Sequence
  Non-cyclic GFR-binding peptide
  MOD_RES (1), (1): Xaa is C or S
  MOD_RES (15), (16), (17), (18), (19): Xaa is A or G
  MOD_RES (20), (21), (22), (23): Xaa is A or G or is absent
XVPTEEEPLPMVYYXXXXXXXXXEQLSNFLQHNK

SEQ ID NO: 29736 - protein, 42 aa, Artificial Sequence
  Non-cyclic GFR-binding peptide
  MOD_RES (3), (40), (42): Xaa is C or S
  MOD_RES (19), (20), (21), (22), (23): Xaa is A or G
  MOD_RES (24), (25), (26), (27): Xaa is A or G or is absent
VQXRPTQVQLEPLPVVYYXXXXXXXXXEQLSNTLEDHLAXKX

SEQ ID NO: 29737 - protein, 38 aa, Artificial Sequence
  Non-cyclic GFR-binding peptide
  MOD_RES (3), (4), (38): Xaa is C or S
  MOD_RES (18), (19), (20), (21), (22): Xaa is A or G
  MOD_RES (23), (24), (25), (26): Xaa is A or G or is absent
KPXXAPTKLRSVKVAKVXXXXXXXXXKEVQVNMVVRSX

SEQ ID NO: 29738 - protein, 44 aa, Artificial Sequence
  Non-cyclic GFR-binding peptide
  MOD_RES (6), (7), (41), (43): Xaa is C or S
  MOD_RES (21), (22), (23), (24), (25): Xaa is A or G
  MOD_RES (26), (27), (28), (29): Xaa is A or G or is absent
KIPKAXXVPTELRPVQMRKIXXXXXXXXXKKATVDMVVEGXGXR

SEQ ID NO: 29739 - protein, 35 aa, Artificial Sequence
  Non-cyclic GFR-binding peptide
  MOD_RES (34), (34): Xaa is C or S
VPTEEEPLTMLYYRIKPHQGQHEQLSNFLQHNKXE

SEQ ID NO: 29740 - protein, 36 aa, Artificial Sequence
  Non-cyclic GFR-binding peptide
  MOD_RES (2), (3), (36): Xaa is C or S
  MOD_RES (17), (18), (19), (20), (21): Xaa is A or G
  MOD_RES (22), (23), (24), (25): Xaa is A or G or is absent
PXXVPQDLSNITIQIMXXXXXXXXXIGEMSMVVKSX

SEQ ID NO: 29741 - protein, 38 aa, Artificial Sequence
  Non-cyclic GFR-binding peptide
  MOD_RES (4), (5), (37): Xaa is C or S
PKPXXAPTQLRPVQVRKIDDSSNVIKKATVNMVVRAXG

SEQ ID NO: 29742 - protein, 34 aa, Artificial Sequence
  Non-cyclic GFR-binding peptide
TQVQLEPLPVVYYEIVRKKPIFEQLSNTLEDHLA

SEQ ID NO: 29743 - protein, 41 aa, Artificial Sequence
  Non-cyclic GFR-binding peptide
  MOD_RES (5), (5): Xaa is C or S
  MOD_RES (21), (22), (23), (24), (25): Xaa is A or G
  MOD_RES (26), (27), (28), (29): Xaa is A or G or is absent
RNVQXRPTQVQLEPLPVVYYXXXXXXXXXEQLSNTLEDHLA

SEQ ID NO: 29744 - protein, 36 aa, Artificial Sequence
  Non-cyclic GFR-binding peptide
  MOD_RES (1), (2), (36): Xaa is C or S
  MOD_RES (16), (17), (18), (19), (20): Xaa is A or G
  MOD_RES (21), (22), (23), (24): Xaa is A or G or is absent
XXAPTQLRSVKVAKVXXXXXXXXXKEVQVNMVVRAX

SEQ ID NO: 29745 - protein, 43 aa, Artificial Sequence
  Non-cyclic GFR-binding peptide
  MOD_RES (7), (41), (43): Xaa is C or S
  MOD_RES (21), (22), (23), (24), (25): Xaa is A or G
  MOD_RES (26), (27), (28), (29): Xaa is A or G or is absent
HVTKPTXAPTKLRPVQVRKIXXXXXXXXXKKATVNMVVRSXGX

SEQ ID NO: 29746 - protein, 36 aa, Artificial Sequence
  Non-cyclic GFR-binding peptide
  MOD_RES (1), (2), (36): Xaa is C or S
  MOD_RES (16), (17), (18), (19), (20): Xaa is A or G
  MOD_RES (21), (22), (23), (24): Xaa is A or G or is absent
XXVPTELRSVKMAKVXXXXXXXXXKEVQVEMVVEGX

SEQ ID NO: 29747 - protein, 43 aa, Artificial Sequence
  Non-cyclic GFR-binding peptide
  MOD_RES (6), (7), (40), (42): Xaa is C or S
  MOD_RES (21), (22), (23), (24), (25): Xaa is A or G
  MOD_RES (26), (27), (28), (29): Xaa is A or G or is absent
ASASPXXVSQDLRSVKIAKVXXXXXXXXXKEVQVMIVKSXKXS

SEQ ID NO: 29748 - protein, 37 aa, Artificial Sequence
  Non-cyclic GFR-binding peptide
  MOD_RES (6), (7): Xaa is C or S
ASASPXXVSQDLRSVKIAKVIGKTPKIKEVQVMIVKS

SEQ ID NO: 29749 - protein, 38 aa, Artificial Sequence
  Non-cyclic GFR-binding peptide
  MOD_RES (3), (4), (36), (38): Xaa is C or S
KPXXAPTKLSNITVQIMDDSSNVIIGEMSNMVVRSXGX

SEQ ID NO: 29750 - protein, 37 aa, Artificial Sequence
  Non-cyclic GFR-binding peptide
  MOD_RES (4), (5): Xaa is C or S
  MOD_RES (19), (20), (21), (22), (23): Xaa is A or G
  MOD_RES (24), (25), (26), (27): Xaa is A or G or is absent
ASPXXVSQDLRSVKIAKVXXXXXXXXXKEVQVMIVKS

SEQ ID NO: 29751 - protein, 43 aa, Artificial Sequence
  Non-cyclic GFR-binding peptide
  MOD_RES (5), (6), (40), (42): Xaa is C or S
  MOD_RES (20), (21), (22), (23), (24): Xaa is A or G
  MOD_RES (25), (26), (27), (28): Xaa is A or G or is absent
IPKAXXVPTELRSVKMAKVXXXXXXXXXKEVQVEMVVEGXGXR

SEQ ID NO: 29752 - protein, 42 aa, Artificial Sequence
  Non-cyclic GFR-binding peptide
  MOD_RES (6), (7), (40), (42): Xaa is C or S
  MOD_RES (21), (22), (23), (24), (25): Xaa is A or G
  MOD_RES (26), (27), (28), (29): Xaa is A or G or is absent
ASASPXXVSQDLRSVKIAKVXXXXXXXXXKEVQVMIVKSXKX

SEQ ID NO: 29753 - protein, 41 aa, Artificial Sequence
  Non-cyclic GFR-binding peptide
  MOD_RES (6), (7), (41): Xaa is C or S
  MOD_RES (21), (22), (23), (24), (25): Xaa is A or G
  MOD_RES (26), (27), (28), (29): Xaa is A or G or is absent
TVPKPXXAPTQLRPVQVRKIXXXXXXXXXKKATVNMVVRAX

SEQ ID NO: 29754 - protein, 37 aa, Artificial Sequence
  Non-cyclic GFR-binding peptide
  MOD_RES (4), (4): Xaa is C or S
GLEXVPTEEEPLTMLYYRIKPHQGQHEQLSNFLQHNK

SEQ ID NO: 29755 - protein, 33 aa, Artificial Sequence
  Non-cyclic GFR-binding peptide
  MOD_RES (14), (15), (16), (17), (18): Xaa is A or G
  MOD_RES (19), (20), (21), (22): Xaa is A or G or is absent
VPTEEEPLPMVYYXXXXXXXXXEQLSNFLQHNK

SEQ ID NO: 29756 - protein, 40 aa, Artificial Sequence
  Non-cyclic GFR-binding peptide
  MOD_RES (5), (6), (39): Xaa is C or S
  MOD_RES (20), (21), (22), (23), (24): Xaa is A or G
  MOD_RES (25), (26), (27), (28): Xaa is A or G or is absent
SASPXXVSQDLRPVQIRKIXXXXXXXXXKKATVMIVKSXK

SEQ ID NO: 29757 - protein, 33 aa, Artificial Sequence
  Non-cyclic GFR-binding peptide
  MOD_RES (1), (33): Xaa is C or S
XAPTQLRSVKVAKVDDSSNVIKEVQVNMVVRAX

SEQ ID NO: 29758 - protein, 30 aa, Artificial Sequence
  Non-cyclic GFR-binding peptide
VPQALSNITIQIMVGRKPKVIGEMSMIVRS

SEQ ID NO: 29759 - protein, 33 aa, Artificial Sequence
  Non-cyclic GFR-binding peptide
  MOD_RES (2), (2): Xaa is C or S
TXAPTKLRSVKVAKVDDSSNVIKEVQVNMVVRS

SEQ ID NO: 29760 - protein, 36 aa, Artificial Sequence
  Non-cyclic GFR-binding peptide
  MOD_RES (3), (4), (35): Xaa is C or S
SPXXVSQDLSNITIQIMIGKTPKIIGEMSMIVKSXK

SEQ ID NO: 29761 - protein, 37 aa, Artificial Sequence
  Non-cyclic GFR-binding peptide
  MOD_RES (5), (6): Xaa is C or S
IPKAXXVPTELSNITMQIMDENEKVVIGEMSDMVVEG

SEQ ID NO: 29762 - protein, 37 aa, Artificial Sequence
  Non-cyclic GFR-binding peptide
  MOD_RES (7), (7): Xaa is C or S
HVTKPTXAPTKLRPVQVRKIDDSSNVIKKATVNMVVR

SEQ ID NO: 29763 - protein, 42 aa, Artificial Sequence
  Non-cyclic GFR-binding peptide
  MOD_RES (6), (40), (42): Xaa is C or S
  MOD_RES (20), (21), (22), (23), (24): Xaa is A or G
  MOD_RES (25), (26), (27), (28): Xaa is A or G or is absent
VTKPTXAPTKLRSVKVAKVXXXXXXXXXKEVQVNMVVRSXGX

SEQ ID NO: 29764 - protein, 33 aa, Artificial Sequence
  Non-cyclic GFR-binding peptide
  MOD_RES (2), (3): Xaa is C or S
AXXVPTELRSVKMAKVDENEKVVKEVQVDMVVE

SEQ ID NO: 29765 - protein, 33 aa, Artificial Sequence
  Non-cyclic GFR-binding peptide
  MOD_RES (2), (3): Xaa is C or S
PXXVPQALRSVKIAKVVGRKPKVKEVQVMIVRS

SEQ ID NO: 29766 - protein, 35 aa, Artificial Sequence
  Non-cyclic GFR-binding peptide
  MOD_RES (32), (34): Xaa is C or S
APTKLSNITVQIMDDSSNVIIGEMSNMVVRSXGXH

SEQ ID NO: 29767 - protein, 38 aa, Artificial Sequence
  Non-cyclic GFR-binding peptide
  MOD_RES (4), (38): Xaa is C or S
GLEXVPTEEEPLTMLYYRIKPHQGQHEQLSNFLQHNKX

SEQ ID NO: 29768 - protein, 32 aa, Artificial Sequence
  Non-cyclic GFR-binding peptide
  MOD_RES (1), (2): Xaa is C or S
XXVSQDLRSVKIAKVIGKTPKIKEVQVMIVKS

SEQ ID NO: 29769 - protein, 36 aa, Artificial Sequence
  Non-cyclic GFR-binding peptide
  MOD_RES (2), (2): Xaa is C or S
KXQPSRVHHEPLPVVYYEYVRKKPKLEQLSNRLEEH

SEQ ID NO: 29770 - protein, 36 aa, Artificial Sequence
  Non-cyclic GFR-binding peptide
  MOD_RES (3), (4): Xaa is C or S
  MOD_RES (18), (19), (20), (21), (22): Xaa is A or G
  MOD_RES (23), (24), (25), (26): Xaa is A or G or is absent
SPXXVPQDLRPVQIRKIXXXXXXXXXKKATVMVVKS

SEQ ID NO: 29771 - protein, 38 aa, Artificial Sequence
  Non-cyclic GFR-binding peptide
  MOD_RES (37), (37): Xaa is C or S
  MOD_RES (16), (17), (18), (19), (20): Xaa is A or G
  MOD_RES (21), (22), (23), (24): Xaa is A or G or is absent
RPTQVQLEPLPVVYYXXXXXXXXXEQLSNTLEDHLAXK

SEQ ID NO: 29772 - protein, 38 aa, Artificial Sequence
  Non-cyclic GFR-binding peptide
  MOD_RES (36), (38): Xaa is C or S
PSRVHHEPLPVVYYEYVRKKPKLEQLSNRLEEHLEXAX

SEQ ID NO: 29773 - protein, 36 aa, Artificial Sequence
  Non-cyclic GFR-binding peptide
RPTQVQLEPLTVLYYEIVRKKPIFEQLSNTLEDHLA

SEQ ID NO: 29774 - protein, 33 aa, Artificial Sequence
  Non-cyclic GFR-binding peptide
  MOD_RES (1), (33): Xaa is C or S
XAPTKLRPVQVRKIDDSSNVIKKATVNMVVRSX

SEQ ID NO: 29775 - protein, 33 aa, Artificial Sequence
  Non-cyclic GFR-binding peptide
  MOD_RES (33), (33): Xaa is C or S
  MOD_RES (14), (15), (16), (17), (18): Xaa is A or G
  MOD_RES (19), (20), (21), (22): Xaa is A or G or is absent
VSQDLSNITIQIMXXXXXXXXXIGEMSMIVKSX

SEQ ID NO: 29776 - protein, 38 aa, Artificial Sequence
  Non-cyclic GFR-binding peptide
  MOD_RES (3), (3): Xaa is C or S
  MOD_RES (19), (20), (21), (22), (23): Xaa is A or G
  MOD_RES (24), (25), (26), (27): Xaa is A or G or is absent
VKXQPSRVHHEPLTVLYYXXXXXXXXXEQLSNRLEEHL

SEQ ID NO: 29777 - protein, 35 aa, Artificial Sequence
  Non-cyclic GFR-binding peptide
PSRVHHEPLTVLYYEYVRKKPKLEQLSNRLEEHLE

SEQ ID NO: 29778 - protein, 31 aa, Artificial Sequence
  Non-cyclic GFR-binding peptide
APTKLRPVQVRKIDDSSNVIKKATVNMVVRS

SEQ ID NO: 29779 - protein, 38 aa, Artificial Sequence
  Non-cyclic GFR-binding peptide
  MOD_RES (4), (5): Xaa is C or S
  MOD_RES (19), (20), (21), (22), (23): Xaa is A or G
  MOD_RES (24), (25), (26), (27): Xaa is A or G or is absent
PKAXXVPTELRSVKMAKVXXXXXXXXXKEVQVEMVVEG

SEQ ID NO: 29780 - protein, 38 aa, Artificial Sequence
  Non-cyclic GFR-binding peptide
  MOD_RES (4), (38): Xaa is C or S
  MOD_RES (18), (19), (20), (21), (22): Xaa is A or G
  MOD_RES (23), (24), (25), (26): Xaa is A or G or is absent
GLEXVPTEEEPLTMLYYXXXXXXXXXEQLSNFLQHNKX

SEQ ID NO: 29781 - protein, 42 aa, Artificial Sequence
  Non-cyclic GFR-binding peptide
  MOD_RES (6), (7), (39), (41): Xaa is C or S
SIPKAXXVPTELRSVKMAKVDEYDKVVKEVQVEMVVEGXGXR

SEQ ID NO: 29782 - protein, 38 aa, Artificial Sequence
  Non-cyclic GFR-binding peptide
  MOD_RES (4), (5), (37): Xaa is C or S
PKPXXAPTKLRPVQVRKIDDSSNVIKKATVNMVVRSXG

SEQ ID NO: 29783 - protein, 38 aa, Artificial Sequence
  Non-cyclic GFR-binding peptide
  MOD_RES (5), (6), (37): Xaa is C or S
SAAPXXVPQALRPVQIRKIVGRKPKVKKATVMIVRSXK

SEQ ID NO: 29784 - protein, 41 aa, Artificial Sequence
  Non-cyclic GFR-binding peptide
  MOD_RES (2), (39), (41): Xaa is C or S
  MOD_RES (18), (19), (20), (21), (22): Xaa is A or G
  MOD_RES (23), (24), (25), (26): Xaa is A or G or is absent
KXQPSRVHHEPLTVLYYXXXXXXXXXEQLSNRLEEHLEXAX

SEQ ID NO: 29785 - protein, 36 aa, Artificial Sequence
  Non-cyclic GFR-binding peptide
  MOD_RES (2), (3): Xaa is C or S
  MOD_RES (17), (18), (19), (20), (21): Xaa is A or G
  MOD_RES (22), (23), (24), (25): Xaa is A or G or is absent
AXXVPTELSNITMQIMXXXXXXXXXIGEMSEMVVEG

SEQ ID NO: 29786 - protein, 36 aa, Artificial Sequence
  Non-cyclic GFR-binding peptide
  MOD_RES (2), (2): Xaa is C or S
KXQPSRVHHEPLTVLYYEYVRKKPKLEQLSNRLEEH

SEQ ID NO: 29787 - protein, 40 aa, Artificial Sequence
  Non-cyclic GFR-binding peptide
  MOD_RES (5), (5): Xaa is C or S
SSVKXQPSRVHHEPLPVVYYEYVRKKPKLEQLSNRLEEHL

SEQ ID NO: 29788 - protein, 38 aa, Artificial Sequence
  Non-cyclic GFR-binding peptide
  MOD_RES (3), (4), (38): Xaa is C or S
  MOD_RES (18), (19), (20), (21), (22): Xaa is A or G
  MOD_RES (23), (24), (25), (26): Xaa is A or G or is absent
KAXXVPTELRSVKMAKVXXXXXXXXXKEVQVDMVVEGX

SEQ ID NO: 29789 - protein, 39 aa, Artificial Sequence
  Non-cyclic GFR-binding peptide
  MOD_RES (4), (5), (37), (39): Xaa is C or S
PKAXXVPTELRSVKMAKVDENEKVVKEVQVDMVVEGXGX

SEQ ID NO: 29790 - protein, 36 aa, Artificial Sequence
  Non-cyclic GFR-binding peptide
  MOD_RES (3), (4): Xaa is C or S
  MOD_RES (18), (19), (20), (21), (22): Xaa is A or G
  MOD_RES (23), (24), (25), (26): Xaa is A or G or is absent
SPXXVPQDLRSVKIAKVXXXXXXXXXKEVQVMVVKS

SEQ ID NO: 29791 - protein, 36 aa, Artificial Sequence
  Non-cyclic GFR-binding peptide
  MOD_RES (1), (2), (34), (36): Xaa is C or S
XXVPTELSNITMQIMDEYDKVVIGEMSEMVVEGXGX

SEQ ID NO: 29792 - protein, 37 aa, Artificial Sequence
  Non-cyclic GFR-binding peptide
  MOD_RES (1), (2), (34), (36): Xaa is C or S
XXAPTQLRSVKVAKVDDSSNVIKEVQVNMVVRAXGXH

SEQ ID NO: 29793 - protein, 37 aa, Artificial Sequence
  Non-cyclic GFR-binding peptide
  MOD_RES (4), (5): Xaa is C or S
  MOD_RES (19), (20), (21), (22), (23): Xaa is A or G
  MOD_RES (24), (25), (26), (27): Xaa is A or G or is absent
ASPXXVPQDLSNITIQIMXXXXXXXXXIGEMSMVVKS

SEQ ID NO: 29794 - protein, 36 aa, Artificial Sequence
  Non-cyclic GFR-binding peptide
  MOD_RES (4), (36): Xaa is C or S
KPTXAPTKLRSVKVAKVDDSSNVIKEVQVNMVVRSX

SEQ ID NO: 29795 - protein, 38 aa, Artificial Sequence
  Non-cyclic GFR-binding peptide
  MOD_RES (3), (4), (38): Xaa is C or S
  MOD_RES (18), (19), (20), (21), (22): Xaa is A or G
  MOD_RES (23), (24), (25), (26): Xaa is A or G or is absent
KPXXAPTQLSNITVQIMXXXXXXXXXIGEMSNMVVRAX

SEQ ID NO: 29796 - protein, 39 aa, Artificial Sequence
  Non-cyclic GFR-binding peptide
  MOD_RES (1), (38): Xaa is C or S
XQPSRVHHEPLPVVYYEYVRKKPKLEQLSNRLEEHLEXA

SEQ ID NO: 29797 - protein, 36 aa, Artificial Sequence
  Non-cyclic GFR-binding peptide
  MOD_RES (1), (2), (36): Xaa is C or S
  MOD_RES (16), (17), (18), (19), (20): Xaa is A or G
  MOD_RES (21), (22), (23), (24): Xaa is A or G or is absent
XXVPTELSNITMQIMXXXXXXXXXIGEMSDMVVEGX

SEQ ID NO: 29798 - protein, 43 aa, Artificial Sequence
  Non-cyclic GFR-binding peptide
  MOD_RES (7), (41), (43): Xaa is C or S
  MOD_RES (21), (22), (23), (24), (25): Xaa is A or G
  MOD_RES (26), (27), (28), (29): Xaa is A or G or is absent
HVTKPTXAPTKLSNITVQIMXXXXXXXXXIGEMSNMVVRSXGX

SEQ ID NO: 29799 - protein, 33 aa, Artificial Sequence
  Non-cyclic GFR-binding peptide
  MOD_RES (14), (15), (16), (17), (18): Xaa is A or G
  MOD_RES (19), (20), (21), (22): Xaa is A or G or is absent
APTKLSNITVQIMXXXXXXXXXIGEMSNMVVRS

SEQ ID NO: 29800 - protein, 41 aa, Artificial Sequence
  Non-cyclic GFR-binding peptide
  MOD_RES (5), (6), (38), (40): Xaa is C or S
VPKPXXAPTKLSNITVQIMDDSSNVIIGEMSNMVVRSXGXH

SEQ ID NO: 29801 - protein, 41 aa, Artificial Sequence
  Non-cyclic GFR-binding peptide
  MOD_RES (5), (6), (40): Xaa is C or S
  MOD_RES (20), (21), (22), (23), (24): Xaa is A or G
  MOD_RES (25), (26), (27), (28): Xaa is A or G or is absent
IPKAXXVPTELRPVQMRKIXXXXXXXXXKKATVEMVVEGXG

SEQ ID NO: 29802 - protein, 35 aa, Artificial Sequence
  Non-cyclic GFR-binding peptide
  MOD_RES (3), (35): Xaa is C or S
PTXAPTKLRPVQVRKIDDSSNVIKKATVNMVVRSX

SEQ ID NO: 29803 - protein, 37 aa, Artificial Sequence
  Non-cyclic GFR-binding peptide
  MOD_RES (2), (2): Xaa is C or S
QXRPTQVQLEPLTVLYYEIVRKKPIFEQLSNTLEDHL

SEQ ID NO: 29804 - protein, 32 aa, Artificial Sequence
  Non-cyclic GFR-binding peptide
  MOD_RES (14), (15), (16), (17), (18): Xaa is A or G
  MOD_RES (19), (20), (21), (22): Xaa is A or G or is absent
APTQLSNITVQIMXXXXXXXXXIGEMSNMVVR

SEQ ID NO: 29805 - protein, 37 aa, Artificial Sequence
  Non-cyclic GFR-binding peptide
  MOD_RES (2), (3), (35), (37): Xaa is C or S
AXXVPTELSNITMQIMDEYDKVVIGEMSEMVVEGXGX

SEQ ID NO: 29806 - protein, 42 aa, Artificial Sequence
  Non-cyclic GFR-binding peptide
  MOD_RES (5), (6), (40), (42): Xaa is C or S
  MOD_RES (20), (21), (22), (23), (24): Xaa is A or G
  MOD_RES (25), (26), (27), (28): Xaa is A or G or is absent
IPKAXXVPTELRSVKMAKVXXXXXXXXXKEVQVDMVVEGXGX

SEQ ID NO: 29807 - protein, 41 aa, Artificial Sequence
  Non-cyclic GFR-binding peptide
  MOD_RES (6), (7), (41): Xaa is C or S
  MOD_RES (21), (22), (23), (24), (25): Xaa is A or G
  MOD_RES (26), (27), (28), (29): Xaa is A or G or is absent
KIPKAXXVPTELRPVQMRKIXXXXXXXXXKKATVDMVVEGX

SEQ ID NO: 29808 - protein, 39 aa, Artificial Sequence
  Non-cyclic GFR-binding peptide
  MOD_RES (4), (36), (38): Xaa is C or S
KPTXAPTKLRPVQVRKIDDSSNVIKKATVNMVVRSXGXH

SEQ ID NO: 29809 - protein, 37 aa, Artificial Sequence
  Non-cyclic GFR-binding peptide
  MOD_RES (1), (35), (37): Xaa is C or S
  MOD_RES (15), (16), (17), (18), (19): Xaa is A or G
  MOD_RES (20), (21), (22), (23): Xaa is A or G or is absent
XVPTELSNITMQIMXXXXXXXXXIGEMSDMVVEGXGX

SEQ ID NO: 29810 - protein, 37 aa, Artificial Sequence
  Non-cyclic GFR-binding peptide
  MOD_RES (2), (3), (37): Xaa is C or S
  MOD_RES (17), (18), (19), (20), (21): Xaa is A or G
  MOD_RES (22), (23), (24), (25): Xaa is A or G or is absent
PXXAPTQLRSVKVAKVXXXXXXXXXKEVQVNMVVRAX

SEQ ID NO: 29811 - protein, 37 aa, Artificial Sequence
  Non-cyclic GFR-binding peptide
  MOD_RES (34), (36): Xaa is C or S
  MOD_RES (14), (15), (16), (17), (18): Xaa is A or G
  MOD_RES (19), (20), (21), (22): Xaa is A or G or is absent
APTQLRSVKVAKVXXXXXXXXXKEVQVNMVVRAXGXH

SEQ ID NO: 29812 - protein, 32 aa, Artificial Sequence
  Non-cyclic GFR-binding peptide
  MOD_RES (2), (2): Xaa is C or S
TXAPTKLSNITVQIMDDSSNVIIGEMSNMVVR

SEQ ID NO: 29813 - protein, 43 aa, Artificial Sequence
  Non-cyclic GFR-binding peptide
  MOD_RES (7), (41), (43): Xaa is C or S
NDEGLEXVPTEEEPLTMLYYRIKPHQGQHEQLSNFLQHNKXEX

SEQ ID NO: 29814 - protein, 39 aa, Artificial Sequence
  Non-cyclic GFR-binding peptide
  MOD_RES (36), (38): Xaa is C or S
PTQVQLEPLTVLYYEIVRKKPIFEQLSNTLEDHLAXKXE

SEQ ID NO: 29815 - protein, 42 aa, Artificial Sequence
  Non-cyclic GFR-binding peptide
  MOD_RES (6), (7), (40), (42): Xaa is C or S
  MOD_RES (21), (22), (23), (24), (25): Xaa is A or G
  MOD_RES (26), (27), (28), (29): Xaa is A or G or is absent
ASAAPXXVPQALRSVKIAKVXXXXXXXXXKEVQVMIVRSXKX

SEQ ID NO: 29816 - protein, 38 aa, Artificial Sequence
  Non-cyclic GFR-binding peptide
  MOD_RES (5), (6): Xaa is C or S
  MOD_RES (20), (21), (22), (23), (24): Xaa is A or G
  MOD_RES (25), (26), (27), (28): Xaa is A or G or is absent
VPKPXXAPTQLSNITVQIMXXXXXXXXXIGEMSNMVVR

SEQ ID NO: 29817 - protein, 36 aa, Artificial Sequence
  Non-cyclic GFR-binding peptide
  MOD_RES (36), (36): Xaa is C or S
  MOD_RES (15), (16), (17), (18), (19): Xaa is A or G
  MOD_RES (20), (21), (22), (23): Xaa is A or G or is absent
PTQVQLEPLPVVYYXXXXXXXXXEQLSNTLEDHLAX

SEQ ID NO: 29818 - protein, 37 aa, Artificial Sequence
  Non-cyclic GFR-binding peptide
  MOD_RES (2), (3), (35), (37): Xaa is C or S
AXXVPTELSNITMQIMDENEKVVIGEMSDMVVEGXGX

SEQ ID NO: 29819 - protein, 40 aa, Artificial Sequence
  Non-cyclic GFR-binding peptide
  MOD_RES (6), (7): Xaa is C or S
  MOD_RES (21), (22), (23), (24), (25): Xaa is A or G
  MOD_RES (26), (27), (28), (29): Xaa is A or G or is absent
KIPKAXXVPTELRPVQMRKIXXXXXXXXXKKATVDMVVEG

SEQ ID NO: 29820 - protein, 41 aa, Artificial Sequence
  Non-cyclic GFR-binding peptide
  MOD_RES (5), (5): Xaa is C or S
  MOD_RES (21), (22), (23), (24), (25): Xaa is A or G
  MOD_RES (26), (27), (28), (29): Xaa is A or G or is absent
SSVKXQPSRVHHEPLTVLYYXXXXXXXXXEQLSNRLEEHLE

SEQ ID NO: 29821 - protein, 39 aa, Artificial Sequence
  Non-cyclic GFR-binding peptide
  MOD_RES (5), (6): Xaa is C or S
  MOD_RES (20), (21), (22), (23), (24): Xaa is A or G
  MOD_RES (25), (26), (27), (28): Xaa is A or G or is absent
VPKPXXAPTKLSNITVQIMXXXXXXXXXIGEMSNMVVRS

SEQ ID NO: 29822 - protein, 35 aa, Artificial Sequence
  Non-cyclic GFR-binding peptide
  MOD_RES (4), (5): Xaa is C or S
ASPXXVPQDLSNITIQIMVGRTPKVIGEMSMVVKS

SEQ ID NO: 29823 - protein, 41 aa, Artificial Sequence
  Non-cyclic GFR-binding peptide
  MOD_RES (6), (7), (40): Xaa is C or S
  MOD_RES (21), (22), (23), (24), (25): Xaa is A or G
  MOD_RES (26), (27), (28), (29): Xaa is A or G or is absent
ASAAPXXVPQALRPVQIRKIXXXXXXXXXKKATVMIVRSXK

SEQ ID NO: 29824 - protein, 31 aa, Artificial Sequence
  Non-cyclic GFR-binding peptide
  MOD_RES (1), (1): Xaa is C or S
XVSQDLRSVKIAKVIGKTPKIKEVQVMIVKS

SEQ ID NO: 29825 - protein, 34 aa, Artificial Sequence
  Non-cyclic GFR-binding peptide
  MOD_RES (1), (2), (34): Xaa is C or S
XXAPTQLSNITVQIMDDSSNVIIGEMSNMVVRAX

SEQ ID NO: 29826 - protein, 35 aa, Artificial Sequence
  Non-cyclic GFR-binding peptide
  MOD_RES (2), (34): Xaa is C or S
TXAPTKLRSVKVAKVDDSSNVIKEVQVNMVVRSXG

SEQ ID NO: 29827 - protein, 39 aa, Artificial Sequence
  Non-cyclic GFR-binding peptide
  MOD_RES (4), (5), (37), (39): Xaa is C or S
PKAXXVPTELRSVKMAKVDEYDKVVKEVQVEMVVEGXGX

SEQ ID NO: 29828 - protein, 38 aa, Artificial Sequence
  Non-cyclic GFR-binding peptide
  MOD_RES (3), (3): Xaa is C or S
VKXQPSRVHHEPLPVVYYEYVRKKPKLEQLSNRLEEHL

SEQ ID NO: 29829 - protein, 31 aa, Artificial Sequence
  Non-cyclic GFR-binding peptide
VPTELRPVQMRKIDENEKVVKKATVDMVVEG

SEQ ID NO: 29830 - protein, 34 aa, Artificial Sequence
  Non-cyclic GFR-binding peptide
  MOD_RES (1), (34): Xaa is C or S
  MOD_RES (15), (16), (17), (18), (19): Xaa is A or G
  MOD_RES (20), (21), (22), (23): Xaa is A or G or is absent
XVSQDLRSVKIAKVXXXXXXXXXKEVQVMIVKSX

SEQ ID NO: 29831 - protein, 37 aa, Artificial Sequence
  Non-cyclic GFR-binding peptide
  MOD_RES (3), (4), (36): Xaa is C or S
KAXXVPTELRPVQMRKIDENEKVVKKATVDMVVEGXG

SEQ ID NO: 29832 - protein, 41 aa, Artificial Sequence
  Non-cyclic GFR-binding peptide
  MOD_RES (6), (38), (40): Xaa is C or S
VTKPTXAPTKLSNITVQIMDDSSNVIIGEMSNMVVRSXGXH

SEQ ID NO: 29833 - protein, 39 aa, Artificial Sequence
  Non-cyclic GFR-binding peptide
  MOD_RES (6), (38): Xaa is C or S
VTKPTXAPTKLRPVQVRKIDDSSNVIKKATVNMVVRSXG

SEQ ID NO: 29834 - protein, 35 aa, Artificial Sequence
  Non-cyclic GFR-binding peptide
  MOD_RES (32), (34): Xaa is C or S
VPTELSNITMQIMDENEKVVIGEMSDMVVEGXGXR

SEQ ID NO: 29835 - protein, 38 aa, Artificial Sequence
  Non-cyclic GFR-binding peptide
  MOD_RES (2), (3), (35), (37): Xaa is C or S
AXXVPTELRPVQMRKIDEYDKVVKKATVEMVVEGXGXR

SEQ ID NO: 29836 - protein, 36 aa, Artificial Sequence
  Non-cyclic GFR-binding peptide
  MOD_RES (4), (36): Xaa is C or S
KPTXAPTKLSNITVQIMDDSSNVIIGEMSNMVVRSX

SEQ ID NO: 29837 - protein, 34 aa, Artificial Sequence
  Non-cyclic GFR-binding peptide
  MOD_RES (31), (33): Xaa is C or S
VPQDLRSVKIAKVVGRTPKVKEVQVMVVKSXKXS

SEQ ID NO: 29838 - protein, 41 aa, Artificial Sequence
  Non-cyclic GFR-binding peptide
  MOD_RES (3), (4), (38), (40): Xaa is C or S
  MOD_RES (18), (19), (20), (21), (22): Xaa is A or G
  MOD_RES (23), (24), (25), (26): Xaa is A or G or is absent
KAXXVPTELSNITMQIMXXXXXXXXXIGEMSEMVVEGXGXR

SEQ ID NO: 29839 - protein, 37 aa, Artificial Sequence
  Non-cyclic GFR-binding peptide
  MOD_RES (34), (36): Xaa is C or S
  MOD_RES (14), (15), (16), (17), (18): Xaa is A or G
  MOD_RES (19), (20), (21), (22): Xaa is A or G or is absent
VPTELRSVKMAKVXXXXXXXXXKEVQVEMVVEGXGXR

SEQ ID NO: 29840 - protein, 39 aa, Artificial Sequence
  Non-cyclic GFR-binding peptide
  MOD_RES (6), (7), (38): Xaa is C or S
ASASPXXVSQDLRPVQIRKIIGKTPKIKKATVMIVKSXK

SEQ ID NO: 29841 - protein, 37 aa, Artificial Sequence
  Non-cyclic GFR-binding peptide
  MOD_RES (6), (7): Xaa is C or S
ASASPXXVSQDLSNITIQIMIGKTPKIIGEMSMIVKS

SEQ ID NO: 29842 - protein, 37 aa, Artificial Sequence
  Non-cyclic GFR-binding peptide
  MOD_RES (34), (36): Xaa is C or S
  MOD_RES (14), (15), (16), (17), (18): Xaa is A or G
  MOD_RES (19), (20), (21), (22): Xaa is A or G or is absent
VPTELSNITMQIMXXXXXXXXXIGEMSDMVVEGXGXR

SEQ ID NO: 29843 - protein, 38 aa, Artificial Sequence
  Non-cyclic GFR-binding peptide
  MOD_RES (5), (6): Xaa is C or S
  MOD_RES (20), (21), (22), (23), (24): Xaa is A or G
  MOD_RES (25), (26), (27), (28): Xaa is A or G or is absent
SASPXXVSQDLSNITIQIMXXXXXXXXXIGEMSMIVKS

SEQ ID NO: 29844 - protein, 32 aa, Artificial Sequence
  Non-cyclic GFR-binding peptide
  MOD_RES (14), (15), (16), (17), (18): Xaa is A or G
  MOD_RES (19), (20), (21), (22): Xaa is A or G or is absent
VPQDLRSVKIAKVXXXXXXXXXKEVQVMVVKS

SEQ ID NO: 29845 - protein, 36 aa, Artificial Sequence
  Non-cyclic GFR-binding peptide
  MOD_RES (3), (4): Xaa is C or S
  MOD_RES (18), (19), (20), (21), (22): Xaa is A or G
  MOD_RES (23), (24), (25), (26): Xaa is A or G or is absent
KAXXVPTELRPVQMRKIXXXXXXXXXKKATVDMVVE

SEQ ID NO: 29846 - protein, 37 aa, Artificial Sequence
  Non-cyclic GFR-binding peptide
  MOD_RES (1), (35), (37): Xaa is C or S
XVPTEEEPLPMVYYRIKPHQGQHEQLSNFLQHNKXEX

SEQ ID NO: 29847 - protein, 35 aa, Artificial Sequence
  Non-cyclic GFR-binding peptide
  MOD_RES (35), (35): Xaa is C or S
  MOD_RES (14), (15), (16), (17), (18): Xaa is A or G
  MOD_RES (19), (20), (21), (22): Xaa is A or G or is absent
TQVQLEPLTVLYYXXXXXXXXXEQLSNTLEDHLAX

SEQ ID NO: 29848 - protein, 41 aa, Artificial Sequence
  Non-cyclic GFR-binding peptide
  MOD_RES (7), (39), (41): Xaa is C or S
HVTKPTXAPTKLRPVQVRKIDDSSNVIKKATVNMVVRSXGX

SEQ ID NO: 29849 - protein, 36 aa, Artificial Sequence
  Non-cyclic GFR-binding peptide
  MOD_RES (5), (6): Xaa is C or S
VPKPXXAPTKLRPVQVRKIDDSSNVIKKATVNMVVR

SEQ ID NO: 29850 - protein, 37 aa, Artificial Sequence
  Non-cyclic GFR-binding peptide
  MOD_RES (2), (3), (37): Xaa is C or S
  MOD_RES (17), (18), (19), (20), (21): Xaa is A or G
  MOD_RES (22), (23), (24), (25): Xaa is A or G or is absent
PXXAPTQLRPVQVRKIXXXXXXXXXKKATVNMVVRAX

SEQ ID NO: 29851 - protein, 40 aa, Artificial Sequence
  Non-cyclic GFR-binding peptide
  MOD_RES (5), (5): Xaa is C or S
RNVQXRPTQVQLEPLTVLYYEIVRKKPIFEQLSNTLEDHL

SEQ ID NO: 29852 - protein, 39 aa, Artificial Sequence
  Non-cyclic GFR-binding peptide
  MOD_RES (4), (5), (39): Xaa is C or S
  MOD_RES (19), (20), (21), (22), (23): Xaa is A or G
  MOD_RES (24), (25), (26), (27): Xaa is A or G or is absent
PKAXXVPTELRSVKMAKVXXXXXXXXXKEVQVEMVVEGX

SEQ ID NO: 29853 - protein, 40 aa, Artificial Sequence
  Non-cyclic GFR-binding peptide
  MOD_RES (3), (37), (39): Xaa is C or S
  MOD_RES (17), (18), (19), (20), (21): Xaa is A or G
  MOD_RES (22), (23), (24), (25): Xaa is A or G or is absent
PTXAPTKLRPVQVRKIXXXXXXXXXKKATVNMVVRSXGXH

SEQ ID NO: 29854 - protein, 32 aa, Artificial Sequence
  Non-cyclic GFR-binding peptide
  MOD_RES (14), (15), (16), (17), (18): Xaa is A or G
  MOD_RES (19), (20), (21), (22): Xaa is A or G or is absent
SRVHHEPLTVLYYXXXXXXXXXEQLSNRLEEH

SEQ ID NO: 29855 - protein, 37 aa, Artificial Sequence
  Non-cyclic GFR-binding peptide
  MOD_RES (35), (37): Xaa is C or S
SRVHHEPLTVLYYEYVRKKPKLEQLSNRLEEHLEXAX

SEQ ID NO: 29856 - protein, 32 aa, Artificial Sequence
  Non-cyclic GFR-binding peptide
  MOD_RES (1), (32): Xaa is C or S
XVSQDLSNITIQIMIGKTPKIIGEMSMIVKSX

SEQ ID NO: 29857 - protein, 34 aa, Artificial Sequence
  Non-cyclic GFR-binding peptide
  MOD_RES (2), (3): Xaa is C or S
PXXAPTKLSNITVQIMDDSSNVIIGEMSNMVVRS

SEQ ID NO: 29858 - protein, 32 aa, Artificial Sequence
  Non-cyclic GFR-binding peptide
  MOD_RES (32), (32): Xaa is C or S
VPTELRPVQMRKIDENEKVVKKATVDMVVEGX

SEQ ID NO: 29859 - protein, 37 aa, Artificial Sequence
  Non-cyclic GFR-binding peptide
  MOD_RES (2), (36): Xaa is C or S
  MOD_RES (16), (17), (18), (19), (20): Xaa is A or G
  MOD_RES (21), (22), (23), (24): Xaa is A or G or is absent
TXAPTKLSNITVQIMXXXXXXXXXIGEMSNMVVRSXG

SEQ ID NO: 29860 - protein, 32 aa, Artificial Sequence
  Non-cyclic GFR-binding peptide
  MOD_RES (1), (1): Xaa is C or S
XVPTELRPVQMRKIDENEKVVKKATVDMVVEG

SEQ ID NO: 29861 - protein, 36 aa, Artificial Sequence
  Non-cyclic GFR-binding peptide
  MOD_RES (1), (1): Xaa is C or S
  MOD_RES (17), (18), (19), (20), (21): Xaa is A or G
  MOD_RES (22), (23), (24), (25): Xaa is A or G or is absent
XRPTQVQLEPLPVVYYXXXXXXXXXEQLSNTLEDHL

SEQ ID NO: 29862 - protein, 40 aa, Artificial Sequence
  Non-cyclic GFR-binding peptide
  MOD_RES (3), (40): Xaa is C or S
  MOD_RES (19), (20), (21), (22), (23): Xaa is A or G
  MOD_RES (24), (25), (26), (27): Xaa is A or G or is absent
VQXRPTQVQLEPLTVLYYXXXXXXXXXEQLSNTLEDHLAX

SEQ ID NO: 29863 - protein, 34 aa, Artificial Sequence
  Non-cyclic GFR-binding peptide
  MOD_RES (1), (1): Xaa is C or S
  MOD_RES (15), (16), (17), (18), (19): Xaa is A or G
  MOD_RES (20), (21), (22), (23): Xaa is A or G or is absent
XVPTELRSVKMAKVXXXXXXXXXKEVQVDMVVEG

SEQ ID NO: 29864 - protein, 34 aa, Artificial Sequence
  Non-cyclic GFR-binding peptide
  MOD_RES (2), (3): Xaa is C or S
PXXAPTQLRPVQVRKIDDSSNVIKKATVNMVVRA

SEQ ID NO: 29865 - protein, 37 aa, Artificial Sequence
  Non-cyclic GFR-binding peptide
  MOD_RES (34), (36): Xaa is C or S
  MOD_RES (14), (15), (16), (17), (18): Xaa is A or G
  MOD_RES (19), (20), (21), (22): Xaa is A or G or is absent
VPTELRPVQMRKIXXXXXXXXXKKATVEMVVEGXGXR

SEQ ID NO: 29866 - protein, 40 aa, Artificial Sequence
  Non-cyclic GFR-binding peptide
  MOD_RES (3), (4), (37), (39): Xaa is C or S
  MOD_RES (18), (19), (20), (21), (22): Xaa is A or G
  MOD_RES (23), (24), (25), (26): Xaa is A or G or is absent
APXXVPQALRSVKIAKVXXXXXXXXXKEVQVMIVRSXKXS

SEQ ID NO: 29867 - protein, 35 aa, Artificial Sequence
  Non-cyclic GFR-binding peptide
  MOD_RES (1), (32), (34): Xaa is C or S
XVPQDLRPVQIRKIVGRTPKVKKATVMVVKSXKXS

SEQ ID NO: 29868 - protein, 34 aa, Artificial Sequence
  Non-cyclic GFR-binding peptide
  MOD_RES (1), (2), (34): Xaa is C or S
XXVPTELRPVQMRKIDEYDKVVKKATVEMVVEGX

SEQ ID NO: 29869 - protein, 39 aa, Artificial Sequence
  Non-cyclic GFR-binding peptide
  MOD_RES (6), (6): Xaa is C or S
  MOD_RES (20), (21), (22), (23), (24): Xaa is A or G
  MOD_RES (25), (26), (27), (28): Xaa is A or G or is absent
VTKPTXAPTKLRPVQVRKIXXXXXXXXXKKATVNMVVRS

SEQ ID NO: 29870 - protein, 40 aa, Artificial Sequence
  Non-cyclic GFR-binding peptide
  MOD_RES (1), (38), (40): Xaa is C or S
  MOD_RES (17), (18), (19), (20), (21): Xaa is A or G
  MOD_RES (22), (23), (24), (25): Xaa is A or G or is absent
XRPTQVQLEPLTVLYYXXXXXXXXXEQLSNTLEDHLAXKX

SEQ ID NO: 29871 - protein, 36 aa, Artificial Sequence
  Non-cyclic GFR-binding peptide
  MOD_RES (2), (2): Xaa is C or S
QXRPTQVQLEPLPVVYYEIVRKKPIFEQLSNTLEDH

SEQ ID NO: 29872 - protein, 40 aa, Artificial Sequence
  Non-cyclic GFR-binding peptide
  MOD_RES (3), (37), (39): Xaa is C or S
  MOD_RES (17), (18), (19), (20), (21): Xaa is A or G
  MOD_RES (22), (23), (24), (25): Xaa is A or G or is absent
PTXAPTKLRSVKVAKVXXXXXXXXXKEVQVNMVVRSXGXH

SEQ ID NO: 29873 - protein, 38 aa, Artificial Sequence
  Non-cyclic GFR-binding peptide
  MOD_RES (1), (2), (36), (38): Xaa is C or S
  MOD_RES (16), (17), (18), (19), (20): Xaa is A or G
  MOD_RES (21), (22), (23), (24): Xaa is A or G or is absent
XXAPTKLRSVKVAKVXXXXXXXXXKEVQVNMVVRSXGX

SEQ ID NO: 29874 - protein, 36 aa, Artificial Sequence
  Non-cyclic GFR-binding peptide
  MOD_RES (3), (4), (36): Xaa is C or S
KAXXVPTELSNITMQIMDEYDKVVIGEMSEMVVEGX

SEQ ID NO: 29875 - protein, 39 aa, Artificial Sequence
  Non-cyclic GFR-binding peptide
  MOD_RES (4), (5), (36), (38): Xaa is C or S
ASPXXVSQDLSNITIQIMIGKTPKIIGEMSMIVKSXKXS

SEQ ID NO: 29876 - protein, 37 aa, Artificial Sequence
  Non-cyclic GFR-binding peptide
  MOD_RES (35), (37): Xaa is C or S
TQVQLEPLTVLYYEIVRKKPIFEQLSNTLEDHLAXKX

SEQ ID NO: 29877 - protein, 34 aa, Artificial Sequence
  Non-cyclic GFR-binding peptide
  MOD_RES (1), (34): Xaa is C or S
  MOD_RES (15), (16), (17), (18), (19): Xaa is A or G
  MOD_RES (20), (21), (22), (23): Xaa is A or G or is absent
XVSQDLSNITIQIMXXXXXXXXXIGEMSMIVKSX

SEQ ID NO: 29878 - protein, 37 aa, Artificial Sequence
  Non-cyclic GFR-binding peptide
  MOD_RES (1), (2), (35), (37): Xaa is C or S
  MOD_RES (16), (17), (18), (19), (20): Xaa is A or G
  MOD_RES (21), (22), (23), (24): Xaa is A or G or is absent
XXVPQALRSVKIAKVXXXXXXXXXKEVQVMIVRSXKX

SEQ ID NO: 29879 - protein, 33 aa, Artificial Sequence
  Non-cyclic GFR-binding peptide
  MOD_RES (33), (33): Xaa is C or S
  MOD_RES (14), (15), (16), (17), (18): Xaa is A or G
  MOD_RES (19), (20), (21), (22): Xaa is A or G or is absent
VPQDLSNITIQIMXXXXXXXXXIGEMSMVVKSX

SEQ ID NO: 29880 - protein, 42 aa, Artificial Sequence
  Non-cyclic GFR-binding peptide
  MOD_RES (6), (7), (41): Xaa is C or S
  MOD_RES (21), (22), (23), (24), (25): Xaa is A or G
  MOD_RES (26), (27), (28), (29): Xaa is A or G or is absent
SIPKAXXVPTELRSVKMAKVXXXXXXXXXKEVQVEMVVEGXG

SEQ ID NO: 29881 - protein, 40 aa, Artificial Sequence
  Non-cyclic GFR-binding peptide
  MOD_RES (5), (6), (39): Xaa is C or S
  MOD_RES (20), (21), (22), (23), (24): Xaa is A or G
  MOD_RES (25), (26), (27), (28): Xaa is A or G or is absent
SAAPXXVPQALSNITIQIMXXXXXXXXXIGEMSMIVRSXK

SEQ ID NO: 29882 - protein, 36 aa, Artificial Sequence
  Non-cyclic GFR-binding peptide
  MOD_RES (3), (4), (35): Xaa is C or S
SPXXVSQDLRPVQIRKIIGKTPKIKKATVMIVKSXK

SEQ ID NO: 29883 - protein, 42 aa, Artificial Sequence
  Non-cyclic GFR-binding peptide
  MOD_RES (7), (39), (41): Xaa is C or S
HVTKPTXAPTKLRPVQVRKIDDSSNVIKKATVNMVVRSXGXH

SEQ ID NO: 29884 - protein, 44 aa, Artificial Sequence
  Non-cyclic GFR-binding peptide
  MOD_RES (5), (42), (44): Xaa is C or S
  MOD_RES (21), (22), (23), (24), (25): Xaa is A or G
  MOD_RES (26), (27), (28), (29): Xaa is A or G or is absent
SSVKXQPSRVHHEPLPVVYYXXXXXXXXXEQLSNRLEEHLEXAX

SEQ ID NO: 29885 - protein, 35 aa, Artificial Sequence
  Non-cyclic GFR-binding peptide
  MOD_RES (1), (33), (35): Xaa is C or S
XAPTKLRSVKVAKVDDSSNVIKEVQVNMVVRSXGX

SEQ ID NO: 29886 - protein, 37 aa, Artificial Sequence
  Non-cyclic GFR-binding peptide
  MOD_RES (1), (2), (36): Xaa is C or S
  MOD_RES (16), (17), (18), (19), (20): Xaa is A or G
  MOD_RES (21), (22), (23), (24): Xaa is A or G or is absent
XXAPTKLRPVQVRKIXXXXXXXXXKKATVNMVVRSXG

SEQ ID NO: 29887 - protein, 38 aa, Artificial Sequence
  Non-cyclic GFR-binding peptide
  MOD_RES (4), (5), (37): Xaa is C or S
PKPXXAPTQLRSVKVAKVDDSSNVIKEVQVNMVVRAXG

SEQ ID NO: 29888 - protein, 37 aa, Artificial Sequence
  Non-cyclic GFR-binding peptide
  MOD_RES (1), (35), (37): Xaa is C or S
  MOD_RES (15), (16), (17), (18), (19): Xaa is A or G
  MOD_RES (20), (21), (22), (23): Xaa is A or G or is absent
XVPTEEEPLTMLYYXXXXXXXXXEQLSNFLQHNKXEX

SEQ ID NO: 29889 - protein, 40 aa, Artificial Sequence
  Non-cyclic GFR-binding peptide
  MOD_RES (6), (7), (39): Xaa is C or S
SIPKAXXVPTELSNITMQIMDEYDKVVIGEMSEMVVEGXG

SEQ ID NO: 29890 - protein, 37 aa, Artificial Sequence
  Non-cyclic GFR-binding peptide
  MOD_RES (5), (6): Xaa is C or S
IPKAXXVPTELRPVQMRKIDENEKVVKKATVDMVVEG

SEQ ID NO: 29891 - protein, 36 aa, Artificial Sequence
  Non-cyclic GFR-binding peptide
  MOD_RES (33), (35): Xaa is C or S
  MOD_RES (14), (15), (16), (17), (18): Xaa is A or G
  MOD_RES (19), (20), (21), (22): Xaa is A or G or is absent
VPQALSNITIQIMXXXXXXXXXIGEMSMIVRSXKXS

SEQ ID NO: 29892 - protein, 39 aa, Artificial Sequence
  Non-cyclic GFR-binding peptide
  MOD_RES (5), (37), (39): Xaa is C or S
TKPTXAPTKLRSVKVAKVDDSSNVIKEVQVNMVVRSXGX

SEQ ID NO: 29893 - protein, 33 aa, Artificial Sequence
  Non-cyclic GFR-binding peptide
  MOD_RES (1), (1): Xaa is C or S
  MOD_RES (15), (16), (17), (18), (19): Xaa is A or G
  MOD_RES (20), (21), (22), (23): Xaa is A or G or is absent
XVPTELSNITMQIMXXXXXXXXXIGEMSEMVVE

SEQ ID NO: 29894 - protein, 35 aa, Artificial Sequence
  Non-cyclic GFR-binding peptide
  MOD_RES (2), (3), (35): Xaa is C or S
PXXAPTKLRSVKVAKVDDSSNVIKEVQVNMVVRSX

SEQ ID NO: 29895 - protein, 38 aa, Artificial Sequence
  Non-cyclic GFR-binding peptide
  MOD_RES (5), (6): Xaa is C or S
  MOD_RES (20), (21), (22), (23), (24): Xaa is A or G
  MOD_RES (25), (26), (27), (28): Xaa is A or G or is absent
VPKPXXAPTQLRPVQVRKIXXXXXXXXXKKATVNMVVR

SEQ ID NO: 29896 - protein, 35 aa, Artificial Sequence
  Non-cyclic GFR-binding peptide
  MOD_RES (35), (35): Xaa is C or S
TQVQLEPLTVLYYEIVRKKPIFEQLSNTLEDHLAX

SEQ ID NO: 29897 - protein, 40 aa, Artificial Sequence
  Non-cyclic GFR-binding peptide
  MOD_RES (3), (40): Xaa is C or S
VQXRPTQVQLEPLTVLYYEIVRKKPIFEQLSNTLEDHLAX

SEQ ID NO: 29898 - protein, 38 aa, Artificial Sequence
  Non-cyclic GFR-binding peptide
  MOD_RES (6), (7): Xaa is C or S
TVPKPXXAPTQLSNITVQIMDDSSNVIIGEMSNMVVRA

SEQ ID NO: 29899 - protein, 38 aa, Artificial Sequence
  Non-cyclic GFR-binding peptide
  MOD_RES (4), (5): Xaa is C or S
  MOD_RES (19), (20), (21), (22), (23): Xaa is A or G
  MOD_RES (24), (25), (26), (27): Xaa is A or G or is absent
PKAXXVPTELRPVQMRKIXXXXXXXXXKKATVEMVVEG

SEQ ID NO: 29900 - protein, 33 aa, Artificial Sequence
  Non-cyclic GFR-binding peptide
  MOD_RES (1), (32): Xaa is C or S
XVPQDLSNITIQIMVGRTPKVIGEMSMVVKSXK

SEQ ID NO: 29901 - protein, 38 aa, Artificial Sequence
  Non-cyclic GFR-binding peptide
  MOD_RES (4), (36), (38): Xaa is C or S
KPTXAPTKLRSVKVAKVDDSSNVIKEVQVNMVVRSXGX

SEQ ID NO: 29902 - protein, 37 aa, Artificial Sequence
  Non-cyclic GFR-binding peptide
  MOD_RES (5), (6), (37): Xaa is C or S
SASPXXVPQDLRSVKIAKVVGRTPKVKEVQVMVVKSX

SEQ ID NO: 29903 - protein, 35 aa, Artificial Sequence
  Non-cyclic GFR-binding peptide
  MOD_RES (2), (3): Xaa is C or S
  MOD_RES (17), (18), (19), (20), (21): Xaa is A or G
  MOD_RES (22), (23), (24), (25): Xaa is A or G or is absent
AXXVPTELRPVQMRKIXXXXXXXXXKKATVDMVVE

SEQ ID NO: 29904 - protein, 35 aa, Artificial Sequence
  Non-cyclic GFR-binding peptide
  MOD_RES (3), (3): Xaa is C or S
  MOD_RES (17), (18), (19), (20), (21): Xaa is A or G
  MOD_RES (22), (23), (24), (25): Xaa is A or G or is absent
LEXVPTEEEPLTMLYYXXXXXXXXXEQLSNFLQHN

SEQ ID NO: 29905 - protein, 32 aa, Artificial Sequence
  Non-cyclic GFR-binding peptide
  MOD_RES (1), (32): Xaa is C or S
XVSQDLRSVKIAKVIGKTPKIKEVQVMIVKSX

SEQ ID NO: 29906 - protein, 37 aa, Artificial Sequence
  Non-cyclic GFR-binding peptide
  MOD_RES (34), (36): Xaa is C or S
VPTEEEPLTMLYYRIKPHQGQHEQLSNFLQHNKXEXR

SEQ ID NO: 29907 - protein, 34 aa, Artificial Sequence
  Non-cyclic GFR-binding peptide
  MOD_RES (3), (4): Xaa is C or S
KPXXAPTKLRPVQVRKIDDSSNVIKKATVNMVVR

SEQ ID NO: 29908 - protein, 37 aa, Artificial Sequence
  Non-cyclic GFR-binding peptide
  MOD_RES (1), (2), (34), (36): Xaa is C or S
XXAPTQLRPVQVRKIDDSSNVIKKATVNMVVRAXGXH

SEQ ID NO: 29909 - protein, 33 aa, Artificial Sequence
  Non-cyclic GFR-binding peptide
  MOD_RES (1), (1): Xaa is C or S
  MOD_RES (15), (16), (17), (18), (19): Xaa is A or G
  MOD_RES (20), (21), (22), (23): Xaa is A or G or is absent
XVPQALSNITIQIMXXXXXXXXXIGEMSMIVRS

SEQ ID NO: 29910 - protein, 40 aa, Artificial Sequence
  Non-cyclic GFR-binding peptide
  MOD_RES (4), (5), (39): Xaa is C or S
  MOD_RES (19), (20), (21), (22), (23): Xaa is A or G
  MOD_RES (24), (25), (26), (27): Xaa is A or G or is absent
PKAXXVPTELRSVKMAKVXXXXXXXXXKEVQVDMVVEGXG

SEQ ID NO: 29911 - protein, 36 aa, Artificial Sequence
  Non-cyclic GFR-binding peptide
  MOD_RES (1), (2), (33), (35): Xaa is C or S
XXVPQDLSNITIQIMVGRTPKVIGEMSMVVKSXKXS

SEQ ID NO: 29912 - protein, 42 aa, Artificial Sequence
  Non-cyclic GFR-binding peptide
  MOD_RES (5), (42): Xaa is C or S
SSVKXQPSRVHHEPLPVVYYEYVRKKPKLEQLSNRLEEHLEX

SEQ ID NO: 29913 - protein, 42 aa, Artificial Sequence
  Non-cyclic GFR-binding peptide
  MOD_RES (5), (39), (41): Xaa is C or S
  MOD_RES (19), (20), (21), (22), (23): Xaa is A or G
  MOD_RES (24), (25), (26), (27): Xaa is A or G or is absent
EGLEXVPTEEEPLPMVYYXXXXXXXXXEQLSNFLQHNKXEXR

SEQ ID NO: 29914 - protein, 33 aa, Artificial Sequence
  Non-cyclic GFR-binding peptide
  MOD_RES (32), (32): Xaa is C or S
VPTELRPVQMRKIDEYDKVVKKATVEMVVEGXG

SEQ ID NO: 29915 - protein, 43 aa, Artificial Sequence
  Non-cyclic GFR-binding peptide
  MOD_RES (4), (41), (43): Xaa is C or S
SVKXQPSRVHHEPLTVLYYEYVRKKPKLEQLSNRLEEHLEXAX

SEQ ID NO: 29916 - protein, 40 aa, Artificial Sequence
  Non-cyclic GFR-binding peptide
  MOD_RES (4), (5), (38), (40): Xaa is C or S
  MOD_RES (19), (20), (21), (22), (23): Xaa is A or G
  MOD_RES (24), (25), (26), (27): Xaa is A or G or is absent
AAPXXVPQALSNITIQIMXXXXXXXXXIGEMSMIVRSXKX

SEQ ID NO: 29917 - protein, 41 aa, Artificial Sequence
  Non-cyclic GFR-binding peptide
  MOD_RES (5), (39), (41): Xaa is C or S
  MOD_RES (19), (20), (21), (22), (23): Xaa is A or G
  MOD_RES (24), (25), (26), (27): Xaa is A or G or is absent
TKPTXAPTKLRSVKVAKVXXXXXXXXXKEVQVNMVVRSXGX

SEQ ID NO: 29918 - protein, 38 aa, Artificial Sequence
  Non-cyclic GFR-binding peptide
  MOD_RES (36), (38): Xaa is C or S
  MOD_RES (15), (16), (17), (18), (19): Xaa is A or G
  MOD_RES (20), (21), (22), (23): Xaa is A or G or is absent
PTQVQLEPLTVLYYXXXXXXXXXEQLSNTLEDHLAXKX

SEQ ID NO: 29919 - protein, 36 aa, Artificial Sequence
  Non-cyclic GFR-binding peptide
  MOD_RES (2), (3), (35): Xaa is C or S
PXXAPTQLSNITVQIMDDSSNVIIGEMSNMVVRAXG

SEQ ID NO: 29920 - protein, 41 aa, Artificial Sequence
  Non-cyclic GFR-binding peptide
  MOD_RES (4), (5), (38), (40): Xaa is C or S
  MOD_RES (19), (20), (21), (22), (23): Xaa is A or G
  MOD_RES (24), (25), (26), (27): Xaa is A or G or is absent
AAPXXVPQALRSVKIAKVXXXXXXXXXKEVQVMIVRSXKXS

SEQ ID NO: 29921 - protein, 34 aa, Artificial Sequence
  Non-cyclic GFR-binding peptide
  MOD_RES (2), (2): Xaa is C or S
EXVPTEEEPLTMLYYRIKPHQGQHEQLSNFLQHN

SEQ ID NO: 29922 - protein, 42 aa, Artificial Sequence
  Non-cyclic GFR-binding peptide
  MOD_RES (6), (7), (39), (41): Xaa is C or S
KIPKAXXVPTELSNITMQIMDENEKVVIGEMSDMVVEGXGXR

SEQ ID NO: 29923 - protein, 37 aa, Artificial Sequence
  Non-cyclic GFR-binding peptide
  MOD_RES (2), (3), (34), (36): Xaa is C or S
PXXVPQALRPVQIRKIVGRKPKVKKATVMIVRSXKXS

SEQ ID NO: 29924 - protein, 34 aa, Artificial Sequence
  Non-cyclic GFR-binding peptide
  MOD_RES (1), (1): Xaa is C or S
  MOD_RES (15), (16), (17), (18), (19): Xaa is A or G
  MOD_RES (20), (21), (22), (23): Xaa is A or G or is absent
XAPTQLRPVQVRKIXXXXXXXXXKKATVNMVVRA

SEQ ID NO: 29925 - protein, 39 aa, Artificial Sequence
  Non-cyclic GFR-binding peptide
  MOD_RES (4), (4): Xaa is C or S
SVKXQPSRVHHEPLPVVYYEYVRKKPKLEQLSNRLEEHL

SEQ ID NO: 29926 - protein, 36 aa, Artificial Sequence
  Non-cyclic GFR-binding peptide
  MOD_RES (3), (4), (36): Xaa is C or S
KPXXAPTQLSNITVQIMDDSSNVIIGEMSNMVVRAX

SEQ ID NO: 29927 - protein, 42 aa, Artificial Sequence
  Non-cyclic GFR-binding peptide
  MOD_RES (4), (5), (39), (41): Xaa is C or S
  MOD_RES (19), (20), (21), (22), (23): Xaa is A or G
  MOD_RES (24), (25), (26), (27): Xaa is A or G or is absent
PKAXXVPTELSNITMQIMXXXXXXXXXIGEMSEMVVEGXGXR

SEQ ID NO: 29928 - protein, 31 aa, Artificial Sequence
  Non-cyclic GFR-binding peptide
  MOD_RES (1), (1): Xaa is C or S
XVPQDLSNITIQIMVGRTPKVIGEMSMVVKS

SEQ ID NO: 29929 - protein, 38 aa, Artificial Sequence
  Non-cyclic GFR-binding peptide
  MOD_RES (4), (5), (38): Xaa is C or S
  MOD_RES (19), (20), (21), (22), (23): Xaa is A or G
  MOD_RES (24), (25), (26), (27): Xaa is A or G or is absent
ASPXXVSQDLSNITIQIMXXXXXXXXXIGEMSMIVKSX

SEQ ID NO: 29930 - protein, 37 aa, Artificial Sequence
  Non-cyclic GFR-binding peptide
  MOD_RES (5), (6), (37): Xaa is C or S
SASPXXVPQDLSNITIQIMVGRTPKVIGEMSMVVKSX

SEQ ID NO: 29931 - protein, 39 aa, Artificial Sequence
  Non-cyclic GFR-binding peptide
  MOD_RES (4), (5), (39): Xaa is C or S
  MOD_RES (19), (20), (21), (22), (23): Xaa is A or G
  MOD_RES (24), (25), (26), (27): Xaa is A or G or is absent
PKPXXAPTKLSNITVQIMXXXXXXXXXIGEMSNMVVRSX

SEQ ID NO: 29932 - protein, 35 aa, Artificial Sequence
  Non-cyclic GFR-binding peptide
  MOD_RES (2), (3): Xaa is C or S
  MOD_RES (17), (18), (19), (20), (21): Xaa is A or G
  MOD_RES (22), (23), (24), (25): Xaa is A or G or is absent
PXXVSQDLRPVQIRKIXXXXXXXXXKKATVMIVKS

SEQ ID NO: 29933 - protein, 42 aa, Artificial Sequence
  Non-cyclic GFR-binding peptide
  MOD_RES (6), (7), (41): Xaa is C or S
  MOD_RES (21), (22), (23), (24), (25): Xaa is A or G
  MOD_RES (26), (27), (28), (29): Xaa is A or G or is absent
KIPKAXXVPTELSNITMQIMXXXXXXXXXIGEMSDMVVEGXG

SEQ ID NO: 29934 - protein, 41 aa, Artificial Sequence
  Non-cyclic GFR-binding peptide
  MOD_RES (6), (7), (39), (41): Xaa is C or S
KIPKAXXVPTELSNITMQIMDENEKVVIGEMSDMVVEGXGX

SEQ ID NO: 29935 - protein, 43 aa, Artificial Sequence
  Non-cyclic GFR-binding peptide
  MOD_RES (6), (7), (40), (42): Xaa is C or S
  MOD_RES (21), (22), (23), (24), (25): Xaa is A or G
  MOD_RES (26), (27), (28), (29): Xaa is A or G or is absent
ASASPXXVSQDLSNITIQIMXXXXXXXXXIGEMSMIVKSXKXS

SEQ ID NO: 29936 - protein, 36 aa, Artificial Sequence
  Non-cyclic GFR-binding peptide
  MOD_RES (5), (6): Xaa is C or S
IPKAXXVPTELRSVKMAKVDEYDKVVKEVQVEMVVE

SEQ ID NO: 29937 - protein, 33 aa, Artificial Sequence
  Non-cyclic GFR-binding peptide
  MOD_RES (1), (1): Xaa is C or S
  MOD_RES (15), (16), (17), (18), (19): Xaa is A or G
  MOD_RES (20), (21), (22), (23): Xaa is A or G or is absent
XVSQDLRSVKIAKVXXXXXXXXXKEVQVMIVKS

SEQ ID NO: 29938 - protein, 39 aa, Artificial Sequence
  Non-cyclic GFR-binding peptide
  MOD_RES (5), (37), (39): Xaa is C or S
TKPTXAPTKLRPVQVRKIDDSSNVIKKATVNMVVRSXGX

SEQ ID NO: 29939 - protein, 44 aa, Artificial Sequence
  Non-cyclic GFR-binding peptide
  MOD_RES (5), (42), (44): Xaa is C or S
RNVQXRPTQVQLEPLTVLYYEIVRKKPIFEQLSNTLEDHLAXKX

SEQ ID NO: 29940 - protein, 35 aa, Artificial Sequence
  Non-cyclic GFR-binding peptide
  MOD_RES (4), (5): Xaa is C or S
PKPXXAPTQLRPVQVRKIDDSSNVIKKATVNMVVR

SEQ ID NO: 29941 - protein, 38 aa, Artificial Sequence
  Non-cyclic GFR-binding peptide
  MOD_RES (2), (3), (36), (38): Xaa is C or S
  MOD_RES (17), (18), (19), (20), (21): Xaa is A or G
  MOD_RES (22), (23), (24), (25): Xaa is A or G or is absent
PXXVSQDLRSVKIAKVXXXXXXXXXKEVQVMIVKSXKX

SEQ ID NO: 29942 - protein, 36 aa, Artificial Sequence
  Non-cyclic GFR-binding peptide
  MOD_RES (35), (35): Xaa is C or S
  MOD_RES (14), (15), (16), (17), (18): Xaa is A or G
  MOD_RES (19), (20), (21), (22): Xaa is A or G or is absent
TQVQLEPLTVLYYXXXXXXXXXEQLSNTLEDHLAXK

SEQ ID NO: 29943 - protein, 41 aa, Artificial Sequence
  Non-cyclic GFR-binding peptide
  MOD_RES (6), (7), (40): Xaa is C or S
  MOD_RES (21), (22), (23), (24), (25): Xaa is A or G
  MOD_RES (26), (27), (28), (29): Xaa is A or G or is absent
ASASPXXVPQDLRSVKIAKVXXXXXXXXXKEVQVMVVKSXK

SEQ ID NO: 29944 - protein, 39 aa, Artificial Sequence
  Non-cyclic GFR-binding peptide
  MOD_RES (3), (4), (36), (38): Xaa is C or S
KAXXVPTELRPVQMRKIDENEKVVKKATVDMVVEGXGXR

SEQ ID NO: 29945 - protein, 37 aa, Artificial Sequence
  Non-cyclic GFR-binding peptide
  MOD_RES (2), (3), (36): Xaa is C or S
  MOD_RES (17), (18), (19), (20), (21): Xaa is A or G
  MOD_RES (22), (23), (24), (25): Xaa is A or G or is absent
PXXVPQALRPVQIRKIXXXXXXXXXKKATVMIVRSXK

SEQ ID NO: 29946 - protein, 35 aa, Artificial Sequence
  Non-cyclic GFR-binding peptide
  MOD_RES (2), (2): Xaa is C or S
  MOD_RES (16), (17), (18), (19), (20): Xaa is A or G
  MOD_RES (21), (22), (23), (24): Xaa is A or G or is absent
EXVPTEEEPLTMLYYXXXXXXXXXEQLSNFLQHNK

SEQ ID NO: 29947 - protein, 37 aa, Artificial Sequence
  Non-cyclic GFR-binding peptide
  MOD_RES (2), (36): Xaa is C or S
  MOD_RES (16), (17), (18), (19), (20): Xaa is A or G
  MOD_RES (21), (22), (23), (24): Xaa is A or G or is absent
EXVPTEEEPLPMVYYXXXXXXXXXEQLSNFLQHNKXE

SEQ ID NO: 29948 - protein, 40 aa, Artificial Sequence
  Non-cyclic GFR-binding peptide
  MOD_RES (7), (7): Xaa is C or S
  MOD_RES (21), (22), (23), (24), (25): Xaa is A or G
  MOD_RES (26), (27), (28), (29): Xaa is A or G or is absent
HVTKPTXAPTKLSNITVQIMXXXXXXXXXIGEMSNMVVRS

SEQ ID NO: 29949 - protein, 40 aa, Artificial Sequence
  Non-cyclic GFR-binding peptide
  MOD_RES (2), (39): Xaa is C or S
KXQPSRVHHEPLTVLYYEYVRKKPKLEQLSNRLEEHLEXA

SEQ ID NO: 29950 - protein, 32 aa, Artificial Sequence
  Non-cyclic GFR-binding peptide
  MOD_RES (1), (32): Xaa is C or S
XVPQALRSVKIAKVVGRKPKVKEVQVMIVRSX

SEQ ID NO: 29951 - protein, 34 aa, Artificial Sequence
  Non-cyclic GFR-binding peptide
PSRVHHEPLPVVYYEYVRKKPKLEQLSNRLEEHL

SEQ ID NO: 29952 - protein, 40 aa, Artificial Sequence
  Non-cyclic GFR-binding peptide
  MOD_RES (6), (7), (40): Xaa is C or S
  MOD_RES (21), (22), (23), (24), (25): Xaa is A or G
  MOD_RES (26), (27), (28), (29): Xaa is A or G or is absent
ASASPXXVPQDLRSVKIAKVXXXXXXXXXKEVQVMVVKSX

SEQ ID NO: 29953 - protein, 42 aa, Artificial Sequence
  Non-cyclic GFR-binding peptide
  MOD_RES (5), (6), (39), (41): Xaa is C or S
  MOD_RES (20), (21), (22), (23), (24): Xaa is A or G
  MOD_RES (25), (26), (27), (28): Xaa is A or G or is absent
SAAPXXVPQALSNITIQIMXXXXXXXXXIGEMSMIVRSXKXS

SEQ ID NO: 29954 - protein, 40 aa, Artificial Sequence
  Non-cyclic GFR-binding peptide
  MOD_RES (5), (6), (40): Xaa is C or S
  MOD_RES (20), (21), (22), (23), (24): Xaa is A or G
  MOD_RES (25), (26), (27), (28): Xaa is A or G or is absent
VPKPXXAPTQLRSVKVAKVXXXXXXXXXKEVQVNMVVRAX

SEQ ID NO: 29955 - protein, 38 aa, Artificial Sequence
  Non-cyclic GFR-binding peptide
  MOD_RES (6), (7), (38): Xaa is C or S
ASAAPXXVPQALRSVKIAKVVGRKPKVKEVQVMIVRSX

SEQ ID NO: 29956 - protein, 42 aa, Artificial Sequence
  Non-cyclic GFR-binding peptide
  MOD_RES (7), (41): Xaa is C or S
  MOD_RES (21), (22), (23), (24), (25): Xaa is A or G
  MOD_RES (26), (27), (28), (29): Xaa is A or G or is absent
NDEGLEXVPTEEEPLPMVYYXXXXXXXXXEQLSNFLQHNKXE

SEQ ID NO: 29957 - protein, 36 aa, Artificial Sequence
  Non-cyclic GFR-binding peptide
  MOD_RES (1), (34), (36): Xaa is C or S
  MOD_RES (15), (16), (17), (18), (19): Xaa is A or G
  MOD_RES (20), (21), (22), (23): Xaa is A or G or is absent
XVPQALRSVKIAKVXXXXXXXXXKEVQVMIVRSXKX

SEQ ID NO: 29958 - protein, 35 aa, Artificial Sequence
  Non-cyclic GFR-binding peptide
  MOD_RES (1), (35): Xaa is C or S
  MOD_RES (15), (16), (17), (18), (19): Xaa is A or G
  MOD_RES (20), (21), (22), (23): Xaa is A or G or is absent
XVPTELRSVKMAKVXXXXXXXXXKEVQVDMVVEGX

SEQ ID NO: 29959 - protein, 34 aa, Artificial Sequence
  Non-cyclic GFR-binding peptide
RPTQVQLEPLTVLYYEIVRKKPIFEQLSNTLEDH

SEQ ID NO: 29960 - protein, 32 aa, Artificial Sequence
  Non-cyclic GFR-binding peptide
  MOD_RES (1), (2): Xaa is C or S
XXVPTELRPVQMRKIDEYDKVVKKATVEMVVE

SEQ ID NO: 29961 - protein, 40 aa, Artificial Sequence
  Non-cyclic GFR-binding peptide
  MOD_RES (37), (39): Xaa is C or S
  MOD_RES (16), (17), (18), (19), (20): Xaa is A or G
  MOD_RES (21), (22), (23), (24): Xaa is A or G or is absent
QPSRVHHEPLPVVYYXXXXXXXXXEQLSNRLEEHLEXAXA

SEQ ID NO: 29962 - protein, 36 aa, Artificial Sequence
  Non-cyclic GFR-binding peptide
  MOD_RES (3), (4), (36): Xaa is C or S
KAXXVPTELRPVQMRKIDENEKVVKKATVDMVVEGX

SEQ ID NO: 29963 - protein, 31 aa, Artificial Sequence
  Non-cyclic GFR-binding peptide
VPTELSNITMQIMDENEKVVIGEMSDMVVEG

SEQ ID NO: 29964 - protein, 33 aa, Artificial Sequence
  Non-cyclic GFR-binding peptide
  MOD_RES (14), (15), (16), (17), (18): Xaa is A or G
  MOD_RES (19), (20), (21), (22): Xaa is A or G or is absent
VPTELRPVQMRKIXXXXXXXXXKKATVDMVVEG

SEQ ID NO: 29965 - protein, 41 aa, Artificial Sequence
  Non-cyclic GFR-binding peptide
  MOD_RES (4), (38), (40): Xaa is C or S
  MOD_RES (18), (19), (20), (21), (22): Xaa is A or G
  MOD_RES (23), (24), (25), (26): Xaa is A or G or is absent
GLEXVPTEEEPLTMLYYXXXXXXXXXEQLSNFLQHNKXEXR

SEQ ID NO: 29966 - protein, 41 aa, Artificial Sequence
  Non-cyclic GFR-binding peptide
  MOD_RES (4), (5), (38), (40): Xaa is C or S
  MOD_RES (19), (20), (21), (22), (23): Xaa is A or G
  MOD_RES (24), (25), (26), (27): Xaa is A or G or is absent
AAPXXVPQALRPVQIRKIXXXXXXXXXKKATVMIVRSXKXS

SEQ ID NO: 29967 - protein, 36 aa, Artificial Sequence
  Non-cyclic GFR-binding peptide
  MOD_RES (3), (4), (35): Xaa is C or S
SPXXVPQDLRPVQIRKIVGRTPKVKKATVMVVKSXK

SEQ ID NO: 29968 - protein, 32 aa, Artificial Sequence
  Non-cyclic GFR-binding peptide
  MOD_RES (14), (15), (16), (17), (18): Xaa is A or G
  MOD_RES (19), (20), (21), (22): Xaa is A or G or is absent
APTKLSNITVQIMXXXXXXXXXIGEMSNMVVR

SEQ ID NO: 29969 - protein, 33 aa, Artificial Sequence
  Non-cyclic GFR-binding peptide
  MOD_RES (1), (1): Xaa is C or S
  MOD_RES (15), (16), (17), (18), (19): Xaa is A or G
  MOD_RES (20), (21), (22), (23): Xaa is A or G or is absent
XAPTKLRSVKVAKVXXXXXXXXXKEVQVNMVVR

SEQ ID NO: 29970 - protein, 37 aa, Artificial Sequence
  Non-cyclic GFR-binding peptide
  MOD_RES (5), (5): Xaa is C or S
  MOD_RES (19), (20), (21), (22), (23): Xaa is A or G
  MOD_RES (24), (25), (26), (27): Xaa is A or G or is absent
TKPTXAPTKLRPVQVRKIXXXXXXXXXKKATVNMVVR

SEQ ID NO: 29971 - protein, 37 aa, Artificial Sequence
  Non-cyclic GFR-binding peptide
  MOD_RES (5), (5): Xaa is C or S
  MOD_RES (19), (20), (21), (22), (23): Xaa is A or G
  MOD_RES (24), (25), (26), (27): Xaa is A or G or is absent
TKPTXAPTKLRSVKVAKVXXXXXXXXXKEVQVNMVVR

SEQ ID NO: 29972 - protein, 38 aa, Artificial Sequence
  Non-cyclic GFR-binding peptide
  MOD_RES (2), (3), (35), (37): Xaa is C or S
PXXAPTQLSNITVQIMDDSSNVIIGEMSNMVVRAXGXH

SEQ ID NO: 29973 - protein, 36 aa, Artificial Sequence
  Non-cyclic GFR-binding peptide
  MOD_RES (33), (35): Xaa is C or S
  MOD_RES (14), (15), (16), (17), (18): Xaa is A or G
  MOD_RES (19), (20), (21), (22): Xaa is A or G or is absent
VPQDLSNITIQIMXXXXXXXXXIGEMSMVVKSXKXS

SEQ ID NO: 29974 - protein, 31 aa, Artificial Sequence
  Non-cyclic GFR-binding peptide
VPTELSNITMQIMDEYDKVVIGEMSEMVVEG

SEQ ID NO: 29975 - protein, 38 aa, Artificial Sequence
  Non-cyclic GFR-binding peptide
  MOD_RES (1), (35), (37): Xaa is C or S
  MOD_RES (15), (16), (17), (18), (19): Xaa is A or G
  MOD_RES (20), (21), (22), (23): Xaa is A or G or is absent
XVPTELRPVQMRKIXXXXXXXXXKKATVEMVVEGXGXR

SEQ ID NO: 29976 - protein, 43 aa, Artificial Sequence
  Non-cyclic GFR-binding peptide
  MOD_RES (6), (40), (42): Xaa is C or S
  MOD_RES (20), (21), (22), (23), (24): Xaa is A or G
  MOD_RES (25), (26), (27), (28): Xaa is A or G or is absent
VTKPTXAPTKLRPVQVRKIXXXXXXXXXKKATVNMVVRSXGXH

SEQ ID NO: 29977 - protein, 41 aa, Artificial Sequence
  Non-cyclic GFR-binding peptide
  MOD_RES (5), (39), (41): Xaa is C or S
  MOD_RES (19), (20), (21), (22), (23): Xaa is A or G
  MOD_RES (24), (25), (26), (27): Xaa is A or G or is absent
TKPTXAPTKLRPVQVRKIXXXXXXXXXKKATVNMVVRSXGX

SEQ ID NO: 29978 - protein, 39 aa, Artificial Sequence
  Non-cyclic GFR-binding peptide
  MOD_RES (6), (7), (39): Xaa is C or S
TVPKPXXAPTQLSNITVQIMDDSSNVIIGEMSNMVVRAX

SEQ ID NO: 29979 - protein, 43 aa, Artificial Sequence
  Non-cyclic GFR-binding peptide
  MOD_RES (6), (7), (40), (42): Xaa is C or S
  MOD_RES (21), (22), (23), (24), (25): Xaa is A or G
  MOD_RES (26), (27), (28), (29): Xaa is A or G or is absent
ASASPXXVPQDLRPVQIRKIXXXXXXXXXKKATVMVVKSXKXS

SEQ ID NO: 29980 - protein, 36 aa, Artificial Sequence
  Non-cyclic GFR-binding peptide
  MOD_RES (1), (1): Xaa is C or S
XRPTQVQLEPLTVLYYEIVRKKPIFEQLSNTLEDHL

SEQ ID NO: 29981 - protein, 40 aa, Artificial Sequence
  Non-cyclic GFR-binding peptide
  MOD_RES (37), (39): Xaa is C or S
RPTQVQLEPLTVLYYEIVRKKPIFEQLSNTLEDHLAXKXE

SEQ ID NO: 29982 - protein, 33 aa, Artificial Sequence
  Non-cyclic GFR-binding peptide
  MOD_RES (1), (1): Xaa is C or S
  MOD_RES (15), (16), (17), (18), (19): Xaa is A or G
  MOD_RES (20), (21), (22), (23): Xaa is A or G or is absent
XAPTKLRPVQVRKIXXXXXXXXXKKATVNMVVR

SEQ ID NO: 29983 - protein, 37 aa, Artificial Sequence
  Non-cyclic GFR-binding peptide
  MOD_RES (1), (2), (34), (36): Xaa is C or S
XXVPTELRSVKMAKVDEYDKVVKEVQVEMVVEGXGXR

SEQ ID NO: 29984 - protein, 42 aa, Artificial Sequence
  Non-cyclic GFR-binding peptide
  MOD_RES (4), (41): Xaa is C or S
  MOD_RES (20), (21), (22), (23), (24): Xaa is A or G
  MOD_RES (25), (26), (27), (28): Xaa is A or G or is absent
SVKXQPSRVHHEPLTVLYYXXXXXXXXXEQLSNRLEEHLEXA

SEQ ID NO: 29985 - protein, 34 aa, Artificial Sequence
  Non-cyclic GFR-binding peptide
  MOD_RES (1), (2): Xaa is C or S
  MOD_RES (16), (17), (18), (19), (20): Xaa is A or G
  MOD_RES (21), (22), (23), (24): Xaa is A or G or is absent
XXAPTQLSNITVQIMXXXXXXXXXIGEMSNMVVR

SEQ ID NO: 29986 - protein, 32 aa, Artificial Sequence
  Non-cyclic GFR-binding peptide
  MOD_RES (1), (2): Xaa is C or S
XXVPQALRPVQIRKIVGRKPKVKKATVMIVRS

SEQ ID NO: 29987 - protein, 40 aa, Artificial Sequence
  Non-cyclic GFR-binding peptide
  MOD_RES (2), (39): Xaa is C or S
QXRPTQVQLEPLTVLYYEIVRKKPIFEQLSNTLEDHLAXK

SEQ ID NO: 29988 - protein, 41 aa, Artificial Sequence
  Non-cyclic GFR-binding peptide
  MOD_RES (4), (38), (40): Xaa is C or S
  MOD_RES (18), (19), (20), (21), (22): Xaa is A or G
  MOD_RES (23), (24), (25), (26): Xaa is A or G or is absent
KPTXAPTKLSNITVQIMXXXXXXXXXIGEMSNMVVRSXGXH

SEQ ID NO: 29989 - protein, 40 aa, Artificial Sequence
  Non-cyclic GFR-binding peptide
  MOD_RES (6), (7), (39): Xaa is C or S
YVPKPXXAPTKLRPVQVRKIDDSSNVIKKATVNMVVRSXG

SEQ ID NO: 29990 - protein, 38 aa, Artificial Sequence
  Non-cyclic GFR-binding peptide
  MOD_RES (2), (3), (35), (37): Xaa is C or S
AXXVPTELSNITMQIMDEYDKVVIGEMSEMVVEGXGXR

SEQ ID NO: 29991 - protein, 37 aa, Artificial Sequence
  Non-cyclic GFR-binding peptide
  MOD_RES (37), (37): Xaa is C or S
  MOD_RES (16), (17), (18), (19), (20): Xaa is A or G
  MOD_RES (21), (22), (23), (24): Xaa is A or G or is absent
QPSRVHHEPLPVVYYXXXXXXXXXEQLSNRLEEHLEX

SEQ ID NO: 29992 - protein, 38 aa, Artificial Sequence
  Non-cyclic GFR-binding peptide
  MOD_RES (1), (35), (37): Xaa is C or S
  MOD_RES (15), (16), (17), (18), (19): Xaa is A or G
  MOD_RES (20), (21), (22), (23): Xaa is A or G or is absent
XVPTELRSVKMAKVXXXXXXXXXKEVQVDMVVEGXGXR

SEQ ID NO: 29993 - protein, 39 aa, Artificial Sequence
  Non-cyclic GFR-binding peptide
  MOD_RES (6), (7): Xaa is C or S
  MOD_RES (21), (22), (23), (24), (25): Xaa is A or G
  MOD_RES (26), (27), (28), (29): Xaa is A or G or is absent
ASAAPXXVPQALSNITIQIMXXXXXXXXXIGEMSMIVRS

SEQ ID NO: 29994 - protein, 35 aa, Artificial Sequence
  Non-cyclic GFR-binding peptide
  MOD_RES (1), (32), (34): Xaa is C or S
XVPQDLRSVKIAKVVGRTPKVKEVQVMVVKSXKXS

SEQ ID NO: 29995 - protein, 37 aa, Artificial Sequence
  Non-cyclic GFR-binding peptide
  MOD_RES (4), (5), (36): Xaa is C or S
AAPXXVPQALRPVQIRKIVGRKPKVKKATVMIVRSXK

SEQ ID NO: 29996 - protein, 36 aa, Artificial Sequence
  Non-cyclic GFR-binding peptide
  MOD_RES (1), (35): Xaa is C or S
  MOD_RES (15), (16), (17), (18), (19): Xaa is A or G
  MOD_RES (20), (21), (22), (23): Xaa is A or G or is absent
XAPTQLRSVKVAKVXXXXXXXXXKEVQVNMVVRAXG

SEQ ID NO: 29997 - protein, 40 aa, Artificial Sequence
  Non-cyclic GFR-binding peptide
  MOD_RES (4), (5), (39): Xaa is C or S
  MOD_RES (19), (20), (21), (22), (23): Xaa is A or G
  MOD_RES (24), (25), (26), (27): Xaa is A or G or is absent
PKPXXAPTQLRPVQVRKIXXXXXXXXXKKATVNMVVRAXG

SEQ ID NO: 29998 - protein, 34 aa, Artificial Sequence
  Non-cyclic GFR-binding peptide
  MOD_RES (34), (34): Xaa is C or S
  MOD_RES (14), (15), (16), (17), (18): Xaa is A or G
  MOD_RES (19), (20), (21), (22): Xaa is A or G or is absent
VPTELSNITMQIMXXXXXXXXXIGEMSDMVVEGX

SEQ ID NO: 29999 - protein, 34 aa, Artificial Sequence
  Non-cyclic GFR-binding peptide
  MOD_RES (3), (4): Xaa is C or S
KAXXVPTELRSVKMAKVDENEKVVKEVQVDMVVE

SEQ ID NO: 30000 - protein, 41 aa, Artificial Sequence
  Non-cyclic GFR-binding peptide
  MOD_RES (3), (4), (38), (40): Xaa is C or S
  MOD_RES (18), (19), (20), (21), (22): Xaa is A or G
  MOD_RES (23), (24), (25), (26): Xaa is A or G or is absent
KPXXAPTKLRPVQVRKIXXXXXXXXXKKATVNMVVRSXGXH

SEQ ID NO: 30001 - protein, 38 aa, Artificial Sequence
  Non-cyclic GFR-binding peptide
  MOD_RES (5), (6), (37): Xaa is C or S
SAAPXXVPQALSNITIQIMVGRKPKVIGEMSMIVRSXK

SEQ ID NO: 30002 - protein, 34 aa, Artificial Sequence
  Non-cyclic GFR-binding peptide
  MOD_RES (16), (17), (18), (19), (20): Xaa is A or G
  MOD_RES (21), (22), (23), (24): Xaa is A or G or is absent
QPSRVHHEPLPVVYYXXXXXXXXXEQLSNRLEEH

SEQ ID NO: 30003 - protein, 36 aa, Artificial Sequence
  Non-cyclic GFR-binding peptide
  MOD_RES (1), (33), (35): Xaa is C or S
XAPTKLSNITVQIMDDSSNVIIGEMSNMVVRSXGXH

SEQ ID NO: 30004 - protein, 43 aa, Artificial Sequence
  Non-cyclic GFR-binding peptide
  MOD_RES (4), (41), (43): Xaa is C or S
NVQXRPTQVQLEPLPVVYYEIVRKKPIFEQLSNTLEDHLAXKX

SEQ ID NO: 30005 - protein, 42 aa, Artificial Sequence
  Non-cyclic GFR-binding peptide
  MOD_RES (6), (7), (41): Xaa is C or S
  MOD_RES (21), (22), (23), (24), (25): Xaa is A or G
  MOD_RES (26), (27), (28), (29): Xaa is A or G or is absent
TVPKPXXAPTQLRPVQVRKIXXXXXXXXXKKATVNMVVRAXG

SEQ ID NO: 30006 - protein, 35 aa, Artificial Sequence
  Non-cyclic GFR-binding peptide
PTQVQLEPLTVLYYEIVRKKPIFEQLSNTLEDHLA

SEQ ID NO: 30007 - protein, 38 aa, Artificial Sequence
  Non-cyclic GFR-binding peptide
  MOD_RES (5), (6), (38): Xaa is C or S
VPKPXXAPTQLSNITVQIMDDSSNVIIGEMSNMVVRAX

SEQ ID NO: 30008 - protein, 35 aa, Artificial Sequence
  Non-cyclic GFR-binding peptide
  MOD_RES (2), (34): Xaa is C or S
TXAPTKLSNITVQIMDDSSNVIIGEMSNMVVRSXG

SEQ ID NO: 30009 - protein, 39 aa, Artificial Sequence
  Non-cyclic GFR-binding peptide
  MOD_RES (4), (5), (37), (39): Xaa is C or S
PKAXXVPTELRPVQMRKIDEYDKVVKKATVEMVVEGXGX

SEQ ID NO: 30010 - protein, 35 aa, Artificial Sequence
  Non-cyclic GFR-binding peptide
  MOD_RES (33), (35): Xaa is C or S
  MOD_RES (14), (15), (16), (17), (18): Xaa is A or G
  MOD_RES (19), (20), (21), (22): Xaa is A or G or is absent
VSQDLSNITIQIMXXXXXXXXXIGEMSMIVKSXKX

SEQ ID NO: 30011 - protein, 37 aa, Artificial Sequence
  Non-cyclic GFR-binding peptide
  MOD_RES (1), (1): Xaa is C or S
  MOD_RES (17), (18), (19), (20), (21): Xaa is A or G
  MOD_RES (22), (23), (24), (25): Xaa is A or G or is absent
XRPTQVQLEPLPVVYYXXXXXXXXXEQLSNTLEDHLA

SEQ ID NO: 30012 - protein, 36 aa, Artificial Sequence
  Non-cyclic GFR-binding peptide
  MOD_RES (2), (36): Xaa is C or S
  MOD_RES (16), (17), (18), (19), (20): Xaa is A or G
  MOD_RES (21), (22), (23), (24): Xaa is A or G or is absent
TXAPTKLRPVQVRKIXXXXXXXXXKKATVNMVVRSX

SEQ ID NO: 30013 - protein, 34 aa, Artificial Sequence
  Non-cyclic GFR-binding peptide
  MOD_RES (34), (34): Xaa is C or S
  MOD_RES (14), (15), (16), (17), (18): Xaa is A or G
  MOD_RES (19), (20), (21), (22): Xaa is A or G or is absent
VPTEEEPLTMLYYXXXXXXXXXEQLSNFLQHNKX

SEQ ID NO: 30014 - protein, 37 aa, Artificial Sequence
  Non-cyclic GFR-binding peptide
  MOD_RES (3), (4), (36): Xaa is C or S
KAXXVPTELRSVKMAKVDENEKVVKEVQVDMVVEGXG

SEQ ID NO: 30015 - protein, 39 aa, Artificial Sequence
  Non-cyclic GFR-binding peptide
  MOD_RES (5), (6), (37), (39): Xaa is C or S
SAAPXXVPQALRPVQIRKIVGRKPKVKKATVMIVRSXKX

SEQ ID NO: 30016 - protein, 38 aa, Artificial Sequence
  Non-cyclic GFR-binding peptide
  MOD_RES (1), (35), (37): Xaa is C or S
XVPTEEEPLTMLYYRIKPHQGQHEQLSNFLQHNKXEXR

SEQ ID NO: 30017 - protein, 36 aa, Artificial Sequence
  Non-cyclic GFR-binding peptide
  MOD_RES (3), (3): Xaa is C or S
  MOD_RES (17), (18), (19), (20), (21): Xaa is A or G
  MOD_RES (22), (23), (24), (25): Xaa is A or G or is absent
PTXAPTKLSNITVQIMXXXXXXXXXIGEMSNMVVRS

SEQ ID NO: 30018 - protein, 39 aa, Artificial Sequence
  Non-cyclic GFR-binding peptide
  MOD_RES (37), (39): Xaa is C or S
  MOD_RES (16), (17), (18), (19), (20): Xaa is A or G
  MOD_RES (21), (22), (23), (24): Xaa is A or G or is absent
RPTQVQLEPLPVVYYXXXXXXXXXEQLSNTLEDHLAXKX

SEQ ID NO: 30019 - protein, 39 aa, Artificial Sequence
  Non-cyclic GFR-binding peptide
  MOD_RES (6), (7): Xaa is C or S
  MOD_RES (21), (22), (23), (24), (25): Xaa is A or G
  MOD_RES (26), (27), (28), (29): Xaa is A or G or is absent
KIPKAXXVPTELSNITMQIMXXXXXXXXXIGEMSDMVVE

SEQ ID NO: 30020 - protein, 36 aa, Artificial Sequence
  Non-cyclic GFR-binding peptide
  MOD_RES (6), (6): Xaa is C or S
VTKPTXAPTKLRSVKVAKVDDSSNVIKEVQVNMVVR

SEQ ID NO: 30021 - protein, 40 aa, Artificial Sequence
  Non-cyclic GFR-binding peptide
  MOD_RES (5), (5): Xaa is C or S
  MOD_RES (21), (22), (23), (24), (25): Xaa is A or G
  MOD_RES (26), (27), (28), (29): Xaa is A or G or is absent
RNVQXRPTQVQLEPLPVVYYXXXXXXXXXEQLSNTLEDHL

SEQ ID NO: 30022 - protein, 39 aa, Artificial Sequence
  Non-cyclic GFR-binding peptide
  MOD_RES (4), (38): Xaa is C or S
  MOD_RES (18), (19), (20), (21), (22): Xaa is A or G
  MOD_RES (23), (24), (25), (26): Xaa is A or G or is absent
GLEXVPTEEEPLTMLYYXXXXXXXXXEQLSNFLQHNKXE

SEQ ID NO: 30023 - protein, 42 aa, Artificial Sequence
  Non-cyclic GFR-binding peptide
  MOD_RES (4), (5), (39), (41): Xaa is C or S
  MOD_RES (19), (20), (21), (22), (23): Xaa is A or G
  MOD_RES (24), (25), (26), (27): Xaa is A or G or is absent
PKAXXVPTELSNITMQIMXXXXXXXXXIGEMSDMVVEGXGXR

SEQ ID NO: 30024 - protein, 36 aa, Artificial Sequence
  Non-cyclic GFR-binding peptide
  MOD_RES (5), (6): Xaa is C or S
IPKAXXVPTELRPVQMRKIDENEKVVKKATVDMVVE

SEQ ID NO: 30025 - protein, 35 aa, Artificial Sequence
  Non-cyclic GFR-binding peptide
  MOD_RES (1), (35): Xaa is C or S
XVPTEEEPLPMVYYRIKPHQGQHEQLSNFLQHNKX

SEQ ID NO: 30026 - protein, 38 aa, Artificial Sequence
  Non-cyclic GFR-binding peptide
  MOD_RES (2), (3), (37): Xaa is C or S
  MOD_RES (17), (18), (19), (20), (21): Xaa is A or G
  MOD_RES (22), (23), (24), (25): Xaa is A or G or is absent
AXXVPTELRSVKMAKVXXXXXXXXXKEVQVEMVVEGXG

SEQ ID NO: 30027 - protein, 40 aa, Artificial Sequence
  Non-cyclic GFR-binding peptide
  MOD_RES (5), (6), (37), (39): Xaa is C or S
SAAPXXVPQALRSVKIAKVVGRKPKVKEVQVMIVRSXKXS

SEQ ID NO: 30028 - protein, 36 aa, Artificial Sequence
  Non-cyclic GFR-binding peptide
  MOD_RES (2), (3), (36): Xaa is C or S
  MOD_RES (17), (18), (19), (20), (21): Xaa is A or G
  MOD_RES (22), (23), (24), (25): Xaa is A or G or is absent
PXXVPQALRPVQIRKIXXXXXXXXXKKATVMIVRSX

SEQ ID NO: 30029 - protein, 38 aa, Artificial Sequence
  Non-cyclic GFR-binding peptide
  MOD_RES (2), (3), (37): Xaa is C or S
  MOD_RES (17), (18), (19), (20), (21): Xaa is A or G
  MOD_RES (22), (23), (24), (25): Xaa is A or G or is absent
PXXAPTKLRPVQVRKIXXXXXXXXXKKATVNMVVRSXG

SEQ ID NO: 30030 - protein, 42 aa, Artificial Sequence
  Non-cyclic GFR-binding peptide
  MOD_RES (2), (39), (41): Xaa is C or S
KXQPSRVHHEPLPVVYYEYVRKKPKLEQLSNRLEEHLEXAXA

SEQ ID NO: 30031 - protein, 35 aa, Artificial Sequence
  Non-cyclic GFR-binding peptide
  MOD_RES (1), (2), (35): Xaa is C or S
  MOD_RES (16), (17), (18), (19), (20): Xaa is A or G
  MOD_RES (21), (22), (23), (24): Xaa is A or G or is absent
XXVPQDLRSVKIAKVXXXXXXXXXKEVQVMVVKSX

SEQ ID NO: 30032 - protein, 33 aa, Artificial Sequence
  Non-cyclic GFR-binding peptide
  MOD_RES (31), (33): Xaa is C or S
VPQDLRSVKIAKVVGRTPKVKEVQVMVVKSXKX

SEQ ID NO: 30033 - protein, 32 aa, Artificial Sequence
  Non-cyclic GFR-binding peptide
  MOD_RES (14), (15), (16), (17), (18): Xaa is A or G
  MOD_RES (19), (20), (21), (22): Xaa is A or G or is absent
VPTEEEPLTMLYYXXXXXXXXXEQLSNFLQHN

SEQ ID NO: 30034 - protein, 41 aa, Artificial Sequence
  Non-cyclic GFR-binding peptide
  MOD_RES (6), (7), (39), (41): Xaa is C or S
YVPKPXXAPTKLSNITVQIMDDSSNVIIGEMSNMVVRSXGX

SEQ ID NO: 30035 - protein, 32 aa, Artificial Sequence
  Non-cyclic GFR-binding peptide
  MOD_RES (14), (15), (16), (17), (18): Xaa is A or G
  MOD_RES (19), (20), (21), (22): Xaa is A or G or is absent
VPQDLRPVQIRKIXXXXXXXXXKKATVMVVKS

SEQ ID NO: 30036 - protein, 34 aa, Artificial Sequence
  Non-cyclic GFR-binding peptide
  MOD_RES (31), (33): Xaa is C or S
VPQALSNITIQIMVGRKPKVIGEMSMIVRSXKXS

SEQ ID NO: 30037 - protein, 38 aa, Artificial Sequence
  Non-cyclic GFR-binding peptide
  MOD_RES (1), (2), (36), (38): Xaa is C or S
  MOD_RES (16), (17), (18), (19), (20): Xaa is A or G
  MOD_RES (21), (22), (23), (24): Xaa is A or G or is absent
XXVPTELRPVQMRKIXXXXXXXXXKKATVEMVVEGXGX

SEQ ID NO: 30038 - protein, 35 aa, Artificial Sequence
  Non-cyclic GFR-binding peptide
  MOD_RES (3), (35): Xaa is C or S
PTXAPTKLSNITVQIMDDSSNVIIGEMSNMVVRSX

SEQ ID NO: 30039 - protein, 36 aa, Artificial Sequence
  Non-cyclic GFR-binding peptide
  MOD_RES (1), (2), (36): Xaa is C or S
  MOD_RES (16), (17), (18), (19), (20): Xaa is A or G
  MOD_RES (21), (22), (23), (24): Xaa is A or G or is absent
XXVPTELSNITMQIMXXXXXXXXXIGEMSEMVVEGX

SEQ ID NO: 30040 - protein, 34 aa, Artificial Sequence
  Non-cyclic GFR-binding peptide
  MOD_RES (2), (2): Xaa is C or S
EXVPTEEEPLPMVYYRIKPHQGQHEQLSNFLQHN

SEQ ID NO: 30041 - protein, 37 aa, Artificial Sequence
  Non-cyclic GFR-binding peptide
  MOD_RES (34), (36): Xaa is C or S
VPTEEEPLPMVYYRIKPHQGQHEQLSNFLQHNKXEXR

SEQ ID NO: 30042 - protein, 35 aa, Artificial Sequence
  Non-cyclic GFR-binding peptide
  MOD_RES (1), (2): Xaa is C or S
  MOD_RES (16), (17), (18), (19), (20): Xaa is A or G
  MOD_RES (21), (22), (23), (24): Xaa is A or G or is absent
XXVPTELRPVQMRKIXXXXXXXXXKKATVDMVVEG

SEQ ID NO: 30043 - protein, 37 aa, Artificial Sequence
  Non-cyclic GFR-binding peptide
  MOD_RES (3), (4), (36): Xaa is C or S
KPXXAPTQLRSVKVAKVDDSSNVIKEVQVNMVVRAXG

SEQ ID NO: 30044 - protein, 32 aa, Artificial Sequence
  Non-cyclic GFR-binding peptide
  MOD_RES (1), (1): Xaa is C or S
XVPTELRPVQMRKIDEYDKVVKKATVEMVVEG

SEQ ID NO: 30045 - protein, 41 aa, Artificial Sequence
  Non-cyclic GFR-binding peptide
  MOD_RES (3), (4), (38), (40): Xaa is C or S
  MOD_RES (18), (19), (20), (21), (22): Xaa is A or G
  MOD_RES (23), (24), (25), (26): Xaa is A or G or is absent
KPXXAPTQLSNITVQIMXXXXXXXXXIGEMSNMVVRAXGXH

SEQ ID NO: 30046 - protein, 37 aa, Artificial Sequence
  Non-cyclic GFR-binding peptide
  MOD_RES (5), (6): Xaa is C or S
VPKPXXAPTKLRSVKVAKVDDSSNVIKEVQVNMVVRS

SEQ ID NO: 30047 - protein, 34 aa, Artificial Sequence
  Non-cyclic GFR-binding peptide
  MOD_RES (1), (2): Xaa is C or S
  MOD_RES (16), (17), (18), (19), (20): Xaa is A or G
  MOD_RES (21), (22), (23), (24): Xaa is A or G or is absent
XXVPTELRPVQMRKIXXXXXXXXXKKATVEMVVE

SEQ ID NO: 30048 - protein, 41 aa, Artificial Sequence
  Non-cyclic GFR-binding peptide
  MOD_RES (6), (7), (38), (40): Xaa is C or S
ASAAPXXVPQALRSVKIAKVVGRKPKVKEVQVMIVRSXKXS

SEQ ID NO: 30049 - protein, 35 aa, Artificial Sequence
  Non-cyclic GFR-binding peptide
  MOD_RES (1), (35): Xaa is C or S
  MOD_RES (15), (16), (17), (18), (19): Xaa is A or G
  MOD_RES (20), (21), (22), (23): Xaa is A or G or is absent
XVPTEEEPLTMLYYXXXXXXXXXEQLSNFLQHNKX

SEQ ID NO: 30050 - protein, 37 aa, Artificial Sequence
  Non-cyclic GFR-binding peptide
  MOD_RES (1), (2), (35), (37): Xaa is C or S
  MOD_RES (16), (17), (18), (19), (20): Xaa is A or G
  MOD_RES (21), (22), (23), (24): Xaa is A or G or is absent
XXVSQDLSNITIQIMXXXXXXXXXIGEMSMIVKSXKX

SEQ ID NO: 30051 - protein, 34 aa, Artificial Sequence
  Non-cyclic GFR-binding peptide
  MOD_RES (1), (1): Xaa is C or S
  MOD_RES (15), (16), (17), (18), (19): Xaa is A or G
  MOD_RES (20), (21), (22), (23): Xaa is A or G or is absent
XVPTEEEPLTMLYYXXXXXXXXXEQLSNFLQHNK

SEQ ID NO: 30052 - protein, 36 aa, Artificial Sequence
  Non-cyclic GFR-binding peptide
  MOD_RES (2), (36): Xaa is C or S
EXVPTEEEPLTMLYYRIKPHQGQHEQLSNFLQHNKX

SEQ ID NO: 30053 - protein, 36 aa, Artificial Sequence
  Non-cyclic GFR-binding peptide
  MOD_RES (3), (4): Xaa is C or S
  MOD_RES (18), (19), (20), (21), (22): Xaa is A or G
  MOD_RES (23), (24), (25), (26): Xaa is A or G or is absent
KPXXAPTKLRPVQVRKIXXXXXXXXXKKATVNMVVR

SEQ ID NO: 30054 - protein, 39 aa, Artificial Sequence
  Non-cyclic GFR-binding peptide
  MOD_RES (5), (6), (38): Xaa is C or S
VPKPXXAPTKLSNITVQIMDDSSNVIIGEMSNMVVRSXG

SEQ ID NO: 30055 - protein, 32 aa, Artificial Sequence
  Non-cyclic GFR-binding peptide
  MOD_RES (1), (2): Xaa is C or S
XXAPTKLRSVKVAKVDDSSNVIKEVQVNMVVR

SEQ ID NO: 30056 - protein, 35 aa, Artificial Sequence
  Non-cyclic GFR-binding peptide
  MOD_RES (1), (35): Xaa is C or S
  MOD_RES (15), (16), (17), (18), (19): Xaa is A or G
  MOD_RES (20), (21), (22), (23): Xaa is A or G or is absent
XVPTELSNITMQIMXXXXXXXXXIGEMSEMVVEGX

SEQ ID NO: 30057 - protein, 35 aa, Artificial Sequence
  Non-cyclic GFR-binding peptide
  MOD_RES (15), (16), (17), (18), (19): Xaa is A or G
  MOD_RES (20), (21), (22), (23): Xaa is A or G or is absent
PSRVHHEPLTVLYYXXXXXXXXXEQLSNRLEEHLE

SEQ ID NO: 30058 - protein, 36 aa, Artificial Sequence
  Non-cyclic GFR-binding peptide
  MOD_RES (2), (3): Xaa is C or S
  MOD_RES (17), (18), (19), (20), (21): Xaa is A or G
  MOD_RES (22), (23), (24), (25): Xaa is A or G or is absent
PXXAPTKLRSVKVAKVXXXXXXXXXKEVQVNMVVRS

SEQ ID NO: 30059 - protein, 40 aa, Artificial Sequence
  Non-cyclic GFR-binding peptide
  MOD_RES (3), (40): Xaa is C or S
VKXQPSRVHHEPLTVLYYEYVRKKPKLEQLSNRLEEHLEX

SEQ ID NO: 30060 - protein, 38 aa, Artificial Sequence
  Non-cyclic GFR-binding peptide
  MOD_RES (4), (5), (38): Xaa is C or S
  MOD_RES (19), (20), (21), (22), (23): Xaa is A or G
  MOD_RES (24), (25), (26), (27): Xaa is A or G or is absent
AAPXXVPQALRPVQIRKIXXXXXXXXXKKATVMIVRSX

SEQ ID NO: 30061 - protein, 37 aa, Artificial Sequence
  Non-cyclic GFR-binding peptide
  MOD_RES (6), (7): Xaa is C or S
ASASPXXVPQDLRPVQIRKIVGRTPKVKKATVMVVKS

SEQ ID NO: 30062 - protein, 42 aa, Artificial Sequence
  Non-cyclic GFR-binding peptide
  MOD_RES (4), (5), (39), (41): Xaa is C or S
  MOD_RES (19), (20), (21), (22), (23): Xaa is A or G
  MOD_RES (24), (25), (26), (27): Xaa is A or G or is absent
PKAXXVPTELRPVQMRKIXXXXXXXXXKKATVEMVVEGXGXR

SEQ ID NO: 30063 - protein, 37 aa, Artificial Sequence
  Non-cyclic GFR-binding peptide
  MOD_RES (1), (34), (36): Xaa is C or S
  MOD_RES (15), (16), (17), (18), (19): Xaa is A or G
  MOD_RES (20), (21), (22), (23): Xaa is A or G or is absent
XVPQALRPVQIRKIXXXXXXXXXKKATVMIVRSXKXS

SEQ ID NO: 30064 - protein, 38 aa, Artificial Sequence
  Non-cyclic GFR-binding peptide
  MOD_RES (3), (4), (35), (37): Xaa is C or S
APXXVPQALRSVKIAKVVGRKPKVKEVQVMIVRSXKXS

SEQ ID NO: 30065 - protein, 37 aa, Artificial Sequence
  Non-cyclic GFR-binding peptide
  MOD_RES (6), (7): Xaa is C or S
ASASPXXVPQDLRSVKIAKVVGRTPKVKEVQVMVVKS

SEQ ID NO: 30066 - protein, 32 aa, Artificial Sequence
  Non-cyclic GFR-binding peptide
  MOD_RES (32), (32): Xaa is C or S
VPTELSNITMQIMDEYDKVVIGEMSEMVVEGX

SEQ ID NO: 30067 - protein, 35 aa, Artificial Sequence
  Non-cyclic GFR-binding peptide
  MOD_RES (2), (3): Xaa is C or S
  MOD_RES (17), (18), (19), (20), (21): Xaa is A or G
  MOD_RES (22), (23), (24), (25): Xaa is A or G or is absent
AXXVPTELRSVKMAKVXXXXXXXXXKEVQVDMVVE

SEQ ID NO: 30068 - protein, 32 aa, Artificial Sequence
  Non-cyclic GFR-binding peptide
  MOD_RES (1), (32): Xaa is C or S
XVPQALSNITIQIMVGRKPKVIGEMSMIVRSX

SEQ ID NO: 30069 - protein, 42 aa, Artificial Sequence
  Non-cyclic GFR-binding peptide
  MOD_RES (3), (40), (42): Xaa is C or S
VQXRPTQVQLEPLPVVYYEIVRKKPIFEQLSNTLEDHLAXKX

SEQ ID NO: 30070 - protein, 41 aa, Artificial Sequence
  Non-cyclic GFR-binding peptide
  MOD_RES (2), (39), (41): Xaa is C or S
  MOD_RES (18), (19), (20), (21), (22): Xaa is A or G
  MOD_RES (23), (24), (25), (26): Xaa is A or G or is absent
KXQPSRVHHEPLPVVYYXXXXXXXXXEQLSNRLEEHLEXAX

SEQ ID NO: 30071 - protein, 36 aa, Artificial Sequence
  Non-cyclic GFR-binding peptide
  MOD_RES (3), (4): Xaa is C or S
  MOD_RES (18), (19), (20), (21), (22): Xaa is A or G
  MOD_RES (23), (24), (25), (26): Xaa is A or G or is absent
KAXXVPTELRSVKMAKVXXXXXXXXXKEVQVDMVVE

SEQ ID NO: 30072 - protein, 37 aa, Artificial Sequence
  Non-cyclic GFR-binding peptide
  MOD_RES (6), (7): Xaa is C or S
ASAAPXXVPQALSNITIQIMVGRKPKVIGEMSMIVRS

SEQ ID NO: 30073 - protein, 41 aa, Artificial Sequence
  Non-cyclic GFR-binding peptide
  MOD_RES (4), (38), (40): Xaa is C or S
  MOD_RES (18), (19), (20), (21), (22): Xaa is A or G
  MOD_RES (23), (24), (25), (26): Xaa is A or G or is absent
GLEXVPTEEEPLPMVYYXXXXXXXXXEQLSNFLQHNKXEXR

SEQ ID NO: 30074 - protein, 32 aa, Artificial Sequence
  Non-cyclic GFR-binding peptide
  MOD_RES (14), (15), (16), (17), (18): Xaa is A or G
  MOD_RES (19), (20), (21), (22): Xaa is A or G or is absent
SRVHHEPLPVVYYXXXXXXXXXEQLSNRLEEH

SEQ ID NO: 30075 - protein, 40 aa, Artificial Sequence
  Non-cyclic GFR-binding peptide
  MOD_RES (1), (38), (40): Xaa is C or S
  MOD_RES (17), (18), (19), (20), (21): Xaa is A or G
  MOD_RES (22), (23), (24), (25): Xaa is A or G or is absent
XQPSRVHHEPLPVVYYXXXXXXXXXEQLSNRLEEHLEXAX

SEQ ID NO: 30076 - protein, 39 aa, Artificial Sequence
  Non-cyclic GFR-binding peptide
  MOD_RES (3), (4), (38): Xaa is C or S
  MOD_RES (18), (19), (20), (21), (22): Xaa is A or G
  MOD_RES (23), (24), (25), (26): Xaa is A or G or is absent
KAXXVPTELSNITMQIMXXXXXXXXXIGEMSDMVVEGXG

SEQ ID NO: 30077 - protein, 36 aa, Artificial Sequence
  Non-cyclic GFR-binding peptide
  MOD_RES (5), (6): Xaa is C or S
SASPXXVPQDLSNITIQIMVGRTPKVIGEMSMVVKS

SEQ ID NO: 30078 - protein, 36 aa, Artificial Sequence
  Non-cyclic GFR-binding peptide
  MOD_RES (2), (3): Xaa is C or S
  MOD_RES (17), (18), (19), (20), (21): Xaa is A or G
  MOD_RES (22), (23), (24), (25): Xaa is A or G or is absent
PXXAPTKLRPVQVRKIXXXXXXXXXKKATVNMVVRS

SEQ ID NO: 30079 - protein, 38 aa, Artificial Sequence
  Non-cyclic GFR-binding peptide
  MOD_RES (36), (38): Xaa is C or S
  MOD_RES (15), (16), (17), (18), (19): Xaa is A or G
  MOD_RES (20), (21), (22), (23): Xaa is A or G or is absent
PSRVHHEPLPVVYYXXXXXXXXXEQLSNRLEEHLEXAX

SEQ ID NO: 30080 - protein, 35 aa, Artificial Sequence
  Non-cyclic GFR-binding peptide
  MOD_RES (2), (3), (35): Xaa is C or S
PXXAPTQLRSVKVAKVDDSSNVIKEVQVNMVVRAX

SEQ ID NO: 30081 - protein, 36 aa, Artificial Sequence
  Non-cyclic GFR-binding peptide
  MOD_RES (2), (3), (34), (36): Xaa is C or S
PXXVPQDLSNITIQIMVGRTPKVIGEMSMVVKSXKX

SEQ ID NO: 30082 - protein, 38 aa, Artificial Sequence
  Non-cyclic GFR-binding peptide
  MOD_RES (1), (2), (36), (38): Xaa is C or S
  MOD_RES (16), (17), (18), (19), (20): Xaa is A or G
  MOD_RES (21), (22), (23), (24): Xaa is A or G or is absent
XXAPTKLRPVQVRKIXXXXXXXXXKKATVNMVVRSXGX

SEQ ID NO: 30083 - protein, 38 aa, Artificial Sequence
  Non-cyclic GFR-binding peptide
  MOD_RES (5), (6): Xaa is C or S
  MOD_RES (20), (21), (22), (23), (24): Xaa is A or G
  MOD_RES (25), (26), (27), (28): Xaa is A or G or is absent
SAAPXXVPQALRSVKIAKVXXXXXXXXXKEVQVMIVRS

SEQ ID NO: 30084 - protein, 35 aa, Artificial Sequence
  Non-cyclic GFR-binding peptide
  MOD_RES (2), (3): Xaa is C or S
  MOD_RES (17), (18), (19), (20), (21): Xaa is A or G
  MOD_RES (22), (23), (24), (25): Xaa is A or G or is absent
PXXAPTKLRPVQVRKIXXXXXXXXXKKATVNMVVR

SEQ ID NO: 30085 - protein, 37 aa, Artificial Sequence
  Non-cyclic GFR-binding peptide
  MOD_RES (3), (4), (37): Xaa is C or S
  MOD_RES (18), (19), (20), (21), (22): Xaa is A or G
  MOD_RES (23), (24), (25), (26): Xaa is A or G or is absent
SPXXVSQDLRPVQIRKIXXXXXXXXXKKATVMIVKSX

SEQ ID NO: 30086 - protein, 34 aa, Artificial Sequence
  Non-cyclic GFR-binding peptide
  MOD_RES (3), (4): Xaa is C or S
KAXXVPTELRSVKMAKVDEYDKVVKEVQVEMVVE

SEQ ID NO: 30087 - protein, 34 aa, Artificial Sequence
  Non-cyclic GFR-binding peptide
  MOD_RES (1), (2), (33): Xaa is C or S
XXVPQDLSNITIQIMVGRTPKVIGEMSMVVKSXK

SEQ ID NO: 30088 - protein, 44 aa, Artificial Sequence
  Non-cyclic GFR-binding peptide
  MOD_RES (5), (42), (44): Xaa is C or S
  MOD_RES (21), (22), (23), (24), (25): Xaa is A or G
  MOD_RES (26), (27), (28), (29): Xaa is A or G or is absent
SSVKXQPSRVHHEPLTVLYYXXXXXXXXXEQLSNRLEEHLEXAX

SEQ ID NO: 30089 - protein, 37 aa, Artificial Sequence
  Non-cyclic GFR-binding peptide
  MOD_RES (34), (36): Xaa is C or S
  MOD_RES (14), (15), (16), (17), (18): Xaa is A or G
  MOD_RES (19), (20), (21), (22): Xaa is A or G or is absent
VPTELSNITMQIMXXXXXXXXXIGEMSEMVVEGXGXR

SEQ ID NO: 30090 - protein, 36 aa, Artificial Sequence
  Non-cyclic GFR-binding peptide
  MOD_RES (5), (6): Xaa is C or S
SAAPXXVPQALRSVKIAKVVGRKPKVKEVQVMIVRS

SEQ ID NO: 30091 - protein, 36 aa, Artificial Sequence
  Non-cyclic GFR-binding peptide
  MOD_RES (1), (2), (33), (35): Xaa is C or S
XXVPQALRSVKIAKVVGRKPKVKEVQVMIVRSXKXS

SEQ ID NO: 30092 - protein, 38 aa, Artificial Sequence
  Non-cyclic GFR-binding peptide
  MOD_RES (2), (3), (36), (38): Xaa is C or S
  MOD_RES (17), (18), (19), (20), (21): Xaa is A or G
  MOD_RES (22), (23), (24), (25): Xaa is A or G or is absent
PXXVPQDLRPVQIRKIXXXXXXXXXKKATVMVVKSXKX

SEQ ID NO: 30093 - protein, 39 aa, Artificial Sequence
  Non-cyclic GFR-binding peptide
  MOD_RES (5), (6), (37), (39): Xaa is C or S
SAAPXXVPQALRSVKIAKVVGRKPKVKEVQVMIVRSXKX

SEQ ID NO: 30094 - protein, 41 aa, Artificial Sequence
  Non-cyclic GFR-binding peptide
  MOD_RES (4), (5), (39), (41): Xaa is C or S
  MOD_RES (19), (20), (21), (22), (23): Xaa is A or G
  MOD_RES (24), (25), (26), (27): Xaa is A or G or is absent
PKAXXVPTELSNITMQIMXXXXXXXXXIGEMSDMVVEGXGX

SEQ ID NO: 30095 - protein, 33 aa, Artificial Sequence
  Non-cyclic GFR-binding peptide
  MOD_RES (1), (32): Xaa is C or S
XVSQDLRPVQIRKIIGKTPKIKKATVMIVKSXK

SEQ ID NO: 30096 - protein, 45 aa, Artificial Sequence
  Non-cyclic GFR-binding peptide
  MOD_RES (5), (42), (44): Xaa is C or S
  MOD_RES (21), (22), (23), (24), (25): Xaa is A or G
  MOD_RES (26), (27), (28), (29): Xaa is A or G or is absent
RNVQXRPTQVQLEPLTVLYYXXXXXXXXXEQLSNTLEDHLAXKXE

SEQ ID NO: 30097 - protein, 36 aa, Artificial Sequence
  Non-cyclic GFR-binding peptide
  MOD_RES (34), (36): Xaa is C or S
  MOD_RES (14), (15), (16), (17), (18): Xaa is A or G
  MOD_RES (19), (20), (21), (22): Xaa is A or G or is absent
VPTELSNITMQIMXXXXXXXXXIGEMSDMVVEGXGX

SEQ ID NO: 30098 - protein, 35 aa, Artificial Sequence
  Non-cyclic GFR-binding peptide
  MOD_RES (3), (4), (35): Xaa is C or S
SPXXVSQDLSNITIQIMIGKTPKIIGEMSMIVKSX

SEQ ID NO: 30099 - protein, 36 aa, Artificial Sequence
  Non-cyclic GFR-binding peptide
  MOD_RES (5), (6): Xaa is C or S
SAAPXXVPQALSNITIQIMVGRKPKVIGEMSMIVRS

SEQ ID NO: 30100 - protein, 34 aa, Artificial Sequence
  Non-cyclic GFR-binding peptide
  MOD_RES (2), (3), (34): Xaa is C or S
PXXVSQDLRPVQIRKIIGKTPKIKKATVMIVKSX

SEQ ID NO: 30101 - protein, 34 aa, Artificial Sequence
  Non-cyclic GFR-binding peptide
  MOD_RES (2), (3): Xaa is C or S
PXXAPTQLRSVKVAKVDDSSNVIKEVQVNMVVRA

SEQ ID NO: 30102 - protein, 36 aa, Artificial Sequence
  Non-cyclic GFR-binding peptide
  MOD_RES (1), (2), (34), (36): Xaa is C or S
XXAPTKLSNITVQIMDDSSNVIIGEMSNMVVRSXGX

SEQ ID NO: 30103 - protein, 36 aa, Artificial Sequence
  Non-cyclic GFR-binding peptide
  MOD_RES (1), (2), (36): Xaa is C or S
  MOD_RES (16), (17), (18), (19), (20): Xaa is A or G
  MOD_RES (21), (22), (23), (24): Xaa is A or G or is absent
XXVPTELRPVQMRKIXXXXXXXXXKKATVDMVVEGX

SEQ ID NO: 30104 - protein, 39 aa, Artificial Sequence
  Non-cyclic GFR-binding peptide
  MOD_RES (3), (3): Xaa is C or S
VKXQPSRVHHEPLPVVYYEYVRKKPKLEQLSNRLEEHLE

SEQ ID NO: 30105 - protein, 39 aa, Artificial Sequence
  Non-cyclic GFR-binding peptide
  MOD_RES (5), (6), (38): Xaa is C or S
VPKPXXAPTQLRSVKVAKVDDSSNVIKEVQVNMVVRAXG

SEQ ID NO: 30106 - protein, 41 aa, Artificial Sequence
  Non-cyclic GFR-binding peptide
  MOD_RES (4), (5), (39), (41): Xaa is C or S
  MOD_RES (19), (20), (21), (22), (23): Xaa is A or G
  MOD_RES (24), (25), (26), (27): Xaa is A or G or is absent
PKAXXVPTELSNITMQIMXXXXXXXXXIGEMSEMVVEGXGX

SEQ ID NO: 30107 - protein, 40 aa, Artificial Sequence
  Non-cyclic GFR-binding peptide
  MOD_RES (2), (39): Xaa is C or S
QXRPTQVQLEPLPVVYYEIVRKKPIFEQLSNTLEDHLAXK

SEQ ID NO: 30108 - protein, 37 aa, Artificial Sequence
  Non-cyclic GFR-binding peptide
  MOD_RES (2), (36): Xaa is C or S
EXVPTEEEPLPMVYYRIKPHQGQHEQLSNFLQHNKXE

SEQ ID NO: 30109 - protein, 36 aa, Artificial Sequence
  Non-cyclic GFR-binding peptide
  MOD_RES (34), (36): Xaa is C or S
  MOD_RES (14), (15), (16), (17), (18): Xaa is A or G
  MOD_RES (19), (20), (21), (22): Xaa is A or G or is absent
VPTELSNITMQIMXXXXXXXXXIGEMSEMVVEGXGX

SEQ ID NO: 30110 - protein, 37 aa, Artificial Sequence
  Non-cyclic GFR-binding peptide
  MOD_RES (5), (6): Xaa is C or S
IPKAXXVPTELRSVKMAKVDENEKVVKEVQVDMVVEG

SEQ ID NO: 30111 - protein, 36 aa, Artificial Sequence
  Non-cyclic GFR-binding peptide
  MOD_RES (1), (34), (36): Xaa is C or S
  MOD_RES (15), (16), (17), (18), (19): Xaa is A or G
  MOD_RES (20), (21), (22), (23): Xaa is A or G or is absent
XVSQDLSNITIQIMXXXXXXXXXIGEMSMIVKSXKX

SEQ ID NO: 30112 - protein, 38 aa, Artificial Sequence
  Non-cyclic GFR-binding peptide
  MOD_RES (1), (35), (37): Xaa is C or S
  MOD_RES (15), (16), (17), (18), (19): Xaa is A or G
  MOD_RES (20), (21), (22), (23): Xaa is A or G or is absent
XVPTELSNITMQIMXXXXXXXXXIGEMSDMVVEGXGXR

SEQ ID NO: 30113 - protein, 38 aa, Artificial Sequence
  Non-cyclic GFR-binding peptide
  MOD_RES (1), (35), (37): Xaa is C or S
  MOD_RES (15), (16), (17), (18), (19): Xaa is A or G
  MOD_RES (20), (21), (22), (23): Xaa is A or G or is absent
XVPTELRSVKMAKVXXXXXXXXXKEVQVEMVVEGXGXR

SEQ ID NO: 30114 - protein, 38 aa, Artificial Sequence
  Non-cyclic GFR-binding peptide
  MOD_RES (1), (38): Xaa is C or S
XQPSRVHHEPLTVLYYEYVRKKPKLEQLSNRLEEHLEX

SEQ ID NO: 30115 - protein, 34 aa, Artificial Sequence
  Non-cyclic GFR-binding peptide
  MOD_RES (1), (33): Xaa is C or S
XVPTELSNITMQIMDEYDKVVIGEMSEMVVEGXG

SEQ ID NO: 30116 - protein, 37 aa, Artificial Sequence
  Non-cyclic GFR-binding peptide
  MOD_RES (6), (7): Xaa is C or S
SIPKAXXVPTELRPVQMRKIDEYDKVVKKATVEMVVE

SEQ ID NO: 30117 - protein, 42 aa, Artificial Sequence
  Non-cyclic GFR-binding peptide
  MOD_RES (6), (7), (41): Xaa is C or S
  MOD_RES (21), (22), (23), (24), (25): Xaa is A or G
  MOD_RES (26), (27), (28), (29): Xaa is A or G or is absent
YVPKPXXAPTKLRPVQVRKIXXXXXXXXXKKATVNMVVRSXG

SEQ ID NO: 30118 - protein, 43 aa, Artificial Sequence
  Non-cyclic GFR-binding peptide
  MOD_RES (6), (40), (42): Xaa is C or S
  MOD_RES (20), (21), (22), (23), (24): Xaa is A or G
  MOD_RES (25), (26), (27), (28): Xaa is A or G or is absent
VTKPTXAPTKLRSVKVAKVXXXXXXXXXKEVQVNMVVRSXGXH

SEQ ID NO: 30119 - protein, 37 aa, Artificial Sequence
  Non-cyclic GFR-binding peptide
  MOD_RES (2), (3), (34), (36): Xaa is C or S
PXXVPQDLSNITIQIMVGRTPKVIGEMSMVVKSXKXS

SEQ ID NO: 30120 - protein, 38 aa, Artificial Sequence
  Non-cyclic GFR-binding peptide
  MOD_RES (36), (38): Xaa is C or S
  MOD_RES (15), (16), (17), (18), (19): Xaa is A or G
  MOD_RES (20), (21), (22), (23): Xaa is A or G or is absent
PTQVQLEPLPVVYYXXXXXXXXXEQLSNTLEDHLAXKX

SEQ ID NO: 30121 - protein, 37 aa, Artificial Sequence
  Non-cyclic GFR-binding peptide
  MOD_RES (3), (4), (36): Xaa is C or S
KPXXAPTKLRSVKVAKVDDSSNVIKEVQVNMVVRSXG

SEQ ID NO: 30122 - protein, 34 aa, Artificial Sequence
  Non-cyclic GFR-binding peptide
QPSRVHHEPLTVLYYEYVRKKPKLEQLSNRLEEH

SEQ ID NO: 30123 - protein, 38 aa, Artificial Sequence
  Non-cyclic GFR-binding peptide
  MOD_RES (1), (35), (37): Xaa is C or S
XVPTEEEPLPMVYYRIKPHQGQHEQLSNFLQHNKXEXR

SEQ ID NO: 30124 - protein, 41 aa, Artificial Sequence
  Non-cyclic GFR-binding peptide
  MOD_RES (3), (40): Xaa is C or S
  MOD_RES (19), (20), (21), (22), (23): Xaa is A or G
  MOD_RES (24), (25), (26), (27): Xaa is A or G or is absent
VQXRPTQVQLEPLPVVYYXXXXXXXXXEQLSNTLEDHLAXK

SEQ ID NO: 30125 - protein, 33 aa, Artificial Sequence
  Non-cyclic GFR-binding peptide
PTQVQLEPLTVLYYEIVRKKPIFEQLSNTLEDH

SEQ ID NO: 30126 - protein, 39 aa, Artificial Sequence
  Non-cyclic GFR-binding peptide
  MOD_RES (6), (7), (39): Xaa is C or S
KIPKAXXVPTELSNITMQIMDENEKVVIGEMSDMVVEGX

SEQ ID NO: 30127 - protein, 36 aa, Artificial Sequence
  Non-cyclic GFR-binding peptide
  MOD_RES (2), (3): Xaa is C or S
  MOD_RES (17), (18), (19), (20), (21): Xaa is A or G
  MOD_RES (22), (23), (24), (25): Xaa is A or G or is absent
PXXAPTQLRSVKVAKVXXXXXXXXXKEVQVNMVVRA

SEQ ID NO: 30128 - protein, 32 aa, Artificial Sequence
  Non-cyclic GFR-binding peptide
  MOD_RES (32), (32): Xaa is C or S
APTQLRPVQVRKIDDSSNVIKKATVNMVVRAX

SEQ ID NO: 30129 - protein, 33 aa, Artificial Sequence
  Non-cyclic GFR-binding peptide
PTQVQLEPLPVVYYEIVRKKPIFEQLSNTLEDH

SEQ ID NO: 30130 - protein, 34 aa, Artificial Sequence
  Non-cyclic GFR-binding peptide
  MOD_RES (32), (34): Xaa is C or S
APTKLRPVQVRKIDDSSNVIKKATVNMVVRSXGX

SEQ ID NO: 30131 - protein, 36 aa, Artificial Sequence
  Non-cyclic GFR-binding peptide
  MOD_RES (34), (36): Xaa is C or S
  MOD_RES (14), (15), (16), (17), (18): Xaa is A or G
  MOD_RES (19), (20), (21), (22): Xaa is A or G or is absent
APTKLRSVKVAKVXXXXXXXXXKEVQVNMVVRSXGX

SEQ ID NO: 30132 - protein, 37 aa, Artificial Sequence
  Non-cyclic GFR-binding peptide
  MOD_RES (1), (1): Xaa is C or S
XRPTQVQLEPLPVVYYEIVRKKPIFEQLSNTLEDHLA

SEQ ID NO: 30133 - protein, 34 aa, Artificial Sequence
  Non-cyclic GFR-binding peptide
  MOD_RES (1), (2), (33): Xaa is C or S
XXVPQALRSVKIAKVVGRKPKVKEVQVMIVRSXK

SEQ ID NO: 30134 - protein, 36 aa, Artificial Sequence
  Non-cyclic GFR-binding peptide
  MOD_RES (5), (6): Xaa is C or S
SASPXXVPQDLRSVKIAKVVGRTPKVKEVQVMVVKS

SEQ ID NO: 30135 - protein, 37 aa, Artificial Sequence
  Non-cyclic GFR-binding peptide
  MOD_RES (6), (7): Xaa is C or S
ASAAPXXVPQALRSVKIAKVVGRKPKVKEVQVMIVRS

SEQ ID NO: 30136 - protein, 35 aa, Artificial Sequence
  Non-cyclic GFR-binding peptide
  MOD_RES (2), (3), (34): Xaa is C or S
PXXVPQDLRPVQIRKIVGRTPKVKKATVMVVKSXK

SEQ ID NO: 30137 - protein, 44 aa, Artificial Sequence
  Non-cyclic GFR-binding peptide
  MOD_RES (6), (7), (41), (43): Xaa is C or S
  MOD_RES (21), (22), (23), (24), (25): Xaa is A or G
  MOD_RES (26), (27), (28), (29): Xaa is A or G or is absent
YVPKPXXAPTKLRPVQVRKIXXXXXXXXXKKATVNMVVRSXGXH

SEQ ID NO: 30138 - protein, 37 aa, Artificial Sequence
  Non-cyclic GFR-binding peptide
  MOD_RES (1), (2), (36): Xaa is C or S
  MOD_RES (16), (17), (18), (19), (20): Xaa is A or G
  MOD_RES (21), (22), (23), (24): Xaa is A or G or is absent
XXVPTELSNITMQIMXXXXXXXXXIGEMSEMVVEGXG

SEQ ID NO: 30139 - protein, 36 aa, Artificial Sequence
  Non-cyclic GFR-binding peptide
  MOD_RES (1), (33), (35): Xaa is C or S
XVPTELRSVKMAKVDEYDKVVKEVQVEMVVEGXGXR

SEQ ID NO: 30140 - protein, 34 aa, Artificial Sequence
  Non-cyclic GFR-binding peptide
  MOD_RES (32), (34): Xaa is C or S
APTQLRSVKVAKVDDSSNVIKEVQVNMVVRAXGX

SEQ ID NO: 30141 - protein, 35 aa, Artificial Sequence
  Non-cyclic GFR-binding peptide
  MOD_RES (34), (34): Xaa is C or S
  MOD_RES (14), (15), (16), (17), (18): Xaa is A or G
  MOD_RES (19), (20), (21), (22): Xaa is A or G or is absent
APTQLSNITVQIMXXXXXXXXXIGEMSNMVVRAXG

SEQ ID NO: 30142 - protein, 37 aa, Artificial Sequence
  Non-cyclic GFR-binding peptide
  MOD_RES (5), (6): Xaa is C or S
VPKPXXAPTKLRPVQVRKIDDSSNVIKKATVNMVVRS

SEQ ID NO: 30143 - protein, 38 aa, Artificial Sequence
  Non-cyclic GFR-binding peptide
  MOD_RES (6), (38): Xaa is C or S
VTKPTXAPTKLRSVKVAKVDDSSNVIKEVQVNMVVRSX

SEQ ID NO: 30144 - protein, 34 aa, Artificial Sequence
  Non-cyclic GFR-binding peptide
  MOD_RES (1), (2): Xaa is C or S
  MOD_RES (16), (17), (18), (19), (20): Xaa is A or G
  MOD_RES (21), (22), (23), (24): Xaa is A or G or is absent
XXVPQALRSVKIAKVXXXXXXXXXKEVQVMIVRS

SEQ ID NO: 30145 - protein, 32 aa, Artificial Sequence
  Non-cyclic GFR-binding peptide
  MOD_RES (14), (15), (16), (17), (18): Xaa is A or G
  MOD_RES (19), (20), (21), (22): Xaa is A or G or is absent
VPTEEEPLPMVYYXXXXXXXXXEQLSNFLQHN

SEQ ID NO: 30146 - protein, 36 aa, Artificial Sequence
  Non-cyclic GFR-binding peptide
  MOD_RES (3), (35): Xaa is C or S
PTXAPTKLRSVKVAKVDDSSNVIKEVQVNMVVRSXG

SEQ ID NO: 30147 - protein, 39 aa, Artificial Sequence
  Non-cyclic GFR-binding peptide
  MOD_RES (2), (39): Xaa is C or S
  MOD_RES (18), (19), (20), (21), (22): Xaa is A or G
  MOD_RES (23), (24), (25), (26): Xaa is A or G or is absent
QXRPTQVQLEPLTVLYYXXXXXXXXXEQLSNTLEDHLAX

SEQ ID NO: 30148 - protein, 37 aa, Artificial Sequence
  Non-cyclic GFR-binding peptide
  MOD_RES (1), (34), (36): Xaa is C or S
  MOD_RES (15), (16), (17), (18), (19): Xaa is A or G
  MOD_RES (20), (21), (22), (23): Xaa is A or G or is absent
XVSQDLSNITIQIMXXXXXXXXXIGEMSMIVKSXKXS

SEQ ID NO: 30149 - protein, 37 aa, Artificial Sequence
  Non-cyclic GFR-binding peptide
  MOD_RES (5), (6): Xaa is C or S
IPKAXXVPTELRSVKMAKVDEYDKVVKEVQVEMVVEG

SEQ ID NO: 30150 - protein, 39 aa, Artificial Sequence
  Non-cyclic GFR-binding peptide
  MOD_RES (5), (6), (38): Xaa is C or S
IPKAXXVPTELRPVQMRKIDENEKVVKKATVDMVVEGXG

SEQ ID NO: 30151 - protein, 41 aa, Artificial Sequence
  Non-cyclic GFR-binding peptide
  MOD_RES (6), (7), (40): Xaa is C or S
  MOD_RES (21), (22), (23), (24), (25): Xaa is A or G
  MOD_RES (26), (27), (28), (29): Xaa is A or G or is absent
ASAAPXXVPQALSNITIQIMXXXXXXXXXIGEMSMIVRSXK

SEQ ID NO: 30152 - protein, 36 aa, Artificial Sequence
  Non-cyclic GFR-binding peptide
  MOD_RES (6), (6): Xaa is C or S
VTKPTXAPTKLRPVQVRKIDDSSNVIKKATVNMVVR

SEQ ID NO: 30153 - protein, 38 aa, Artificial Sequence
  Non-cyclic GFR-binding peptide
  MOD_RES (3), (3): Xaa is C or S
VQXRPTQVQLEPLPVVYYEIVRKKPIFEQLSNTLEDHL

SEQ ID NO: 30154 - protein, 36 aa, Artificial Sequence
  Non-cyclic GFR-binding peptide
  MOD_RES (1), (1): Xaa is C or S
XQPSRVHHEPLPVVYYEYVRKKPKLEQLSNRLEEHL

SEQ ID NO: 30155 - protein, 35 aa, Artificial Sequence
  Non-cyclic GFR-binding peptide
QPSRVHHEPLPVVYYEYVRKKPKLEQLSNRLEEHL

SEQ ID NO: 30156 - protein, 36 aa, Artificial Sequence
  Non-cyclic GFR-binding peptide
  MOD_RES (1), (2), (36): Xaa is C or S
  MOD_RES (16), (17), (18), (19), (20): Xaa is A or G
  MOD_RES (21), (22), (23), (24): Xaa is A or G or is absent
XXVPTELRSVKMAKVXXXXXXXXXKEVQVDMVVEGX

SEQ ID NO: 30157 - protein, 34 aa, Artificial Sequence
  Non-cyclic GFR-binding peptide
  MOD_RES (3), (4): Xaa is C or S
KAXXVPTELSNITMQIMDEYDKVVIGEMSEMVVE

SEQ ID NO: 30158 - protein, 39 aa, Artificial Sequence
  Non-cyclic GFR-binding peptide
  MOD_RES (1), (2), (36), (38): Xaa is C or S
  MOD_RES (16), (17), (18), (19), (20): Xaa is A or G
  MOD_RES (21), (22), (23), (24): Xaa is A or G or is absent
XXVPTELRPVQMRKIXXXXXXXXXKKATVEMVVEGXGXR

SEQ ID NO: 30159 - protein, 40 aa, Artificial Sequence
  Non-cyclic GFR-binding peptide
  MOD_RES (5), (6), (38), (40): Xaa is C or S
VPKPXXAPTQLSNITVQIMDDSSNVIIGEMSNMVVRAXGX

SEQ ID NO: 30160 - protein, 33 aa, Artificial Sequence
  Non-cyclic GFR-binding peptide
  MOD_RES (1), (33): Xaa is C or S
XVPTELRPVQMRKIDEYDKVVKKATVEMVVEGX

SEQ ID NO: 30161 - protein, 43 aa, Artificial Sequence
  Non-cyclic GFR-binding peptide
  MOD_RES (6), (7), (40), (42): Xaa is C or S
  MOD_RES (21), (22), (23), (24), (25): Xaa is A or G
  MOD_RES (26), (27), (28), (29): Xaa is A or G or is absent
ASAAPXXVPQALSNITIQIMXXXXXXXXXIGEMSMIVRSXKXS

SEQ ID NO: 30162 - protein, 36 aa, Artificial Sequence
  Non-cyclic GFR-binding peptide
  MOD_RES (2), (3), (34), (36): Xaa is C or S
PXXVSQDLRPVQIRKIIGKTPKIKKATVMIVKSXKX

SEQ ID NO: 30163 - protein, 43 aa, Artificial Sequence
  Non-cyclic GFR-binding peptide
  MOD_RES (7), (41), (43): Xaa is C or S
  MOD_RES (21), (22), (23), (24), (25): Xaa is A or G
  MOD_RES (26), (27), (28), (29): Xaa is A or G or is absent
NDEGLEXVPTEEEPLTMLYYXXXXXXXXXEQLSNFLQHNKXEX

SEQ ID NO: 30164 - protein, 36 aa, Artificial Sequence
  Non-cyclic GFR-binding peptide
  MOD_RES (36), (36): Xaa is C or S
  MOD_RES (15), (16), (17), (18), (19): Xaa is A or G
  MOD_RES (20), (21), (22), (23): Xaa is A or G or is absent
PSRVHHEPLPVVYYXXXXXXXXXEQLSNRLEEHLEX

SEQ ID NO: 30165 - protein, 36 aa, Artificial Sequence
  Non-cyclic GFR-binding peptide
  MOD_RES (4), (5): Xaa is C or S
PKPXXAPTQLSNITVQIMDDSSNVIIGEMSNMVVRA

SEQ ID NO: 30166 - protein, 40 aa, Artificial Sequence
  Non-cyclic GFR-binding peptide
  MOD_RES (1), (38), (40): Xaa is C or S
  MOD_RES (17), (18), (19), (20), (21): Xaa is A or G
  MOD_RES (22), (23), (24), (25): Xaa is A or G or is absent
XRPTQVQLEPLPVVYYXXXXXXXXXEQLSNTLEDHLAXKX

SEQ ID NO: 30167 - protein, 32 aa, Artificial Sequence
  Non-cyclic GFR-binding peptide
  MOD_RES (14), (15), (16), (17), (18): Xaa is A or G
  MOD_RES (19), (20), (21), (22): Xaa is A or G or is absent
TQVQLEPLTVLYYXXXXXXXXXEQLSNTLEDH

SEQ ID NO: 30168 - protein, 35 aa, Artificial Sequence
  Non-cyclic GFR-binding peptide
  MOD_RES (33), (35): Xaa is C or S
  MOD_RES (14), (15), (16), (17), (18): Xaa is A or G
  MOD_RES (19), (20), (21), (22): Xaa is A or G or is absent
VPQALRSVKIAKVXXXXXXXXXKEVQVMIVRSXKX

SEQ ID NO: 30169 - protein, 36 aa, Artificial Sequence
  Non-cyclic GFR-binding peptide
  MOD_RES (2), (3), (34), (36): Xaa is C or S
PXXVPQDLRPVQIRKIVGRTPKVKKATVMVVKSXKX

SEQ ID NO: 30170 - protein, 34 aa, Artificial Sequence
  Non-cyclic GFR-binding peptide
  MOD_RES (1), (2): Xaa is C or S
  MOD_RES (16), (17), (18), (19), (20): Xaa is A or G
  MOD_RES (21), (22), (23), (24): Xaa is A or G or is absent
XXVPQALRPVQIRKIXXXXXXXXXKKATVMIVRS

SEQ ID NO: 30171 - protein, 38 aa, Artificial Sequence
  Non-cyclic GFR-binding peptide
  MOD_RES (6), (7), (38): Xaa is C or S
ASAAPXXVPQALSNITIQIMVGRKPKVIGEMSMIVRSX

SEQ ID NO: 30172 - protein, 32 aa, Artificial Sequence
  Non-cyclic GFR-binding peptide
  MOD_RES (14), (15), (16), (17), (18): Xaa is A or G
  MOD_RES (19), (20), (21), (22): Xaa is A or G or is absent
TQVQLEPLPVVYYXXXXXXXXXEQLSNTLEDH

SEQ ID NO: 30173 - protein, 35 aa, Artificial Sequence
  Non-cyclic GFR-binding peptide
  MOD_RES (34), (34): Xaa is C or S
  MOD_RES (14), (15), (16), (17), (18): Xaa is A or G
  MOD_RES (19), (20), (21), (22): Xaa is A or G or is absent
VPTELRSVKMAKVXXXXXXXXXKEVQVDMVVEGXG

SEQ ID NO: 30174 - protein, 41 aa, Artificial Sequence
  Non-cyclic GFR-binding peptide
  MOD_RES (3), (4), (38), (40): Xaa is C or S
  MOD_RES (18), (19), (20), (21), (22): Xaa is A or G
  MOD_RES (23), (24), (25), (26): Xaa is A or G or is absent
KPXXAPTKLRSVKVAKVXXXXXXXXXKEVQVNMVVRSXGXH

SEQ ID NO: 30175 - protein, 36 aa, Artificial Sequence
  Non-cyclic GFR-binding peptide
  MOD_RES (1), (2), (34), (36): Xaa is C or S
XXVPTELRSVKMAKVDENEKVVKEVQVDMVVEGXGX

SEQ ID NO: 30176 - protein, 36 aa, Artificial Sequence
  Non-cyclic GFR-binding peptide
  MOD_RES (34), (36): Xaa is C or S
  MOD_RES (14), (15), (16), (17), (18): Xaa is A or G
  MOD_RES (19), (20), (21), (22): Xaa is A or G or is absent
APTQLRPVQVRKIXXXXXXXXXKKATVNMVVRAXGX

SEQ ID NO: 30177 - protein, 33 aa, Artificial Sequence
  Non-cyclic GFR-binding peptide
  MOD_RES (2), (3): Xaa is C or S
PXXVPQDLRPVQIRKIVGRTPKVKKATVMVVKS

SEQ ID NO: 30178 - protein, 38 aa, Artificial Sequence
  Non-cyclic GFR-binding peptide
  MOD_RES (3), (4), (38): Xaa is C or S
  MOD_RES (18), (19), (20), (21), (22): Xaa is A or G
  MOD_RES (23), (24), (25), (26): Xaa is A or G or is absent
KPXXAPTQLRSVKVAKVXXXXXXXXXKEVQVNMVVRAX

SEQ ID NO: 30179 - protein, 34 aa, Artificial Sequence
  Non-cyclic GFR-binding peptide
  MOD_RES (3), (3): Xaa is C or S
PTXAPTKLSNITVQIMDDSSNVIIGEMSNMVVRS

SEQ ID NO: 30180 - protein, 37 aa, Artificial Sequence
  Non-cyclic GFR-binding peptide
  MOD_RES (4), (5): Xaa is C or S
  MOD_RES (19), (20), (21), (22), (23): Xaa is A or G
  MOD_RES (24), (25), (26), (27): Xaa is A or G or is absent
AAPXXVPQALRPVQIRKIXXXXXXXXXKKATVMIVRS

SEQ ID NO: 30181 - protein, 36 aa, Artificial Sequence
  Non-cyclic GFR-binding peptide
  MOD_RES (1), (33), (35): Xaa is C or S
XVPTELRPVQMRKIDENEKVVKKATVDMVVEGXGXR

SEQ ID NO: 30182 - protein, 39 aa, Artificial Sequence
  Non-cyclic GFR-binding peptide
  MOD_RES (2), (36), (38): Xaa is C or S
  MOD_RES (16), (17), (18), (19), (20): Xaa is A or G
  MOD_RES (21), (22), (23), (24): Xaa is A or G or is absent
EXVPTEEEPLTMLYYXXXXXXXXXEQLSNFLQHNKXEXR

SEQ ID NO: 30183 - protein, 41 aa, Artificial Sequence
  Non-cyclic GFR-binding peptide
  MOD_RES (6), (7), (40): Xaa is C or S
  MOD_RES (21), (22), (23), (24), (25): Xaa is A or G
  MOD_RES (26), (27), (28), (29): Xaa is A or G or is absent
ASASPXXVSQDLSNITIQIMXXXXXXXXXIGEMSMIVKSXK

SEQ ID NO: 30184 - protein, 33 aa, Artificial Sequence
  Non-cyclic GFR-binding peptide
  MOD_RES (3), (3): Xaa is C or S
PTXAPTKLSNITVQIMDDSSNVIIGEMSNMVVR

SEQ ID NO: 30185 - protein, 34 aa, Artificial Sequence
  Non-cyclic GFR-binding peptide
  MOD_RES (34), (34): Xaa is C or S
  MOD_RES (14), (15), (16), (17), (18): Xaa is A or G
  MOD_RES (19), (20), (21), (22): Xaa is A or G or is absent
VPTELRSVKMAKVXXXXXXXXXKEVQVDMVVEGX

SEQ ID NO: 30186 - protein, 39 aa, Artificial Sequence
  Non-cyclic GFR-binding peptide
  MOD_RES (2), (3), (36), (38): Xaa is C or S
  MOD_RES (17), (18), (19), (20), (21): Xaa is A or G
  MOD_RES (22), (23), (24), (25): Xaa is A or G or is absent
PXXVSQDLRSVKIAKVXXXXXXXXXKEVQVMIVKSXKXS

SEQ ID NO: 30187 - protein, 30 aa, Artificial Sequence
  Non-cyclic GFR-binding peptide
VPQALRPVQIRKIVGRKPKVKKATVMIVRS

SEQ ID NO: 30188 - protein, 33 aa, Artificial Sequence
  Non-cyclic GFR-binding peptide
PSRVHHEPLPVVYYEYVRKKPKLEQLSNRLEEH

SEQ ID NO: 30189 - protein, 36 aa, Artificial Sequence
  Non-cyclic GFR-binding peptide
  MOD_RES (2), (36): Xaa is C or S
  MOD_RES (16), (17), (18), (19), (20): Xaa is A or G
  MOD_RES (21), (22), (23), (24): Xaa is A or G or is absent
TXAPTKLRSVKVAKVXXXXXXXXXKEVQVNMVVRSX

SEQ ID NO: 30190 - protein, 36 aa, Artificial Sequence
  Non-cyclic GFR-binding peptide
  MOD_RES (2), (36): Xaa is C or S
EXVPTEEEPLPMVYYRIKPHQGQHEQLSNFLQHNKX

SEQ ID NO: 30191 - protein, 32 aa, Artificial Sequence
  Non-cyclic GFR-binding peptide
  MOD_RES (1), (32): Xaa is C or S
XVPQDLRPVQIRKIVGRTPKVKKATVMVVKSX

SEQ ID NO: 30192 - protein, 33 aa, Artificial Sequence
  Non-cyclic GFR-binding peptide
SRVHHEPLTVLYYEYVRKKPKLEQLSNRLEEHL

SEQ ID NO: 30193 - protein, 33 aa, Artificial Sequence
  Non-cyclic GFR-binding peptide
  MOD_RES (2), (3): Xaa is C or S
PXXAPTKLSNITVQIMDDSSNVIIGEMSNMVVR

SEQ ID NO: 30194 - protein, 37 aa, Artificial Sequence
  Non-cyclic GFR-binding peptide
  MOD_RES (1), (34), (36): Xaa is C or S
  MOD_RES (15), (16), (17), (18), (19): Xaa is A or G
  MOD_RES (20), (21), (22), (23): Xaa is A or G or is absent
XVPQDLRPVQIRKIXXXXXXXXXKKATVMVVKSXKXS

SEQ ID NO: 30195 - protein, 41 aa, Artificial Sequence
  Non-cyclic GFR-binding peptide
  MOD_RES (4), (5), (38), (40): Xaa is C or S
  MOD_RES (19), (20), (21), (22), (23): Xaa is A or G
  MOD_RES (24), (25), (26), (27): Xaa is A or G or is absent
ASPXXVSQDLRPVQIRKIXXXXXXXXXKKATVMIVKSXKXS

SEQ ID NO: 30196 - protein, 42 aa, Artificial Sequence
  Non-cyclic GFR-binding peptide
  MOD_RES (5), (6), (40), (42): Xaa is C or S
  MOD_RES (20), (21), (22), (23), (24): Xaa is A or G
  MOD_RES (25), (26), (27), (28): Xaa is A or G or is absent
IPKAXXVPTELSNITMQIMXXXXXXXXXIGEMSEMVVEGXGX

SEQ ID NO: 30197 - protein, 34 aa, Artificial Sequence
  Non-cyclic GFR-binding peptide
  MOD_RES (1), (33): Xaa is C or S
XAPTKLRPVQVRKIDDSSNVIKKATVNMVVRSXG

SEQ ID NO: 30198 - protein, 33 aa, Artificial Sequence
  Non-cyclic GFR-binding peptide
  MOD_RES (1), (32): Xaa is C or S
XVPQDLRPVQIRKIVGRTPKVKKATVMVVKSXK

SEQ ID NO: 30199 - protein, 38 aa, Artificial Sequence
  Non-cyclic GFR-binding peptide
  MOD_RES (1), (2), (35), (37): Xaa is C or S
  MOD_RES (16), (17), (18), (19), (20): Xaa is A or G
  MOD_RES (21), (22), (23), (24): Xaa is A or G or is absent
XXVPQDLSNITIQIMXXXXXXXXXIGEMSMVVKSXKXS

SEQ ID NO: 30200 - protein, 41 aa, Artificial Sequence
  Non-cyclic GFR-binding peptide
  MOD_RES (5), (6), (38), (40): Xaa is C or S
IPKAXXVPTELRPVQMRKIDENEKVVKKATVDMVVEGXGXR

SEQ ID NO: 30201 - protein, 40 aa, Artificial Sequence
  Non-cyclic GFR-binding peptide
  MOD_RES (3), (4), (37), (39): Xaa is C or S
  MOD_RES (18), (19), (20), (21), (22): Xaa is A or G
  MOD_RES (23), (24), (25), (26): Xaa is A or G or is absent
SPXXVSQDLRPVQIRKIXXXXXXXXXKKATVMIVKSXKXS

SEQ ID NO: 30202 - protein, 34 aa, Artificial Sequence
  Non-cyclic GFR-binding peptide
  MOD_RES (2), (3): Xaa is C or S
PXXAPTKLRSVKVAKVDDSSNVIKEVQVNMVVRS

SEQ ID NO: 30203 - protein, 34 aa, Artificial Sequence
  Non-cyclic GFR-binding peptide
  MOD_RES (16), (17), (18), (19), (20): Xaa is A or G
  MOD_RES (21), (22), (23), (24): Xaa is A or G or is absent
QPSRVHHEPLTVLYYXXXXXXXXXEQLSNRLEEH

SEQ ID NO: 30204 - protein, 36 aa, Artificial Sequence
  Non-cyclic GFR-binding peptide
  MOD_RES (34), (36): Xaa is C or S
  MOD_RES (14), (15), (16), (17), (18): Xaa is A or G
  MOD_RES (19), (20), (21), (22): Xaa is A or G or is absent
VPTELRSVKMAKVXXXXXXXXXKEVQVEMVVEGXGX

SEQ ID NO: 30205 - protein, 40 aa, Artificial Sequence
  Non-cyclic GFR-binding peptide
  MOD_RES (3), (4), (38), (40): Xaa is C or S
  MOD_RES (18), (19), (20), (21), (22): Xaa is A or G
  MOD_RES (23), (24), (25), (26): Xaa is A or G or is absent
KPXXAPTKLRSVKVAKVXXXXXXXXXKEVQVNMVVRSXGX

SEQ ID NO: 30206 - protein, 41 aa, Artificial Sequence
  Non-cyclic GFR-binding peptide
  MOD_RES (5), (6), (38), (40): Xaa is C or S
VPKPXXAPTQLRPVQVRKIDDSSNVIKKATVNMVVRAXGXH

SEQ ID NO: 30207 - protein, 36 aa, Artificial Sequence
  Non-cyclic GFR-binding peptide
  MOD_RES (3), (4), (35): Xaa is C or S
APXXVPQALSNITIQIMVGRKPKVIGEMSMIVRSXK

SEQ ID NO: 30208 - protein, 35 aa, Artificial Sequence
  Non-cyclic GFR-binding peptide
  MOD_RES (4), (5): Xaa is C or S
PKPXXAPTQLRSVKVAKVDDSSNVIKEVQVNMVVR

SEQ ID NO: 30209 - protein, 40 aa, Artificial Sequence
  Non-cyclic GFR-binding peptide
  MOD_RES (5), (6), (39): Xaa is C or S
  MOD_RES (20), (21), (22), (23), (24): Xaa is A or G
  MOD_RES (25), (26), (27), (28): Xaa is A or G or is absent
SASPXXVPQDLRSVKIAKVXXXXXXXXXKEVQVMVVKSXK

SEQ ID NO: 30210 - protein, 38 aa, Artificial Sequence
  Non-cyclic GFR-binding peptide
  MOD_RES (3), (4), (38): Xaa is C or S
  MOD_RES (18), (19), (20), (21), (22): Xaa is A or G
  MOD_RES (23), (24), (25), (26): Xaa is A or G or is absent
KPXXAPTKLRPVQVRKIXXXXXXXXXKKATVNMVVRSX

SEQ ID NO: 30211 - protein, 41 aa, Artificial Sequence
  Non-cyclic GFR-binding peptide
  MOD_RES (5), (6), (39), (41): Xaa is C or S
  MOD_RES (20), (21), (22), (23), (24): Xaa is A or G
  MOD_RES (25), (26), (27), (28): Xaa is A or G or is absent
SASPXXVSQDLRSVKIAKVXXXXXXXXXKEVQVMIVKSXKX

SEQ ID NO: 30212 - protein, 34 aa, Artificial Sequence
  Non-cyclic GFR-binding peptide
  MOD_RES (1), (2): Xaa is C or S
  MOD_RES (16), (17), (18), (19), (20): Xaa is A or G
  MOD_RES (21), (22), (23), (24): Xaa is A or G or is absent
XXVPTELRSVKMAKVXXXXXXXXXKEVQVEMVVE

SEQ ID NO: 30213 - protein, 36 aa, Artificial Sequence
  Non-cyclic GFR-binding peptide
  MOD_RES (4), (5): Xaa is C or S
PKPXXAPTQLRPVQVRKIDDSSNVIKKATVNMVVRA

SEQ ID NO: 30214 - protein, 39 aa, Artificial Sequence
  Non-cyclic GFR-binding peptide
  MOD_RES (37), (39): Xaa is C or S
  MOD_RES (16), (17), (18), (19), (20): Xaa is A or G
  MOD_RES (21), (22), (23), (24): Xaa is A or G or is absent
RPTQVQLEPLTVLYYXXXXXXXXXEQLSNTLEDHLAXKX

SEQ ID NO: 30215 - protein, 33 aa, Artificial Sequence
  Non-cyclic GFR-binding peptide
  MOD_RES (33), (33): Xaa is C or S
  MOD_RES (14), (15), (16), (17), (18): Xaa is A or G
  MOD_RES (19), (20), (21), (22): Xaa is A or G or is absent
VPQALRPVQIRKIXXXXXXXXXKKATVMIVRSX

SEQ ID NO: 30216 - protein, 38 aa, Artificial Sequence
  Non-cyclic GFR-binding peptide
  MOD_RES (2), (2): Xaa is C or S
KXQPSRVHHEPLPVVYYEYVRKKPKLEQLSNRLEEHLE

SEQ ID NO: 30217 - protein, 39 aa, Artificial Sequence
  Non-cyclic GFR-binding peptide
  MOD_RES (2), (3), (36), (38): Xaa is C or S
  MOD_RES (17), (18), (19), (20), (21): Xaa is A or G
  MOD_RES (22), (23), (24), (25): Xaa is A or G or is absent
PXXVPQDLRPVQIRKIXXXXXXXXXKKATVMVVKSXKXS

SEQ ID NO: 30218 - protein, 37 aa, Artificial Sequence
  Non-cyclic GFR-binding peptide
  MOD_RES (3), (4), (37): Xaa is C or S
  MOD_RES (18), (19), (20), (21), (22): Xaa is A or G
  MOD_RES (23), (24), (25), (26): Xaa is A or G or is absent
SPXXVSQDLRSVKIAKVXXXXXXXXXKEVQVMIVKSX

SEQ ID NO: 30219 - protein, 38 aa, Artificial Sequence
  Non-cyclic GFR-binding peptide
  MOD_RES (3), (4), (36), (38): Xaa is C or S
KAXXVPTELSNITMQIMDENEKVVIGEMSDMVVEGXGX

SEQ ID NO: 30220 - protein, 34 aa, Artificial Sequence
  Non-cyclic GFR-binding peptide
  MOD_RES (2), (2): Xaa is C or S
  MOD_RES (16), (17), (18), (19), (20): Xaa is A or G
  MOD_RES (21), (22), (23), (24): Xaa is A or G or is absent
EXVPTEEEPLPMVYYXXXXXXXXXEQLSNFLQHN

SEQ ID NO: 30221 - protein, 39 aa, Artificial Sequence
  Non-cyclic GFR-binding peptide
  MOD_RES (5), (6), (38): Xaa is C or S
IPKAXXVPTELRPVQMRKIDEYDKVVKKATVEMVVEGXG

SEQ ID NO: 30222 - protein, 34 aa, Artificial Sequence
  Non-cyclic GFR-binding peptide
  MOD_RES (3), (4): Xaa is C or S
KAXXVPTELSNITMQIMDENEKVVIGEMSDMVVE

SEQ ID NO: 30223 - protein, 36 aa, Artificial Sequence
  Non-cyclic GFR-binding peptide
  MOD_RES (2), (3), (34), (36): Xaa is C or S
PXXVSQDLRSVKIAKVIGKTPKIKEVQVMIVKSXKX

SEQ ID NO: 30224 - protein, 42 aa, Artificial Sequence
  Non-cyclic GFR-binding peptide
  MOD_RES (5), (6), (39), (41): Xaa is C or S
  MOD_RES (20), (21), (22), (23), (24): Xaa is A or G
  MOD_RES (25), (26), (27), (28): Xaa is A or G or is absent
SASPXXVSQDLRSVKIAKVXXXXXXXXXKEVQVMIVKSXKXS

SEQ ID NO: 30225 - protein, 44 aa, Artificial Sequence
  Non-cyclic GFR-binding peptide
  MOD_RES (7), (41), (43): Xaa is C or S
NDEGLEXVPTEEEPLTMLYYRIKPHQGQHEQLSNFLQHNKXEXR

SEQ ID NO: 30226 - protein, 40 aa, Artificial Sequence
  Non-cyclic GFR-binding peptide
  MOD_RES (1), (38), (40): Xaa is C or S
  MOD_RES (17), (18), (19), (20), (21): Xaa is A or G
  MOD_RES (22), (23), (24), (25): Xaa is A or G or is absent
XQPSRVHHEPLTVLYYXXXXXXXXXEQLSNRLEEHLEXAX

SEQ ID NO: 30227 - protein, 40 aa, Artificial Sequence
  Non-cyclic GFR-binding peptide
  MOD_RES (5), (39): Xaa is C or S
  MOD_RES (19), (20), (21), (22), (23): Xaa is A or G
  MOD_RES (24), (25), (26), (27): Xaa is A or G or is absent
EGLEXVPTEEEPLPMVYYXXXXXXXXXEQLSNFLQHNKXE

SEQ ID NO: 30228 - protein, 39 aa, Artificial Sequence
  Non-cyclic GFR-binding peptide
  MOD_RES (1), (2), (36), (38): Xaa is C or S
  MOD_RES (16), (17), (18), (19), (20): Xaa is A or G
  MOD_RES (21), (22), (23), (24): Xaa is A or G or is absent
XXVPTELRSVKMAKVXXXXXXXXXKEVQVEMVVEGXGXR

SEQ ID NO: 30229 - protein, 36 aa, Artificial Sequence
  Non-cyclic GFR-binding peptide
  MOD_RES (2), (3), (34), (36): Xaa is C or S
PXXVPQALRSVKIAKVVGRKPKVKEVQVMIVRSXKX

SEQ ID NO: 30230 - protein, 36 aa, Artificial Sequence
  Non-cyclic GFR-binding peptide
  MOD_RES (1), (33), (35): Xaa is C or S
XVPTELSNITMQIMDEYDKVVIGEMSEMVVEGXGXR

SEQ ID NO: 30231 - protein, 42 aa, Artificial Sequence
  Non-cyclic GFR-binding peptide
  MOD_RES (4), (5), (39), (41): Xaa is C or S
  MOD_RES (19), (20), (21), (22), (23): Xaa is A or G
  MOD_RES (24), (25), (26), (27): Xaa is A or G or is absent
PKAXXVPTELRSVKMAKVXXXXXXXXXKEVQVDMVVEGXGXR

SEQ ID NO: 30232 - protein, 38 aa, Artificial Sequence
  Non-cyclic GFR-binding peptide
  MOD_RES (6), (7): Xaa is C or S
TVPKPXXAPTQLRSVKVAKVDDSSNVIKEVQVNMVVRA

SEQ ID NO: 30233 - protein, 39 aa, Artificial Sequence
  Non-cyclic GFR-binding peptide
  MOD_RES (2), (39): Xaa is C or S
  MOD_RES (18), (19), (20), (21), (22): Xaa is A or G
  MOD_RES (23), (24), (25), (26): Xaa is A or G or is absent
KXQPSRVHHEPLPVVYYXXXXXXXXXEQLSNRLEEHLEX

SEQ ID NO: 30234 - protein, 35 aa, Artificial Sequence
  Non-cyclic GFR-binding peptide
  MOD_RES (1), (35): Xaa is C or S
  MOD_RES (15), (16), (17), (18), (19): Xaa is A or G
  MOD_RES (20), (21), (22), (23): Xaa is A or G or is absent
XAPTKLSNITVQIMXXXXXXXXXIGEMSNMVVRSX

SEQ ID NO: 30235 - protein, 34 aa, Artificial Sequence
  Non-cyclic GFR-binding peptide
  MOD_RES (3), (3): Xaa is C or S
PTXAPTKLRPVQVRKIDDSSNVIKKATVNMVVRS

SEQ ID NO: 30236 - protein, 36 aa, Artificial Sequence
  Non-cyclic GFR-binding peptide
  MOD_RES (2), (3): Xaa is C or S
  MOD_RES (17), (18), (19), (20), (21): Xaa is A or G
  MOD_RES (22), (23), (24), (25): Xaa is A or G or is absent
PXXAPTQLRPVQVRKIXXXXXXXXXKKATVNMVVRA

SEQ ID NO: 30237 - protein, 31 aa, Artificial Sequence
  Non-cyclic GFR-binding peptide
  MOD_RES (1), (1): Xaa is C or S
XAPTQLRSVKVAKVDDSSNVIKEVQVNMVVR

SEQ ID NO: 30238 - protein, 32 aa, Artificial Sequence
  Non-cyclic GFR-binding peptide
  MOD_RES (1), (2): Xaa is C or S
XXAPTKLSNITVQIMDDSSNVIIGEMSNMVVR

SEQ ID NO: 30239 - protein, 38 aa, Artificial Sequence
  Non-cyclic GFR-binding peptide
  MOD_RES (2), (2): Xaa is C or S
  MOD_RES (18), (19), (20), (21), (22): Xaa is A or G
  MOD_RES (23), (24), (25), (26): Xaa is A or G or is absent
QXRPTQVQLEPLPVVYYXXXXXXXXXEQLSNTLEDHLA

SEQ ID NO: 30240 - protein, 36 aa, Artificial Sequence
  Non-cyclic GFR-binding peptide
  MOD_RES (4), (5): Xaa is C or S
PKPXXAPTKLSNITVQIMDDSSNVIIGEMSNMVVRS

SEQ ID NO: 30241 - protein, 38 aa, Artificial Sequence
  Non-cyclic GFR-binding peptide
  MOD_RES (1), (2), (35), (37): Xaa is C or S
  MOD_RES (16), (17), (18), (19), (20): Xaa is A or G
  MOD_RES (21), (22), (23), (24): Xaa is A or G or is absent
XXVPQDLRPVQIRKIXXXXXXXXXKKATVMVVKSXKXS

SEQ ID NO: 30242 - protein, 32 aa, Artificial Sequence
  Non-cyclic GFR-binding peptide
  MOD_RES (14), (15), (16), (17), (18): Xaa is A or G
  MOD_RES (19), (20), (21), (22): Xaa is A or G or is absent
VPTELSNITMQIMXXXXXXXXXIGEMSDMVVE

SEQ ID NO: 30243 - protein, 34 aa, Artificial Sequence
  Non-cyclic GFR-binding peptide
PTQVQLEPLPVVYYEIVRKKPIFEQLSNTLEDHL

SEQ ID NO: 30244 - protein, 37 aa, Artificial Sequence
  Non-cyclic GFR-binding peptide
  MOD_RES (1), (2), (34), (36): Xaa is C or S
XXVPTELRPVQMRKIDENEKVVKKATVDMVVEGXGXR

SEQ ID NO: 30245 - protein, 33 aa, Artificial Sequence
  Non-cyclic GFR-binding peptide
  MOD_RES (2), (3): Xaa is C or S
PXXVSQDLSNITIQIMIGKTPKIIGEMSMIVKS

SEQ ID NO: 30246 - protein, 34 aa, Artificial Sequence
  Non-cyclic GFR-binding peptide
  MOD_RES (1), (2), (34): Xaa is C or S
XXVPTELRPVQMRKIDENEKVVKKATVDMVVEGX

SEQ ID NO: 30247 - protein, 39 aa, Artificial Sequence
  Non-cyclic GFR-binding peptide
  MOD_RES (1), (2), (36), (38): Xaa is C or S
  MOD_RES (16), (17), (18), (19), (20): Xaa is A or G
  MOD_RES (21), (22), (23), (24): Xaa is A or G or is absent
XXVPTELSNITMQIMXXXXXXXXXIGEMSDMVVEGXGXR

SEQ ID NO: 30248 - protein, 39 aa, Artificial Sequence
  Non-cyclic GFR-binding peptide
  MOD_RES (4), (5), (39): Xaa is C or S
  MOD_RES (19), (20), (21), (22), (23): Xaa is A or G
  MOD_RES (24), (25), (26), (27): Xaa is A or G or is absent
PKPXXAPTKLRSVKVAKVXXXXXXXXXKEVQVNMVVRSX

SEQ ID NO: 30249 - protein, 39 aa, Artificial Sequence
  Non-cyclic GFR-binding peptide
  MOD_RES (6), (7), (38): Xaa is C or S
ASAAPXXVPQALSNITIQIMVGRKPKVIGEMSMIVRSXK

SEQ ID NO: 30250 - protein, 35 aa, Artificial Sequence
  Non-cyclic GFR-binding peptide
  MOD_RES (1), (2): Xaa is C or S
  MOD_RES (16), (17), (18), (19), (20): Xaa is A or G
  MOD_RES (21), (22), (23), (24): Xaa is A or G or is absent
XXAPTQLRPVQVRKIXXXXXXXXXKKATVNMVVRA

SEQ ID NO: 30251 - protein, 39 aa, Artificial Sequence
  Non-cyclic GFR-binding peptide
  MOD_RES (4), (5), (37), (39): Xaa is C or S
PKAXXVPTELSNITMQIMDENEKVVIGEMSDMVVEGXGX

SEQ ID NO: 30252 - protein, 42 aa, Artificial Sequence
  Non-cyclic GFR-binding peptide
  MOD_RES (6), (40), (42): Xaa is C or S
DEGLEXVPTEEEPLTMLYYRIKPHQGQHEQLSNFLQHNKXEX

SEQ ID NO: 30253 - protein, 39 aa, Artificial Sequence
  Non-cyclic GFR-binding peptide
  MOD_RES (3), (4), (38): Xaa is C or S
  MOD_RES (18), (19), (20), (21), (22): Xaa is A or G
  MOD_RES (23), (24), (25), (26): Xaa is A or G or is absent
KAXXVPTELRSVKMAKVXXXXXXXXXKEVQVEMVVEGXG

SEQ ID NO: 30254 - protein, 36 aa, Artificial Sequence
  Non-cyclic GFR-binding peptide
  MOD_RES (3), (4): Xaa is C or S
  MOD_RES (18), (19), (20), (21), (22): Xaa is A or G
  MOD_RES (23), (24), (25), (26): Xaa is A or G or is absent
KPXXAPTKLRSVKVAKVXXXXXXXXXKEVQVNMVVR

SEQ ID NO: 30255 - protein, 38 aa, Artificial Sequence
  Non-cyclic GFR-binding peptide
  MOD_RES (2), (3), (35), (37): Xaa is C or S
PXXAPTQLRSVKVAKVDDSSNVIKEVQVNMVVRAXGXH

SEQ ID NO: 30256 - protein, 34 aa, Artificial Sequence
  Non-cyclic GFR-binding peptide
  MOD_RES (1), (2): Xaa is C or S
  MOD_RES (16), (17), (18), (19), (20): Xaa is A or G
  MOD_RES (21), (22), (23), (24): Xaa is A or G or is absent
XXAPTKLSNITVQIMXXXXXXXXXIGEMSNMVVR

SEQ ID NO: 30257 - protein, 36 aa, Artificial Sequence
  Non-cyclic GFR-binding peptide
  MOD_RES (34), (36): Xaa is C or S
  MOD_RES (14), (15), (16), (17), (18): Xaa is A or G
  MOD_RES (19), (20), (21), (22): Xaa is A or G or is absent
APTQLRSVKVAKVXXXXXXXXXKEVQVNMVVRAXGX

SEQ ID NO: 30258 - protein, 38 aa, Artificial Sequence
  Non-cyclic GFR-binding peptide
  MOD_RES (2), (3), (37): Xaa is C or S
  MOD_RES (17), (18), (19), (20), (21): Xaa is A or G
  MOD_RES (22), (23), (24), (25): Xaa is A or G or is absent
AXXVPTELRSVKMAKVXXXXXXXXXKEVQVDMVVEGXG

SEQ ID NO: 30259 - protein, 31 aa, Artificial Sequence
  Non-cyclic GFR-binding peptide
  MOD_RES (31), (31): Xaa is C or S
VPQDLSNITIQIMVGRTPKVIGEMSMVVKSX

SEQ ID NO: 30260 - protein, 42 aa, Artificial Sequence
  Non-cyclic GFR-binding peptide
  MOD_RES (5), (6), (40), (42): Xaa is C or S
  MOD_RES (20), (21), (22), (23), (24): Xaa is A or G
  MOD_RES (25), (26), (27), (28): Xaa is A or G or is absent
IPKAXXVPTELRSVKMAKVXXXXXXXXXKEVQVEMVVEGXGX

SEQ ID NO: 30261 - protein, 35 aa, Artificial Sequence
  Non-cyclic GFR-binding peptide
  MOD_RES (1), (33), (35): Xaa is C or S
XVPTELSNITMQIMDEYDKVVIGEMSEMVVEGXGX

SEQ ID NO: 30262 - protein, 40 aa, Artificial Sequence
  Non-cyclic GFR-binding peptide
  MOD_RES (2), (39): Xaa is C or S
KXQPSRVHHEPLPVVYYEYVRKKPKLEQLSNRLEEHLEXA

SEQ ID NO: 30263 - protein, 37 aa, Artificial Sequence
  Non-cyclic GFR-binding peptide
  MOD_RES (1), (34), (36): Xaa is C or S
  MOD_RES (15), (16), (17), (18), (19): Xaa is A or G
  MOD_RES (20), (21), (22), (23): Xaa is A or G or is absent
XVSQDLRPVQIRKIXXXXXXXXXKKATVMIVKSXKXS

SEQ ID NO: 30264 - protein, 41 aa, Artificial Sequence
  Non-cyclic GFR-binding peptide
  MOD_RES (6), (7), (38), (40): Xaa is C or S
ASAAPXXVPQALRPVQIRKIVGRKPKVKKATVMIVRSXKXS

SEQ ID NO: 30265 - protein, 41 aa, Artificial Sequence
  Non-cyclic GFR-binding peptide
  MOD_RES (7), (41): Xaa is C or S
  MOD_RES (21), (22), (23), (24), (25): Xaa is A or G
  MOD_RES (26), (27), (28), (29): Xaa is A or G or is absent
HVTKPTXAPTKLRSVKVAKVXXXXXXXXXKEVQVNMVVRSX

SEQ ID NO: 30266 - protein, 34 aa, Artificial Sequence
  Non-cyclic GFR-binding peptide
  MOD_RES (1), (34): Xaa is C or S
  MOD_RES (15), (16), (17), (18), (19): Xaa is A or G
  MOD_RES (20), (21), (22), (23): Xaa is A or G or is absent
XVPQDLRSVKIAKVXXXXXXXXXKEVQVMVVKSX

SEQ ID NO: 30267 - protein, 37 aa, Artificial Sequence
  Non-cyclic GFR-binding peptide
  MOD_RES (2), (2): Xaa is C or S
  MOD_RES (18), (19), (20), (21), (22): Xaa is A or G
  MOD_RES (23), (24), (25), (26): Xaa is A or G or is absent
QXRPTQVQLEPLPVVYYXXXXXXXXXEQLSNTLEDHL

SEQ ID NO: 30268 - protein, 36 aa, Artificial Sequence
  Non-cyclic GFR-binding peptide
  MOD_RES (4), (5), (36): Xaa is C or S
ASPXXVSQDLSNITIQIMIGKTPKIIGEMSMIVKSX

SEQ ID NO: 30269 - protein, 39 aa, Artificial Sequence
  Non-cyclic GFR-binding peptide
  MOD_RES (4), (5), (36), (38): Xaa is C or S
ASPXXVPQDLSNITIQIMVGRTPKVIGEMSMVVKSXKXS

SEQ ID NO: 30270 - protein, 40 aa, Artificial Sequence
  Non-cyclic GFR-binding peptide
  MOD_RES (6), (7), (40): Xaa is C or S
  MOD_RES (21), (22), (23), (24), (25): Xaa is A or G
  MOD_RES (26), (27), (28), (29): Xaa is A or G or is absent
ASASPXXVPQDLRPVQIRKIXXXXXXXXXKKATVMVVKSX

SEQ ID NO: 30271 - protein, 36 aa, Artificial Sequence
  Non-cyclic GFR-binding peptide
  MOD_RES (2), (3), (35): Xaa is C or S
PXXAPTKLSNITVQIMDDSSNVIIGEMSNMVVRSXG

SEQ ID NO: 30272 - protein, 32 aa, Artificial Sequence
  Non-cyclic GFR-binding peptide
  MOD_RES (1), (1): Xaa is C or S
XVPTELRSVKMAKVDENEKVVKEVQVDMVVEG

SEQ ID NO: 30273 - protein, 40 aa, Artificial Sequence
  Non-cyclic GFR-binding peptide
  MOD_RES (2), (3), (37), (39): Xaa is C or S
  MOD_RES (17), (18), (19), (20), (21): Xaa is A or G
  MOD_RES (22), (23), (24), (25): Xaa is A or G or is absent
AXXVPTELSNITMQIMXXXXXXXXXIGEMSEMVVEGXGXR

SEQ ID NO: 30274 - protein, 41 aa, Artificial Sequence
  Non-cyclic GFR-binding peptide
  MOD_RES (6), (7), (41): Xaa is C or S
  MOD_RES (21), (22), (23), (24), (25): Xaa is A or G
  MOD_RES (26), (27), (28), (29): Xaa is A or G or is absent
TVPKPXXAPTQLRSVKVAKVXXXXXXXXXKEVQVNMVVRAX

SEQ ID NO: 30275 - protein, 37 aa, Artificial Sequence
  Non-cyclic GFR-binding peptide
  MOD_RES (3), (3): Xaa is C or S
  MOD_RES (19), (20), (21), (22), (23): Xaa is A or G
  MOD_RES (24), (25), (26), (27): Xaa is A or G or is absent
VQXRPTQVQLEPLTVLYYXXXXXXXXXEQLSNTLEDH

SEQ ID NO: 30276 - protein, 39 aa, Artificial Sequence
  Non-cyclic GFR-binding peptide
  MOD_RES (2), (3), (36), (38): Xaa is C or S
  MOD_RES (17), (18), (19), (20), (21): Xaa is A or G
  MOD_RES (22), (23), (24), (25): Xaa is A or G or is absent
PXXVPQDLRSVKIAKVXXXXXXXXXKEVQVMVVKSXKXS

SEQ ID NO: 30277 - protein, 42 aa, Artificial Sequence
  Non-cyclic GFR-binding peptide
  MOD_RES (3), (40), (42): Xaa is C or S
  MOD_RES (19), (20), (21), (22), (23): Xaa is A or G
  MOD_RES (24), (25), (26), (27): Xaa is A or G or is absent
VKXQPSRVHHEPLTVLYYXXXXXXXXXEQLSNRLEEHLEXAX

SEQ ID NO: 30278 - protein, 35 aa, Artificial Sequence
  Non-cyclic GFR-binding peptide
  MOD_RES (1), (32), (34): Xaa is C or S
XVSQDLRPVQIRKIIGKTPKIKKATVMIVKSXKXS

SEQ ID NO: 30279 - protein, 38 aa, Artificial Sequence
  Non-cyclic GFR-binding peptide
  MOD_RES (5), (6): Xaa is C or S
  MOD_RES (20), (21), (22), (23), (24): Xaa is A or G
  MOD_RES (25), (26), (27), (28): Xaa is A or G or is absent
SAAPXXVPQALRPVQIRKIXXXXXXXXXKKATVMIVRS

SEQ ID NO: 30280 - protein, 35 aa, Artificial Sequence
  Non-cyclic GFR-binding peptide
  MOD_RES (2), (3): Xaa is C or S
  MOD_RES (17), (18), (19), (20), (21): Xaa is A or G
  MOD_RES (22), (23), (24), (25): Xaa is A or G or is absent
PXXAPTKLRSVKVAKVXXXXXXXXXKEVQVNMVVR

SEQ ID NO: 30281 - protein, 36 aa, Artificial Sequence
  Non-cyclic GFR-binding peptide
  MOD_RES (1), (35): Xaa is C or S
  MOD_RES (15), (16), (17), (18), (19): Xaa is A or G
  MOD_RES (20), (21), (22), (23): Xaa is A or G or is absent
XVPTELRPVQMRKIXXXXXXXXXKKATVEMVVEGXG

SEQ ID NO: 30282 - protein, 43 aa, Artificial Sequence
  Non-cyclic GFR-binding peptide
  MOD_RES (5), (42): Xaa is C or S
  MOD_RES (21), (22), (23), (24), (25): Xaa is A or G
  MOD_RES (26), (27), (28), (29): Xaa is A or G or is absent
RNVQXRPTQVQLEPLTVLYYXXXXXXXXXEQLSNTLEDHLAXK

SEQ ID NO: 30283 - protein, 33 aa, Artificial Sequence
  Non-cyclic GFR-binding peptide
  MOD_RES (1), (1): Xaa is C or S
  MOD_RES (15), (16), (17), (18), (19): Xaa is A or G
  MOD_RES (20), (21), (22), (23): Xaa is A or G or is absent
XVPTELRPVQMRKIXXXXXXXXXKKATVDMVVE

SEQ ID NO: 30284 - protein, 36 aa, Artificial Sequence
  Non-cyclic GFR-binding peptide
  MOD_RES (1), (34), (36): Xaa is C or S
  MOD_RES (15), (16), (17), (18), (19): Xaa is A or G
  MOD_RES (20), (21), (22), (23): Xaa is A or G or is absent
XVPQDLRSVKIAKVXXXXXXXXXKEVQVMVVKSXKX

SEQ ID NO: 30285 - protein, 42 aa, Artificial Sequence
  Non-cyclic GFR-binding peptide
  MOD_RES (6), (7), (39), (41): Xaa is C or S
YVPKPXXAPTKLSNITVQIMDDSSNVIIGEMSNMVVRSXGXH

SEQ ID NO: 30286 - protein, 34 aa, Artificial Sequence
  Non-cyclic GFR-binding peptide
  MOD_RES (31), (33): Xaa is C or S
VPQDLRPVQIRKIVGRTPKVKKATVMVVKSXKXS

SEQ ID NO: 30287 - protein, 37 aa, Artificial Sequence
  Non-cyclic GFR-binding peptide
  MOD_RES (2), (3), (34), (36): Xaa is C or S
PXXVSQDLSNITIQIMIGKTPKIIGEMSMIVKSXKXS

SEQ ID NO: 30288 - protein, 36 aa, Artificial Sequence
  Non-cyclic GFR-binding peptide
  MOD_RES (5), (6): Xaa is C or S
IPKAXXVPTELSNITMQIMDEYDKVVIGEMSEMVVE

SEQ ID NO: 30289 - protein, 41 aa, Artificial Sequence
  Non-cyclic GFR-binding peptide
  MOD_RES (5), (6), (40): Xaa is C or S
  MOD_RES (20), (21), (22), (23), (24): Xaa is A or G
  MOD_RES (25), (26), (27), (28): Xaa is A or G or is absent
VPKPXXAPTQLRSVKVAKVXXXXXXXXXKEVQVNMVVRAXG

SEQ ID NO: 30290 - protein, 31 aa, Artificial Sequence
  Non-cyclic GFR-binding peptide
  MOD_RES (31), (31): Xaa is C or S
VPQDLRSVKIAKVVGRTPKVKEVQVMVVKSX

SEQ ID NO: 30291 - protein, 39 aa, Artificial Sequence
  Non-cyclic GFR-binding peptide
  MOD_RES (2), (39): Xaa is C or S
QXRPTQVQLEPLTVLYYEIVRKKPIFEQLSNTLEDHLAX

SEQ ID NO: 30292 - protein, 38 aa, Artificial Sequence
  Non-cyclic GFR-binding peptide
  MOD_RES (3), (35), (37): Xaa is C or S
PTXAPTKLRPVQVRKIDDSSNVIKKATVNMVVRSXGXH

SEQ ID NO: 30293 - protein, 35 aa, Artificial Sequence
  Non-cyclic GFR-binding peptide
  MOD_RES (2), (3): Xaa is C or S
  MOD_RES (17), (18), (19), (20), (21): Xaa is A or G
  MOD_RES (22), (23), (24), (25): Xaa is A or G or is absent
PXXVPQDLSNITIQIMXXXXXXXXXIGEMSMVVKS

SEQ ID NO: 30294 - protein, 35 aa, Artificial Sequence
  Non-cyclic GFR-binding peptide
  MOD_RES (3), (3): Xaa is C or S
  MOD_RES (17), (18), (19), (20), (21): Xaa is A or G
  MOD_RES (22), (23), (24), (25): Xaa is A or G or is absent
PTXAPTKLSNITVQIMXXXXXXXXXIGEMSNMVVR

SEQ ID NO: 30295 - protein, 39 aa, Artificial Sequence
  Non-cyclic GFR-binding peptide
  MOD_RES (5), (5): Xaa is C or S
SSVKXQPSRVHHEPLPVVYYEYVRKKPKLEQLSNRLEEH

SEQ ID NO: 30296 - protein, 39 aa, Artificial Sequence
  Non-cyclic GFR-binding peptide
  MOD_RES (4), (4): Xaa is C or S
NVQXRPTQVQLEPLTVLYYEIVRKKPIFEQLSNTLEDHL

SEQ ID NO: 30297 - protein, 33 aa, Artificial Sequence
  Non-cyclic GFR-binding peptide
  MOD_RES (31), (33): Xaa is C or S
VSQDLRSVKIAKVIGKTPKIKEVQVMIVKSXKX

SEQ ID NO: 30298 - protein, 37 aa, Artificial Sequence
  Non-cyclic GFR-binding peptide
  MOD_RES (1), (2), (34), (36): Xaa is C or S
XXAPTKLRSVKVAKVDDSSNVIKEVQVNMVVRSXGXH

SEQ ID NO: 30299 - protein, 37 aa, Artificial Sequence
  Non-cyclic GFR-binding peptide
  MOD_RES (3), (4): Xaa is C or S
  MOD_RES (18), (19), (20), (21), (22): Xaa is A or G
  MOD_RES (23), (24), (25), (26): Xaa is A or G or is absent
KPXXAPTQLSNITVQIMXXXXXXXXXIGEMSNMVVRA

SEQ ID NO: 30300 - protein, 37 aa, Artificial Sequence
  Non-cyclic GFR-binding peptide
  MOD_RES (2), (3), (35), (37): Xaa is C or S
PXXAPTKLSNITVQIMDDSSNVIIGEMSNMVVRSXGX

SEQ ID NO: 30301 - protein, 34 aa, Artificial Sequence
  Non-cyclic GFR-binding peptide
  MOD_RES (34), (34): Xaa is C or S
  MOD_RES (14), (15), (16), (17), (18): Xaa is A or G
  MOD_RES (19), (20), (21), (22): Xaa is A or G or is absent
VPTEEEPLPMVYYXXXXXXXXXEQLSNFLQHNKX

SEQ ID NO: 30302 - protein, 35 aa, Artificial Sequence
  Non-cyclic GFR-binding peptide
  MOD_RES (1), (34): Xaa is C or S
  MOD_RES (15), (16), (17), (18), (19): Xaa is A or G
  MOD_RES (20), (21), (22), (23): Xaa is A or G or is absent
XVPQDLSNITIQIMXXXXXXXXXIGEMSMVVKSXK

SEQ ID NO: 30303 - protein, 33 aa, Artificial Sequence
  Non-cyclic GFR-binding peptide
  MOD_RES (1), (2): Xaa is C or S
XXAPTQLSNITVQIMDDSSNVIIGEMSNMVVRA

SEQ ID NO: 30304 - protein, 35 aa, Artificial Sequence
  Non-cyclic GFR-binding peptide
  MOD_RES (4), (5): Xaa is C or S
PKAXXVPTELRPVQMRKIDEYDKVVKKATVEMVVE

SEQ ID NO: 30305 - protein, 44 aa, Artificial Sequence
  Non-cyclic GFR-binding peptide
  MOD_RES (4), (41), (43): Xaa is C or S
  MOD_RES (20), (21), (22), (23), (24): Xaa is A or G
  MOD_RES (25), (26), (27), (28): Xaa is A or G or is absent
SVKXQPSRVHHEPLTVLYYXXXXXXXXXEQLSNRLEEHLEXAXA

SEQ ID NO: 30306 - protein, 37 aa, Artificial Sequence
  Non-cyclic GFR-binding peptide
  MOD_RES (5), (6): Xaa is C or S
IPKAXXVPTELRPVQMRKIDEYDKVVKKATVEMVVEG

SEQ ID NO: 30307 - protein, 39 aa, Artificial Sequence
  Non-cyclic GFR-binding peptide
  MOD_RES (6), (7): Xaa is C or S
  MOD_RES (21), (22), (23), (24), (25): Xaa is A or G
  MOD_RES (26), (27), (28), (29): Xaa is A or G or is absent
ASASPXXVPQDLSNITIQIMXXXXXXXXXIGEMSMVVKS

SEQ ID NO: 30308 - protein, 42 aa, Artificial Sequence
  Non-cyclic GFR-binding peptide
  MOD_RES (5), (6), (39), (41): Xaa is C or S
  MOD_RES (20), (21), (22), (23), (24): Xaa is A or G
  MOD_RES (25), (26), (27), (28): Xaa is A or G or is absent
SASPXXVPQDLRSVKIAKVXXXXXXXXXKEVQVMVVKSXKXS

SEQ ID NO: 30309 - protein, 31 aa, Artificial Sequence
  Non-cyclic GFR-binding peptide
VPTELRSVKMAKVDENEKVVKEVQVDMVVEG

SEQ ID NO: 30310 - protein, 39 aa, Artificial Sequence
  Non-cyclic GFR-binding peptide
  MOD_RES (3), (4), (36), (38): Xaa is C or S
KPXXAPTQLRSVKVAKVDDSSNVIKEVQVNMVVRAXGXH

SEQ ID NO: 30311 - protein, 38 aa, Artificial Sequence
  Non-cyclic GFR-binding peptide
  MOD_RES (36), (38): Xaa is C or S
  MOD_RES (15), (16), (17), (18), (19): Xaa is A or G
  MOD_RES (20), (21), (22), (23): Xaa is A or G or is absent
PSRVHHEPLTVLYYXXXXXXXXXEQLSNRLEEHLEXAX

SEQ ID NO: 30312 - protein, 35 aa, Artificial Sequence
  Non-cyclic GFR-binding peptide
  MOD_RES (3), (3): Xaa is C or S
  MOD_RES (17), (18), (19), (20), (21): Xaa is A or G
  MOD_RES (22), (23), (24), (25): Xaa is A or G or is absent
LEXVPTEEEPLPMVYYXXXXXXXXXEQLSNFLQHN

SEQ ID NO: 30313 - protein, 37 aa, Artificial Sequence
  Non-cyclic GFR-binding peptide
  MOD_RES (3), (4): Xaa is C or S
  MOD_RES (18), (19), (20), (21), (22): Xaa is A or G
  MOD_RES (23), (24), (25), (26): Xaa is A or G or is absent
KAXXVPTELRPVQMRKIXXXXXXXXXKKATVDMVVEG

SEQ ID NO: 30314 - protein, 42 aa, Artificial Sequence
  Non-cyclic GFR-binding peptide
  MOD_RES (5), (6), (39), (41): Xaa is C or S
  MOD_RES (20), (21), (22), (23), (24): Xaa is A or G
  MOD_RES (25), (26), (27), (28): Xaa is A or G or is absent
SASPXXVSQDLSNITIQIMXXXXXXXXXIGEMSMIVKSXKXS

SEQ ID NO: 30315 - protein, 35 aa, Artificial Sequence
  Non-cyclic GFR-binding peptide
  MOD_RES (1), (2): Xaa is C or S
  MOD_RES (16), (17), (18), (19), (20): Xaa is A or G
  MOD_RES (21), (22), (23), (24): Xaa is A or G or is absent
XXVPTELRSVKMAKVXXXXXXXXXKEVQVDMVVEG

SEQ ID NO: 30316 - protein, 41 aa, Artificial Sequence
  Non-cyclic GFR-binding peptide
  MOD_RES (5), (39), (41): Xaa is C or S
EGLEXVPTEEEPLPMVYYRIKPHQGQHEQLSNFLQHNKXEX

SEQ ID NO: 30317 - protein, 36 aa, Artificial Sequence
  Non-cyclic GFR-binding peptide
  MOD_RES (2), (3), (34), (36): Xaa is C or S
PXXVSQDLSNITIQIMIGKTPKIIGEMSMIVKSXKX

SEQ ID NO: 30318 - protein, 41 aa, Artificial Sequence
  Non-cyclic GFR-binding peptide
  MOD_RES (4), (41): Xaa is C or S
  MOD_RES (20), (21), (22), (23), (24): Xaa is A or G
  MOD_RES (25), (26), (27), (28): Xaa is A or G or is absent
NVQXRPTQVQLEPLTVLYYXXXXXXXXXEQLSNTLEDHLAX

SEQ ID NO: 30319 - protein, 33 aa, Artificial Sequence
  Non-cyclic GFR-binding peptide
  MOD_RES (2), (3): Xaa is C or S
PXXVPQALSNITIQIMVGRKPKVIGEMSMIVRS

SEQ ID NO: 30320 - protein, 41 aa, Artificial Sequence
  Non-cyclic GFR-binding peptide
  MOD_RES (7), (41): Xaa is C or S
NDEGLEXVPTEEEPLTMLYYRIKPHQGQHEQLSNFLQHNKX

SEQ ID NO: 30321 - protein, 35 aa, Artificial Sequence
  Non-cyclic GFR-binding peptide
  MOD_RES (1), (33), (35): Xaa is C or S
XAPTQLSNITVQIMDDSSNVIIGEMSNMVVRAXGX

SEQ ID NO: 30322 - protein, 33 aa, Artificial Sequence
  Non-cyclic GFR-binding peptide
  MOD_RES (33), (33): Xaa is C or S
  MOD_RES (14), (15), (16), (17), (18): Xaa is A or G
  MOD_RES (19), (20), (21), (22): Xaa is A or G or is absent
VSQDLRSVKIAKVXXXXXXXXXKEVQVMIVKSX

SEQ ID NO: 30323 - protein, 41 aa, Artificial Sequence
  Non-cyclic GFR-binding peptide
  MOD_RES (5), (6), (39), (41): Xaa is C or S
  MOD_RES (20), (21), (22), (23), (24): Xaa is A or G
  MOD_RES (25), (26), (27), (28): Xaa is A or G or is absent
SASPXXVPQDLSNITIQIMXXXXXXXXXIGEMSMVVKSXKX

SEQ ID NO: 30324 - protein, 39 aa, Artificial Sequence
  Non-cyclic GFR-binding peptide
  MOD_RES (6), (6): Xaa is C or S
  MOD_RES (20), (21), (22), (23), (24): Xaa is A or G
  MOD_RES (25), (26), (27), (28): Xaa is A or G or is absent
VTKPTXAPTKLRSVKVAKVXXXXXXXXXKEVQVNMVVRS

SEQ ID NO: 30325 - protein, 32 aa, Artificial Sequence
  Non-cyclic GFR-binding peptide
  MOD_RES (1), (2): Xaa is C or S
XXAPTKLRPVQVRKIDDSSNVIKKATVNMVVR

SEQ ID NO: 30326 - protein, 31 aa, Artificial Sequence
  Non-cyclic GFR-binding peptide
VPTELRSVKMAKVDEYDKVVKEVQVEMVVEG

SEQ ID NO: 30327 - protein, 42 aa, Artificial Sequence
  Non-cyclic GFR-binding peptide
  MOD_RES (5), (6), (40), (42): Xaa is C or S
  MOD_RES (20), (21), (22), (23), (24): Xaa is A or G
  MOD_RES (25), (26), (27), (28): Xaa is A or G or is absent
IPKAXXVPTELRPVQMRKIXXXXXXXXXKKATVEMVVEGXGX

SEQ ID NO: 30328 - protein, 33 aa, Artificial Sequence
  Non-cyclic GFR-binding peptide
VPTEEEPLPMVYYRIKPHQGQHEQLSNFLQHNK

SEQ ID NO: 30329 - protein, 37 aa, Artificial Sequence
  Non-cyclic GFR-binding peptide
  MOD_RES (1), (34), (36): Xaa is C or S
  MOD_RES (15), (16), (17), (18), (19): Xaa is A or G
  MOD_RES (20), (21), (22), (23): Xaa is A or G or is absent
XVPQALRSVKIAKVXXXXXXXXXKEVQVMIVRSXKXS

SEQ ID NO: 30330 - protein, 39 aa, Artificial Sequence
  Non-cyclic GFR-binding peptide
  MOD_RES (4), (5), (39): Xaa is C or S
  MOD_RES (19), (20), (21), (22), (23): Xaa is A or G
  MOD_RES (24), (25), (26), (27): Xaa is A or G or is absent
PKAXXVPTELRPVQMRKIXXXXXXXXXKKATVEMVVEGX

SEQ ID NO: 30331 - protein, 37 aa, Artificial Sequence
  Non-cyclic GFR-binding peptide
  MOD_RES (6), (7): Xaa is C or S
ASASPXXVPQDLSNITIQIMVGRTPKVIGEMSMVVKS

SEQ ID NO: 30332 - protein, 34 aa, Artificial Sequence
  Non-cyclic GFR-binding peptide
  MOD_RES (34), (34): Xaa is C or S
VPTEEEPLPMVYYRIKPHQGQHEQLSNFLQHNKX

SEQ ID NO: 30333 - protein, 35 aa, Artificial Sequence
  Non-cyclic GFR-binding peptide
RPTQVQLEPLTVLYYEIVRKKPIFEQLSNTLEDHL

SEQ ID NO: 30334 - protein, 34 aa, Artificial Sequence
  Non-cyclic GFR-binding peptide
  MOD_RES (1), (1): Xaa is C or S
  MOD_RES (15), (16), (17), (18), (19): Xaa is A or G
  MOD_RES (20), (21), (22), (23): Xaa is A or G or is absent
XVPTELRPVQMRKIXXXXXXXXXKKATVEMVVEG

SEQ ID NO: 30335 - protein, 38 aa, Artificial Sequence
  Non-cyclic GFR-binding peptide
  MOD_RES (4), (5): Xaa is C or S
  MOD_RES (19), (20), (21), (22), (23): Xaa is A or G
  MOD_RES (24), (25), (26), (27): Xaa is A or G or is absent
PKAXXVPTELRSVKMAKVXXXXXXXXXKEVQVDMVVEG

SEQ ID NO: 30336 - protein, 40 aa, Artificial Sequence
  Non-cyclic GFR-binding peptide
  MOD_RES (4), (38), (40): Xaa is C or S
GLEXVPTEEEPLPMVYYRIKPHQGQHEQLSNFLQHNKXEX

SEQ ID NO: 30337 - protein, 38 aa, Artificial Sequence
  Non-cyclic GFR-binding peptide
  MOD_RES (1), (2), (35), (37): Xaa is C or S
  MOD_RES (16), (17), (18), (19), (20): Xaa is A or G
  MOD_RES (21), (22), (23), (24): Xaa is A or G or is absent
XXVPQDLRSVKIAKVXXXXXXXXXKEVQVMVVKSXKXS

SEQ ID NO: 30338 - protein, 36 aa, Artificial Sequence
  Non-cyclic GFR-binding peptide
  MOD_RES (2), (3): Xaa is C or S
  MOD_RES (17), (18), (19), (20), (21): Xaa is A or G
  MOD_RES (22), (23), (24), (25): Xaa is A or G or is absent
AXXVPTELSNITMQIMXXXXXXXXXIGEMSDMVVEG

SEQ ID NO: 30339 - protein, 32 aa, Artificial Sequence
  Non-cyclic GFR-binding peptide
  MOD_RES (31), (31): Xaa is C or S
VPQALRSVKIAKVVGRKPKVKEVQVMIVRSXK

SEQ ID NO: 30340 - protein, 41 aa, Artificial Sequence
  Non-cyclic GFR-binding peptide
  MOD_RES (6), (7), (40): Xaa is C or S
  MOD_RES (21), (22), (23), (24), (25): Xaa is A or G
  MOD_RES (26), (27), (28), (29): Xaa is A or G or is absent
ASASPXXVPQDLSNITIQIMXXXXXXXXXIGEMSMVVKSXK

SEQ ID NO: 30341 - protein, 36 aa, Artificial Sequence
  Non-cyclic GFR-binding peptide
  MOD_RES (1), (2), (35): Xaa is C or S
  MOD_RES (16), (17), (18), (19), (20): Xaa is A or G
  MOD_RES (21), (22), (23), (24): Xaa is A or G or is absent
XXVSQDLSNITIQIMXXXXXXXXXIGEMSMIVKSXK

SEQ ID NO: 30342 - protein, 41 aa, Artificial Sequence
  Non-cyclic GFR-binding peptide
  MOD_RES (4), (38), (40): Xaa is C or S
  MOD_RES (18), (19), (20), (21), (22): Xaa is A or G
  MOD_RES (23), (24), (25), (26): Xaa is A or G or is absent
KPTXAPTKLRPVQVRKIXXXXXXXXXKKATVNMVVRSXGXH

SEQ ID NO: 30343 - protein, 37 aa, Artificial Sequence
  Non-cyclic GFR-binding peptide
  MOD_RES (2), (2): Xaa is C or S
KXQPSRVHHEPLPVVYYEYVRKKPKLEQLSNRLEEHL

SEQ ID NO: 30344 - protein, 37 aa, Artificial Sequence
  Non-cyclic GFR-binding peptide
  MOD_RES (6), (7): Xaa is C or S
ASAAPXXVPQALRPVQIRKIVGRKPKVKKATVMIVRS

SEQ ID NO: 30345 - protein, 40 aa, Artificial Sequence
  Non-cyclic GFR-binding peptide
  MOD_RES (6), (7), (39): Xaa is C or S
TVPKPXXAPTQLSNITVQIMDDSSNVIIGEMSNMVVRAXG

SEQ ID NO: 30346 - protein, 36 aa, Artificial Sequence
  Non-cyclic GFR-binding peptide
  MOD_RES (5), (6): Xaa is C or S
SASPXXVPQDLRPVQIRKIVGRTPKVKKATVMVVKS

SEQ ID NO: 30347 - protein, 34 aa, Artificial Sequence
  Non-cyclic GFR-binding peptide
  MOD_RES (2), (3), (34): Xaa is C or S
PXXVPQALRPVQIRKIVGRKPKVKKATVMIVRSX

SEQ ID NO: 30348 - protein, 34 aa, Artificial Sequence
  Non-cyclic GFR-binding peptide
  MOD_RES (1), (32), (34): Xaa is C or S
XVPQDLRSVKIAKVVGRTPKVKEVQVMVVKSXKX

SEQ ID NO: 30349 - protein, 37 aa, Artificial Sequence
  Non-cyclic GFR-binding peptide
  MOD_RES (3), (4), (36): Xaa is C or S
KAXXVPTELSNITMQIMDEYDKVVIGEMSEMVVEGXG

SEQ ID NO: 30350 - protein, 33 aa, Artificial Sequence
  Non-cyclic GFR-binding peptide
  MOD_RES (1), (1): Xaa is C or S
  MOD_RES (15), (16), (17), (18), (19): Xaa is A or G
  MOD_RES (20), (21), (22), (23): Xaa is A or G or is absent
XVPTELRSVKMAKVXXXXXXXXXKEVQVDMVVE

SEQ ID NO: 30351 - protein, 39 aa, Artificial Sequence
  Non-cyclic GFR-binding peptide
  MOD_RES (7), (39): Xaa is C or S
HVTKPTXAPTKLSNITVQIMDDSSNVIIGEMSNMVVRSX

SEQ ID NO: 30352 - protein, 37 aa, Artificial Sequence
  Non-cyclic GFR-binding peptide
  MOD_RES (36), (36): Xaa is C or S
  MOD_RES (15), (16), (17), (18), (19): Xaa is A or G
  MOD_RES (20), (21), (22), (23): Xaa is A or G or is absent
PTQVQLEPLPVVYYXXXXXXXXXEQLSNTLEDHLAXK

SEQ ID NO: 30353 - protein, 31 aa, Artificial Sequence
  Non-cyclic GFR-binding peptide
APTKLRSVKVAKVDDSSNVIKEVQVNMVVRS

SEQ ID NO: 30354 - protein, 40 aa, Artificial Sequence
  Non-cyclic GFR-binding peptide
  MOD_RES (37), (39): Xaa is C or S
  MOD_RES (16), (17), (18), (19), (20): Xaa is A or G
  MOD_RES (21), (22), (23), (24): Xaa is A or G or is absent
RPTQVQLEPLTVLYYXXXXXXXXXEQLSNTLEDHLAXKXE

SEQ ID NO: 30355 - protein, 38 aa, Artificial Sequence
  Non-cyclic GFR-binding peptide
  MOD_RES (5), (5): Xaa is C or S
  MOD_RES (19), (20), (21), (22), (23): Xaa is A or G
  MOD_RES (24), (25), (26), (27): Xaa is A or G or is absent
EGLEXVPTEEEPLTMLYYXXXXXXXXXEQLSNFLQHNK

SEQ ID NO: 30356 - protein, 38 aa, Artificial Sequence
  Non-cyclic GFR-binding peptide
  MOD_RES (5), (6), (37): Xaa is C or S
SASPXXVPQDLRPVQIRKIVGRTPKVKKATVMVVKSXK

SEQ ID NO: 30357 - protein, 39 aa, Artificial Sequence
  Non-cyclic GFR-binding peptide
  MOD_RES (1), (38): Xaa is C or S
XRPTQVQLEPLPVVYYEIVRKKPIFEQLSNTLEDHLAXK

SEQ ID NO: 30358 - protein, 44 aa, Artificial Sequence
  Non-cyclic GFR-binding peptide
  MOD_RES (6), (7), (41), (43): Xaa is C or S
  MOD_RES (21), (22), (23), (24), (25): Xaa is A or G
  MOD_RES (26), (27), (28), (29): Xaa is A or G or is absent
YVPKPXXAPTKLRSVKVAKVXXXXXXXXXKEVQVNMVVRSXGXH

SEQ ID NO: 30359 - protein, 38 aa, Artificial Sequence
  Non-cyclic GFR-binding peptide
  MOD_RES (5), (6), (37): Xaa is C or S
SASPXXVSQDLRPVQIRKIIGKTPKIKKATVMIVKSXK

SEQ ID NO: 30360 - protein, 34 aa, Artificial Sequence
  Non-cyclic GFR-binding peptide
  MOD_RES (33), (33): Xaa is C or S
  MOD_RES (14), (15), (16), (17), (18): Xaa is A or G
  MOD_RES (19), (20), (21), (22): Xaa is A or G or is absent
VPQDLSNITIQIMXXXXXXXXXIGEMSMVVKSXK

SEQ ID NO: 30361 - protein, 38 aa, Artificial Sequence
  Non-cyclic GFR-binding peptide
  MOD_RES (35), (37): Xaa is C or S
  MOD_RES (14), (15), (16), (17), (18): Xaa is A or G
  MOD_RES (19), (20), (21), (22): Xaa is A or G or is absent
SRVHHEPLTVLYYXXXXXXXXXEQLSNRLEEHLEXAXA

SEQ ID NO: 30362 - protein, 39 aa, Artificial Sequence
  Non-cyclic GFR-binding peptide
  MOD_RES (5), (6), (37), (39): Xaa is C or S
SAAPXXVPQALSNITIQIMVGRKPKVIGEMSMIVRSXKX

SEQ ID NO: 30363 - protein, 39 aa, Artificial Sequence
  Non-cyclic GFR-binding peptide
  MOD_RES (5), (6): Xaa is C or S
  MOD_RES (20), (21), (22), (23), (24): Xaa is A or G
  MOD_RES (25), (26), (27), (28): Xaa is A or G or is absent
VPKPXXAPTQLSNITVQIMXXXXXXXXXIGEMSNMVVRA

SEQ ID NO: 30364 - protein, 39 aa, Artificial Sequence
  Non-cyclic GFR-binding peptide
  MOD_RES (3), (3): Xaa is C or S
  MOD_RES (19), (20), (21), (22), (23): Xaa is A or G
  MOD_RES (24), (25), (26), (27): Xaa is A or G or is absent
VKXQPSRVHHEPLTVLYYXXXXXXXXXEQLSNRLEEHLE

SEQ ID NO: 30365 - protein, 34 aa, Artificial Sequence
  Non-cyclic GFR-binding peptide
SRVHHEPLPVVYYEYVRKKPKLEQLSNRLEEHLE

SEQ ID NO: 30366 - protein, 42 aa, Artificial Sequence
  Non-cyclic GFR-binding peptide
  MOD_RES (6), (7), (39), (41): Xaa is C or S
YVPKPXXAPTKLRPVQVRKIDDSSNVIKKATVNMVVRSXGXH

SEQ ID NO: 30367 - protein, 38 aa, Artificial Sequence
  Non-cyclic GFR-binding peptide
  MOD_RES (5), (6), (38): Xaa is C or S
VPKPXXAPTKLSNITVQIMDDSSNVIIGEMSNMVVRSX

SEQ ID NO: 30368 - protein, 39 aa, Artificial Sequence
  Non-cyclic GFR-binding peptide
  MOD_RES (5), (6), (38): Xaa is C or S
IPKAXXVPTELRSVKMAKVDEYDKVVKEVQVEMVVEGXG

SEQ ID NO: 30369 - protein, 36 aa, Artificial Sequence
  Non-cyclic GFR-binding peptide
  MOD_RES (5), (6): Xaa is C or S
SAAPXXVPQALRPVQIRKIVGRKPKVKKATVMIVRS

SEQ ID NO: 30370 - protein, 38 aa, Artificial Sequence
  Non-cyclic GFR-binding peptide
  MOD_RES (4), (5), (37): Xaa is C or S
PKAXXVPTELSNITMQIMDEYDKVVIGEMSEMVVEGXG

SEQ ID NO: 30371 - protein, 37 aa, Artificial Sequence
  Non-cyclic GFR-binding peptide
  MOD_RES (5), (6), (37): Xaa is C or S
SAAPXXVPQALRPVQIRKIVGRKPKVKKATVMIVRSX

SEQ ID NO: 30372 - protein, 36 aa, Artificial Sequence
  Non-cyclic GFR-binding peptide
  MOD_RES (2), (3), (35): Xaa is C or S
AXXVPTELSNITMQIMDENEKVVIGEMSDMVVEGXG

SEQ ID NO: 30373 - protein, 35 aa, Artificial Sequence
  Non-cyclic GFR-binding peptide
  MOD_RES (3), (3): Xaa is C or S
LEXVPTEEEPLTMLYYRIKPHQGQHEQLSNFLQHN

SEQ ID NO: 30374 - protein, 39 aa, Artificial Sequence
  Non-cyclic GFR-binding peptide
  MOD_RES (6), (7), (39): Xaa is C or S
KIPKAXXVPTELRPVQMRKIDENEKVVKKATVDMVVEGX

SEQ ID NO: 30375 - protein, 39 aa, Artificial Sequence
  Non-cyclic GFR-binding peptide
  MOD_RES (2), (36), (38): Xaa is C or S
  MOD_RES (16), (17), (18), (19), (20): Xaa is A or G
  MOD_RES (21), (22), (23), (24): Xaa is A or G or is absent
TXAPTKLSNITVQIMXXXXXXXXXIGEMSNMVVRSXGXH

SEQ ID NO: 30376 - protein, 35 aa, Artificial Sequence
  Non-cyclic GFR-binding peptide
  MOD_RES (32), (34): Xaa is C or S
VPTELRSVKMAKVDEYDKVVKEVQVEMVVEGXGXR

SEQ ID NO: 30377 - protein, 35 aa, Artificial Sequence
  Non-cyclic GFR-binding peptide
  MOD_RES (1), (1): Xaa is C or S
  MOD_RES (17), (18), (19), (20), (21): Xaa is A or G
  MOD_RES (22), (23), (24), (25): Xaa is A or G or is absent
XRPTQVQLEPLPVVYYXXXXXXXXXEQLSNTLEDH

SEQ ID NO: 30378 - protein, 38 aa, Artificial Sequence
  Non-cyclic GFR-binding peptide
  MOD_RES (6), (7): Xaa is C or S
YVPKPXXAPTKLSNITVQIMDDSSNVIIGEMSNMVVRS

SEQ ID NO: 30379 - protein, 38 aa, Artificial Sequence
  Non-cyclic GFR-binding peptide
  MOD_RES (4), (36), (38): Xaa is C or S
KPTXAPTKLRPVQVRKIDDSSNVIKKATVNMVVRSXGX

SEQ ID NO: 30380 - protein, 33 aa, Artificial Sequence
  Non-cyclic GFR-binding peptide
  MOD_RES (32), (32): Xaa is C or S
VPTELRSVKMAKVDEYDKVVKEVQVEMVVEGXG

SEQ ID NO: 30381 - protein, 41 aa, Artificial Sequence
  Non-cyclic GFR-binding peptide
  MOD_RES (5), (5): Xaa is C or S
  MOD_RES (21), (22), (23), (24), (25): Xaa is A or G
  MOD_RES (26), (27), (28), (29): Xaa is A or G or is absent
SSVKXQPSRVHHEPLPVVYYXXXXXXXXXEQLSNRLEEHLE

SEQ ID NO: 30382 - protein, 38 aa, Artificial Sequence
  Non-cyclic GFR-binding peptide
  MOD_RES (4), (38): Xaa is C or S
  MOD_RES (18), (19), (20), (21), (22): Xaa is A or G
  MOD_RES (23), (24), (25), (26): Xaa is A or G or is absent
KPTXAPTKLRPVQVRKIXXXXXXXXXKKATVNMVVRSX

SEQ ID NO: 30383 - protein, 37 aa, Artificial Sequence
  Non-cyclic GFR-binding peptide
  MOD_RES (1), (2), (34), (36): Xaa is C or S
XXAPTKLSNITVQIMDDSSNVIIGEMSNMVVRSXGXH

SEQ ID NO: 30384 - protein, 35 aa, Artificial Sequence
  Non-cyclic GFR-binding peptide
  MOD_RES (1), (33), (35): Xaa is C or S
XAPTKLRPVQVRKIDDSSNVIKKATVNMVVRSXGX

SEQ ID NO: 30385 - protein, 44 aa, Artificial Sequence
  Non-cyclic GFR-binding peptide
  MOD_RES (6), (7), (41), (43): Xaa is C or S
  MOD_RES (21), (22), (23), (24), (25): Xaa is A or G
  MOD_RES (26), (27), (28), (29): Xaa is A or G or is absent
YVPKPXXAPTKLSNITVQIMXXXXXXXXXIGEMSNMVVRSXGXH

SEQ ID NO: 30386 - protein, 42 aa, Artificial Sequence
  Non-cyclic GFR-binding peptide
  MOD_RES (4), (5), (39), (41): Xaa is C or S
  MOD_RES (19), (20), (21), (22), (23): Xaa is A or G
  MOD_RES (24), (25), (26), (27): Xaa is A or G or is absent
PKAXXVPTELRSVKMAKVXXXXXXXXXKEVQVEMVVEGXGXR

SEQ ID NO: 30387 - protein, 37 aa, Artificial Sequence
  Non-cyclic GFR-binding peptide
  MOD_RES (4), (5), (36): Xaa is C or S
ASPXXVSQDLRSVKIAKVIGKTPKIKEVQVMIVKSXK

SEQ ID NO: 30388 - protein, 36 aa, Artificial Sequence
  Non-cyclic GFR-binding peptide
  MOD_RES (1), (2), (35): Xaa is C or S
  MOD_RES (16), (17), (18), (19), (20): Xaa is A or G
  MOD_RES (21), (22), (23), (24): Xaa is A or G or is absent
XXVPQDLSNITIQIMXXXXXXXXXIGEMSMVVKSXK

SEQ ID NO: 30389 - protein, 36 aa, Artificial Sequence
  Non-cyclic GFR-binding peptide
  MOD_RES (33), (35): Xaa is C or S
  MOD_RES (14), (15), (16), (17), (18): Xaa is A or G
  MOD_RES (19), (20), (21), (22): Xaa is A or G or is absent
VPQDLRSVKIAKVXXXXXXXXXKEVQVMVVKSXKXS

SEQ ID NO: 30390 - protein, 38 aa, Artificial Sequence
  Non-cyclic GFR-binding peptide
  MOD_RES (7), (7): Xaa is C or S
HVTKPTXAPTKLSNITVQIMDDSSNVIIGEMSNMVVRS

SEQ ID NO: 30391 - protein, 42 aa, Artificial Sequence
  Non-cyclic GFR-binding peptide
  MOD_RES (2), (39), (41): Xaa is C or S
QXRPTQVQLEPLTVLYYEIVRKKPIFEQLSNTLEDHLAXKXE

SEQ ID NO: 30392 - protein, 39 aa, Artificial Sequence
  Non-cyclic GFR-binding peptide
  MOD_RES (5), (6), (39): Xaa is C or S
  MOD_RES (20), (21), (22), (23), (24): Xaa is A or G
  MOD_RES (25), (26), (27), (28): Xaa is A or G or is absent
SASPXXVPQDLSNITIQIMXXXXXXXXXIGEMSMVVKSX

SEQ ID NO: 30393 - protein, 35 aa, Artificial Sequence
  Non-cyclic GFR-binding peptide
  MOD_RES (2), (3), (34): Xaa is C or S
PXXVPQALSNITIQIMVGRKPKVIGEMSMIVRSXK

SEQ ID NO: 30394 - protein, 40 aa, Artificial Sequence
  Non-cyclic GFR-binding peptide
  MOD_RES (5), (6), (39): Xaa is C or S
  MOD_RES (20), (21), (22), (23), (24): Xaa is A or G
  MOD_RES (25), (26), (27), (28): Xaa is A or G or is absent
SASPXXVSQDLRSVKIAKVXXXXXXXXXKEVQVMIVKSXK

SEQ ID NO: 30395 - protein, 42 aa, Artificial Sequence
  Non-cyclic GFR-binding peptide
  MOD_RES (6), (40), (42): Xaa is C or S
DEGLEXVPTEEEPLPMVYYRIKPHQGQHEQLSNFLQHNKXEX

SEQ ID NO: 30396 - protein, 45 aa, Artificial Sequence
  Non-cyclic GFR-binding peptide
  MOD_RES (5), (42), (44): Xaa is C or S
RNVQXRPTQVQLEPLTVLYYEIVRKKPIFEQLSNTLEDHLAXKXE

SEQ ID NO: 30397 - protein, 31 aa, Artificial Sequence
  Non-cyclic GFR-binding peptide
  MOD_RES (1), (1): Xaa is C or S
XAPTQLRPVQVRKIDDSSNVIKKATVNMVVR

SEQ ID NO: 30398 - protein, 32 aa, Artificial Sequence
  Non-cyclic GFR-binding peptide
  MOD_RES (1), (2): Xaa is C or S
XXVPQALSNITIQIMVGRKPKVIGEMSMIVRS

SEQ ID NO: 30399 - protein, 40 aa, Artificial Sequence
  Non-cyclic GFR-binding peptide
  MOD_RES (3), (40): Xaa is C or S
  MOD_RES (19), (20), (21), (22), (23): Xaa is A or G
  MOD_RES (24), (25), (26), (27): Xaa is A or G or is absent
VKXQPSRVHHEPLTVLYYXXXXXXXXXEQLSNRLEEHLEX

SEQ ID NO: 30400 - protein, 35 aa, Artificial Sequence
  Non-cyclic GFR-binding peptide
  MOD_RES (32), (34): Xaa is C or S
APTQLRPVQVRKIDDSSNVIKKATVNMVVRAXGXH

SEQ ID NO: 30401 - protein, 38 aa, Artificial Sequence
  Non-cyclic GFR-binding peptide
  MOD_RES (4), (5): Xaa is C or S
  MOD_RES (19), (20), (21), (22), (23): Xaa is A or G
  MOD_RES (24), (25), (26), (27): Xaa is A or G or is absent
PKPXXAPTQLRPVQVRKIXXXXXXXXXKKATVNMVVRA

SEQ ID NO: 30402 - protein, 35 aa, Artificial Sequence
  Non-cyclic GFR-binding peptide
  MOD_RES (4), (5): Xaa is C or S
ASPXXVPQDLRSVKIAKVVGRTPKVKEVQVMVVKS

SEQ ID NO: 30403 - protein, 35 aa, Artificial Sequence
  Non-cyclic GFR-binding peptide
PSRVHHEPLPVVYYEYVRKKPKLEQLSNRLEEHLE

SEQ ID NO: 30404 - protein, 33 aa, Artificial Sequence
  Non-cyclic GFR-binding peptide
  MOD_RES (14), (15), (16), (17), (18): Xaa is A or G
  MOD_RES (19), (20), (21), (22): Xaa is A or G or is absent
VPTELRSVKMAKVXXXXXXXXXKEVQVDMVVEG

SEQ ID NO: 30405 - protein, 38 aa, Artificial Sequence
  Non-cyclic GFR-binding peptide
  MOD_RES (4), (5): Xaa is C or S
  MOD_RES (19), (20), (21), (22), (23): Xaa is A or G
  MOD_RES (24), (25), (26), (27): Xaa is A or G or is absent
PKAXXVPTELSNITMQIMXXXXXXXXXIGEMSDMVVEG

SEQ ID NO: 30406 - protein, 38 aa, Artificial Sequence
  Non-cyclic GFR-binding peptide
  MOD_RES (5), (6): Xaa is C or S
  MOD_RES (20), (21), (22), (23), (24): Xaa is A or G
  MOD_RES (25), (26), (27), (28): Xaa is A or G or is absent
SASPXXVPQDLRSVKIAKVXXXXXXXXXKEVQVMVVKS

SEQ ID NO: 30407 - protein, 44 aa, Artificial Sequence
  Non-cyclic GFR-binding peptide
  MOD_RES (6), (7), (41), (43): Xaa is C or S
  MOD_RES (21), (22), (23), (24), (25): Xaa is A or G
  MOD_RES (26), (27), (28), (29): Xaa is A or G or is absent
TVPKPXXAPTQLRSVKVAKVXXXXXXXXXKEVQVNMVVRAXGXH

SEQ ID NO: 30408 - protein, 41 aa, Artificial Sequence
  Non-cyclic GFR-binding peptide
  MOD_RES (6), (7), (38), (40): Xaa is C or S
ASASPXXVPQDLRPVQIRKIVGRTPKVKKATVMVVKSXKXS

SEQ ID NO: 30409 - protein, 38 aa, Artificial Sequence
  Non-cyclic GFR-binding peptide
  MOD_RES (6), (7): Xaa is C or S
SIPKAXXVPTELSNITMQIMDEYDKVVIGEMSEMVVEG

SEQ ID NO: 30410 - protein, 40 aa, Artificial Sequence
  Non-cyclic GFR-binding peptide
  MOD_RES (5), (6), (40): Xaa is C or S
  MOD_RES (20), (21), (22), (23), (24): Xaa is A or G
  MOD_RES (25), (26), (27), (28): Xaa is A or G or is absent
VPKPXXAPTQLRPVQVRKIXXXXXXXXXKKATVNMVVRAX

SEQ ID NO: 30411 - protein, 35 aa, Artificial Sequence
  Non-cyclic GFR-binding peptide
  MOD_RES (2), (3), (35): Xaa is C or S
AXXVPTELRSVKMAKVDEYDKVVKEVQVEMVVEGX

SEQ ID NO: 30412 - protein, 41 aa, Artificial Sequence
  Non-cyclic GFR-binding peptide
  MOD_RES (7), (39), (41): Xaa is C or S
HVTKPTXAPTKLRSVKVAKVDDSSNVIKEVQVNMVVRSXGX

SEQ ID NO: 30413 - protein, 31 aa, Artificial Sequence
  Non-cyclic GFR-binding peptide
  MOD_RES (1), (1): Xaa is C or S
XVSQDLSNITIQIMIGKTPKIIGEMSMIVKS

SEQ ID NO: 30414 - protein, 34 aa, Artificial Sequence
  Non-cyclic GFR-binding peptide
  MOD_RES (1), (1): Xaa is C or S
  MOD_RES (15), (16), (17), (18), (19): Xaa is A or G
  MOD_RES (20), (21), (22), (23): Xaa is A or G or is absent
XAPTQLRSVKVAKVXXXXXXXXXKEVQVNMVVRA

SEQ ID NO: 30415 - protein, 39 aa, Artificial Sequence
  Non-cyclic GFR-binding peptide
  MOD_RES (6), (7), (38): Xaa is C or S
ASAAPXXVPQALRSVKIAKVVGRKPKVKEVQVMIVRSXK

SEQ ID NO: 30416 - protein, 36 aa, Artificial Sequence
  Non-cyclic GFR-binding peptide
  MOD_RES (1), (2), (33), (35): Xaa is C or S
XXVSQDLRSVKIAKVIGKTPKIKEVQVMIVKSXKXS

SEQ ID NO: 30417 - protein, 40 aa, Artificial Sequence
  Non-cyclic GFR-binding peptide
  MOD_RES (5), (6), (38), (40): Xaa is C or S
VPKPXXAPTKLRSVKVAKVDDSSNVIKEVQVNMVVRSXGX

SEQ ID NO: 30418 - protein, 34 aa, Artificial Sequence
  Non-cyclic GFR-binding peptide
  MOD_RES (1), (33): Xaa is C or S
XAPTKLRSVKVAKVDDSSNVIKEVQVNMVVRSXG

SEQ ID NO: 30419 - protein, 37 aa, Artificial Sequence
  Non-cyclic GFR-binding peptide
  MOD_RES (2), (3), (34), (36): Xaa is C or S
PXXVPQALRSVKIAKVVGRKPKVKEVQVMIVRSXKXS

SEQ ID NO: 30420 - protein, 40 aa, Artificial Sequence
  Non-cyclic GFR-binding peptide
  MOD_RES (4), (5), (38), (40): Xaa is C or S
  MOD_RES (19), (20), (21), (22), (23): Xaa is A or G
  MOD_RES (24), (25), (26), (27): Xaa is A or G or is absent
ASPXXVPQDLRSVKIAKVXXXXXXXXXKEVQVMVVKSXKX

SEQ ID NO: 30421 - protein, 36 aa, Artificial Sequence
  Non-cyclic GFR-binding peptide
  MOD_RES (5), (6): Xaa is C or S
SASPXXVSQDLSNITIQIMIGKTPKIIGEMSMIVKS

SEQ ID NO: 30422 - protein, 37 aa, Artificial Sequence
  Non-cyclic GFR-binding peptide
  MOD_RES (6), (7): Xaa is C or S
SIPKAXXVPTELRSVKMAKVDEYDKVVKEVQVEMVVE

SEQ ID NO: 30423 - protein, 33 aa, Artificial Sequence
  Non-cyclic GFR-binding peptide
  MOD_RES (14), (15), (16), (17), (18): Xaa is A or G
  MOD_RES (19), (20), (21), (22): Xaa is A or G or is absent
APTQLRPVQVRKIXXXXXXXXXKKATVNMVVRA

SEQ ID NO: 30424 - protein, 35 aa, Artificial Sequence
  Non-cyclic GFR-binding peptide
  MOD_RES (2), (3): Xaa is C or S
  MOD_RES (17), (18), (19), (20), (21): Xaa is A or G
  MOD_RES (22), (23), (24), (25): Xaa is A or G or is absent
PXXVSQDLRSVKIAKVXXXXXXXXXKEVQVMIVKS

SEQ ID NO: 30425 - protein, 35 aa, Artificial Sequence
  Non-cyclic GFR-binding peptide
  MOD_RES (1), (33), (35): Xaa is C or S
XVPTELRSVKMAKVDEYDKVVKEVQVEMVVEGXGX

SEQ ID NO: 30426 - protein, 34 aa, Artificial Sequence
  Non-cyclic GFR-binding peptide
  MOD_RES (2), (3): Xaa is C or S
AXXVPTELSNITMQIMDENEKVVIGEMSDMVVEG

SEQ ID NO: 30427 - protein, 38 aa, Artificial Sequence
  Non-cyclic GFR-binding peptide
  MOD_RES (5), (6), (38): Xaa is C or S
IPKAXXVPTELSNITMQIMDENEKVVIGEMSDMVVEGX

SEQ ID NO: 30428 - protein, 37 aa, Artificial Sequence
  Non-cyclic GFR-binding peptide
  MOD_RES (35), (37): Xaa is C or S
TQVQLEPLPVVYYEIVRKKPIFEQLSNTLEDHLAXKX

SEQ ID NO: 30429 - protein, 36 aa, Artificial Sequence
  Non-cyclic GFR-binding peptide
  MOD_RES (1), (35): Xaa is C or S
XVPTEEEPLTMLYYRIKPHQGQHEQLSNFLQHNKXE

SEQ ID NO: 30430 - protein, 32 aa, Artificial Sequence
  Non-cyclic GFR-binding peptide
  MOD_RES (1), (1): Xaa is C or S
XVPTELRSVKMAKVDEYDKVVKEVQVEMVVEG

SEQ ID NO: 30431 - protein, 39 aa, Artificial Sequence
  Non-cyclic GFR-binding peptide
  MOD_RES (4), (5), (39): Xaa is C or S
  MOD_RES (19), (20), (21), (22), (23): Xaa is A or G
  MOD_RES (24), (25), (26), (27): Xaa is A or G or is absent
PKAXXVPTELRSVKMAKVXXXXXXXXXKEVQVDMVVEGX

SEQ ID NO: 30432 - protein, 36 aa, Artificial Sequence
  Non-cyclic GFR-binding peptide
  MOD_RES (2), (3), (34), (36): Xaa is C or S
PXXVPQDLRSVKIAKVVGRTPKVKEVQVMVVKSXKX

SEQ ID NO: 30433 - protein, 34 aa, Artificial Sequence
  Non-cyclic GFR-binding peptide
  MOD_RES (32), (34): Xaa is C or S
VPTELRPVQMRKIDEYDKVVKKATVEMVVEGXGX

SEQ ID NO: 30434 - protein, 38 aa, Artificial Sequence
  Non-cyclic GFR-binding peptide
  MOD_RES (2), (3), (37): Xaa is C or S
  MOD_RES (17), (18), (19), (20), (21): Xaa is A or G
  MOD_RES (22), (23), (24), (25): Xaa is A or G or is absent
PXXAPTKLSNITVQIMXXXXXXXXXIGEMSNMVVRSXG

SEQ ID NO: 30435 - protein, 33 aa, Artificial Sequence
  Non-cyclic GFR-binding peptide
  MOD_RES (1), (33): Xaa is C or S
XAPTKLRSVKVAKVDDSSNVIKEVQVNMVVRSX

SEQ ID NO: 30436 - protein, 35 aa, Artificial Sequence
  Non-cyclic GFR-binding peptide
  MOD_RES (33), (35): Xaa is C or S
  MOD_RES (14), (15), (16), (17), (18): Xaa is A or G
  MOD_RES (19), (20), (21), (22): Xaa is A or G or is absent
VPQDLRSVKIAKVXXXXXXXXXKEVQVMVVKSXKX

SEQ ID NO: 30437 - protein, 34 aa, Artificial Sequence
  Non-cyclic GFR-binding peptide
  MOD_RES (1), (33): Xaa is C or S
XAPTQLRPVQVRKIDDSSNVIKKATVNMVVRAXG

SEQ ID NO: 30438 - protein, 35 aa, Artificial Sequence
  Non-cyclic GFR-binding peptide
  MOD_RES (2), (3), (35): Xaa is C or S
AXXVPTELRSVKMAKVDENEKVVKEVQVDMVVEGX

SEQ ID NO: 30439 - protein, 35 aa, Artificial Sequence
  Non-cyclic GFR-binding peptide
  MOD_RES (3), (4), (35): Xaa is C or S
SPXXVPQDLRPVQIRKIVGRTPKVKKATVMVVKSX

SEQ ID NO: 30440 - protein, 37 aa, Artificial Sequence
  Non-cyclic GFR-binding peptide
  MOD_RES (2), (36): Xaa is C or S
  MOD_RES (16), (17), (18), (19), (20): Xaa is A or G
  MOD_RES (21), (22), (23), (24): Xaa is A or G or is absent
TXAPTKLRSVKVAKVXXXXXXXXXKEVQVNMVVRSXG

SEQ ID NO: 30441 - protein, 40 aa, Artificial Sequence
  Non-cyclic GFR-binding peptide
  MOD_RES (4), (5), (37), (39): Xaa is C or S
PKPXXAPTKLRPVQVRKIDDSSNVIKKATVNMVVRSXGXH

SEQ ID NO: 30442 - protein, 39 aa, Artificial Sequence
  Non-cyclic GFR-binding peptide
  MOD_RES (2), (3), (36), (38): Xaa is C or S
  MOD_RES (17), (18), (19), (20), (21): Xaa is A or G
  MOD_RES (22), (23), (24), (25): Xaa is A or G or is absent
PXXVSQDLRPVQIRKIXXXXXXXXXKKATVMIVKSXKXS

SEQ ID NO: 30443 - protein, 36 aa, Artificial Sequence
  Non-cyclic GFR-binding peptide
  MOD_RES (36), (36): Xaa is C or S
PSRVHHEPLTVLYYEYVRKKPKLEQLSNRLEEHLEX

SEQ ID NO: 30444 - protein, 39 aa, Artificial Sequence
  Non-cyclic GFR-binding peptide
  MOD_RES (5), (6), (39): Xaa is C or S
  MOD_RES (20), (21), (22), (23), (24): Xaa is A or G
  MOD_RES (25), (26), (27), (28): Xaa is A or G or is absent
SAAPXXVPQALSNITIQIMXXXXXXXXXIGEMSMIVRSX

SEQ ID NO: 30445 - protein, 36 aa, Artificial Sequence
  Non-cyclic GFR-binding peptide
  MOD_RES (5), (6): Xaa is C or S
IPKAXXVPTELRSVKMAKVDENEKVVKEVQVDMVVE

SEQ ID NO: 30446 - protein, 42 aa, Artificial Sequence
  Non-cyclic GFR-binding peptide
  MOD_RES (7), (41): Xaa is C or S
NDEGLEXVPTEEEPLPMVYYRIKPHQGQHEQLSNFLQHNKXE

SEQ ID NO: 30447 - protein, 39 aa, Artificial Sequence
  Non-cyclic GFR-binding peptide
  MOD_RES (2), (39): Xaa is C or S
KXQPSRVHHEPLTVLYYEYVRKKPKLEQLSNRLEEHLEX

SEQ ID NO: 30448 - protein, 38 aa, Artificial Sequence
  Non-cyclic GFR-binding peptide
  MOD_RES (2), (3), (36), (38): Xaa is C or S
  MOD_RES (17), (18), (19), (20), (21): Xaa is A or G
  MOD_RES (22), (23), (24), (25): Xaa is A or G or is absent
PXXVPQALRPVQIRKIXXXXXXXXXKKATVMIVRSXKX

SEQ ID NO: 30449 - protein, 35 aa, Artificial Sequence
  Non-cyclic GFR-binding peptide
  MOD_RES (1), (34): Xaa is C or S
  MOD_RES (15), (16), (17), (18), (19): Xaa is A or G
  MOD_RES (20), (21), (22), (23): Xaa is A or G or is absent
XVSQDLSNITIQIMXXXXXXXXXIGEMSMIVKSXK

SEQ ID NO: 30450 - protein, 39 aa, Artificial Sequence
  Non-cyclic GFR-binding peptide
  MOD_RES (6), (7): Xaa is C or S
  MOD_RES (21), (22), (23), (24), (25): Xaa is A or G
  MOD_RES (26), (27), (28), (29): Xaa is A or G or is absent
ASASPXXVPQDLRSVKIAKVXXXXXXXXXKEVQVMVVKS

SEQ ID NO: 30451 - protein, 36 aa, Artificial Sequence
  Non-cyclic GFR-binding peptide
  MOD_RES (3), (4), (35): Xaa is C or S
APXXVPQALRSVKIAKVVGRKPKVKEVQVMIVRSXK

SEQ ID NO: 30452 - protein, 42 aa, Artificial Sequence
  Non-cyclic GFR-binding peptide
  MOD_RES (5), (6), (39), (41): Xaa is C or S
  MOD_RES (20), (21), (22), (23), (24): Xaa is A or G
  MOD_RES (25), (26), (27), (28): Xaa is A or G or is absent
SASPXXVSQDLRPVQIRKIXXXXXXXXXKKATVMIVKSXKXS

SEQ ID NO: 30453 - protein, 39 aa, Artificial Sequence
  Non-cyclic GFR-binding peptide
  MOD_RES (6), (7): Xaa is C or S
  MOD_RES (21), (22), (23), (24), (25): Xaa is A or G
  MOD_RES (26), (27), (28), (29): Xaa is A or G or is absent
SIPKAXXVPTELRPVQMRKIXXXXXXXXXKKATVEMVVE

SEQ ID NO: 30454 - protein, 34 aa, Artificial Sequence
  Non-cyclic GFR-binding peptide
  MOD_RES (2), (3): Xaa is C or S
PXXAPTQLSNITVQIMDDSSNVIIGEMSNMVVRA

SEQ ID NO: 30455 - protein, 37 aa, Artificial Sequence
  Non-cyclic GFR-binding peptide
  MOD_RES (37), (37): Xaa is C or S
  MOD_RES (16), (17), (18), (19), (20): Xaa is A or G
  MOD_RES (21), (22), (23), (24): Xaa is A or G or is absent
RPTQVQLEPLPVVYYXXXXXXXXXEQLSNTLEDHLAX

SEQ ID NO: 30456 - protein, 41 aa, Artificial Sequence
  Non-cyclic GFR-binding peptide
  MOD_RES (3), (40): Xaa is C or S
  MOD_RES (19), (20), (21), (22), (23): Xaa is A or G
  MOD_RES (24), (25), (26), (27): Xaa is A or G or is absent
VQXRPTQVQLEPLTVLYYXXXXXXXXXEQLSNTLEDHLAXK

SEQ ID NO: 30457 - protein, 41 aa, Artificial Sequence
  Non-cyclic GFR-binding peptide
  MOD_RES (4), (5), (38), (40): Xaa is C or S
  MOD_RES (19), (20), (21), (22), (23): Xaa is A or G
  MOD_RES (24), (25), (26), (27): Xaa is A or G or is absent
ASPXXVSQDLRSVKIAKVXXXXXXXXXKEVQVMIVKSXKXS

SEQ ID NO: 30458 - protein, 37 aa, Artificial Sequence
  Non-cyclic GFR-binding peptide
  MOD_RES (2), (3), (37): Xaa is C or S
  MOD_RES (17), (18), (19), (20), (21): Xaa is A or G
  MOD_RES (22), (23), (24), (25): Xaa is A or G or is absent
AXXVPTELSNITMQIMXXXXXXXXXIGEMSDMVVEGX

SEQ ID NO: 30459 - protein, 43 aa, Artificial Sequence
  Non-cyclic GFR-binding peptide
  MOD_RES (6), (40), (42): Xaa is C or S
  MOD_RES (20), (21), (22), (23), (24): Xaa is A or G
  MOD_RES (25), (26), (27), (28): Xaa is A or G or is absent
DEGLEXVPTEEEPLPMVYYXXXXXXXXXEQLSNFLQHNKXEXR

SEQ ID NO: 30460 - protein, 36 aa, Artificial Sequence
  Non-cyclic GFR-binding peptide
  MOD_RES (3), (4), (36): Xaa is C or S
KPXXAPTKLSNITVQIMDDSSNVIIGEMSNMVVRSX

SEQ ID NO: 30461 - protein, 36 aa, Artificial Sequence
  Non-cyclic GFR-binding peptide
  MOD_RES (4), (5), (36): Xaa is C or S
ASPXXVPQDLRPVQIRKIVGRTPKVKKATVMVVKSX

SEQ ID NO: 30462 - protein, 41 aa, Artificial Sequence
  Non-cyclic GFR-binding peptide
  MOD_RES (6), (7), (40): Xaa is C or S
  MOD_RES (21), (22), (23), (24), (25): Xaa is A or G
  MOD_RES (26), (27), (28), (29): Xaa is A or G or is absent
ASAAPXXVPQALRSVKIAKVXXXXXXXXXKEVQVMIVRSXK

SEQ ID NO: 30463 - protein, 38 aa, Artificial Sequence
  Non-cyclic GFR-binding peptide
  MOD_RES (2), (3), (35), (37): Xaa is C or S
AXXVPTELRPVQMRKIDENEKVVKKATVDMVVEGXGXR

SEQ ID NO: 30464 - protein, 40 aa, Artificial Sequence
  Non-cyclic GFR-binding peptide
  MOD_RES (2), (3), (37), (39): Xaa is C or S
  MOD_RES (17), (18), (19), (20), (21): Xaa is A or G
  MOD_RES (22), (23), (24), (25): Xaa is A or G or is absent
AXXVPTELRSVKMAKVXXXXXXXXXKEVQVEMVVEGXGXR

SEQ ID NO: 30465 - protein, 36 aa, Artificial Sequence
  Non-cyclic GFR-binding peptide
  MOD_RES (1), (2), (36): Xaa is C or S
  MOD_RES (16), (17), (18), (19), (20): Xaa is A or G
  MOD_RES (21), (22), (23), (24): Xaa is A or G or is absent
XXAPTKLSNITVQIMXXXXXXXXXIGEMSNMVVRSX

SEQ ID NO: 30466 - protein, 44 aa, Artificial Sequence
  Non-cyclic GFR-binding peptide
  MOD_RES (6), (7), (41), (43): Xaa is C or S
  MOD_RES (21), (22), (23), (24), (25): Xaa is A or G
  MOD_RES (26), (27), (28), (29): Xaa is A or G or is absent
SIPKAXXVPTELSNITMQIMXXXXXXXXXIGEMSEMVVEGXGXR

SEQ ID NO: 30467 - protein, 39 aa, Artificial Sequence
  Non-cyclic GFR-binding peptide
  MOD_RES (6), (7), (38): Xaa is C or S
ASASPXXVPQDLRPVQIRKIVGRTPKVKKATVMVVKSXK

SEQ ID NO: 30468 - protein, 39 aa, Artificial Sequence
  Non-cyclic GFR-binding peptide
  MOD_RES (6), (7): Xaa is C or S
  MOD_RES (21), (22), (23), (24), (25): Xaa is A or G
  MOD_RES (26), (27), (28), (29): Xaa is A or G or is absent
SIPKAXXVPTELRSVKMAKVXXXXXXXXXKEVQVEMVVE

SEQ ID NO: 30469 - protein, 39 aa, Artificial Sequence
  Non-cyclic GFR-binding peptide
  MOD_RES (2), (3), (37), (39): Xaa is C or S
  MOD_RES (17), (18), (19), (20), (21): Xaa is A or G
  MOD_RES (22), (23), (24), (25): Xaa is A or G or is absent
AXXVPTELSNITMQIMXXXXXXXXXIGEMSDMVVEGXGX

SEQ ID NO: 30470 - protein, 36 aa, Artificial Sequence
  Non-cyclic GFR-binding peptide
  MOD_RES (2), (2): Xaa is C or S
  MOD_RES (18), (19), (20), (21), (22): Xaa is A or G
  MOD_RES (23), (24), (25), (26): Xaa is A or G or is absent
KXQPSRVHHEPLPVVYYXXXXXXXXXEQLSNRLEEH

SEQ ID NO: 30471 - protein, 36 aa, Artificial Sequence
  Non-cyclic GFR-binding peptide
  MOD_RES (1), (33), (35): Xaa is C or S
XAPTQLRPVQVRKIDDSSNVIKKATVNMVVRAXGXH

SEQ ID NO: 30472 - protein, 38 aa, Artificial Sequence
  Non-cyclic GFR-binding peptide
  MOD_RES (1), (2), (36), (38): Xaa is C or S
  MOD_RES (16), (17), (18), (19), (20): Xaa is A or G
  MOD_RES (21), (22), (23), (24): Xaa is A or G or is absent
XXVPTELRSVKMAKVXXXXXXXXXKEVQVEMVVEGXGX

SEQ ID NO: 30473 - protein, 30 aa, Artificial Sequence
  Non-cyclic GFR-binding peptide
APTQLSNITVQIMDDSSNVIIGEMSNMVVR

SEQ ID NO: 30474 - protein, 38 aa, Artificial Sequence
  Non-cyclic GFR-binding peptide
  MOD_RES (1), (2), (35), (37): Xaa is C or S
  MOD_RES (16), (17), (18), (19), (20): Xaa is A or G
  MOD_RES (21), (22), (23), (24): Xaa is A or G or is absent
XXVSQDLSNITIQIMXXXXXXXXXIGEMSMIVKSXKXS

SEQ ID NO: 30475 - protein, 42 aa, Artificial Sequence
  Non-cyclic GFR-binding peptide
  MOD_RES (3), (40), (42): Xaa is C or S
VQXRPTQVQLEPLTVLYYEIVRKKPIFEQLSNTLEDHLAXKX

SEQ ID NO: 30476 - protein, 38 aa, Artificial Sequence
  Non-cyclic GFR-binding peptide
  MOD_RES (5), (6): Xaa is C or S
  MOD_RES (20), (21), (22), (23), (24): Xaa is A or G
  MOD_RES (25), (26), (27), (28): Xaa is A or G or is absent
SASPXXVPQDLRPVQIRKIXXXXXXXXXKKATVMVVKS

SEQ ID NO: 30477 - protein, 39 aa, Artificial Sequence
  Non-cyclic GFR-binding peptide
  MOD_RES (6), (7), (39): Xaa is C or S
YVPKPXXAPTKLRPVQVRKIDDSSNVIKKATVNMVVRSX

SEQ ID NO: 30478 - protein, 38 aa, Artificial Sequence
  Non-cyclic GFR-binding peptide
  MOD_RES (1), (35), (37): Xaa is C or S
  MOD_RES (15), (16), (17), (18), (19): Xaa is A or G
  MOD_RES (20), (21), (22), (23): Xaa is A or G or is absent
XVPTELRPVQMRKIXXXXXXXXXKKATVDMVVEGXGXR

SEQ ID NO: 30479 - protein, 43 aa, Artificial Sequence
  Non-cyclic GFR-binding peptide
  MOD_RES (6), (7), (41), (43): Xaa is C or S
  MOD_RES (21), (22), (23), (24), (25): Xaa is A or G
  MOD_RES (26), (27), (28), (29): Xaa is A or G or is absent
YVPKPXXAPTKLSNITVQIMXXXXXXXXXIGEMSNMVVRSXGX

SEQ ID NO: 30480 - protein, 35 aa, Artificial Sequence
  Non-cyclic GFR-binding peptide
  MOD_RES (32), (34): Xaa is C or S
VPTELSNITMQIMDEYDKVVIGEMSEMVVEGXGXR

SEQ ID NO: 30481 - protein, 38 aa, Artificial Sequence
  Non-cyclic GFR-binding peptide
  MOD_RES (6), (7), (38): Xaa is C or S
ASAAPXXVPQALRPVQIRKIVGRKPKVKKATVMIVRSX

SEQ ID NO: 30482 - protein, 35 aa, Artificial Sequence
  Non-cyclic GFR-binding peptide
  MOD_RES (1), (2), (33), (35): Xaa is C or S
XXVPQDLRSVKIAKVVGRTPKVKEVQVMVVKSXKX

SEQ ID NO: 30483 - protein, 36 aa, Artificial Sequence
  Non-cyclic GFR-binding peptide
  MOD_RES (36), (36): Xaa is C or S
PSRVHHEPLPVVYYEYVRKKPKLEQLSNRLEEHLEX

SEQ ID NO: 30484 - protein, 41 aa, Artificial Sequence
  Non-cyclic GFR-binding peptide
  MOD_RES (6), (40): Xaa is C or S
DEGLEXVPTEEEPLTMLYYRIKPHQGQHEQLSNFLQHNKXE

SEQ ID NO: 30485 - protein, 43 aa, Artificial Sequence
  Non-cyclic GFR-binding peptide
  MOD_RES (5), (42): Xaa is C or S
  MOD_RES (21), (22), (23), (24), (25): Xaa is A or G
  MOD_RES (26), (27), (28), (29): Xaa is A or G or is absent
RNVQXRPTQVQLEPLPVVYYXXXXXXXXXEQLSNTLEDHLAXK

SEQ ID NO: 30486 - protein, 39 aa, Artificial Sequence
  Non-cyclic GFR-binding peptide
  MOD_RES (4), (38): Xaa is C or S
GLEXVPTEEEPLTMLYYRIKPHQGQHEQLSNFLQHNKXE

SEQ ID NO: 30487 - protein, 38 aa, Artificial Sequence
  Non-cyclic GFR-binding peptide
  MOD_RES (2), (2): Xaa is C or S
QXRPTQVQLEPLPVVYYEIVRKKPIFEQLSNTLEDHLA

SEQ ID NO: 30488 - protein, 35 aa, Artificial Sequence
  Non-cyclic GFR-binding peptide
  MOD_RES (2), (3): Xaa is C or S
  MOD_RES (17), (18), (19), (20), (21): Xaa is A or G
  MOD_RES (22), (23), (24), (25): Xaa is A or G or is absent
PXXVPQALSNITIQIMXXXXXXXXXIGEMSMIVRS

SEQ ID NO: 30489 - protein, 41 aa, Artificial Sequence
  Non-cyclic GFR-binding peptide
  MOD_RES (1), (38), (40): Xaa is C or S
  MOD_RES (17), (18), (19), (20), (21): Xaa is A or G
  MOD_RES (22), (23), (24), (25): Xaa is A or G or is absent
XQPSRVHHEPLPVVYYXXXXXXXXXEQLSNRLEEHLEXAXA

SEQ ID NO: 30490 - protein, 41 aa, Artificial Sequence
  Non-cyclic GFR-binding peptide
  MOD_RES (6), (7), (40): Xaa is C or S
  MOD_RES (21), (22), (23), (24), (25): Xaa is A or G
  MOD_RES (26), (27), (28), (29): Xaa is A or G or is absent
ASASPXXVSQDLRSVKIAKVXXXXXXXXXKEVQVMIVKSXK

SEQ ID NO: 30491 - protein, 35 aa, Artificial Sequence
  Non-cyclic GFR-binding peptide
  MOD_RES (15), (16), (17), (18), (19): Xaa is A or G
  MOD_RES (20), (21), (22), (23): Xaa is A or G or is absent
PTQVQLEPLTVLYYXXXXXXXXXEQLSNTLEDHLA

SEQ ID NO: 30492 - protein, 44 aa, Artificial Sequence
  Non-cyclic GFR-binding peptide
  MOD_RES (5), (42), (44): Xaa is C or S
RNVQXRPTQVQLEPLPVVYYEIVRKKPIFEQLSNTLEDHLAXKX

SEQ ID NO: 30493 - protein, 40 aa, Artificial Sequence
  Non-cyclic GFR-binding peptide
  MOD_RES (5), (6), (39): Xaa is C or S
  MOD_RES (20), (21), (22), (23), (24): Xaa is A or G
  MOD_RES (25), (26), (27), (28): Xaa is A or G or is absent
SAAPXXVPQALRSVKIAKVXXXXXXXXXKEVQVMIVRSXK

SEQ ID NO: 30494 - protein, 38 aa, Artificial Sequence
  Non-cyclic GFR-binding peptide
  MOD_RES (5), (6), (38): Xaa is C or S
IPKAXXVPTELRSVKMAKVDENEKVVKEVQVDMVVEGX

SEQ ID NO: 30495 - protein, 39 aa, Artificial Sequence
  Non-cyclic GFR-binding peptide
  MOD_RES (3), (4), (37), (39): Xaa is C or S
  MOD_RES (18), (19), (20), (21), (22): Xaa is A or G
  MOD_RES (23), (24), (25), (26): Xaa is A or G or is absent
SPXXVPQDLRSVKIAKVXXXXXXXXXKEVQVMVVKSXKX

SEQ ID NO: 30496 - protein, 37 aa, Artificial Sequence
  Non-cyclic GFR-binding peptide
  MOD_RES (2), (2): Xaa is C or S
  MOD_RES (18), (19), (20), (21), (22): Xaa is A or G
  MOD_RES (23), (24), (25), (26): Xaa is A or G or is absent
KXQPSRVHHEPLPVVYYXXXXXXXXXEQLSNRLEEHL

SEQ ID NO: 30497 - protein, 38 aa, Artificial Sequence
  Non-cyclic GFR-binding peptide
  MOD_RES (1), (38): Xaa is C or S
  MOD_RES (17), (18), (19), (20), (21): Xaa is A or G
  MOD_RES (22), (23), (24), (25): Xaa is A or G or is absent
XQPSRVHHEPLTVLYYXXXXXXXXXEQLSNRLEEHLEX

SEQ ID NO: 30498 - protein, 43 aa, Artificial Sequence
  Non-cyclic GFR-binding peptide
  MOD_RES (3), (40), (42): Xaa is C or S
  MOD_RES (19), (20), (21), (22), (23): Xaa is A or G
  MOD_RES (24), (25), (26), (27): Xaa is A or G or is absent
VQXRPTQVQLEPLPVVYYXXXXXXXXXEQLSNTLEDHLAXKXE

SEQ ID NO: 30499 - protein, 36 aa, Artificial Sequence
  Non-cyclic GFR-binding peptide
  MOD_RES (35), (35): Xaa is C or S
  MOD_RES (14), (15), (16), (17), (18): Xaa is A or G
  MOD_RES (19), (20), (21), (22): Xaa is A or G or is absent
SRVHHEPLPVVYYXXXXXXXXXEQLSNRLEEHLEXA

SEQ ID NO: 30500 - protein, 39 aa, Artificial Sequence
  Non-cyclic GFR-binding peptide
  MOD_RES (2), (3), (36), (38): Xaa is C or S
  MOD_RES (17), (18), (19), (20), (21): Xaa is A or G
  MOD_RES (22), (23), (24), (25): Xaa is A or G or is absent
PXXVSQDLSNITIQIMXXXXXXXXXIGEMSMIVKSXKXS

SEQ ID NO: 30501 - protein, 34 aa, Artificial Sequence
  Non-cyclic GFR-binding peptide
  MOD_RES (3), (4): Xaa is C or S
KPXXAPTKLSNITVQIMDDSSNVIIGEMSNMVVR

SEQ ID NO: 30502 - protein, 33 aa, Artificial Sequence
  Non-cyclic GFR-binding peptide
PSRVHHEPLTVLYYEYVRKKPKLEQLSNRLEEH

SEQ ID NO: 30503 - protein, 37 aa, Artificial Sequence
  Non-cyclic GFR-binding peptide
  MOD_RES (4), (4): Xaa is C or S
  MOD_RES (18), (19), (20), (21), (22): Xaa is A or G
  MOD_RES (23), (24), (25), (26): Xaa is A or G or is absent
GLEXVPTEEEPLTMLYYXXXXXXXXXEQLSNFLQHNK

SEQ ID NO: 30504 - protein, 40 aa, Artificial Sequence
  Non-cyclic GFR-binding peptide
  MOD_RES (6), (7), (40): Xaa is C or S
  MOD_RES (21), (22), (23), (24), (25): Xaa is A or G
  MOD_RES (26), (27), (28), (29): Xaa is A or G or is absent
ASAAPXXVPQALRPVQIRKIXXXXXXXXXKKATVMIVRSX

SEQ ID NO: 30505 - protein, 36 aa, Artificial Sequence
  Non-cyclic GFR-binding peptide
  MOD_RES (2), (3), (34), (36): Xaa is C or S
PXXVPQALRPVQIRKIVGRKPKVKKATVMIVRSXKX

SEQ ID NO: 30506 - protein, 37 aa, Artificial Sequence
  Non-cyclic GFR-binding peptide
  MOD_RES (1), (35), (37): Xaa is C or S
  MOD_RES (15), (16), (17), (18), (19): Xaa is A or G
  MOD_RES (20), (21), (22), (23): Xaa is A or G or is absent
XVPTELRPVQMRKIXXXXXXXXXKKATVEMVVEGXGX

SEQ ID NO: 30507 - protein, 36 aa, Artificial Sequence
  Non-cyclic GFR-binding peptide
  MOD_RES (2), (3), (36): Xaa is C or S
  MOD_RES (17), (18), (19), (20), (21): Xaa is A or G
  MOD_RES (22), (23), (24), (25): Xaa is A or G or is absent
PXXVPQALRSVKIAKVXXXXXXXXXKEVQVMIVRSX

SEQ ID NO: 30508 - protein, 37 aa, Artificial Sequence
  Non-cyclic GFR-binding peptide
  MOD_RES (4), (4): Xaa is C or S
  MOD_RES (18), (19), (20), (21), (22): Xaa is A or G
  MOD_RES (23), (24), (25), (26): Xaa is A or G or is absent
KPTXAPTKLSNITVQIMXXXXXXXXXIGEMSNMVVRS

SEQ ID NO: 30509 - protein, 39 aa, Artificial Sequence
  Non-cyclic GFR-binding peptide
  MOD_RES (1), (2), (36), (38): Xaa is C or S
  MOD_RES (16), (17), (18), (19), (20): Xaa is A or G
  MOD_RES (21), (22), (23), (24): Xaa is A or G or is absent
XXVPTELSNITMQIMXXXXXXXXXIGEMSEMVVEGXGXR

SEQ ID NO: 30510 - protein, 33 aa, Artificial Sequence
  Non-cyclic GFR-binding peptide
  MOD_RES (14), (15), (16), (17), (18): Xaa is A or G
  MOD_RES (19), (20), (21), (22): Xaa is A or G or is absent
SRVHHEPLPVVYYXXXXXXXXXEQLSNRLEEHL

SEQ ID NO: 30511 - protein, 35 aa, Artificial Sequence
  Non-cyclic GFR-binding peptide
  MOD_RES (2), (3): Xaa is C or S
  MOD_RES (17), (18), (19), (20), (21): Xaa is A or G
  MOD_RES (22), (23), (24), (25): Xaa is A or G or is absent
PXXAPTQLRSVKVAKVXXXXXXXXXKEVQVNMVVR

SEQ ID NO: 30512 - protein, 34 aa, Artificial Sequence
  Non-cyclic GFR-binding peptide
  MOD_RES (2), (2): Xaa is C or S
  MOD_RES (16), (17), (18), (19), (20): Xaa is A or G
  MOD_RES (21), (22), (23), (24): Xaa is A or G or is absent
TXAPTKLSNITVQIMXXXXXXXXXIGEMSNMVVR

SEQ ID NO: 30513 - protein, 35 aa, Artificial Sequence
  Non-cyclic GFR-binding peptide
  MOD_RES (1), (1): Xaa is C or S
  MOD_RES (17), (18), (19), (20), (21): Xaa is A or G
  MOD_RES (22), (23), (24), (25): Xaa is A or G or is absent
XRPTQVQLEPLTVLYYXXXXXXXXXEQLSNTLEDH

SEQ ID NO: 30514 - protein, 38 aa, Artificial Sequence
  Non-cyclic GFR-binding peptide
  MOD_RES (1), (2), (36), (38): Xaa is C or S
  MOD_RES (16), (17), (18), (19), (20): Xaa is A or G
  MOD_RES (21), (22), (23), (24): Xaa is A or G or is absent
XXAPTQLRSVKVAKVXXXXXXXXXKEVQVNMVVRAXGX

SEQ ID NO: 30515 - protein, 35 aa, Artificial Sequence
  Non-cyclic GFR-binding peptide
  MOD_RES (1), (2), (35): Xaa is C or S
  MOD_RES (16), (17), (18), (19), (20): Xaa is A or G
  MOD_RES (21), (22), (23), (24): Xaa is A or G or is absent
XXVPQDLRPVQIRKIXXXXXXXXXKKATVMVVKSX

SEQ ID NO: 30516 - protein, 40 aa, Artificial Sequence
  Non-cyclic GFR-binding peptide
  MOD_RES (6), (7), (39): Xaa is C or S
YVPKPXXAPTKLRSVKVAKVDDSSNVIKEVQVNMVVRSXG

SEQ ID NO: 30517 - protein, 40 aa, Artificial Sequence
  Non-cyclic GFR-binding peptide
  MOD_RES (3), (37), (39): Xaa is C or S
  MOD_RES (17), (18), (19), (20), (21): Xaa is A or G
  MOD_RES (22), (23), (24), (25): Xaa is A or G or is absent
PTXAPTKLSNITVQIMXXXXXXXXXIGEMSNMVVRSXGXH

SEQ ID NO: 30518 - protein, 35 aa, Artificial Sequence
  Non-cyclic GFR-binding peptide
  MOD_RES (1), (2), (34): Xaa is C or S
XXVPTELSNITMQIMDENEKVVIGEMSDMVVEGXG

SEQ ID NO: 30519 - protein, 40 aa, Artificial Sequence
  Non-cyclic GFR-binding peptide
  MOD_RES (3), (4), (38), (40): Xaa is C or S
  MOD_RES (18), (19), (20), (21), (22): Xaa is A or G
  MOD_RES (23), (24), (25), (26): Xaa is A or G or is absent
KPXXAPTKLRPVQVRKIXXXXXXXXXKKATVNMVVRSXGX

SEQ ID NO: 30520 - protein, 35 aa, Artificial Sequence
  Non-cyclic GFR-binding peptide
  MOD_RES (34), (34): Xaa is C or S
  MOD_RES (14), (15), (16), (17), (18): Xaa is A or G
  MOD_RES (19), (20), (21), (22): Xaa is A or G or is absent
APTKLRSVKVAKVXXXXXXXXXKEVQVNMVVRSXG

SEQ ID NO: 30521 - protein, 42 aa, Artificial Sequence
  Non-cyclic GFR-binding peptide
  MOD_RES (5), (6), (39), (41): Xaa is C or S
  MOD_RES (20), (21), (22), (23), (24): Xaa is A or G
  MOD_RES (25), (26), (27), (28): Xaa is A or G or is absent
SASPXXVPQDLRPVQIRKIXXXXXXXXXKKATVMVVKSXKXS

SEQ ID NO: 30522 - protein, 37 aa, Artificial Sequence
  Non-cyclic GFR-binding peptide
  MOD_RES (3), (37): Xaa is C or S
LEXVPTEEEPLTMLYYRIKPHQGQHEQLSNFLQHNKX

SEQ ID NO: 30523 - protein, 35 aa, Artificial Sequence
  Non-cyclic GFR-binding peptide
  MOD_RES (2), (3): Xaa is C or S
  MOD_RES (17), (18), (19), (20), (21): Xaa is A or G
  MOD_RES (22), (23), (24), (25): Xaa is A or G or is absent
PXXAPTQLRPVQVRKIXXXXXXXXXKKATVNMVVR

SEQ ID NO: 30524 - protein, 36 aa, Artificial Sequence
  Non-cyclic GFR-binding peptide
  MOD_RES (3), (3): Xaa is C or S
  MOD_RES (17), (18), (19), (20), (21): Xaa is A or G
  MOD_RES (22), (23), (24), (25): Xaa is A or G or is absent
LEXVPTEEEPLPMVYYXXXXXXXXXEQLSNFLQHNK

SEQ ID NO: 30525 - protein, 40 aa, Artificial Sequence
  Non-cyclic GFR-binding peptide
  MOD_RES (6), (7), (38), (40): Xaa is C or S
ASAAPXXVPQALSNITIQIMVGRKPKVIGEMSMIVRSXKX

SEQ ID NO: 30526 - protein, 38 aa, Artificial Sequence
  Non-cyclic GFR-binding peptide
  MOD_RES (5), (6), (38): Xaa is C or S
IPKAXXVPTELRSVKMAKVDEYDKVVKEVQVEMVVEGX

SEQ ID NO: 30527 - protein, 33 aa, Artificial Sequence
  Non-cyclic GFR-binding peptide
  MOD_RES (2), (3): Xaa is C or S
AXXVPTELSNITMQIMDENEKVVIGEMSDMVVE

SEQ ID NO: 30528 - protein, 40 aa, Artificial Sequence
  Non-cyclic GFR-binding peptide
  MOD_RES (4), (5), (39): Xaa is C or S
  MOD_RES (19), (20), (21), (22), (23): Xaa is A or G
  MOD_RES (24), (25), (26), (27): Xaa is A or G or is absent
PKAXXVPTELRSVKMAKVXXXXXXXXXKEVQVEMVVEGXG

SEQ ID NO: 30529 - protein, 41 aa, Artificial Sequence
  Non-cyclic GFR-binding peptide
  MOD_RES (6), (7), (38), (40): Xaa is C or S
ASASPXXVPQDLRSVKIAKVVGRTPKVKEVQVMVVKSXKXS

SEQ ID NO: 30530 - protein, 39 aa, Artificial Sequence
  Non-cyclic GFR-binding peptide
  MOD_RES (7), (39): Xaa is C or S
HVTKPTXAPTKLRPVQVRKIDDSSNVIKKATVNMVVRSX

SEQ ID NO: 30531 - protein, 37 aa, Artificial Sequence
  Non-cyclic GFR-binding peptide
  MOD_RES (3), (4), (37): Xaa is C or S
  MOD_RES (18), (19), (20), (21), (22): Xaa is A or G
  MOD_RES (23), (24), (25), (26): Xaa is A or G or is absent
SPXXVPQDLSNITIQIMXXXXXXXXXIGEMSMVVKSX

SEQ ID NO: 30532 - protein, 41 aa, Artificial Sequence
  Non-cyclic GFR-binding peptide
  MOD_RES (5), (6), (38), (40): Xaa is C or S
IPKAXXVPTELRSVKMAKVDEYDKVVKEVQVEMVVEGXGXR

SEQ ID NO: 30533 - protein, 35 aa, Artificial Sequence
  Non-cyclic GFR-binding peptide
  MOD_RES (2), (3): Xaa is C or S
  MOD_RES (17), (18), (19), (20), (21): Xaa is A or G
  MOD_RES (22), (23), (24), (25): Xaa is A or G or is absent
AXXVPTELRPVQMRKIXXXXXXXXXKKATVEMVVE

SEQ ID NO: 30534 - protein, 38 aa, Artificial Sequence
  Non-cyclic GFR-binding peptide
  MOD_RES (4), (5), (37): Xaa is C or S
PKAXXVPTELSNITMQIMDENEKVVIGEMSDMVVEGXG

SEQ ID NO: 30535 - protein, 34 aa, Artificial Sequence
  Non-cyclic GFR-binding peptide
  MOD_RES (2), (3): Xaa is C or S
AXXVPTELSNITMQIMDEYDKVVIGEMSEMVVEG

SEQ ID NO: 30536 - protein, 36 aa, Artificial Sequence
  Non-cyclic GFR-binding peptide
  MOD_RES (2), (3), (35): Xaa is C or S
AXXVPTELRPVQMRKIDEYDKVVKKATVEMVVEGXG

SEQ ID NO: 30537 - protein, 37 aa, Artificial Sequence
  Non-cyclic GFR-binding peptide
  MOD_RES (3), (4): Xaa is C or S
  MOD_RES (18), (19), (20), (21), (22): Xaa is A or G
  MOD_RES (23), (24), (25), (26): Xaa is A or G or is absent
KAXXVPTELSNITMQIMXXXXXXXXXIGEMSEMVVEG

SEQ ID NO: 30538 - protein, 36 aa, Artificial Sequence
  Non-cyclic GFR-binding peptide
  MOD_RES (1), (2), (35): Xaa is C or S
  MOD_RES (16), (17), (18), (19), (20): Xaa is A or G
  MOD_RES (21), (22), (23), (24): Xaa is A or G or is absent
XXVSQDLRSVKIAKVXXXXXXXXXKEVQVMIVKSXK

SEQ ID NO: 30539 - protein, 39 aa, Artificial Sequence
  Non-cyclic GFR-binding peptide
  MOD_RES (3), (4), (36), (38): Xaa is C or S
KAXXVPTELSNITMQIMDEYDKVVIGEMSEMVVEGXGXR

SEQ ID NO: 30540 - protein, 41 aa, Artificial Sequence
  Non-cyclic GFR-binding peptide
  MOD_RES (1), (38), (40): Xaa is C or S
XRPTQVQLEPLTVLYYEIVRKKPIFEQLSNTLEDHLAXKXE

SEQ ID NO: 30541 - protein, 36 aa, Artificial Sequence
  Non-cyclic GFR-binding peptide
  MOD_RES (1), (2), (36): Xaa is C or S
  MOD_RES (16), (17), (18), (19), (20): Xaa is A or G
  MOD_RES (21), (22), (23), (24): Xaa is A or G or is absent
XXVPTELRPVQMRKIXXXXXXXXXKKATVEMVVEGX

SEQ ID NO: 30542 - protein, 34 aa, Artificial Sequence
  Non-cyclic GFR-binding peptide
  MOD_RES (32), (34): Xaa is C or S
APTQLSNITVQIMDDSSNVIIGEMSNMVVRAXGX

SEQ ID NO: 30543 - protein, 32 aa, Artificial Sequence
  Non-cyclic GFR-binding peptide
  MOD_RES (1), (1): Xaa is C or S
XAPTKLRPVQVRKIDDSSNVIKKATVNMVVRS

SEQ ID NO: 30544 - protein, 41 aa, Artificial Sequence
  Non-cyclic GFR-binding peptide
  MOD_RES (5), (6), (39), (41): Xaa is C or S
  MOD_RES (20), (21), (22), (23), (24): Xaa is A or G
  MOD_RES (25), (26), (27), (28): Xaa is A or G or is absent
SASPXXVPQDLRPVQIRKIXXXXXXXXXKKATVMVVKSXKX

SEQ ID NO: 30545 - protein, 37 aa, Artificial Sequence
  Non-cyclic GFR-binding peptide
  MOD_RES (34), (36): Xaa is C or S
  MOD_RES (14), (15), (16), (17), (18): Xaa is A or G
  MOD_RES (19), (20), (21), (22): Xaa is A or G or is absent
APTKLRPVQVRKIXXXXXXXXXKKATVNMVVRSXGXH

SEQ ID NO: 30546 - protein, 32 aa, Artificial Sequence
  Non-cyclic GFR-binding peptide
  MOD_RES (1), (2): Xaa is C or S
XXVPTELSNITMQIMDEYDKVVIGEMSEMVVE

SEQ ID NO: 30547 - protein, 37 aa, Artificial Sequence
  Non-cyclic GFR-binding peptide
  MOD_RES (1), (1): Xaa is C or S
XQPSRVHHEPLTVLYYEYVRKKPKLEQLSNRLEEHLE

SEQ ID NO: 30548 - protein, 36 aa, Artificial Sequence
  Non-cyclic GFR-binding peptide
  MOD_RES (1), (35): Xaa is C or S
  MOD_RES (15), (16), (17), (18), (19): Xaa is A or G
  MOD_RES (20), (21), (22), (23): Xaa is A or G or is absent
XVPTELRSVKMAKVXXXXXXXXXKEVQVDMVVEGXG

SEQ ID NO: 30549 - protein, 40 aa, Artificial Sequence
  Non-cyclic GFR-binding peptide
  MOD_RES (6), (7), (38), (40): Xaa is C or S
ASASPXXVSQDLSNITIQIMIGKTPKIIGEMSMIVKSXKX

SEQ ID NO: 30550 - protein, 40 aa, Artificial Sequence
  Non-cyclic GFR-binding peptide
  MOD_RES (5), (39): Xaa is C or S
EGLEXVPTEEEPLPMVYYRIKPHQGQHEQLSNFLQHNKXE

SEQ ID NO: 30551 - protein, 38 aa, Artificial Sequence
  Non-cyclic GFR-binding peptide
  MOD_RES (3), (4), (36), (38): Xaa is C or S
KAXXVPTELRPVQMRKIDENEKVVKKATVDMVVEGXGX

SEQ ID NO: 30552 - protein, 37 aa, Artificial Sequence
  Non-cyclic GFR-binding peptide
  MOD_RES (34), (36): Xaa is C or S
  MOD_RES (14), (15), (16), (17), (18): Xaa is A or G
  MOD_RES (19), (20), (21), (22): Xaa is A or G or is absent
APTKLRSVKVAKVXXXXXXXXXKEVQVNMVVRSXGXH

SEQ ID NO: 30553 - protein, 35 aa, Artificial Sequence
  Non-cyclic GFR-binding peptide
  MOD_RES (2), (2): Xaa is C or S
EXVPTEEEPLPMVYYRIKPHQGQHEQLSNFLQHNK

SEQ ID NO: 30554 - protein, 33 aa, Artificial Sequence
  Non-cyclic GFR-binding peptide
  MOD_RES (1), (33): Xaa is C or S
XVPTELSNITMQIMDEYDKVVIGEMSEMVVEGX

SEQ ID NO: 30555 - protein, 36 aa, Artificial Sequence
  Non-cyclic GFR-binding peptide
  MOD_RES (33), (35): Xaa is C or S
  MOD_RES (14), (15), (16), (17), (18): Xaa is A or G
  MOD_RES (19), (20), (21), (22): Xaa is A or G or is absent
VPQALRSVKIAKVXXXXXXXXXKEVQVMIVRSXKXS

SEQ ID NO: 30556 - protein, 34 aa, Artificial Sequence
  Non-cyclic GFR-binding peptide
  MOD_RES (1), (1): Xaa is C or S
XVPTEEEPLTMLYYRIKPHQGQHEQLSNFLQHNK

SEQ ID NO: 30557 - protein, 34 aa, Artificial Sequence
  Non-cyclic GFR-binding peptide
  MOD_RES (1), (2), (33): Xaa is C or S
XXVPQDLRSVKIAKVVGRTPKVKEVQVMVVKSXK

SEQ ID NO: 30558 - protein, 39 aa, Artificial Sequence
  Non-cyclic GFR-binding peptide
  MOD_RES (7), (39): Xaa is C or S
HVTKPTXAPTKLRSVKVAKVDDSSNVIKEVQVNMVVRSX

SEQ ID NO: 30559 - protein, 36 aa, Artificial Sequence
  Non-cyclic GFR-binding peptide
  MOD_RES (33), (35): Xaa is C or S
  MOD_RES (14), (15), (16), (17), (18): Xaa is A or G
  MOD_RES (19), (20), (21), (22): Xaa is A or G or is absent
VSQDLSNITIQIMXXXXXXXXXIGEMSMIVKSXKXS

SEQ ID NO: 30560 - protein, 35 aa, Artificial Sequence
  Non-cyclic GFR-binding peptide
  MOD_RES (3), (4), (35): Xaa is C or S
SPXXVPQDLRSVKIAKVVGRTPKVKEVQVMVVKSX

SEQ ID NO: 30561 - protein, 36 aa, Artificial Sequence
  Non-cyclic GFR-binding peptide
  MOD_RES (2), (2): Xaa is C or S
  MOD_RES (18), (19), (20), (21), (22): Xaa is A or G
  MOD_RES (23), (24), (25), (26): Xaa is A or G or is absent
KXQPSRVHHEPLTVLYYXXXXXXXXXEQLSNRLEEH

SEQ ID NO: 30562 - protein, 37 aa, Artificial Sequence
  Non-cyclic GFR-binding peptide
  MOD_RES (36), (36): Xaa is C or S
PSRVHHEPLTVLYYEYVRKKPKLEQLSNRLEEHLEXA

SEQ ID NO: 30563 - protein, 33 aa, Artificial Sequence
  Non-cyclic GFR-binding peptide
  MOD_RES (1), (2), (33): Xaa is C or S
XXVPQALRPVQIRKIVGRKPKVKKATVMIVRSX

SEQ ID NO: 30564 - protein, 35 aa, Artificial Sequence
  Non-cyclic GFR-binding peptide
  MOD_RES (1), (35): Xaa is C or S
  MOD_RES (15), (16), (17), (18), (19): Xaa is A or G
  MOD_RES (20), (21), (22), (23): Xaa is A or G or is absent
XVPTELRPVQMRKIXXXXXXXXXKKATVEMVVEGX

SEQ ID NO: 30565 - protein, 41 aa, Artificial Sequence
  Non-cyclic GFR-binding peptide
  MOD_RES (5), (5): Xaa is C or S
SSVKXQPSRVHHEPLTVLYYEYVRKKPKLEQLSNRLEEHLE

SEQ ID NO: 30566 - protein, 41 aa, Artificial Sequence
  Non-cyclic GFR-binding peptide
  MOD_RES (7), (41): Xaa is C or S
  MOD_RES (21), (22), (23), (24), (25): Xaa is A or G
  MOD_RES (26), (27), (28), (29): Xaa is A or G or is absent
HVTKPTXAPTKLSNITVQIMXXXXXXXXXIGEMSNMVVRSX

SEQ ID NO: 30567 - protein, 34 aa, Artificial Sequence
  Non-cyclic GFR-binding peptide
  MOD_RES (1), (32), (34): Xaa is C or S
XVSQDLRSVKIAKVIGKTPKIKEVQVMIVKSXKX

SEQ ID NO: 30568 - protein, 42 aa, Artificial Sequence
  Non-cyclic GFR-binding peptide
  MOD_RES (4), (5), (39), (41): Xaa is C or S
  MOD_RES (19), (20), (21), (22), (23): Xaa is A or G
  MOD_RES (24), (25), (26), (27): Xaa is A or G or is absent
PKPXXAPTKLSNITVQIMXXXXXXXXXIGEMSNMVVRSXGXH

SEQ ID NO: 30569 - protein, 32 aa, Artificial Sequence
  Non-cyclic GFR-binding peptide
  MOD_RES (1), (32): Xaa is C or S
XVPQALRPVQIRKIVGRKPKVKKATVMIVRSX

SEQ ID NO: 30570 - protein, 39 aa, Artificial Sequence
  Non-cyclic GFR-binding peptide
  MOD_RES (5), (6), (37), (39): Xaa is C or S
SASPXXVPQDLSNITIQIMVGRTPKVIGEMSMVVKSXKX

SEQ ID NO: 30571 - protein, 36 aa, Artificial Sequence
  Non-cyclic GFR-binding peptide
  MOD_RES (1), (2), (35): Xaa is C or S
  MOD_RES (16), (17), (18), (19), (20): Xaa is A or G
  MOD_RES (21), (22), (23), (24): Xaa is A or G or is absent
XXVPQDLRPVQIRKIXXXXXXXXXKKATVMVVKSXK

SEQ ID NO: 30572 - protein, 33 aa, Artificial Sequence
  Non-cyclic GFR-binding peptide
  MOD_RES (31), (33): Xaa is C or S
VSQDLRPVQIRKIIGKTPKIKKATVMIVKSXKX

SEQ ID NO: 30573 - protein, 38 aa, Artificial Sequence
  Non-cyclic GFR-binding peptide
  MOD_RES (4), (38): Xaa is C or S
  MOD_RES (18), (19), (20), (21), (22): Xaa is A or G
  MOD_RES (23), (24), (25), (26): Xaa is A or G or is absent
KPTXAPTKLSNITVQIMXXXXXXXXXIGEMSNMVVRSX

SEQ ID NO: 30574 - protein, 41 aa, Artificial Sequence
  Non-cyclic GFR-binding peptide
  MOD_RES (3), (4), (38), (40): Xaa is C or S
  MOD_RES (18), (19), (20), (21), (22): Xaa is A or G
  MOD_RES (23), (24), (25), (26): Xaa is A or G or is absent
KAXXVPTELRSVKMAKVXXXXXXXXXKEVQVDMVVEGXGXR

SEQ ID NO: 30575 - protein, 39 aa, Artificial Sequence
  Non-cyclic GFR-binding peptide
  MOD_RES (5), (6), (38): Xaa is C or S
VPKPXXAPTKLRSVKVAKVDDSSNVIKEVQVNMVVRSXG

SEQ ID NO: 30576 - protein, 40 aa, Artificial Sequence
  Non-cyclic GFR-binding peptide
  MOD_RES (7), (39): Xaa is C or S
HVTKPTXAPTKLSNITVQIMDDSSNVIIGEMSNMVVRSXG

SEQ ID NO: 30577 - protein, 33 aa, Artificial Sequence
  Non-cyclic GFR-binding peptide
  MOD_RES (32), (32): Xaa is C or S
APTQLRSVKVAKVDDSSNVIKEVQVNMVVRAXG

SEQ ID NO: 30578 - protein, 38 aa, Artificial Sequence
  Non-cyclic GFR-binding peptide
  MOD_RES (3), (4), (35), (37): Xaa is C or S
SPXXVPQDLRSVKIAKVVGRTPKVKEVQVMVVKSXKXS

SEQ ID NO: 30579 - protein, 37 aa, Artificial Sequence
  Non-cyclic GFR-binding peptide
  MOD_RES (4), (5): Xaa is C or S
  MOD_RES (19), (20), (21), (22), (23): Xaa is A or G
  MOD_RES (24), (25), (26), (27): Xaa is A or G or is absent
PKPXXAPTKLRSVKVAKVXXXXXXXXXKEVQVNMVVR

SEQ ID NO: 30580 - protein, 40 aa, Artificial Sequence
  Non-cyclic GFR-binding peptide
  MOD_RES (3), (4), (37), (39): Xaa is C or S
  MOD_RES (18), (19), (20), (21), (22): Xaa is A or G
  MOD_RES (23), (24), (25), (26): Xaa is A or G or is absent
APXXVPQALSNITIQIMXXXXXXXXXIGEMSMIVRSXKXS

SEQ ID NO: 30581 - protein, 41 aa, Artificial Sequence
  Non-cyclic GFR-binding peptide
  MOD_RES (4), (41): Xaa is C or S
SVKXQPSRVHHEPLPVVYYEYVRKKPKLEQLSNRLEEHLEX

SEQ ID NO: 30582 - protein, 37 aa, Artificial Sequence
  Non-cyclic GFR-binding peptide
  MOD_RES (2), (3), (34), (36): Xaa is C or S
PXXVSQDLRSVKIAKVIGKTPKIKEVQVMIVKSXKXS

SEQ ID NO: 30583 - protein, 33 aa, Artificial Sequence
  Non-cyclic GFR-binding peptide
  MOD_RES (14), (15), (16), (17), (18): Xaa is A or G
  MOD_RES (19), (20), (21), (22): Xaa is A or G or is absent
APTKLRPVQVRKIXXXXXXXXXKKATVNMVVRS

SEQ ID NO: 30584 - protein, 34 aa, Artificial Sequence
  Non-cyclic GFR-binding peptide
  MOD_RES (3), (4): Xaa is C or S
KAXXVPTELRPVQMRKIDEYDKVVKKATVEMVVE

SEQ ID NO: 30585 - protein, 36 aa, Artificial Sequence
  Non-cyclic GFR-binding peptide
  MOD_RES (3), (35): Xaa is C or S
PTXAPTKLSNITVQIMDDSSNVIIGEMSNMVVRSXG

SEQ ID NO: 30586 - protein, 36 aa, Artificial Sequence
  Non-cyclic GFR-binding peptide
  MOD_RES (3), (4): Xaa is C or S
  MOD_RES (18), (19), (20), (21), (22): Xaa is A or G
  MOD_RES (23), (24), (25), (26): Xaa is A or G or is absent
KAXXVPTELRPVQMRKIXXXXXXXXXKKATVEMVVE

SEQ ID NO: 30587 - protein, 36 aa, Artificial Sequence
  Non-cyclic GFR-binding peptide
  MOD_RES (4), (5), (36): Xaa is C or S
AAPXXVPQALRPVQIRKIVGRKPKVKKATVMIVRSX

SEQ ID NO: 30588 - protein, 41 aa, Artificial Sequence
  Non-cyclic GFR-binding peptide
  MOD_RES (6), (7), (38), (40): Xaa is C or S
ASAAPXXVPQALSNITIQIMVGRKPKVIGEMSMIVRSXKXS

SEQ ID NO: 30589 - protein, 36 aa, Artificial Sequence
  Non-cyclic GFR-binding peptide
  MOD_RES (2), (3), (36): Xaa is C or S
  MOD_RES (17), (18), (19), (20), (21): Xaa is A or G
  MOD_RES (22), (23), (24), (25): Xaa is A or G or is absent
PXXVPQDLRPVQIRKIXXXXXXXXXKKATVMVVKSX

SEQ ID NO: 30590 - protein, 38 aa, Artificial Sequence
  Non-cyclic GFR-binding peptide
  MOD_RES (3), (37): Xaa is C or S
LEXVPTEEEPLPMVYYRIKPHQGQHEQLSNFLQHNKXE

SEQ ID NO: 30591 - protein, 35 aa, Artificial Sequence
  Non-cyclic GFR-binding peptide
  MOD_RES (1), (32), (34): Xaa is C or S
XVPQALSNITIQIMVGRKPKVIGEMSMIVRSXKXS

SEQ ID NO: 30592 - protein, 34 aa, Artificial Sequence
  Non-cyclic GFR-binding peptide
  MOD_RES (1), (32), (34): Xaa is C or S
XVPQDLRPVQIRKIVGRTPKVKKATVMVVKSXKX

SEQ ID NO: 30593 - protein, 35 aa, Artificial Sequence
  Non-cyclic GFR-binding peptide
  MOD_RES (34), (34): Xaa is C or S
  MOD_RES (14), (15), (16), (17), (18): Xaa is A or G
  MOD_RES (19), (20), (21), (22): Xaa is A or G or is absent
APTKLSNITVQIMXXXXXXXXXIGEMSNMVVRSXG

SEQ ID NO: 30594 - protein, 43 aa, Artificial Sequence
  Non-cyclic GFR-binding peptide
  MOD_RES (3), (40), (42): Xaa is C or S
VKXQPSRVHHEPLPVVYYEYVRKKPKLEQLSNRLEEHLEXAXA

SEQ ID NO: 30595 - protein, 40 aa, Artificial Sequence
  Non-cyclic GFR-binding peptide
  MOD_RES (4), (5), (37), (39): Xaa is C or S
PKAXXVPTELRSVKMAKVDENEKVVKEVQVDMVVEGXGXR

SEQ ID NO: 30596 - protein, 36 aa, Artificial Sequence
  Non-cyclic GFR-binding peptide
  MOD_RES (33), (35): Xaa is C or S
  MOD_RES (14), (15), (16), (17), (18): Xaa is A or G
  MOD_RES (19), (20), (21), (22): Xaa is A or G or is absent
VPQALRPVQIRKIXXXXXXXXXKKATVMIVRSXKXS

SEQ ID NO: 30597 - protein, 35 aa, Artificial Sequence
  Non-cyclic GFR-binding peptide
  MOD_RES (3), (4): Xaa is C or S
KPXXAPTQLRSVKVAKVDDSSNVIKEVQVNMVVRA

SEQ ID NO: 30598 - protein, 35 aa, Artificial Sequence
  Non-cyclic GFR-binding peptide
  MOD_RES (2), (2): Xaa is C or S
  MOD_RES (16), (17), (18), (19), (20): Xaa is A or G
  MOD_RES (21), (22), (23), (24): Xaa is A or G or is absent
TXAPTKLRPVQVRKIXXXXXXXXXKKATVNMVVRS

SEQ ID NO: 30599 - protein, 33 aa, Artificial Sequence
  Non-cyclic GFR-binding peptide
  MOD_RES (1), (2): Xaa is C or S
XXVPTELRSVKMAKVDEYDKVVKEVQVEMVVEG

SEQ ID NO: 30600 - protein, 33 aa, Artificial Sequence
  Non-cyclic GFR-binding peptide
  MOD_RES (2), (3): Xaa is C or S
PXXVPQDLSNITIQIMVGRTPKVIGEMSMVVKS

SEQ ID NO: 30601 - protein, 44 aa, Artificial Sequence
  Non-cyclic GFR-binding peptide
  MOD_RES (4), (41), (43): Xaa is C or S
SVKXQPSRVHHEPLPVVYYEYVRKKPKLEQLSNRLEEHLEXAXA

SEQ ID NO: 30602 - protein, 36 aa, Artificial Sequence
  Non-cyclic GFR-binding peptide
  MOD_RES (3), (4), (35): Xaa is C or S
APXXVPQALRPVQIRKIVGRKPKVKKATVMIVRSXK

SEQ ID NO: 30603 - protein, 44 aa, Artificial Sequence
  Non-cyclic GFR-binding peptide
  MOD_RES (6), (7), (41), (43): Xaa is C or S
  MOD_RES (21), (22), (23), (24), (25): Xaa is A or G
  MOD_RES (26), (27), (28), (29): Xaa is A or G or is absent
KIPKAXXVPTELSNITMQIMXXXXXXXXXIGEMSDMVVEGXGXR

SEQ ID NO: 30604 - protein, 41 aa, Artificial Sequence
  Non-cyclic GFR-binding peptide
  MOD_RES (4), (5), (38), (40): Xaa is C or S
  MOD_RES (19), (20), (21), (22), (23): Xaa is A or G
  MOD_RES (24), (25), (26), (27): Xaa is A or G or is absent
AAPXXVPQALSNITIQIMXXXXXXXXXIGEMSMIVRSXKXS

SEQ ID NO: 30605 - protein, 37 aa, Artificial Sequence
  Non-cyclic GFR-binding peptide
  MOD_RES (6), (6): Xaa is C or S
VTKPTXAPTKLSNITVQIMDDSSNVIIGEMSNMVVRS

SEQ ID NO: 30606 - protein, 39 aa, Artificial Sequence
  Non-cyclic GFR-binding peptide
  MOD_RES (3), (4), (38): Xaa is C or S
  MOD_RES (18), (19), (20), (21), (22): Xaa is A or G
  MOD_RES (23), (24), (25), (26): Xaa is A or G or is absent
KPXXAPTQLRSVKVAKVXXXXXXXXXKEVQVNMVVRAXG

SEQ ID NO: 30607 - protein, 36 aa, Artificial Sequence
  Non-cyclic GFR-binding peptide
  MOD_RES (3), (3): Xaa is C or S
LEXVPTEEEPLTMLYYRIKPHQGQHEQLSNFLQHNK

SEQ ID NO: 30608 - protein, 40 aa, Artificial Sequence
  Non-cyclic GFR-binding peptide
  MOD_RES (5), (6), (38), (40): Xaa is C or S
VPKPXXAPTKLRPVQVRKIDDSSNVIKKATVNMVVRSXGX

SEQ ID NO: 30609 - protein, 37 aa, Artificial Sequence
  Non-cyclic GFR-binding peptide
  MOD_RES (3), (4), (37): Xaa is C or S
  MOD_RES (18), (19), (20), (21), (22): Xaa is A or G
  MOD_RES (23), (24), (25), (26): Xaa is A or G or is absent
SPXXVSQDLSNITIQIMXXXXXXXXXIGEMSMIVKSX

SEQ ID NO: 30610 - protein, 34 aa, Artificial Sequence
  Non-cyclic GFR-binding peptide
  MOD_RES (1), (1): Xaa is C or S
  MOD_RES (15), (16), (17), (18), (19): Xaa is A or G
  MOD_RES (20), (21), (22), (23): Xaa is A or G or is absent
XAPTKLRSVKVAKVXXXXXXXXXKEVQVNMVVRS

SEQ ID NO: 30611 - protein, 34 aa, Artificial Sequence
  Non-cyclic GFR-binding peptide
  MOD_RES (34), (34): Xaa is C or S
  MOD_RES (14), (15), (16), (17), (18): Xaa is A or G
  MOD_RES (19), (20), (21), (22): Xaa is A or G or is absent
APTQLRPVQVRKIXXXXXXXXXKKATVNMVVRAX

SEQ ID NO: 30612 - protein, 39 aa, Artificial Sequence
  Non-cyclic GFR-binding peptide
  MOD_RES (2), (36), (38): Xaa is C or S
  MOD_RES (16), (17), (18), (19), (20): Xaa is A or G
  MOD_RES (21), (22), (23), (24): Xaa is A or G or is absent
TXAPTKLRPVQVRKIXXXXXXXXXKKATVNMVVRSXGXH

SEQ ID NO: 30613 - protein, 34 aa, Artificial Sequence
  Non-cyclic GFR-binding peptide
  MOD_RES (1), (2): Xaa is C or S
  MOD_RES (16), (17), (18), (19), (20): Xaa is A or G
  MOD_RES (21), (22), (23), (24): Xaa is A or G or is absent
XXVPTELSNITMQIMXXXXXXXXXIGEMSDMVVE

SEQ ID NO: 30614 - protein, 44 aa, Artificial Sequence
  Non-cyclic GFR-binding peptide
  MOD_RES (6), (7), (41), (43): Xaa is C or S
  MOD_RES (21), (22), (23), (24), (25): Xaa is A or G
  MOD_RES (26), (27), (28), (29): Xaa is A or G or is absent
TVPKPXXAPTQLSNITVQIMXXXXXXXXXIGEMSNMVVRAXGXH

SEQ ID NO: 30615 - protein, 34 aa, Artificial Sequence
  Non-cyclic GFR-binding peptide
PTQVQLEPLTVLYYEIVRKKPIFEQLSNTLEDHL

SEQ ID NO: 30616 - protein, 37 aa, Artificial Sequence
  Non-cyclic GFR-binding peptide
  MOD_RES (1), (35), (37): Xaa is C or S
  MOD_RES (15), (16), (17), (18), (19): Xaa is A or G
  MOD_RES (20), (21), (22), (23): Xaa is A or G or is absent
XAPTKLRPVQVRKIXXXXXXXXXKKATVNMVVRSXGX

SEQ ID NO: 30617 - protein, 37 aa, Artificial Sequence
  Non-cyclic GFR-binding peptide
  MOD_RES (35), (37): Xaa is C or S
  MOD_RES (14), (15), (16), (17), (18): Xaa is A or G
  MOD_RES (19), (20), (21), (22): Xaa is A or G or is absent
TQVQLEPLPVVYYXXXXXXXXXEQLSNTLEDHLAXKX

SEQ ID NO: 30618 - protein, 34 aa, Artificial Sequence
  Non-cyclic GFR-binding peptide
  MOD_RES (34), (34): Xaa is C or S
  MOD_RES (14), (15), (16), (17), (18): Xaa is A or G
  MOD_RES (19), (20), (21), (22): Xaa is A or G or is absent
APTKLSNITVQIMXXXXXXXXXIGEMSNMVVRSX

SEQ ID NO: 30619 - protein, 34 aa, Artificial Sequence
  Non-cyclic GFR-binding peptide
  MOD_RES (34), (34): Xaa is C or S
  MOD_RES (14), (15), (16), (17), (18): Xaa is A or G
  MOD_RES (19), (20), (21), (22): Xaa is A or G or is absent
VPTELRSVKMAKVXXXXXXXXXKEVQVEMVVEGX

SEQ ID NO: 30620 - protein, 38 aa, Artificial Sequence
  Non-cyclic GFR-binding peptide
  MOD_RES (1), (38): Xaa is C or S
XRPTQVQLEPLPVVYYEIVRKKPIFEQLSNTLEDHLAX

SEQ ID NO: 30621 - protein, 35 aa, Artificial Sequence
  Non-cyclic GFR-binding peptide
  MOD_RES (1), (2): Xaa is C or S
  MOD_RES (16), (17), (18), (19), (20): Xaa is A or G
  MOD_RES (21), (22), (23), (24): Xaa is A or G or is absent
XXVPTELRPVQMRKIXXXXXXXXXKKATVEMVVEG

SEQ ID NO: 30622 - protein, 41 aa, Artificial Sequence
  Non-cyclic GFR-binding peptide
  MOD_RES (5), (6), (39), (41): Xaa is C or S
  MOD_RES (20), (21), (22), (23), (24): Xaa is A or G
  MOD_RES (25), (26), (27), (28): Xaa is A or G or is absent
SASPXXVSQDLRPVQIRKIXXXXXXXXXKKATVMIVKSXKX

SEQ ID NO: 30623 - protein, 35 aa, Artificial Sequence
  Non-cyclic GFR-binding peptide
  MOD_RES (1), (2), (34): Xaa is C or S
XXAPTKLRPVQVRKIDDSSNVIKKATVNMVVRSXG

SEQ ID NO: 30624 - protein, 38 aa, Artificial Sequence
  Non-cyclic GFR-binding peptide
  MOD_RES (5), (5): Xaa is C or S
  MOD_RES (19), (20), (21), (22), (23): Xaa is A or G
  MOD_RES (24), (25), (26), (27): Xaa is A or G or is absent
TKPTXAPTKLRPVQVRKIXXXXXXXXXKKATVNMVVRS

SEQ ID NO: 30625 - protein, 33 aa, Artificial Sequence
  Non-cyclic GFR-binding peptide
  MOD_RES (1), (2), (33): Xaa is C or S
XXVSQDLRPVQIRKIIGKTPKIKKATVMIVKSX

SEQ ID NO: 30626 - protein, 35 aa, Artificial Sequence
  Non-cyclic GFR-binding peptide
  MOD_RES (4), (4): Xaa is C or S
KPTXAPTKLSNITVQIMDDSSNVIIGEMSNMVVRS

SEQ ID NO: 30627 - protein, 40 aa, Artificial Sequence
  Non-cyclic GFR-binding peptide
  MOD_RES (5), (6), (40): Xaa is C or S
  MOD_RES (20), (21), (22), (23), (24): Xaa is A or G
  MOD_RES (25), (26), (27), (28): Xaa is A or G or is absent
VPKPXXAPTKLRPVQVRKIXXXXXXXXXKKATVNMVVRSX

SEQ ID NO: 30628 - protein, 36 aa, Artificial Sequence
  Non-cyclic GFR-binding peptide
  MOD_RES (3), (4): Xaa is C or S
  MOD_RES (18), (19), (20), (21), (22): Xaa is A or G
  MOD_RES (23), (24), (25), (26): Xaa is A or G or is absent
SPXXVPQDLSNITIQIMXXXXXXXXXIGEMSMVVKS

SEQ ID NO: 30629 - protein, 38 aa, Artificial Sequence
  Non-cyclic GFR-binding peptide
  MOD_RES (6), (7): Xaa is C or S
SIPKAXXVPTELRPVQMRKIDEYDKVVKKATVEMVVEG

SEQ ID NO: 30630 - protein, 38 aa, Artificial Sequence
  Non-cyclic GFR-binding peptide
  MOD_RES (1), (38): Xaa is C or S
  MOD_RES (17), (18), (19), (20), (21): Xaa is A or G
  MOD_RES (22), (23), (24), (25): Xaa is A or G or is absent
XRPTQVQLEPLTVLYYXXXXXXXXXEQLSNTLEDHLAX

SEQ ID NO: 30631 - protein, 38 aa, Artificial Sequence
  Non-cyclic GFR-binding peptide
  MOD_RES (3), (4), (36), (38): Xaa is C or S
KAXXVPTELRPVQMRKIDEYDKVVKKATVEMVVEGXGX

SEQ ID NO: 30632 - protein, 37 aa, Artificial Sequence
  Non-cyclic GFR-binding peptide
  MOD_RES (2), (3), (36): Xaa is C or S
  MOD_RES (17), (18), (19), (20), (21): Xaa is A or G
  MOD_RES (22), (23), (24), (25): Xaa is A or G or is absent
PXXVPQALSNITIQIMXXXXXXXXXIGEMSMIVRSXK

SEQ ID NO: 30633 - protein, 40 aa, Artificial Sequence
  Non-cyclic GFR-binding peptide
  MOD_RES (3), (4), (38), (40): Xaa is C or S
  MOD_RES (18), (19), (20), (21), (22): Xaa is A or G
  MOD_RES (23), (24), (25), (26): Xaa is A or G or is absent
KAXXVPTELSNITMQIMXXXXXXXXXIGEMSEMVVEGXGX

SEQ ID NO: 30634 - protein, 36 aa, Artificial Sequence
  Non-cyclic GFR-binding peptide
  MOD_RES (2), (36): Xaa is C or S
  MOD_RES (16), (17), (18), (19), (20): Xaa is A or G
  MOD_RES (21), (22), (23), (24): Xaa is A or G or is absent
TXAPTKLSNITVQIMXXXXXXXXXIGEMSNMVVRSX

SEQ ID NO: 30635 - protein, 37 aa, Artificial Sequence
  Non-cyclic GFR-binding peptide
  MOD_RES (1), (2), (34), (36): Xaa is C or S
XXAPTKLRPVQVRKIDDSSNVIKKATVNMVVRSXGXH

SEQ ID NO: 30636 - protein, 37 aa, Artificial Sequence
  Non-cyclic GFR-binding peptide
  MOD_RES (4), (5): Xaa is C or S
  MOD_RES (19), (20), (21), (22), (23): Xaa is A or G
  MOD_RES (24), (25), (26), (27): Xaa is A or G or is absent
PKPXXAPTQLSNITVQIMXXXXXXXXXIGEMSNMVVR

SEQ ID NO: 30637 - protein, 38 aa, Artificial Sequence
  Non-cyclic GFR-binding peptide
  MOD_RES (35), (37): Xaa is C or S
  MOD_RES (14), (15), (16), (17), (18): Xaa is A or G
  MOD_RES (19), (20), (21), (22): Xaa is A or G or is absent
SRVHHEPLPVVYYXXXXXXXXXEQLSNRLEEHLEXAXA

SEQ ID NO: 30638 - protein, 36 aa, Artificial Sequence
  Non-cyclic GFR-binding peptide
  MOD_RES (1), (2), (33), (35): Xaa is C or S
XXVSQDLRPVQIRKIIGKTPKIKKATVMIVKSXKXS

SEQ ID NO: 30639 - protein, 37 aa, Artificial Sequence
  Non-cyclic GFR-binding peptide
  MOD_RES (4), (5), (37): Xaa is C or S
PKPXXAPTQLRSVKVAKVDDSSNVIKEVQVNMVVRAX

SEQ ID NO: 30640 - protein, 41 aa, Artificial Sequence
  Non-cyclic GFR-binding peptide
  MOD_RES (5), (39), (41): Xaa is C or S
  MOD_RES (19), (20), (21), (22), (23): Xaa is A or G
  MOD_RES (24), (25), (26), (27): Xaa is A or G or is absent
EGLEXVPTEEEPLPMVYYXXXXXXXXXEQLSNFLQHNKXEX

SEQ ID NO: 30641 - protein, 42 aa, Artificial Sequence
  Non-cyclic GFR-binding peptide
  MOD_RES (6), (7), (39), (41): Xaa is C or S
TVPKPXXAPTQLRPVQVRKIDDSSNVIKKATVNMVVRAXGXH

SEQ ID NO: 30642 - protein, 36 aa, Artificial Sequence
  Non-cyclic GFR-binding peptide
  MOD_RES (3), (4): Xaa is C or S
  MOD_RES (18), (19), (20), (21), (22): Xaa is A or G
  MOD_RES (23), (24), (25), (26): Xaa is A or G or is absent
KAXXVPTELRSVKMAKVXXXXXXXXXKEVQVEMVVE

SEQ ID NO: 30643 - protein, 41 aa, Artificial Sequence
  Non-cyclic GFR-binding peptide
  MOD_RES (1), (38), (40): Xaa is C or S
  MOD_RES (17), (18), (19), (20), (21): Xaa is A or G
  MOD_RES (22), (23), (24), (25): Xaa is A or G or is absent
XQPSRVHHEPLTVLYYXXXXXXXXXEQLSNRLEEHLEXAXA

SEQ ID NO: 30644 - protein, 42 aa, Artificial Sequence
  Non-cyclic GFR-binding peptide
  MOD_RES (5), (6), (40), (42): Xaa is C or S
  MOD_RES (20), (21), (22), (23), (24): Xaa is A or G
  MOD_RES (25), (26), (27), (28): Xaa is A or G or is absent
VPKPXXAPTKLRSVKVAKVXXXXXXXXXKEVQVNMVVRSXGX

SEQ ID NO: 30645 - protein, 30 aa, Artificial Sequence
  Non-cyclic GFR-binding peptide
VPQALRSVKIAKVVGRKPKVKEVQVMIVRS

SEQ ID NO: 30646 - protein, 37 aa, Artificial Sequence
  Non-cyclic GFR-binding peptide
  MOD_RES (4), (4): Xaa is C or S
  MOD_RES (18), (19), (20), (21), (22): Xaa is A or G
  MOD_RES (23), (24), (25), (26): Xaa is A or G or is absent
KPTXAPTKLRSVKVAKVXXXXXXXXXKEVQVNMVVRS

SEQ ID NO: 30647 - protein, 33 aa, Artificial Sequence
  Non-cyclic GFR-binding peptide
  MOD_RES (1), (2): Xaa is C or S
XXAPTQLRSVKVAKVDDSSNVIKEVQVNMVVRA

SEQ ID NO: 30648 - protein, 39 aa, Artificial Sequence
  Non-cyclic GFR-binding peptide
  MOD_RES (5), (6): Xaa is C or S
  MOD_RES (20), (21), (22), (23), (24): Xaa is A or G
  MOD_RES (25), (26), (27), (28): Xaa is A or G or is absent
IPKAXXVPTELSNITMQIMXXXXXXXXXIGEMSDMVVEG

SEQ ID NO: 30649 - protein, 35 aa, Artificial Sequence
  Non-cyclic GFR-binding peptide
  MOD_RES (34), (34): Xaa is C or S
  MOD_RES (14), (15), (16), (17), (18): Xaa is A or G
  MOD_RES (19), (20), (21), (22): Xaa is A or G or is absent
APTQLRPVQVRKIXXXXXXXXXKKATVNMVVRAXG

SEQ ID NO: 30650 - protein, 37 aa, Artificial Sequence
  Non-cyclic GFR-binding peptide
  MOD_RES (4), (5), (37): Xaa is C or S
PKPXXAPTKLRPVQVRKIDDSSNVIKKATVNMVVRSX

SEQ ID NO: 30651 - protein, 41 aa, Artificial Sequence
  Non-cyclic GFR-binding peptide
  MOD_RES (4), (41): Xaa is C or S
  MOD_RES (20), (21), (22), (23), (24): Xaa is A or G
  MOD_RES (25), (26), (27), (28): Xaa is A or G or is absent
NVQXRPTQVQLEPLPVVYYXXXXXXXXXEQLSNTLEDHLAX

SEQ ID NO: 30652 - protein, 38 aa, Artificial Sequence
  Non-cyclic GFR-binding peptide
  MOD_RES (6), (6): Xaa is C or S
  MOD_RES (20), (21), (22), (23), (24): Xaa is A or G
  MOD_RES (25), (26), (27), (28): Xaa is A or G or is absent
DEGLEXVPTEEEPLPMVYYXXXXXXXXXEQLSNFLQHN

SEQ ID NO: 30653 - protein, 33 aa, Artificial Sequence
  Non-cyclic GFR-binding peptide
  MOD_RES (2), (3): Xaa is C or S
PXXVPQDLRSVKIAKVVGRTPKVKEVQVMVVKS

SEQ ID NO: 30654 - protein, 37 aa, Artificial Sequence
  Non-cyclic GFR-binding peptide
  MOD_RES (4), (5), (36): Xaa is C or S
ASPXXVPQDLRSVKIAKVVGRTPKVKEVQVMVVKSXK

SEQ ID NO: 30655 - protein, 41 aa, Artificial Sequence
  Non-cyclic GFR-binding peptide
  MOD_RES (5), (6), (39), (41): Xaa is C or S
  MOD_RES (20), (21), (22), (23), (24): Xaa is A or G
  MOD_RES (25), (26), (27), (28): Xaa is A or G or is absent
SAAPXXVPQALRPVQIRKIXXXXXXXXXKKATVMIVRSXKX

SEQ ID NO: 30656 - protein, 41 aa, Artificial Sequence
  Non-cyclic GFR-binding peptide
  MOD_RES (3), (40): Xaa is C or S
  MOD_RES (19), (20), (21), (22), (23): Xaa is A or G
  MOD_RES (24), (25), (26), (27): Xaa is A or G or is absent
VKXQPSRVHHEPLTVLYYXXXXXXXXXEQLSNRLEEHLEXA

SEQ ID NO: 30657 - protein, 31 aa, Artificial Sequence
  Non-cyclic GFR-binding peptide
APTQLRPVQVRKIDDSSNVIKKATVNMVVRA

SEQ ID NO: 30658 - protein, 39 aa, Artificial Sequence
  Non-cyclic GFR-binding peptide
  MOD_RES (1), (2), (36), (38): Xaa is C or S
  MOD_RES (16), (17), (18), (19), (20): Xaa is A or G
  MOD_RES (21), (22), (23), (24): Xaa is A or G or is absent
XXAPTKLSNITVQIMXXXXXXXXXIGEMSNMVVRSXGXH

SEQ ID NO: 30659 - protein, 41 aa, Artificial Sequence
  Non-cyclic GFR-binding peptide
  MOD_RES (6), (40): Xaa is C or S
  MOD_RES (20), (21), (22), (23), (24): Xaa is A or G
  MOD_RES (25), (26), (27), (28): Xaa is A or G or is absent
DEGLEXVPTEEEPLTMLYYXXXXXXXXXEQLSNFLQHNKXE

SEQ ID NO: 30660 - protein, 39 aa, Artificial Sequence
  Non-cyclic GFR-binding peptide
  MOD_RES (6), (7): Xaa is C or S
  MOD_RES (21), (22), (23), (24), (25): Xaa is A or G
  MOD_RES (26), (27), (28), (29): Xaa is A or G or is absent
ASASPXXVSQDLRPVQIRKIXXXXXXXXXKKATVMIVKS

SEQ ID NO: 30661 - protein, 38 aa, Artificial Sequence
  Non-cyclic GFR-binding peptide
  MOD_RES (37), (37): Xaa is C or S
RPTQVQLEPLTVLYYEIVRKKPIFEQLSNTLEDHLAXK

SEQ ID NO: 30662 - protein, 35 aa, Artificial Sequence
  Non-cyclic GFR-binding peptide
  MOD_RES (3), (4): Xaa is C or S
KAXXVPTELRSVKMAKVDEYDKVVKEVQVEMVVEG

SEQ ID NO: 30663 - protein, 37 aa, Artificial Sequence
  Non-cyclic GFR-binding peptide
  MOD_RES (3), (4), (35), (37): Xaa is C or S
APXXVPQALSNITIQIMVGRKPKVIGEMSMIVRSXKX

SEQ ID NO: 30664 - protein, 40 aa, Artificial Sequence
  Non-cyclic GFR-binding peptide
  MOD_RES (5), (6), (37), (39): Xaa is C or S
SASPXXVPQDLRPVQIRKIVGRTPKVKKATVMVVKSXKXS

SEQ ID NO: 30665 - protein, 36 aa, Artificial Sequence
  Non-cyclic GFR-binding peptide
  MOD_RES (3), (4): Xaa is C or S
  MOD_RES (18), (19), (20), (21), (22): Xaa is A or G
  MOD_RES (23), (24), (25), (26): Xaa is A or G or is absent
KPXXAPTQLRSVKVAKVXXXXXXXXXKEVQVNMVVR

SEQ ID NO: 30666 - protein, 45 aa, Artificial Sequence
  Non-cyclic GFR-binding peptide
  MOD_RES (5), (42), (44): Xaa is C or S
SSVKXQPSRVHHEPLTVLYYEYVRKKPKLEQLSNRLEEHLEXAXA

SEQ ID NO: 30667 - protein, 34 aa, Artificial Sequence
  Non-cyclic GFR-binding peptide
  MOD_RES (1), (2), (33): Xaa is C or S
XXVSQDLRSVKIAKVIGKTPKIKEVQVMIVKSXK

SEQ ID NO: 30668 - protein, 37 aa, Artificial Sequence
  Non-cyclic GFR-binding peptide
  MOD_RES (5), (6), (37): Xaa is C or S
SAAPXXVPQALRSVKIAKVVGRKPKVKEVQVMIVRSX

SEQ ID NO: 30669 - protein, 39 aa, Artificial Sequence
  Non-cyclic GFR-binding peptide
  MOD_RES (3), (37), (39): Xaa is C or S
  MOD_RES (17), (18), (19), (20), (21): Xaa is A or G
  MOD_RES (22), (23), (24), (25): Xaa is A or G or is absent
LEXVPTEEEPLPMVYYXXXXXXXXXEQLSNFLQHNKXEX

SEQ ID NO: 30670 - protein, 41 aa, Artificial Sequence
  Non-cyclic GFR-binding peptide
  MOD_RES (6), (7), (39), (41): Xaa is C or S
KIPKAXXVPTELRSVKMAKVDENEKVVKEVQVDMVVEGXGX

SEQ ID NO: 30671 - protein, 43 aa, Artificial Sequence
  Non-cyclic GFR-binding peptide
  MOD_RES (4), (41), (43): Xaa is C or S
  MOD_RES (20), (21), (22), (23), (24): Xaa is A or G
  MOD_RES (25), (26), (27), (28): Xaa is A or G or is absent
NVQXRPTQVQLEPLPVVYYXXXXXXXXXEQLSNTLEDHLAXKX

SEQ ID NO: 30672 - protein, 40 aa, Artificial Sequence
  Non-cyclic GFR-binding peptide
  MOD_RES (5), (6), (37), (39): Xaa is C or S
SAAPXXVPQALSNITIQIMVGRKPKVIGEMSMIVRSXKXS

SEQ ID NO: 30673 - protein, 31 aa, Artificial Sequence
  Non-cyclic GFR-binding peptide
  MOD_RES (1), (1): Xaa is C or S
XVPTELRSVKMAKVDENEKVVKEVQVDMVVE

SEQ ID NO: 30674 - protein, 34 aa, Artificial Sequence
  Non-cyclic GFR-binding peptide
  MOD_RES (32), (34): Xaa is C or S
VPTELSNITMQIMDENEKVVIGEMSDMVVEGXGX

SEQ ID NO: 30675 - protein, 42 aa, Artificial Sequence
  Non-cyclic GFR-binding peptide
  MOD_RES (2), (39), (41): Xaa is C or S
  MOD_RES (18), (19), (20), (21), (22): Xaa is A or G
  MOD_RES (23), (24), (25), (26): Xaa is A or G or is absent
KXQPSRVHHEPLTVLYYXXXXXXXXXEQLSNRLEEHLEXAXA

SEQ ID NO: 30676 - protein, 39 aa, Artificial Sequence
  Non-cyclic GFR-binding peptide
  MOD_RES (6), (7): Xaa is C or S
  MOD_RES (21), (22), (23), (24), (25): Xaa is A or G
  MOD_RES (26), (27), (28), (29): Xaa is A or G or is absent
TVPKPXXAPTQLRPVQVRKIXXXXXXXXXKKATVNMVVR

SEQ ID NO: 30677 - protein, 37 aa, Artificial Sequence
  Non-cyclic GFR-binding peptide
  MOD_RES (4), (5): Xaa is C or S
  MOD_RES (19), (20), (21), (22), (23): Xaa is A or G
  MOD_RES (24), (25), (26), (27): Xaa is A or G or is absent
PKAXXVPTELSNITMQIMXXXXXXXXXIGEMSEMVVE

SEQ ID NO: 30678 - protein, 34 aa, Artificial Sequence
  Non-cyclic GFR-binding peptide
  MOD_RES (1), (34): Xaa is C or S
  MOD_RES (15), (16), (17), (18), (19): Xaa is A or G
  MOD_RES (20), (21), (22), (23): Xaa is A or G or is absent
XVPQDLRPVQIRKIXXXXXXXXXKKATVMVVKSX

SEQ ID NO: 30679 - protein, 38 aa, Artificial Sequence
  Non-cyclic GFR-binding peptide
  MOD_RES (37), (37): Xaa is C or S
  MOD_RES (16), (17), (18), (19), (20): Xaa is A or G
  MOD_RES (21), (22), (23), (24): Xaa is A or G or is absent
RPTQVQLEPLTVLYYXXXXXXXXXEQLSNTLEDHLAXK

SEQ ID NO: 30680 - protein, 35 aa, Artificial Sequence
  Non-cyclic GFR-binding peptide
  MOD_RES (3), (3): Xaa is C or S
LEXVPTEEEPLPMVYYRIKPHQGQHEQLSNFLQHN

SEQ ID NO: 30681 - protein, 43 aa, Artificial Sequence
  Non-cyclic GFR-binding peptide
  MOD_RES (6), (40), (42): Xaa is C or S
  MOD_RES (20), (21), (22), (23), (24): Xaa is A or G
  MOD_RES (25), (26), (27), (28): Xaa is A or G or is absent
DEGLEXVPTEEEPLTMLYYXXXXXXXXXEQLSNFLQHNKXEXR

SEQ ID NO: 30682 - protein, 41 aa, Artificial Sequence
  Non-cyclic GFR-binding peptide
  MOD_RES (5), (6), (40): Xaa is C or S
  MOD_RES (20), (21), (22), (23), (24): Xaa is A or G
  MOD_RES (25), (26), (27), (28): Xaa is A or G or is absent
IPKAXXVPTELRSVKMAKVXXXXXXXXXKEVQVDMVVEGXG

SEQ ID NO: 30683 - protein, 36 aa, Artificial Sequence
  Non-cyclic GFR-binding peptide
  MOD_RES (34), (36): Xaa is C or S
  MOD_RES (14), (15), (16), (17), (18): Xaa is A or G
  MOD_RES (19), (20), (21), (22): Xaa is A or G or is absent
VPTELRSVKMAKVXXXXXXXXXKEVQVDMVVEGXGX

SEQ ID NO: 30684 - protein, 36 aa, Artificial Sequence
  Non-cyclic GFR-binding peptide
  MOD_RES (2), (34), (36): Xaa is C or S
TXAPTKLSNITVQIMDDSSNVIIGEMSNMVVRSXGX

SEQ ID NO: 30685 - protein, 34 aa, Artificial Sequence
  Non-cyclic GFR-binding peptide
  MOD_RES (2), (3), (34): Xaa is C or S
PXXVPQDLRPVQIRKIVGRTPKVKKATVMVVKSX

SEQ ID NO: 30686 - protein, 34 aa, Artificial Sequence
  Non-cyclic GFR-binding peptide
  MOD_RES (33), (33): Xaa is C or S
  MOD_RES (14), (15), (16), (17), (18): Xaa is A or G
  MOD_RES (19), (20), (21), (22): Xaa is A or G or is absent
VPQDLRSVKIAKVXXXXXXXXXKEVQVMVVKSXK

SEQ ID NO: 30687 - protein, 43 aa, Artificial Sequence
  Non-cyclic GFR-binding peptide
  MOD_RES (6), (7), (40), (42): Xaa is C or S
  MOD_RES (21), (22), (23), (24), (25): Xaa is A or G
  MOD_RES (26), (27), (28), (29): Xaa is A or G or is absent
ASASPXXVPQDLSNITIQIMXXXXXXXXXIGEMSMVVKSXKXS

SEQ ID NO: 30688 - protein, 42 aa, Artificial Sequence
  Non-cyclic GFR-binding peptide
  MOD_RES (4), (41): Xaa is C or S
NVQXRPTQVQLEPLTVLYYEIVRKKPIFEQLSNTLEDHLAXK

SEQ ID NO: 30689 - protein, 39 aa, Artificial Sequence
  Non-cyclic GFR-binding peptide
  MOD_RES (6), (7): Xaa is C or S
  MOD_RES (21), (22), (23), (24), (25): Xaa is A or G
  MOD_RES (26), (27), (28), (29): Xaa is A or G or is absent
TVPKPXXAPTQLRSVKVAKVXXXXXXXXXKEVQVNMVVR

SEQ ID NO: 30690 - protein, 37 aa, Artificial Sequence
  Non-cyclic GFR-binding peptide
  MOD_RES (4), (4): Xaa is C or S
  MOD_RES (18), (19), (20), (21), (22): Xaa is A or G
  MOD_RES (23), (24), (25), (26): Xaa is A or G or is absent
GLEXVPTEEEPLPMVYYXXXXXXXXXEQLSNFLQHNK

SEQ ID NO: 30691 - protein, 39 aa, Artificial Sequence
  Non-cyclic GFR-binding peptide
  MOD_RES (4), (5), (38): Xaa is C or S
  MOD_RES (19), (20), (21), (22), (23): Xaa is A or G
  MOD_RES (24), (25), (26), (27): Xaa is A or G or is absent
ASPXXVPQDLRSVKIAKVXXXXXXXXXKEVQVMVVKSXK

SEQ ID NO: 30692 - protein, 37 aa, Artificial Sequence
  Non-cyclic GFR-binding peptide
  MOD_RES (4), (5): Xaa is C or S
  MOD_RES (19), (20), (21), (22), (23): Xaa is A or G
  MOD_RES (24), (25), (26), (27): Xaa is A or G or is absent
ASPXXVSQDLSNITIQIMXXXXXXXXXIGEMSMIVKS

SEQ ID NO: 30693 - protein, 31 aa, Artificial Sequence
  Non-cyclic GFR-binding peptide
APTKLSNITVQIMDDSSNVIIGEMSNMVVRS

SEQ ID NO: 30694 - protein, 40 aa, Artificial Sequence
  Non-cyclic GFR-binding peptide
  MOD_RES (2), (3), (37), (39): Xaa is C or S
  MOD_RES (17), (18), (19), (20), (21): Xaa is A or G
  MOD_RES (22), (23), (24), (25): Xaa is A or G or is absent
AXXVPTELSNITMQIMXXXXXXXXXIGEMSDMVVEGXGXR

SEQ ID NO: 30695 - protein, 37 aa, Artificial Sequence
  Non-cyclic GFR-binding peptide
  MOD_RES (1), (2), (35), (37): Xaa is C or S
  MOD_RES (16), (17), (18), (19), (20): Xaa is A or G
  MOD_RES (21), (22), (23), (24): Xaa is A or G or is absent
XXVPQALSNITIQIMXXXXXXXXXIGEMSMIVRSXKX

SEQ ID NO: 30696 - protein, 38 aa, Artificial Sequence
  Non-cyclic GFR-binding peptide
  MOD_RES (2), (36), (38): Xaa is C or S
  MOD_RES (16), (17), (18), (19), (20): Xaa is A or G
  MOD_RES (21), (22), (23), (24): Xaa is A or G or is absent
TXAPTKLSNITVQIMXXXXXXXXXIGEMSNMVVRSXGX

SEQ ID NO: 30697 - protein, 38 aa, Artificial Sequence
  Non-cyclic GFR-binding peptide
  MOD_RES (5), (6): Xaa is C or S
  MOD_RES (20), (21), (22), (23), (24): Xaa is A or G
  MOD_RES (25), (26), (27), (28): Xaa is A or G or is absent
SAAPXXVPQALSNITIQIMXXXXXXXXXIGEMSMIVRS

SEQ ID NO: 30698 - protein, 41 aa, Artificial Sequence
  Non-cyclic GFR-binding peptide
  MOD_RES (6), (38), (40): Xaa is C or S
VTKPTXAPTKLRPVQVRKIDDSSNVIKKATVNMVVRSXGXH

SEQ ID NO: 30699 - protein, 37 aa, Artificial Sequence
  Non-cyclic GFR-binding peptide
  MOD_RES (3), (4), (36): Xaa is C or S
KPXXAPTKLSNITVQIMDDSSNVIIGEMSNMVVRSXG

SEQ ID NO: 30700 - protein, 35 aa, Artificial Sequence
  Non-cyclic GFR-binding peptide
  MOD_RES (1), (2): Xaa is C or S
  MOD_RES (16), (17), (18), (19), (20): Xaa is A or G
  MOD_RES (21), (22), (23), (24): Xaa is A or G or is absent
XXVPTELSNITMQIMXXXXXXXXXIGEMSDMVVEG

SEQ ID NO: 30701 - protein, 39 aa, Artificial Sequence
  Non-cyclic GFR-binding peptide
  MOD_RES (1), (2), (36), (38): Xaa is C or S
  MOD_RES (16), (17), (18), (19), (20): Xaa is A or G
  MOD_RES (21), (22), (23), (24): Xaa is A or G or is absent
XXVPTELRSVKMAKVXXXXXXXXXKEVQVDMVVEGXGXR

SEQ ID NO: 30702 - protein, 36 aa, Artificial Sequence
  Non-cyclic GFR-binding peptide
  MOD_RES (1), (2), (33), (35): Xaa is C or S
XXVPQDLRSVKIAKVVGRTPKVKEVQVMVVKSXKXS

SEQ ID NO: 30703 - protein, 32 aa, Artificial Sequence
  Non-cyclic GFR-binding peptide
  MOD_RES (1), (2): Xaa is C or S
XXVPTELRSVKMAKVDENEKVVKEVQVDMVVE

SEQ ID NO: 30704 - protein, 38 aa, Artificial Sequence
  Non-cyclic GFR-binding peptide
  MOD_RES (3), (4), (38): Xaa is C or S
  MOD_RES (18), (19), (20), (21), (22): Xaa is A or G
  MOD_RES (23), (24), (25), (26): Xaa is A or G or is absent
KPXXAPTKLSNITVQIMXXXXXXXXXIGEMSNMVVRSX

SEQ ID NO: 30705 - protein, 32 aa, Artificial Sequence
  Non-cyclic GFR-binding peptide
  MOD_RES (31), (31): Xaa is C or S
VSQDLRSVKIAKVIGKTPKIKEVQVMIVKSXK

SEQ ID NO: 30706 - protein, 34 aa, Artificial Sequence
  Non-cyclic GFR-binding peptide
  MOD_RES (2), (3): Xaa is C or S
AXXVPTELRSVKMAKVDENEKVVKEVQVDMVVEG

SEQ ID NO: 30707 - protein, 39 aa, Artificial Sequence
  Non-cyclic GFR-binding peptide
  MOD_RES (3), (4), (36), (38): Xaa is C or S
KAXXVPTELSNITMQIMDENEKVVIGEMSDMVVEGXGXR

SEQ ID NO: 30708 - protein, 35 aa, Artificial Sequence
  Non-cyclic GFR-binding peptide
  MOD_RES (1), (34): Xaa is C or S
  MOD_RES (15), (16), (17), (18), (19): Xaa is A or G
  MOD_RES (20), (21), (22), (23): Xaa is A or G or is absent
XVPQDLRSVKIAKVXXXXXXXXXKEVQVMVVKSXK

SEQ ID NO: 30709 - protein, 39 aa, Artificial Sequence
  Non-cyclic GFR-binding peptide
  MOD_RES (2), (3), (37), (39): Xaa is C or S
  MOD_RES (17), (18), (19), (20), (21): Xaa is A or G
  MOD_RES (22), (23), (24), (25): Xaa is A or G or is absent
PXXAPTQLSNITVQIMXXXXXXXXXIGEMSNMVVRAXGX

SEQ ID NO: 30710 - protein, 40 aa, Artificial Sequence
  Non-cyclic GFR-binding peptide
  MOD_RES (2), (3), (37), (39): Xaa is C or S
  MOD_RES (17), (18), (19), (20), (21): Xaa is A or G
  MOD_RES (22), (23), (24), (25): Xaa is A or G or is absent
PXXAPTQLRSVKVAKVXXXXXXXXXKEVQVNMVVRAXGXH

SEQ ID NO: 30711 - protein, 40 aa, Artificial Sequence
  Non-cyclic GFR-binding peptide
  MOD_RES (2), (39): Xaa is C or S
  MOD_RES (18), (19), (20), (21), (22): Xaa is A or G
  MOD_RES (23), (24), (25), (26): Xaa is A or G or is absent
KXQPSRVHHEPLPVVYYXXXXXXXXXEQLSNRLEEHLEXA

SEQ ID NO: 30712 - protein, 44 aa, Artificial Sequence
  Non-cyclic GFR-binding peptide
  MOD_RES (5), (42), (44): Xaa is C or S
  MOD_RES (21), (22), (23), (24), (25): Xaa is A or G
  MOD_RES (26), (27), (28), (29): Xaa is A or G or is absent
RNVQXRPTQVQLEPLPVVYYXXXXXXXXXEQLSNTLEDHLAXKX

SEQ ID NO: 30713 - protein, 32 aa, Artificial Sequence
  Non-cyclic GFR-binding peptide
  MOD_RES (1), (2): Xaa is C or S
XXVPTELRSVKMAKVDEYDKVVKEVQVEMVVE

SEQ ID NO: 30714 - protein, 37 aa, Artificial Sequence
  Non-cyclic GFR-binding peptide
  MOD_RES (7), (7): Xaa is C or S
HVTKPTXAPTKLSNITVQIMDDSSNVIIGEMSNMVVR

SEQ ID NO: 30715 - protein, 40 aa, Artificial Sequence
  Non-cyclic GFR-binding peptide
  MOD_RES (4), (5), (37), (39): Xaa is C or S
PKAXXVPTELSNITMQIMDENEKVVIGEMSDMVVEGXGXR

SEQ ID NO: 30716 - protein, 35 aa, Artificial Sequence
  Non-cyclic GFR-binding peptide
  MOD_RES (2), (3): Xaa is C or S
  MOD_RES (17), (18), (19), (20), (21): Xaa is A or G
  MOD_RES (22), (23), (24), (25): Xaa is A or G or is absent
AXXVPTELRSVKMAKVXXXXXXXXXKEVQVEMVVE

SEQ ID NO: 30717 - protein, 41 aa, Artificial Sequence
  Non-cyclic GFR-binding peptide
  MOD_RES (5), (6), (40): Xaa is C or S
  MOD_RES (20), (21), (22), (23), (24): Xaa is A or G
  MOD_RES (25), (26), (27), (28): Xaa is A or G or is absent
VPKPXXAPTKLRPVQVRKIXXXXXXXXXKKATVNMVVRSXG

SEQ ID NO: 30718 - protein, 34 aa, Artificial Sequence
  Non-cyclic GFR-binding peptide
  MOD_RES (2), (2): Xaa is C or S
  MOD_RES (16), (17), (18), (19), (20): Xaa is A or G
  MOD_RES (21), (22), (23), (24): Xaa is A or G or is absent
EXVPTEEEPLTMLYYXXXXXXXXXEQLSNFLQHN

SEQ ID NO: 30719 - protein, 34 aa, Artificial Sequence
  Non-cyclic GFR-binding peptide
  MOD_RES (3), (4): Xaa is C or S
APXXVPQALRPVQIRKIVGRKPKVKKATVMIVRS

SEQ ID NO: 30720 - protein, 36 aa, Artificial Sequence
  Non-cyclic GFR-binding peptide
  MOD_RES (3), (4): Xaa is C or S
  MOD_RES (18), (19), (20), (21), (22): Xaa is A or G
  MOD_RES (23), (24), (25), (26): Xaa is A or G or is absent
APXXVPQALRSVKIAKVXXXXXXXXXKEVQVMIVRS

SEQ ID NO: 30721 - protein, 37 aa, Artificial Sequence
  Non-cyclic GFR-binding peptide
  MOD_RES (2), (3), (37): Xaa is C or S
  MOD_RES (17), (18), (19), (20), (21): Xaa is A or G
  MOD_RES (22), (23), (24), (25): Xaa is A or G or is absent
PXXAPTQLSNITVQIMXXXXXXXXXIGEMSNMVVRAX

SEQ ID NO: 30722 - protein, 33 aa, Artificial Sequence
  Non-cyclic GFR-binding peptide
  MOD_RES (2), (3): Xaa is C or S
PXXAPTKLRSVKVAKVDDSSNVIKEVQVNMVVR

SEQ ID NO: 30723 - protein, 36 aa, Artificial Sequence
  Non-cyclic GFR-binding peptide
  MOD_RES (1), (34), (36): Xaa is C or S
  MOD_RES (15), (16), (17), (18), (19): Xaa is A or G
  MOD_RES (20), (21), (22), (23): Xaa is A or G or is absent
XVPQALSNITIQIMXXXXXXXXXIGEMSMIVRSXKX

SEQ ID NO: 30724 - protein, 33 aa, Artificial Sequence
  Non-cyclic GFR-binding peptide
  MOD_RES (14), (15), (16), (17), (18): Xaa is A or G
  MOD_RES (19), (20), (21), (22): Xaa is A or G or is absent
SRVHHEPLTVLYYXXXXXXXXXEQLSNRLEEHL

SEQ ID NO: 30725 - protein, 37 aa, Artificial Sequence
  Non-cyclic GFR-binding peptide
  MOD_RES (6), (7): Xaa is C or S
KIPKAXXVPTELSNITMQIMDENEKVVIGEMSDMVVE

SEQ ID NO: 30726 - protein, 33 aa, Artificial Sequence
  Non-cyclic GFR-binding peptide
  MOD_RES (33), (33): Xaa is C or S
  MOD_RES (14), (15), (16), (17), (18): Xaa is A or G
  MOD_RES (19), (20), (21), (22): Xaa is A or G or is absent
VSQDLRPVQIRKIXXXXXXXXXKKATVMIVKSX

SEQ ID NO: 30727 - protein, 39 aa, Artificial Sequence
  Non-cyclic GFR-binding peptide
  MOD_RES (4), (4): Xaa is C or S
  MOD_RES (20), (21), (22), (23), (24): Xaa is A or G
  MOD_RES (25), (26), (27), (28): Xaa is A or G or is absent
SVKXQPSRVHHEPLPVVYYXXXXXXXXXEQLSNRLEEHL

SEQ ID NO: 30728 - protein, 40 aa, Artificial Sequence
  Non-cyclic GFR-binding peptide
  MOD_RES (5), (6), (38), (40): Xaa is C or S
IPKAXXVPTELRPVQMRKIDENEKVVKKATVDMVVEGXGX

SEQ ID NO: 30729 - protein, 38 aa, Artificial Sequence
  Non-cyclic GFR-binding peptide
  MOD_RES (4), (5), (36), (38): Xaa is C or S
ASPXXVSQDLRPVQIRKIIGKTPKIKKATVMIVKSXKX

SEQ ID NO: 30730 - protein, 36 aa, Artificial Sequence
  Non-cyclic GFR-binding peptide
  MOD_RES (4), (4): Xaa is C or S
  MOD_RES (18), (19), (20), (21), (22): Xaa is A or G
  MOD_RES (23), (24), (25), (26): Xaa is A or G or is absent
KPTXAPTKLRPVQVRKIXXXXXXXXXKKATVNMVVR

SEQ ID NO: 30731 - protein, 39 aa, Artificial Sequence
  Non-cyclic GFR-binding peptide
  MOD_RES (4), (5), (38): Xaa is C or S
  MOD_RES (19), (20), (21), (22), (23): Xaa is A or G
  MOD_RES (24), (25), (26), (27): Xaa is A or G or is absent
ASPXXVPQDLRPVQIRKIXXXXXXXXXKKATVMVVKSXK

SEQ ID NO: 30732 - protein, 38 aa, Artificial Sequence
  Non-cyclic GFR-binding peptide
  MOD_RES (3), (4), (38): Xaa is C or S
  MOD_RES (18), (19), (20), (21), (22): Xaa is A or G
  MOD_RES (23), (24), (25), (26): Xaa is A or G or is absent
KAXXVPTELRSVKMAKVXXXXXXXXXKEVQVEMVVEGX

SEQ ID NO: 30733 - protein, 40 aa, Artificial Sequence
  Non-cyclic GFR-binding peptide
  MOD_RES (4), (5), (39): Xaa is C or S
  MOD_RES (19), (20), (21), (22), (23): Xaa is A or G
  MOD_RES (24), (25), (26), (27): Xaa is A or G or is absent
PKPXXAPTKLRSVKVAKVXXXXXXXXXKEVQVNMVVRSXG

SEQ ID NO: 30734 - protein, 36 aa, Artificial Sequence
  Non-cyclic GFR-binding peptide
  MOD_RES (36), (36): Xaa is C or S
PTQVQLEPLPVVYYEIVRKKPIFEQLSNTLEDHLAX

SEQ ID NO: 30735 - protein, 34 aa, Artificial Sequence
  Non-cyclic GFR-binding peptide
  MOD_RES (1), (2), (33): Xaa is C or S
XXVSQDLRPVQIRKIIGKTPKIKKATVMIVKSXK

SEQ ID NO: 30736 - protein, 39 aa, Artificial Sequence
  Non-cyclic GFR-binding peptide
  MOD_RES (5), (6), (39): Xaa is C or S
  MOD_RES (20), (21), (22), (23), (24): Xaa is A or G
  MOD_RES (25), (26), (27), (28): Xaa is A or G or is absent
SAAPXXVPQALRPVQIRKIXXXXXXXXXKKATVMIVRSX

SEQ ID NO: 30737 - protein, 43 aa, Artificial Sequence
  Non-cyclic GFR-binding peptide
  MOD_RES (3), (40), (42): Xaa is C or S
  MOD_RES (19), (20), (21), (22), (23): Xaa is A or G
  MOD_RES (24), (25), (26), (27): Xaa is A or G or is absent
VQXRPTQVQLEPLTVLYYXXXXXXXXXEQLSNTLEDHLAXKXE

SEQ ID NO: 30738 - protein, 39 aa, Artificial Sequence
  Non-cyclic GFR-binding peptide
  MOD_RES (5), (6), (39): Xaa is C or S
  MOD_RES (20), (21), (22), (23), (24): Xaa is A or G
  MOD_RES (25), (26), (27), (28): Xaa is A or G or is absent
SASPXXVSQDLRSVKIAKVXXXXXXXXXKEVQVMIVKSX

SEQ ID NO: 30739 - protein, 32 aa, Artificial Sequence
  Non-cyclic GFR-binding peptide
  MOD_RES (31), (31): Xaa is C or S
VSQDLRPVQIRKIIGKTPKIKKATVMIVKSXK

SEQ ID NO: 30740 - protein, 35 aa, Artificial Sequence
  Non-cyclic GFR-binding peptide
  MOD_RES (1), (35): Xaa is C or S
  MOD_RES (15), (16), (17), (18), (19): Xaa is A or G
  MOD_RES (20), (21), (22), (23): Xaa is A or G or is absent
XAPTKLRPVQVRKIXXXXXXXXXKKATVNMVVRSX

SEQ ID NO: 30741 - protein, 37 aa, Artificial Sequence
  Non-cyclic GFR-binding peptide
  MOD_RES (2), (3), (35), (37): Xaa is C or S
PXXAPTQLRPVQVRKIDDSSNVIKKATVNMVVRAXGX

SEQ ID NO: 30742 - protein, 35 aa, Artificial Sequence
  Non-cyclic GFR-binding peptide
  MOD_RES (2), (3), (34): Xaa is C or S
PXXVSQDLSNITIQIMIGKTPKIIGEMSMIVKSXK

SEQ ID NO: 30743 - protein, 39 aa, Artificial Sequence
  Non-cyclic GFR-binding peptide
  MOD_RES (5), (39): Xaa is C or S
  MOD_RES (19), (20), (21), (22), (23): Xaa is A or G
  MOD_RES (24), (25), (26), (27): Xaa is A or G or is absent
TKPTXAPTKLRPVQVRKIXXXXXXXXXKKATVNMVVRSX

SEQ ID NO: 30744 - protein, 38 aa, Artificial Sequence
  Non-cyclic GFR-binding peptide
  MOD_RES (3), (4), (37): Xaa is C or S
  MOD_RES (18), (19), (20), (21), (22): Xaa is A or G
  MOD_RES (23), (24), (25), (26): Xaa is A or G or is absent
SPXXVSQDLSNITIQIMXXXXXXXXXIGEMSMIVKSXK

SEQ ID NO: 30745 - protein, 38 aa, Artificial Sequence
  Non-cyclic GFR-binding peptide
  MOD_RES (3), (4), (38): Xaa is C or S
  MOD_RES (18), (19), (20), (21), (22): Xaa is A or G
  MOD_RES (23), (24), (25), (26): Xaa is A or G or is absent
KPXXAPTQLRPVQVRKIXXXXXXXXXKKATVNMVVRAX

SEQ ID NO: 30746 - protein, 42 aa, Artificial Sequence
  Non-cyclic GFR-binding peptide
  MOD_RES (6), (7), (40), (42): Xaa is C or S
  MOD_RES (21), (22), (23), (24), (25): Xaa is A or G
  MOD_RES (26), (27), (28), (29): Xaa is A or G or is absent
ASASPXXVPQDLSNITIQIMXXXXXXXXXIGEMSMVVKSXKX

SEQ ID NO: 30747 - protein, 34 aa, Artificial Sequence
  Non-cyclic GFR-binding peptide
  MOD_RES (1), (2): Xaa is C or S
  MOD_RES (16), (17), (18), (19), (20): Xaa is A or G
  MOD_RES (21), (22), (23), (24): Xaa is A or G or is absent
XXVSQDLSNITIQIMXXXXXXXXXIGEMSMIVKS

SEQ ID NO: 30748 - protein, 39 aa, Artificial Sequence
  Non-cyclic GFR-binding peptide
  MOD_RES (2), (3), (37), (39): Xaa is C or S
  MOD_RES (17), (18), (19), (20), (21): Xaa is A or G
  MOD_RES (22), (23), (24), (25): Xaa is A or G or is absent
AXXVPTELRSVKMAKVXXXXXXXXXKEVQVEMVVEGXGX

SEQ ID NO: 30749 - protein, 32 aa, Artificial Sequence
  Non-cyclic GFR-binding peptide
  MOD_RES (2), (2): Xaa is C or S
TXAPTKLRPVQVRKIDDSSNVIKKATVNMVVR

SEQ ID NO: 30750 - protein, 34 aa, Artificial Sequence
  Non-cyclic GFR-binding peptide
  MOD_RES (32), (34): Xaa is C or S
VPTELSNITMQIMDEYDKVVIGEMSEMVVEGXGX

SEQ ID NO: 30751 - protein, 38 aa, Artificial Sequence
  Non-cyclic GFR-binding peptide
  MOD_RES (5), (6): Xaa is C or S
  MOD_RES (20), (21), (22), (23), (24): Xaa is A or G
  MOD_RES (25), (26), (27), (28): Xaa is A or G or is absent
VPKPXXAPTKLSNITVQIMXXXXXXXXXIGEMSNMVVR

SEQ ID NO: 30752 - protein, 37 aa, Artificial Sequence
  Non-cyclic GFR-binding peptide
  MOD_RES (1), (1): Xaa is C or S
  MOD_RES (17), (18), (19), (20), (21): Xaa is A or G
  MOD_RES (22), (23), (24), (25): Xaa is A or G or is absent
XQPSRVHHEPLTVLYYXXXXXXXXXEQLSNRLEEHLE

SEQ ID NO: 30753 - protein, 42 aa, Artificial Sequence
  Non-cyclic GFR-binding peptide
  MOD_RES (6), (40), (42): Xaa is C or S
  MOD_RES (20), (21), (22), (23), (24): Xaa is A or G
  MOD_RES (25), (26), (27), (28): Xaa is A or G or is absent
DEGLEXVPTEEEPLTMLYYXXXXXXXXXEQLSNFLQHNKXEX

SEQ ID NO: 30754 - protein, 38 aa, Artificial Sequence
  Non-cyclic GFR-binding peptide
  MOD_RES (6), (6): Xaa is C or S
  MOD_RES (20), (21), (22), (23), (24): Xaa is A or G
  MOD_RES (25), (26), (27), (28): Xaa is A or G or is absent
DEGLEXVPTEEEPLTMLYYXXXXXXXXXEQLSNFLQHN

SEQ ID NO: 30755 - protein, 40 aa, Artificial Sequence
  Non-cyclic GFR-binding peptide
  MOD_RES (4), (5), (37), (39): Xaa is C or S
PKPXXAPTQLRPVQVRKIDDSSNVIKKATVNMVVRAXGXH

SEQ ID NO: 30756 - protein, 37 aa, Artificial Sequence
  Non-cyclic GFR-binding peptide
  MOD_RES (2), (3), (37): Xaa is C or S
  MOD_RES (17), (18), (19), (20), (21): Xaa is A or G
  MOD_RES (22), (23), (24), (25): Xaa is A or G or is absent
AXXVPTELRSVKMAKVXXXXXXXXXKEVQVDMVVEGX

SEQ ID NO: 30757 - protein, 38 aa, Artificial Sequence
  Non-cyclic GFR-binding peptide
  MOD_RES (4), (5), (36), (38): Xaa is C or S
ASPXXVSQDLRSVKIAKVIGKTPKIKEVQVMIVKSXKX

SEQ ID NO: 30758 - protein, 38 aa, Artificial Sequence
  Non-cyclic GFR-binding peptide
  MOD_RES (1), (2), (36), (38): Xaa is C or S
  MOD_RES (16), (17), (18), (19), (20): Xaa is A or G
  MOD_RES (21), (22), (23), (24): Xaa is A or G or is absent
XXAPTQLRPVQVRKIXXXXXXXXXKKATVNMVVRAXGX

SEQ ID NO: 30759 - protein, 39 aa, Artificial Sequence
  Non-cyclic GFR-binding peptide
  MOD_RES (5), (6), (38): Xaa is C or S
VPKPXXAPTQLRPVQVRKIDDSSNVIKKATVNMVVRAXG

SEQ ID NO: 30760 - protein, 43 aa, Artificial Sequence
  Non-cyclic GFR-binding peptide
  MOD_RES (5), (6), (40), (42): Xaa is C or S
  MOD_RES (20), (21), (22), (23), (24): Xaa is A or G
  MOD_RES (25), (26), (27), (28): Xaa is A or G or is absent
IPKAXXVPTELRPVQMRKIXXXXXXXXXKKATVEMVVEGXGXR

SEQ ID NO: 30761 - protein, 36 aa, Artificial Sequence
  Non-cyclic GFR-binding peptide
  MOD_RES (4), (5): Xaa is C or S
PKAXXVPTELSNITMQIMDENEKVVIGEMSDMVVEG

SEQ ID NO: 30762 - protein, 36 aa, Artificial Sequence
  Non-cyclic GFR-binding peptide
  MOD_RES (1), (34), (36): Xaa is C or S
  MOD_RES (15), (16), (17), (18), (19): Xaa is A or G
  MOD_RES (20), (21), (22), (23): Xaa is A or G or is absent
XVPQDLRPVQIRKIXXXXXXXXXKKATVMVVKSXKX

SEQ ID NO: 30763 - protein, 37 aa, Artificial Sequence
  Non-cyclic GFR-binding peptide
  MOD_RES (4), (5), (36): Xaa is C or S
ASPXXVSQDLRPVQIRKIIGKTPKIKKATVMIVKSXK

SEQ ID NO: 30764 - protein, 38 aa, Artificial Sequence
  Non-cyclic GFR-binding peptide
  MOD_RES (4), (4): Xaa is C or S
NVQXRPTQVQLEPLTVLYYEIVRKKPIFEQLSNTLEDH

SEQ ID NO: 30765 - protein, 36 aa, Artificial Sequence
  Non-cyclic GFR-binding peptide
  MOD_RES (35), (35): Xaa is C or S
  MOD_RES (14), (15), (16), (17), (18): Xaa is A or G
  MOD_RES (19), (20), (21), (22): Xaa is A or G or is absent
SRVHHEPLTVLYYXXXXXXXXXEQLSNRLEEHLEXA

SEQ ID NO: 30766 - protein, 44 aa, Artificial Sequence
  Non-cyclic GFR-binding peptide
  MOD_RES (6), (7), (41), (43): Xaa is C or S
  MOD_RES (21), (22), (23), (24), (25): Xaa is A or G
  MOD_RES (26), (27), (28), (29): Xaa is A or G or is absent
TVPKPXXAPTQLRPVQVRKIXXXXXXXXXKKATVNMVVRAXGXH

SEQ ID NO: 30767 - protein, 35 aa, Artificial Sequence
  Non-cyclic GFR-binding peptide
  MOD_RES (4), (5): Xaa is C or S
ASPXXVPQDLRPVQIRKIVGRTPKVKKATVMVVKS

SEQ ID NO: 30768 - protein, 39 aa, Artificial Sequence
  Non-cyclic GFR-binding peptide
  MOD_RES (3), (4), (36), (38): Xaa is C or S
KAXXVPTELRSVKMAKVDEYDKVVKEVQVEMVVEGXGXR

SEQ ID NO: 30769 - protein, 39 aa, Artificial Sequence
  Non-cyclic GFR-binding peptide
  MOD_RES (1), (38): Xaa is C or S
XQPSRVHHEPLTVLYYEYVRKKPKLEQLSNRLEEHLEXA

SEQ ID NO: 30770 - protein, 42 aa, Artificial Sequence
  Non-cyclic GFR-binding peptide
  MOD_RES (4), (5), (39), (41): Xaa is C or S
  MOD_RES (19), (20), (21), (22), (23): Xaa is A or G
  MOD_RES (24), (25), (26), (27): Xaa is A or G or is absent
PKPXXAPTKLRSVKVAKVXXXXXXXXXKEVQVNMVVRSXGXH

SEQ ID NO: 30771 - protein, 41 aa, Artificial Sequence
  Non-cyclic GFR-binding peptide
  MOD_RES (7), (41): Xaa is C or S
NDEGLEXVPTEEEPLPMVYYRIKPHQGQHEQLSNFLQHNKX

SEQ ID NO: 30772 - protein, 33 aa, Artificial Sequence
  Non-cyclic GFR-binding peptide
  MOD_RES (14), (15), (16), (17), (18): Xaa is A or G
  MOD_RES (19), (20), (21), (22): Xaa is A or G or is absent
TQVQLEPLTVLYYXXXXXXXXXEQLSNTLEDHL

SEQ ID NO: 30773 - protein, 45 aa, Artificial Sequence
  Non-cyclic GFR-binding peptide
  MOD_RES (5), (42), (44): Xaa is C or S
SSVKXQPSRVHHEPLPVVYYEYVRKKPKLEQLSNRLEEHLEXAXA

SEQ ID NO: 30774 - protein, 37 aa, Artificial Sequence
  Non-cyclic GFR-binding peptide
  MOD_RES (34), (36): Xaa is C or S
  MOD_RES (14), (15), (16), (17), (18): Xaa is A or G
  MOD_RES (19), (20), (21), (22): Xaa is A or G or is absent
APTKLSNITVQIMXXXXXXXXXIGEMSNMVVRSXGXH

SEQ ID NO: 30775 - protein, 40 aa, Artificial Sequence
  Non-cyclic GFR-binding peptide
  MOD_RES (2), (3), (37), (39): Xaa is C or S
  MOD_RES (17), (18), (19), (20), (21): Xaa is A or G
  MOD_RES (22), (23), (24), (25): Xaa is A or G or is absent
AXXVPTELRPVQMRKIXXXXXXXXXKKATVEMVVEGXGXR

SEQ ID NO: 30776 - protein, 38 aa, Artificial Sequence
  Non-cyclic GFR-binding peptide
  MOD_RES (6), (7), (38): Xaa is C or S
ASASPXXVPQDLSNITIQIMVGRTPKVIGEMSMVVKSX

SEQ ID NO: 30777 - protein, 32 aa, Artificial Sequence
  Non-cyclic GFR-binding peptide
  MOD_RES (1), (1): Xaa is C or S
XVPTELSNITMQIMDEYDKVVIGEMSEMVVEG

SEQ ID NO: 30778 - protein, 35 aa, Artificial Sequence
  Non-cyclic GFR-binding peptide
  MOD_RES (34), (34): Xaa is C or S
  MOD_RES (14), (15), (16), (17), (18): Xaa is A or G
  MOD_RES (19), (20), (21), (22): Xaa is A or G or is absent
VPTELRPVQMRKIXXXXXXXXXKKATVEMVVEGXG

SEQ ID NO: 30779 - protein, 37 aa, Artificial Sequence
  Non-cyclic GFR-binding peptide
  MOD_RES (1), (1): Xaa is C or S
  MOD_RES (17), (18), (19), (20), (21): Xaa is A or G
  MOD_RES (22), (23), (24), (25): Xaa is A or G or is absent
XRPTQVQLEPLTVLYYXXXXXXXXXEQLSNTLEDHLA

SEQ ID NO: 30780 - protein, 37 aa, Artificial Sequence
  Non-cyclic GFR-binding peptide
  MOD_RES (3), (4), (35), (37): Xaa is C or S
SPXXVSQDLRPVQIRKIIGKTPKIKKATVMIVKSXKX

SEQ ID NO: 30781 - protein, 37 aa, Artificial Sequence
  Non-cyclic GFR-binding peptide
  MOD_RES (5), (37): Xaa is C or S
TKPTXAPTKLRSVKVAKVDDSSNVIKEVQVNMVVRSX

SEQ ID NO: 30782 - protein, 41 aa, Artificial Sequence
  Non-cyclic GFR-binding peptide
  MOD_RES (3), (4), (38), (40): Xaa is C or S
  MOD_RES (18), (19), (20), (21), (22): Xaa is A or G
  MOD_RES (23), (24), (25), (26): Xaa is A or G or is absent
KAXXVPTELSNITMQIMXXXXXXXXXIGEMSDMVVEGXGXR

SEQ ID NO: 30783 - protein, 34 aa, Artificial Sequence
  Non-cyclic GFR-binding peptide
  MOD_RES (33), (33): Xaa is C or S
  MOD_RES (14), (15), (16), (17), (18): Xaa is A or G
  MOD_RES (19), (20), (21), (22): Xaa is A or G or is absent
VPQALRPVQIRKIXXXXXXXXXKKATVMIVRSXK

SEQ ID NO: 30784 - protein, 30 aa, Artificial Sequence
  Non-cyclic GFR-binding peptide
APTKLSNITVQIMDDSSNVIIGEMSNMVVR

SEQ ID NO: 30785 - protein, 42 aa, Artificial Sequence
  Non-cyclic GFR-binding peptide
  MOD_RES (5), (39), (41): Xaa is C or S
  MOD_RES (19), (20), (21), (22), (23): Xaa is A or G
  MOD_RES (24), (25), (26), (27): Xaa is A or G or is absent
TKPTXAPTKLRPVQVRKIXXXXXXXXXKKATVNMVVRSXGXH

SEQ ID NO: 30786 - protein, 36 aa, Artificial Sequence
  Non-cyclic GFR-binding peptide
  MOD_RES (5), (6): Xaa is C or S
VPKPXXAPTKLRSVKVAKVDDSSNVIKEVQVNMVVR

SEQ ID NO: 30787 - protein, 38 aa, Artificial Sequence
  Non-cyclic GFR-binding peptide
  MOD_RES (4), (5), (36), (38): Xaa is C or S
ASPXXVPQDLRPVQIRKIVGRTPKVKKATVMVVKSXKX

SEQ ID NO: 30788 - protein, 35 aa, Artificial Sequence
  Non-cyclic GFR-binding peptide
  MOD_RES (1), (2), (35): Xaa is C or S
  MOD_RES (16), (17), (18), (19), (20): Xaa is A or G
  MOD_RES (21), (22), (23), (24): Xaa is A or G or is absent
XXVPQALSNITIQIMXXXXXXXXXIGEMSMIVRSX

SEQ ID NO: 30789 - protein, 42 aa, Artificial Sequence
  Non-cyclic GFR-binding peptide
  MOD_RES (3), (40), (42): Xaa is C or S
VKXQPSRVHHEPLPVVYYEYVRKKPKLEQLSNRLEEHLEXAX

SEQ ID NO: 30790 - protein, 41 aa, Artificial Sequence
  Non-cyclic GFR-binding peptide
  MOD_RES (6), (7), (39), (41): Xaa is C or S
KIPKAXXVPTELRPVQMRKIDENEKVVKKATVDMVVEGXGX

SEQ ID NO: 30791 - protein, 34 aa, Artificial Sequence
  Non-cyclic GFR-binding peptide
  MOD_RES (1), (1): Xaa is C or S
  MOD_RES (15), (16), (17), (18), (19): Xaa is A or G
  MOD_RES (20), (21), (22), (23): Xaa is A or G or is absent
XVPTELRSVKMAKVXXXXXXXXXKEVQVEMVVEG

SEQ ID NO: 30792 - protein, 39 aa, Artificial Sequence
  Non-cyclic GFR-binding peptide
  MOD_RES (36), (38): Xaa is C or S
  MOD_RES (15), (16), (17), (18), (19): Xaa is A or G
  MOD_RES (20), (21), (22), (23): Xaa is A or G or is absent
PSRVHHEPLPVVYYXXXXXXXXXEQLSNRLEEHLEXAXA

SEQ ID NO: 30793 - protein, 44 aa, Artificial Sequence
  Non-cyclic GFR-binding peptide
  MOD_RES (6), (7), (41), (43): Xaa is C or S
  MOD_RES (21), (22), (23), (24), (25): Xaa is A or G
  MOD_RES (26), (27), (28), (29): Xaa is A or G or is absent
SIPKAXXVPTELRPVQMRKIXXXXXXXXXKKATVEMVVEGXGXR

SEQ ID NO: 30794 - protein, 32 aa, Artificial Sequence
  Non-cyclic GFR-binding peptide
  MOD_RES (31), (31): Xaa is C or S
VSQDLSNITIQIMIGKTPKIIGEMSMIVKSXK

SEQ ID NO: 30795 - protein, 40 aa, Artificial Sequence
  Non-cyclic GFR-binding peptide
  MOD_RES (5), (6), (39): Xaa is C or S
  MOD_RES (20), (21), (22), (23), (24): Xaa is A or G
  MOD_RES (25), (26), (27), (28): Xaa is A or G or is absent
SASPXXVSQDLSNITIQIMXXXXXXXXXIGEMSMIVKSXK

SEQ ID NO: 30796 - protein, 36 aa, Artificial Sequence
  Non-cyclic GFR-binding peptide
  MOD_RES (34), (36): Xaa is C or S
  MOD_RES (14), (15), (16), (17), (18): Xaa is A or G
  MOD_RES (19), (20), (21), (22): Xaa is A or G or is absent
APTQLSNITVQIMXXXXXXXXXIGEMSNMVVRAXGX

SEQ ID NO: 30797 - protein, 37 aa, Artificial Sequence
  Non-cyclic GFR-binding peptide
  MOD_RES (3), (37): Xaa is C or S
LEXVPTEEEPLPMVYYRIKPHQGQHEQLSNFLQHNKX

SEQ ID NO: 30798 - protein, 37 aa, Artificial Sequence
  Non-cyclic GFR-binding peptide
  MOD_RES (2), (3), (34), (36): Xaa is C or S
PXXVSQDLRPVQIRKIIGKTPKIKKATVMIVKSXKXS

SEQ ID NO: 30799 - protein, 35 aa, Artificial Sequence
  Non-cyclic GFR-binding peptide
  MOD_RES (1), (34): Xaa is C or S
  MOD_RES (15), (16), (17), (18), (19): Xaa is A or G
  MOD_RES (20), (21), (22), (23): Xaa is A or G or is absent
XVSQDLRPVQIRKIXXXXXXXXXKKATVMIVKSXK

SEQ ID NO: 30800 - protein, 36 aa, Artificial Sequence
  Non-cyclic GFR-binding peptide
  MOD_RES (5), (6): Xaa is C or S
VPKPXXAPTKLSNITVQIMDDSSNVIIGEMSNMVVR

SEQ ID NO: 30801 - protein, 34 aa, Artificial Sequence
  Non-cyclic GFR-binding peptide
  MOD_RES (1), (33): Xaa is C or S
XVPTELRSVKMAKVDENEKVVKEVQVDMVVEGXG

SEQ ID NO: 30802 - protein, 38 aa, Artificial Sequence
  Non-cyclic GFR-binding peptide
  MOD_RES (2), (3), (37): Xaa is C or S
  MOD_RES (17), (18), (19), (20), (21): Xaa is A or G
  MOD_RES (22), (23), (24), (25): Xaa is A or G or is absent
AXXVPTELSNITMQIMXXXXXXXXXIGEMSEMVVEGXG

SEQ ID NO: 30803 - protein, 39 aa, Artificial Sequence
  Non-cyclic GFR-binding peptide
  MOD_RES (5), (37), (39): Xaa is C or S
TKPTXAPTKLSNITVQIMDDSSNVIIGEMSNMVVRSXGX

SEQ ID NO: 30804 - protein, 37 aa, Artificial Sequence
  Non-cyclic GFR-binding peptide
  MOD_RES (4), (5), (37): Xaa is C or S
PKPXXAPTQLRPVQVRKIDDSSNVIKKATVNMVVRAX

SEQ ID NO: 30805 - protein, 40 aa, Artificial Sequence
  Non-cyclic GFR-binding peptide
  MOD_RES (2), (3), (37), (39): Xaa is C or S
  MOD_RES (17), (18), (19), (20), (21): Xaa is A or G
  MOD_RES (22), (23), (24), (25): Xaa is A or G or is absent
AXXVPTELRSVKMAKVXXXXXXXXXKEVQVDMVVEGXGXR

SEQ ID NO: 30806 - protein, 37 aa, Artificial Sequence
  Non-cyclic GFR-binding peptide
  MOD_RES (5), (6), (37): Xaa is C or S
SASPXXVSQDLSNITIQIMIGKTPKIIGEMSMIVKSX

SEQ ID NO: 30807 - protein, 40 aa, Artificial Sequence
  Non-cyclic GFR-binding peptide
  MOD_RES (4), (4): Xaa is C or S
SVKXQPSRVHHEPLTVLYYEYVRKKPKLEQLSNRLEEHLE

SEQ ID NO: 30808 - protein, 34 aa, Artificial Sequence
  Non-cyclic GFR-binding peptide
  MOD_RES (15), (16), (17), (18), (19): Xaa is A or G
  MOD_RES (20), (21), (22), (23): Xaa is A or G or is absent
PTQVQLEPLPVVYYXXXXXXXXXEQLSNTLEDHL

SEQ ID NO: 30809 - protein, 41 aa, Artificial Sequence
  Non-cyclic GFR-binding peptide
  MOD_RES (6), (7), (41): Xaa is C or S
  MOD_RES (21), (22), (23), (24), (25): Xaa is A or G
  MOD_RES (26), (27), (28), (29): Xaa is A or G or is absent
TVPKPXXAPTQLSNITVQIMXXXXXXXXXIGEMSNMVVRAX

SEQ ID NO: 30810 - protein, 34 aa, Artificial Sequence
  Non-cyclic GFR-binding peptide
  MOD_RES (31), (33): Xaa is C or S
VSQDLRSVKIAKVIGKTPKIKEVQVMIVKSXKXS

SEQ ID NO: 30811 - protein, 30 aa, Artificial Sequence
  Non-cyclic GFR-binding peptide
VPQDLSNITIQIMVGRTPKVIGEMSMVVKS

SEQ ID NO: 30812 - protein, 40 aa, Artificial Sequence
  Non-cyclic GFR-binding peptide
  MOD_RES (3), (37), (39): Xaa is C or S
  MOD_RES (17), (18), (19), (20), (21): Xaa is A or G
  MOD_RES (22), (23), (24), (25): Xaa is A or G or is absent
LEXVPTEEEPLTMLYYXXXXXXXXXEQLSNFLQHNKXEXR

SEQ ID NO: 30813 - protein, 41 aa, Artificial Sequence
  Non-cyclic GFR-binding peptide
  MOD_RES (4), (41): Xaa is C or S
NVQXRPTQVQLEPLPVVYYEIVRKKPIFEQLSNTLEDHLAX

SEQ ID NO: 30814 - protein, 36 aa, Artificial Sequence
  Non-cyclic GFR-binding peptide
  MOD_RES (1), (35): Xaa is C or S
  MOD_RES (15), (16), (17), (18), (19): Xaa is A or G
  MOD_RES (20), (21), (22), (23): Xaa is A or G or is absent
XVPTELRPVQMRKIXXXXXXXXXKKATVDMVVEGXG

SEQ ID NO: 30815 - protein, 34 aa, Artificial Sequence
  Non-cyclic GFR-binding peptide
  MOD_RES (1), (1): Xaa is C or S
  MOD_RES (15), (16), (17), (18), (19): Xaa is A or G
  MOD_RES (20), (21), (22), (23): Xaa is A or G or is absent
XVPTELSNITMQIMXXXXXXXXXIGEMSDMVVEG

SEQ ID NO: 30816 - protein, 41 aa, Artificial Sequence
  Non-cyclic GFR-binding peptide
  MOD_RES (6), (7), (39), (41): Xaa is C or S
SIPKAXXVPTELRSVKMAKVDEYDKVVKEVQVEMVVEGXGX

SEQ ID NO: 30817 - protein, 36 aa, Artificial Sequence
  Non-cyclic GFR-binding peptide
  MOD_RES (34), (36): Xaa is C or S
  MOD_RES (14), (15), (16), (17), (18): Xaa is A or G
  MOD_RES (19), (20), (21), (22): Xaa is A or G or is absent
VPTELRPVQMRKIXXXXXXXXXKKATVDMVVEGXGX

SEQ ID NO: 30818 - protein, 35 aa, Artificial Sequence
  Non-cyclic GFR-binding peptide
  MOD_RES (1), (2), (35): Xaa is C or S
  MOD_RES (16), (17), (18), (19), (20): Xaa is A or G
  MOD_RES (21), (22), (23), (24): Xaa is A or G or is absent
XXVPQALRSVKIAKVXXXXXXXXXKEVQVMIVRSX

SEQ ID NO: 30819 - protein, 41 aa, Artificial Sequence
  Non-cyclic GFR-binding peptide
  MOD_RES (1), (38), (40): Xaa is C or S
  MOD_RES (17), (18), (19), (20), (21): Xaa is A or G
  MOD_RES (22), (23), (24), (25): Xaa is A or G or is absent
XRPTQVQLEPLTVLYYXXXXXXXXXEQLSNTLEDHLAXKXE

SEQ ID NO: 30820 - protein, 41 aa, Artificial Sequence
  Non-cyclic GFR-binding peptide
  MOD_RES (1), (38), (40): Xaa is C or S
XRPTQVQLEPLPVVYYEIVRKKPIFEQLSNTLEDHLAXKXE

SEQ ID NO: 30821 - protein, 38 aa, Artificial Sequence
  Non-cyclic GFR-binding peptide
  MOD_RES (5), (6), (37): Xaa is C or S
SASPXXVPQDLSNITIQIMVGRTPKVIGEMSMVVKSXK

SEQ ID NO: 30822 - protein, 35 aa, Artificial Sequence
  Non-cyclic GFR-binding peptide
  MOD_RES (3), (4): Xaa is C or S
KAXXVPTELRPVQMRKIDEYDKVVKKATVEMVVEG

SEQ ID NO: 30823 - protein, 36 aa, Artificial Sequence
  Non-cyclic GFR-binding peptide
  MOD_RES (3), (4), (36): Xaa is C or S
KPXXAPTQLRPVQVRKIDDSSNVIKKATVNMVVRAX

SEQ ID NO: 30824 - protein, 37 aa, Artificial Sequence
  Non-cyclic GFR-binding peptide
  MOD_RES (4), (5), (37): Xaa is C or S
PKAXXVPTELRSVKMAKVDENEKVVKEVQVDMVVEGX

SEQ ID NO: 30825 - protein, 37 aa, Artificial Sequence
  Non-cyclic GFR-binding peptide
  MOD_RES (2), (3), (35), (37): Xaa is C or S
PXXAPTQLRSVKVAKVDDSSNVIKEVQVNMVVRAXGX

SEQ ID NO: 30826 - protein, 37 aa, Artificial Sequence
  Non-cyclic GFR-binding peptide
  MOD_RES (2), (3), (36): Xaa is C or S
  MOD_RES (17), (18), (19), (20), (21): Xaa is A or G
  MOD_RES (22), (23), (24), (25): Xaa is A or G or is absent
PXXVPQDLRPVQIRKIXXXXXXXXXKKATVMVVKSXK

SEQ ID NO: 30827 - protein, 36 aa, Artificial Sequence
  Non-cyclic GFR-binding peptide
  MOD_RES (2), (36): Xaa is C or S
  MOD_RES (16), (17), (18), (19), (20): Xaa is A or G
  MOD_RES (21), (22), (23), (24): Xaa is A or G or is absent
EXVPTEEEPLTMLYYXXXXXXXXXEQLSNFLQHNKX

SEQ ID NO: 30828 - protein, 33 aa, Artificial Sequence
  Non-cyclic GFR-binding peptide
  MOD_RES (33), (33): Xaa is C or S
  MOD_RES (14), (15), (16), (17), (18): Xaa is A or G
  MOD_RES (19), (20), (21), (22): Xaa is A or G or is absent
VPQDLRPVQIRKIXXXXXXXXXKKATVMVVKSX

SEQ ID NO: 30829 - protein, 36 aa, Artificial Sequence
  Non-cyclic GFR-binding peptide
  MOD_RES (1), (35): Xaa is C or S
  MOD_RES (15), (16), (17), (18), (19): Xaa is A or G
  MOD_RES (20), (21), (22), (23): Xaa is A or G or is absent
XVPTEEEPLTMLYYXXXXXXXXXEQLSNFLQHNKXE

SEQ ID NO: 30830 - protein, 40 aa, Artificial Sequence
  Non-cyclic GFR-binding peptide
  MOD_RES (5), (6), (38), (40): Xaa is C or S
IPKAXXVPTELRPVQMRKIDEYDKVVKKATVEMVVEGXGX

SEQ ID NO: 30831 - protein, 33 aa, Artificial Sequence
  Non-cyclic GFR-binding peptide
  MOD_RES (32), (32): Xaa is C or S
VPTELRPVQMRKIDENEKVVKKATVDMVVEGXG

SEQ ID NO: 30832 - protein, 34 aa, Artificial Sequence
  Non-cyclic GFR-binding peptide
  MOD_RES (15), (16), (17), (18), (19): Xaa is A or G
  MOD_RES (20), (21), (22), (23): Xaa is A or G or is absent
PSRVHHEPLPVVYYXXXXXXXXXEQLSNRLEEHL

SEQ ID NO: 30833 - protein, 40 aa, Artificial Sequence
  Non-cyclic GFR-binding peptide
  MOD_RES (6), (40): Xaa is C or S
  MOD_RES (20), (21), (22), (23), (24): Xaa is A or G
  MOD_RES (25), (26), (27), (28): Xaa is A or G or is absent
DEGLEXVPTEEEPLPMVYYXXXXXXXXXEQLSNFLQHNKX

SEQ ID NO: 30834 - protein, 39 aa, Artificial Sequence
  Non-cyclic GFR-binding peptide
  MOD_RES (2), (39): Xaa is C or S
  MOD_RES (18), (19), (20), (21), (22): Xaa is A or G
  MOD_RES (23), (24), (25), (26): Xaa is A or G or is absent
KXQPSRVHHEPLTVLYYXXXXXXXXXEQLSNRLEEHLEX

SEQ ID NO: 30835 - protein, 32 aa, Artificial Sequence
  Non-cyclic GFR-binding peptide
  MOD_RES (1), (1): Xaa is C or S
XAPTQLSNITVQIMDDSSNVIIGEMSNMVVRA

SEQ ID NO: 30836 - protein, 34 aa, Artificial Sequence
  Non-cyclic GFR-binding peptide
QPSRVHHEPLPVVYYEYVRKKPKLEQLSNRLEEH

SEQ ID NO: 30837 - protein, 38 aa, Artificial Sequence
  Non-cyclic GFR-binding peptide
  MOD_RES (6), (7), (38): Xaa is C or S
ASASPXXVSQDLSNITIQIMIGKTPKIIGEMSMIVKSX

SEQ ID NO: 30838 - protein, 31 aa, Artificial Sequence
  Non-cyclic GFR-binding peptide
  MOD_RES (1), (1): Xaa is C or S
XVPTELSNITMQIMDEYDKVVIGEMSEMVVE

SEQ ID NO: 30839 - protein, 38 aa, Artificial Sequence
  Non-cyclic GFR-binding peptide
  MOD_RES (3), (4), (37): Xaa is C or S
  MOD_RES (18), (19), (20), (21), (22): Xaa is A or G
  MOD_RES (23), (24), (25), (26): Xaa is A or G or is absent
SPXXVPQDLRSVKIAKVXXXXXXXXXKEVQVMVVKSXK

SEQ ID NO: 30840 - protein, 35 aa, Artificial Sequence
  Non-cyclic GFR-binding peptide
  MOD_RES (1), (2), (35): Xaa is C or S
  MOD_RES (16), (17), (18), (19), (20): Xaa is A or G
  MOD_RES (21), (22), (23), (24): Xaa is A or G or is absent
XXVPQDLSNITIQIMXXXXXXXXXIGEMSMVVKSX

SEQ ID NO: 30841 - protein, 35 aa, Artificial Sequence
  Non-cyclic GFR-binding peptide
  MOD_RES (35), (35): Xaa is C or S
SRVHHEPLPVVYYEYVRKKPKLEQLSNRLEEHLEX

SEQ ID NO: 30842 - protein, 41 aa, Artificial Sequence
  Non-cyclic GFR-binding peptide
  MOD_RES (2), (39), (41): Xaa is C or S
QXRPTQVQLEPLPVVYYEIVRKKPIFEQLSNTLEDHLAXKX

SEQ ID NO: 30843 - protein, 37 aa, Artificial Sequence
  Non-cyclic GFR-binding peptide
  MOD_RES (6), (7): Xaa is C or S
KIPKAXXVPTELRSVKMAKVDENEKVVKEVQVDMVVE

SEQ ID NO: 30844 - protein, 37 aa, Artificial Sequence
  Non-cyclic GFR-binding peptide
  MOD_RES (3), (4), (35), (37): Xaa is C or S
SPXXVSQDLSNITIQIMIGKTPKIIGEMSMIVKSXKX

SEQ ID NO: 30845 - protein, 37 aa, Artificial Sequence
  Non-cyclic GFR-binding peptide
  MOD_RES (2), (2): Xaa is C or S
KXQPSRVHHEPLTVLYYEYVRKKPKLEQLSNRLEEHL

SEQ ID NO: 30846 - protein, 41 aa, Artificial Sequence
  Non-cyclic GFR-binding peptide
  MOD_RES (3), (4), (38), (40): Xaa is C or S
  MOD_RES (18), (19), (20), (21), (22): Xaa is A or G
  MOD_RES (23), (24), (25), (26): Xaa is A or G or is absent
KAXXVPTELRPVQMRKIXXXXXXXXXKKATVEMVVEGXGXR

SEQ ID NO: 30847 - protein, 38 aa, Artificial Sequence
  Non-cyclic GFR-binding peptide
  MOD_RES (37), (37): Xaa is C or S
QPSRVHHEPLTVLYYEYVRKKPKLEQLSNRLEEHLEXA

SEQ ID NO: 30848 - protein, 38 aa, Artificial Sequence
  Non-cyclic GFR-binding peptide
  MOD_RES (6), (6): Xaa is C or S
  MOD_RES (20), (21), (22), (23), (24): Xaa is A or G
  MOD_RES (25), (26), (27), (28): Xaa is A or G or is absent
VTKPTXAPTKLSNITVQIMXXXXXXXXXIGEMSNMVVR

SEQ ID NO: 30849 - protein, 42 aa, Artificial Sequence
  Non-cyclic GFR-binding peptide
  MOD_RES (7), (41): Xaa is C or S
  MOD_RES (21), (22), (23), (24), (25): Xaa is A or G
  MOD_RES (26), (27), (28), (29): Xaa is A or G or is absent
HVTKPTXAPTKLRSVKVAKVXXXXXXXXXKEVQVNMVVRSXG

SEQ ID NO: 30850 - protein, 40 aa, Artificial Sequence
  Non-cyclic GFR-binding peptide
  MOD_RES (4), (5), (37), (39): Xaa is C or S
PKAXXVPTELRPVQMRKIDEYDKVVKKATVEMVVEGXGXR

SEQ ID NO: 30851 - protein, 37 aa, Artificial Sequence
  Non-cyclic GFR-binding peptide
  MOD_RES (3), (4), (35), (37): Xaa is C or S
SPXXVPQDLSNITIQIMVGRTPKVIGEMSMVVKSXKX

SEQ ID NO: 30852 - protein, 38 aa, Artificial Sequence
  Non-cyclic GFR-binding peptide
  MOD_RES (3), (4), (35), (37): Xaa is C or S
SPXXVSQDLRPVQIRKIIGKTPKIKKATVMIVKSXKXS

SEQ ID NO: 30853 - protein, 36 aa, Artificial Sequence
  Non-cyclic GFR-binding peptide
  MOD_RES (5), (6): Xaa is C or S
SASPXXVSQDLRPVQIRKIIGKTPKIKKATVMIVKS

SEQ ID NO: 30854 - protein, 36 aa, Artificial Sequence
  Non-cyclic GFR-binding peptide
  MOD_RES (1), (33), (35): Xaa is C or S
XAPTKLRSVKVAKVDDSSNVIKEVQVNMVVRSXGXH

SEQ ID NO: 30855 - protein, 35 aa, Artificial Sequence
  Non-cyclic GFR-binding peptide
  MOD_RES (4), (5): Xaa is C or S
PKAXXVPTELRPVQMRKIDENEKVVKKATVDMVVE

SEQ ID NO: 30856 - protein, 32 aa, Artificial Sequence
  Non-cyclic GFR-binding peptide
SRVHHEPLPVVYYEYVRKKPKLEQLSNRLEEH

SEQ ID NO: 30857 - protein, 36 aa, Artificial Sequence
  Non-cyclic GFR-binding peptide
  MOD_RES (2), (3): Xaa is C or S
  MOD_RES (17), (18), (19), (20), (21): Xaa is A or G
  MOD_RES (22), (23), (24), (25): Xaa is A or G or is absent
AXXVPTELRSVKMAKVXXXXXXXXXKEVQVDMVVEG

SEQ ID NO: 30858 - protein, 38 aa, Artificial Sequence
  Non-cyclic GFR-binding peptide
  MOD_RES (2), (3), (36), (38): Xaa is C or S
  MOD_RES (17), (18), (19), (20), (21): Xaa is A or G
  MOD_RES (22), (23), (24), (25): Xaa is A or G or is absent
PXXVSQDLSNITIQIMXXXXXXXXXIGEMSMIVKSXKX

SEQ ID NO: 30859 - protein, 40 aa, Artificial Sequence
  Non-cyclic GFR-binding peptide
  MOD_RES (4), (5), (39): Xaa is C or S
  MOD_RES (19), (20), (21), (22), (23): Xaa is A or G
  MOD_RES (24), (25), (26), (27): Xaa is A or G or is absent
PKAXXVPTELSNITMQIMXXXXXXXXXIGEMSDMVVEGXG

SEQ ID NO: 30860 - protein, 42 aa, Artificial Sequence
  Non-cyclic GFR-binding peptide
  MOD_RES (2), (39), (41): Xaa is C or S
  MOD_RES (18), (19), (20), (21), (22): Xaa is A or G
  MOD_RES (23), (24), (25), (26): Xaa is A or G or is absent
QXRPTQVQLEPLTVLYYXXXXXXXXXEQLSNTLEDHLAXKXE

SEQ ID NO: 30861 - protein, 40 aa, Artificial Sequence
  Non-cyclic GFR-binding peptide
  MOD_RES (3), (37), (39): Xaa is C or S
LEXVPTEEEPLPMVYYRIKPHQGQHEQLSNFLQHNKXEXR

SEQ ID NO: 30862 - protein, 36 aa, Artificial Sequence
  Non-cyclic GFR-binding peptide
  MOD_RES (4), (5), (36): Xaa is C or S
ASPXXVPQDLSNITIQIMVGRTPKVIGEMSMVVKSX

SEQ ID NO: 30863 - protein, 36 aa, Artificial Sequence
  Non-cyclic GFR-binding peptide
  MOD_RES (1), (2), (36): Xaa is C or S
  MOD_RES (16), (17), (18), (19), (20): Xaa is A or G
  MOD_RES (21), (22), (23), (24): Xaa is A or G or is absent
XXAPTKLRSVKVAKVXXXXXXXXXKEVQVNMVVRSX

SEQ ID NO: 30864 - protein, 33 aa, Artificial Sequence
  Non-cyclic GFR-binding peptide
  MOD_RES (14), (15), (16), (17), (18): Xaa is A or G
  MOD_RES (19), (20), (21), (22): Xaa is A or G or is absent
VPTELRPVQMRKIXXXXXXXXXKKATVEMVVEG

SEQ ID NO: 30865 - protein, 42 aa, Artificial Sequence
  Non-cyclic GFR-binding peptide
  MOD_RES (5), (6), (40), (42): Xaa is C or S
  MOD_RES (20), (21), (22), (23), (24): Xaa is A or G
  MOD_RES (25), (26), (27), (28): Xaa is A or G or is absent
VPKPXXAPTKLRPVQVRKIXXXXXXXXXKKATVNMVVRSXGX

SEQ ID NO: 30866 - protein, 42 aa, Artificial Sequence
  Non-cyclic GFR-binding peptide
  MOD_RES (5), (42): Xaa is C or S
RNVQXRPTQVQLEPLTVLYYEIVRKKPIFEQLSNTLEDHLAX

SEQ ID NO: 30867 - protein, 38 aa, Artificial Sequence
  Non-cyclic GFR-binding peptide
  MOD_RES (4), (5), (36), (38): Xaa is C or S
AAPXXVPQALSNITIQIMVGRKPKVIGEMSMIVRSXKX

SEQ ID NO: 30868 - protein, 39 aa, Artificial Sequence
  Non-cyclic GFR-binding peptide
  MOD_RES (3), (4), (38): Xaa is C or S
  MOD_RES (18), (19), (20), (21), (22): Xaa is A or G
  MOD_RES (23), (24), (25), (26): Xaa is A or G or is absent
KAXXVPTELRSVKMAKVXXXXXXXXXKEVQVDMVVEGXG

SEQ ID NO: 30869 - protein, 39 aa, Artificial Sequence
  Non-cyclic GFR-binding peptide
  MOD_RES (3), (37), (39): Xaa is C or S
  MOD_RES (17), (18), (19), (20), (21): Xaa is A or G
  MOD_RES (22), (23), (24), (25): Xaa is A or G or is absent
PTXAPTKLRPVQVRKIXXXXXXXXXKKATVNMVVRSXGX

SEQ ID NO: 30870 - protein, 44 aa, Artificial Sequence
  Non-cyclic GFR-binding peptide
  MOD_RES (7), (41), (43): Xaa is C or S
NDEGLEXVPTEEEPLPMVYYRIKPHQGQHEQLSNFLQHNKXEXR

SEQ ID NO: 30871 - protein, 32 aa, Artificial Sequence
  Non-cyclic GFR-binding peptide
SRVHHEPLTVLYYEYVRKKPKLEQLSNRLEEH

SEQ ID NO: 30872 - protein, 33 aa, Artificial Sequence
  Non-cyclic GFR-binding peptide
  MOD_RES (2), (2): Xaa is C or S
TXAPTKLSNITVQIMDDSSNVIIGEMSNMVVRS

SEQ ID NO: 30873 - protein, 41 aa, Artificial Sequence
  Non-cyclic GFR-binding peptide
  MOD_RES (3), (4), (38), (40): Xaa is C or S
  MOD_RES (18), (19), (20), (21), (22): Xaa is A or G
  MOD_RES (23), (24), (25), (26): Xaa is A or G or is absent
KPXXAPTKLSNITVQIMXXXXXXXXXIGEMSNMVVRSXGXH

SEQ ID NO: 30874 - protein, 44 aa, Artificial Sequence
  Non-cyclic GFR-binding peptide
  MOD_RES (4), (41), (43): Xaa is C or S
  MOD_RES (20), (21), (22), (23), (24): Xaa is A or G
  MOD_RES (25), (26), (27), (28): Xaa is A or G or is absent
SVKXQPSRVHHEPLPVVYYXXXXXXXXXEQLSNRLEEHLEXAXA

SEQ ID NO: 30875 - protein, 36 aa, Artificial Sequence
  Non-cyclic GFR-binding peptide
  MOD_RES (5), (6): Xaa is C or S
IPKAXXVPTELRPVQMRKIDEYDKVVKKATVEMVVE

SEQ ID NO: 30876 - protein, 38 aa, Artificial Sequence
  Non-cyclic GFR-binding peptide
  MOD_RES (1), (2), (36), (38): Xaa is C or S
  MOD_RES (16), (17), (18), (19), (20): Xaa is A or G
  MOD_RES (21), (22), (23), (24): Xaa is A or G or is absent
XXVPTELSNITMQIMXXXXXXXXXIGEMSDMVVEGXGX

SEQ ID NO: 30877 - protein, 40 aa, Artificial Sequence
  Non-cyclic GFR-binding peptide
  MOD_RES (3), (40): Xaa is C or S
VKXQPSRVHHEPLPVVYYEYVRKKPKLEQLSNRLEEHLEX

SEQ ID NO: 30878 - protein, 37 aa, Artificial Sequence
  Non-cyclic GFR-binding peptide
  MOD_RES (4), (36): Xaa is C or S
KPTXAPTKLRPVQVRKIDDSSNVIKKATVNMVVRSXG

SEQ ID NO: 30879 - protein, 33 aa, Artificial Sequence
  Non-cyclic GFR-binding peptide
  MOD_RES (1), (1): Xaa is C or S
  MOD_RES (15), (16), (17), (18), (19): Xaa is A or G
  MOD_RES (20), (21), (22), (23): Xaa is A or G or is absent
XAPTQLRSVKVAKVXXXXXXXXXKEVQVNMVVR

SEQ ID NO: 30880 - protein, 35 aa, Artificial Sequence
  Non-cyclic GFR-binding peptide
  MOD_RES (1), (2), (35): Xaa is C or S
  MOD_RES (16), (17), (18), (19), (20): Xaa is A or G
  MOD_RES (21), (22), (23), (24): Xaa is A or G or is absent
XXVSQDLRPVQIRKIXXXXXXXXXKKATVMIVKSX

SEQ ID NO: 30881 - protein, 43 aa, Artificial Sequence
  Non-cyclic GFR-binding peptide
  MOD_RES (6), (7), (40), (42): Xaa is C or S
  MOD_RES (21), (22), (23), (24), (25): Xaa is A or G
  MOD_RES (26), (27), (28), (29): Xaa is A or G or is absent
ASAAPXXVPQALRPVQIRKIXXXXXXXXXKKATVMIVRSXKXS

SEQ ID NO: 30882 - protein, 39 aa, Artificial Sequence
  Non-cyclic GFR-binding peptide
  MOD_RES (1), (2), (36), (38): Xaa is C or S
  MOD_RES (16), (17), (18), (19), (20): Xaa is A or G
  MOD_RES (21), (22), (23), (24): Xaa is A or G or is absent
XXAPTKLRSVKVAKVXXXXXXXXXKEVQVNMVVRSXGXH

SEQ ID NO: 30883 - protein, 36 aa, Artificial Sequence
  Non-cyclic GFR-binding peptide
  MOD_RES (34), (36): Xaa is C or S
  MOD_RES (14), (15), (16), (17), (18): Xaa is A or G
  MOD_RES (19), (20), (21), (22): Xaa is A or G or is absent
VPTEEEPLTMLYYXXXXXXXXXEQLSNFLQHNKXEX

SEQ ID NO: 30884 - protein, 37 aa, Artificial Sequence
  Non-cyclic GFR-binding peptide
  MOD_RES (6), (7): Xaa is C or S
SIPKAXXVPTELSNITMQIMDEYDKVVIGEMSEMVVE

SEQ ID NO: 30885 - protein, 36 aa, Artificial Sequence
  Non-cyclic GFR-binding peptide
  MOD_RES (3), (3): Xaa is C or S
LEXVPTEEEPLPMVYYRIKPHQGQHEQLSNFLQHNK

SEQ ID NO: 30886 - protein, 36 aa, Artificial Sequence
  Non-cyclic GFR-binding peptide
  MOD_RES (3), (4): Xaa is C or S
  MOD_RES (18), (19), (20), (21), (22): Xaa is A or G
  MOD_RES (23), (24), (25), (26): Xaa is A or G or is absent
APXXVPQALRPVQIRKIXXXXXXXXXKKATVMIVRS

SEQ ID NO: 30887 - protein, 38 aa, Artificial Sequence
  Non-cyclic GFR-binding peptide
  MOD_RES (3), (37): Xaa is C or S
  MOD_RES (17), (18), (19), (20), (21): Xaa is A or G
  MOD_RES (22), (23), (24), (25): Xaa is A or G or is absent
LEXVPTEEEPLPMVYYXXXXXXXXXEQLSNFLQHNKXE

SEQ ID NO: 30888 - protein, 41 aa, Artificial Sequence
  Non-cyclic GFR-binding peptide
  MOD_RES (5), (6), (40): Xaa is C or S
  MOD_RES (20), (21), (22), (23), (24): Xaa is A or G
  MOD_RES (25), (26), (27), (28): Xaa is A or G or is absent
VPKPXXAPTQLSNITVQIMXXXXXXXXXIGEMSNMVVRAXG

SEQ ID NO: 30889 - protein, 35 aa, Artificial Sequence
  Non-cyclic GFR-binding peptide
  MOD_RES (15), (16), (17), (18), (19): Xaa is A or G
  MOD_RES (20), (21), (22), (23): Xaa is A or G or is absent
PTQVQLEPLPVVYYXXXXXXXXXEQLSNTLEDHLA

SEQ ID NO: 30890 - protein, 39 aa, Artificial Sequence
  Non-cyclic GFR-binding peptide
  MOD_RES (4), (5), (38): Xaa is C or S
  MOD_RES (19), (20), (21), (22), (23): Xaa is A or G
  MOD_RES (24), (25), (26), (27): Xaa is A or G or is absent
AAPXXVPQALSNITIQIMXXXXXXXXXIGEMSMIVRSXK

SEQ ID NO: 30891 - protein, 33 aa, Artificial Sequence
  Non-cyclic GFR-binding peptide
  MOD_RES (1), (1): Xaa is C or S
  MOD_RES (15), (16), (17), (18), (19): Xaa is A or G
  MOD_RES (20), (21), (22), (23): Xaa is A or G or is absent
XVPQDLRPVQIRKIXXXXXXXXXKKATVMVVKS

SEQ ID NO: 30892 - protein, 41 aa, Artificial Sequence
  Non-cyclic GFR-binding peptide
  MOD_RES (4), (38), (40): Xaa is C or S
  MOD_RES (18), (19), (20), (21), (22): Xaa is A or G
  MOD_RES (23), (24), (25), (26): Xaa is A or G or is absent
KPTXAPTKLRSVKVAKVXXXXXXXXXKEVQVNMVVRSXGXH

SEQ ID NO: 30893 - protein, 36 aa, Artificial Sequence
  Non-cyclic GFR-binding peptide
  MOD_RES (3), (4): Xaa is C or S
  MOD_RES (18), (19), (20), (21), (22): Xaa is A or G
  MOD_RES (23), (24), (25), (26): Xaa is A or G or is absent
SPXXVSQDLRSVKIAKVXXXXXXXXXKEVQVMIVKS

SEQ ID NO: 30894 - protein, 37 aa, Artificial Sequence
  Non-cyclic GFR-binding peptide
  MOD_RES (4), (5): Xaa is C or S
  MOD_RES (19), (20), (21), (22), (23): Xaa is A or G
  MOD_RES (24), (25), (26), (27): Xaa is A or G or is absent
PKAXXVPTELRPVQMRKIXXXXXXXXXKKATVDMVVE

SEQ ID NO: 30895 - protein, 38 aa, Artificial Sequence
  Non-cyclic GFR-binding peptide
  MOD_RES (2), (3), (37): Xaa is C or S
  MOD_RES (17), (18), (19), (20), (21): Xaa is A or G
  MOD_RES (22), (23), (24), (25): Xaa is A or G or is absent
PXXAPTQLSNITVQIMXXXXXXXXXIGEMSNMVVRAXG

SEQ ID NO: 30896 - protein, 37 aa, Artificial Sequence
  Non-cyclic GFR-binding peptide
  MOD_RES (3), (4), (36): Xaa is C or S
KPXXAPTQLSNITVQIMDDSSNVIIGEMSNMVVRAXG

SEQ ID NO: 30897 - protein, 35 aa, Artificial Sequence
  Non-cyclic GFR-binding peptide
  MOD_RES (4), (5): Xaa is C or S
PKAXXVPTELSNITMQIMDEYDKVVIGEMSEMVVE

SEQ ID NO: 30898 - protein, 44 aa, Artificial Sequence
  Non-cyclic GFR-binding peptide
  MOD_RES (7), (41), (43): Xaa is C or S
  MOD_RES (21), (22), (23), (24), (25): Xaa is A or G
  MOD_RES (26), (27), (28), (29): Xaa is A or G or is absent
HVTKPTXAPTKLSNITVQIMXXXXXXXXXIGEMSNMVVRSXGXH

SEQ ID NO: 30899 - protein, 38 aa, Artificial Sequence
  Non-cyclic GFR-binding peptide
  MOD_RES (1), (2), (36), (38): Xaa is C or S
  MOD_RES (16), (17), (18), (19), (20): Xaa is A or G
  MOD_RES (21), (22), (23), (24): Xaa is A or G or is absent
XXVPTELRPVQMRKIXXXXXXXXXKKATVDMVVEGXGX

SEQ ID NO: 30900 - protein, 43 aa, Artificial Sequence
  Non-cyclic GFR-binding peptide
  MOD_RES (5), (42): Xaa is C or S
  MOD_RES (21), (22), (23), (24), (25): Xaa is A or G
  MOD_RES (26), (27), (28), (29): Xaa is A or G or is absent
SSVKXQPSRVHHEPLPVVYYXXXXXXXXXEQLSNRLEEHLEXA

SEQ ID NO: 30901 - protein, 38 aa, Artificial Sequence
  Non-cyclic GFR-binding peptide
  MOD_RES (36), (38): Xaa is C or S
PTQVQLEPLTVLYYEIVRKKPIFEQLSNTLEDHLAXKX

SEQ ID NO: 30902 - protein, 38 aa, Artificial Sequence
  Non-cyclic GFR-binding peptide
  MOD_RES (3), (4), (35), (37): Xaa is C or S
APXXVPQALRPVQIRKIVGRKPKVKKATVMIVRSXKXS

SEQ ID NO: 30903 - protein, 40 aa, Artificial Sequence
  Non-cyclic GFR-binding peptide
  MOD_RES (6), (38), (40): Xaa is C or S
VTKPTXAPTKLSNITVQIMDDSSNVIIGEMSNMVVRSXGX

SEQ ID NO: 30904 - protein, 34 aa, Artificial Sequence
  Non-cyclic GFR-binding peptide
  MOD_RES (33), (33): Xaa is C or S
  MOD_RES (14), (15), (16), (17), (18): Xaa is A or G
  MOD_RES (19), (20), (21), (22): Xaa is A or G or is absent
VPQALRSVKIAKVXXXXXXXXXKEVQVMIVRSXK

SEQ ID NO: 30905 - protein, 38 aa, Artificial Sequence
  Non-cyclic GFR-binding peptide
  MOD_RES (2), (3), (37): Xaa is C or S
  MOD_RES (17), (18), (19), (20), (21): Xaa is A or G
  MOD_RES (22), (23), (24), (25): Xaa is A or G or is absent
AXXVPTELSNITMQIMXXXXXXXXXIGEMSDMVVEGXG

SEQ ID NO: 30906 - protein, 36 aa, Artificial Sequence
  Non-cyclic GFR-binding peptide
  MOD_RES (36), (36): Xaa is C or S
  MOD_RES (15), (16), (17), (18), (19): Xaa is A or G
  MOD_RES (20), (21), (22), (23): Xaa is A or G or is absent
PTQVQLEPLTVLYYXXXXXXXXXEQLSNTLEDHLAX

SEQ ID NO: 30907 - protein, 31 aa, Artificial Sequence
  Non-cyclic GFR-binding peptide
  MOD_RES (1), (1): Xaa is C or S
XVPQALRPVQIRKIVGRKPKVKKATVMIVRS

SEQ ID NO: 30908 - protein, 33 aa, Artificial Sequence
  Non-cyclic GFR-binding peptide
  MOD_RES (32), (32): Xaa is C or S
VPTELRSVKMAKVDENEKVVKEVQVDMVVEGXG

SEQ ID NO: 30909 - protein, 39 aa, Artificial Sequence
  Non-cyclic GFR-binding peptide
  MOD_RES (6), (6): Xaa is C or S
  MOD_RES (20), (21), (22), (23), (24): Xaa is A or G
  MOD_RES (25), (26), (27), (28): Xaa is A or G or is absent
VTKPTXAPTKLSNITVQIMXXXXXXXXXIGEMSNMVVRS

SEQ ID NO: 30910 - protein, 41 aa, Artificial Sequence
  Non-cyclic GFR-binding peptide
  MOD_RES (5), (6), (39), (41): Xaa is C or S
  MOD_RES (20), (21), (22), (23), (24): Xaa is A or G
  MOD_RES (25), (26), (27), (28): Xaa is A or G or is absent
SAAPXXVPQALRSVKIAKVXXXXXXXXXKEVQVMIVRSXKX

SEQ ID NO: 30911 - protein, 40 aa, Artificial Sequence
  Non-cyclic GFR-binding peptide
  MOD_RES (2), (3), (37), (39): Xaa is C or S
  MOD_RES (17), (18), (19), (20), (21): Xaa is A or G
  MOD_RES (22), (23), (24), (25): Xaa is A or G or is absent
PXXAPTQLSNITVQIMXXXXXXXXXIGEMSNMVVRAXGXH

SEQ ID NO: 30912 - protein, 45 aa, Artificial Sequence
  Non-cyclic GFR-binding peptide
  MOD_RES (5), (42), (44): Xaa is C or S
  MOD_RES (21), (22), (23), (24), (25): Xaa is A or G
  MOD_RES (26), (27), (28), (29): Xaa is A or G or is absent
SSVKXQPSRVHHEPLTVLYYXXXXXXXXXEQLSNRLEEHLEXAXA

SEQ ID NO: 30913 - protein, 41 aa, Artificial Sequence
  Non-cyclic GFR-binding peptide
  MOD_RES (5), (6), (38), (40): Xaa is C or S
VPKPXXAPTKLRPVQVRKIDDSSNVIKKATVNMVVRSXGXH

SEQ ID NO: 30914 - protein, 34 aa, Artificial Sequence
  Non-cyclic GFR-binding peptide
PSRVHHEPLTVLYYEYVRKKPKLEQLSNRLEEHL

SEQ ID NO: 30915 - protein, 39 aa, Artificial Sequence
  Non-cyclic GFR-binding peptide
  MOD_RES (3), (4), (38): Xaa is C or S
  MOD_RES (18), (19), (20), (21), (22): Xaa is A or G
  MOD_RES (23), (24), (25), (26): Xaa is A or G or is absent
KPXXAPTKLRPVQVRKIXXXXXXXXXKKATVNMVVRSXG

SEQ ID NO: 30916 - protein, 37 aa, Artificial Sequence
  Non-cyclic GFR-binding peptide
  MOD_RES (3), (4): Xaa is C or S
  MOD_RES (18), (19), (20), (21), (22): Xaa is A or G
  MOD_RES (23), (24), (25), (26): Xaa is A or G or is absent
KPXXAPTKLSNITVQIMXXXXXXXXXIGEMSNMVVRS

SEQ ID NO: 30917 - protein, 39 aa, Artificial Sequence
  Non-cyclic GFR-binding peptide
  MOD_RES (3), (4), (37), (39): Xaa is C or S
  MOD_RES (18), (19), (20), (21), (22): Xaa is A or G
  MOD_RES (23), (24), (25), (26): Xaa is A or G or is absent
SPXXVSQDLSNITIQIMXXXXXXXXXIGEMSMIVKSXKX

SEQ ID NO: 30918 - protein, 30 aa, Artificial Sequence
  Non-cyclic GFR-binding peptide
VPTELRSVKMAKVDEYDKVVKEVQVEMVVE

SEQ ID NO: 30919 - protein, 36 aa, Artificial Sequence
  Non-cyclic GFR-binding peptide
  MOD_RES (35), (35): Xaa is C or S
  MOD_RES (14), (15), (16), (17), (18): Xaa is A or G
  MOD_RES (19), (20), (21), (22): Xaa is A or G or is absent
TQVQLEPLPVVYYXXXXXXXXXEQLSNTLEDHLAXK

SEQ ID NO: 30920 - protein, 40 aa, Artificial Sequence
  Non-cyclic GFR-binding peptide
  MOD_RES (4), (4): Xaa is C or S
SVKXQPSRVHHEPLPVVYYEYVRKKPKLEQLSNRLEEHLE

SEQ ID NO: 30921 - protein, 43 aa, Artificial Sequence
  Non-cyclic GFR-binding peptide
  MOD_RES (3), (40), (42): Xaa is C or S
  MOD_RES (19), (20), (21), (22), (23): Xaa is A or G
  MOD_RES (24), (25), (26), (27): Xaa is A or G or is absent
VKXQPSRVHHEPLPVVYYXXXXXXXXXEQLSNRLEEHLEXAXA

SEQ ID NO: 30922 - protein, 32 aa, Artificial Sequence
  Non-cyclic GFR-binding peptide
  MOD_RES (1), (2): Xaa is C or S
XXVPQALRSVKIAKVVGRKPKVKEVQVMIVRS

SEQ ID NO: 30923 - protein, 34 aa, Artificial Sequence
  Non-cyclic GFR-binding peptide
  MOD_RES (31), (33): Xaa is C or S
VPQALRSVKIAKVVGRKPKVKEVQVMIVRSXKXS

SEQ ID NO: 30924 - protein, 42 aa, Artificial Sequence
  Non-cyclic GFR-binding peptide
  MOD_RES (5), (42): Xaa is C or S
  MOD_RES (21), (22), (23), (24), (25): Xaa is A or G
  MOD_RES (26), (27), (28), (29): Xaa is A or G or is absent
SSVKXQPSRVHHEPLPVVYYXXXXXXXXXEQLSNRLEEHLEX

SEQ ID NO: 30925 - protein, 36 aa, Artificial Sequence
  Non-cyclic GFR-binding peptide
  MOD_RES (3), (4), (36): Xaa is C or S
KAXXVPTELSNITMQIMDENEKVVIGEMSDMVVEGX

SEQ ID NO: 30926 - protein, 40 aa, Artificial Sequence
  Non-cyclic GFR-binding peptide
  MOD_RES (4), (5), (39): Xaa is C or S
  MOD_RES (19), (20), (21), (22), (23): Xaa is A or G
  MOD_RES (24), (25), (26), (27): Xaa is A or G or is absent
PKAXXVPTELSNITMQIMXXXXXXXXXIGEMSEMVVEGXG

SEQ ID NO: 30927 - protein, 35 aa, Artificial Sequence
  Non-cyclic GFR-binding peptide
  MOD_RES (1), (2), (34): Xaa is C or S
XXAPTQLRPVQVRKIDDSSNVIKKATVNMVVRAXG

SEQ ID NO: 30928 - protein, 41 aa, Artificial Sequence
  Non-cyclic GFR-binding peptide
  MOD_RES (3), (4), (38), (40): Xaa is C or S
  MOD_RES (18), (19), (20), (21), (22): Xaa is A or G
  MOD_RES (23), (24), (25), (26): Xaa is A or G or is absent
KPXXAPTQLRPVQVRKIXXXXXXXXXKKATVNMVVRAXGXH

SEQ ID NO: 30929 - protein, 41 aa, Artificial Sequence
  Non-cyclic GFR-binding peptide
  MOD_RES (5), (6), (40): Xaa is C or S
  MOD_RES (20), (21), (22), (23), (24): Xaa is A or G
  MOD_RES (25), (26), (27), (28): Xaa is A or G or is absent
VPKPXXAPTKLRSVKVAKVXXXXXXXXXKEVQVNMVVRSXG

SEQ ID NO: 30930 - protein, 32 aa, Artificial Sequence
  Non-cyclic GFR-binding peptide
  MOD_RES (14), (15), (16), (17), (18): Xaa is A or G
  MOD_RES (19), (20), (21), (22): Xaa is A or G or is absent
APTQLRPVQVRKIXXXXXXXXXKKATVNMVVR

SEQ ID NO: 30931 - protein, 41 aa, Artificial Sequence
  Non-cyclic GFR-binding peptide
  MOD_RES (6), (7), (41): Xaa is C or S
  MOD_RES (21), (22), (23), (24), (25): Xaa is A or G
  MOD_RES (26), (27), (28), (29): Xaa is A or G or is absent
SIPKAXXVPTELRSVKMAKVXXXXXXXXXKEVQVEMVVEGX

SEQ ID NO: 30932 - protein, 36 aa, Artificial Sequence
  Non-cyclic GFR-binding peptide
  MOD_RES (4), (4): Xaa is C or S
  MOD_RES (18), (19), (20), (21), (22): Xaa is A or G
  MOD_RES (23), (24), (25), (26): Xaa is A or G or is absent
KPTXAPTKLRSVKVAKVXXXXXXXXXKEVQVNMVVR

SEQ ID NO: 30933 - protein, 34 aa, Artificial Sequence
  Non-cyclic GFR-binding peptide
  MOD_RES (2), (3), (34): Xaa is C or S
PXXVSQDLSNITIQIMIGKTPKIIGEMSMIVKSX

SEQ ID NO: 30934 - protein, 39 aa, Artificial Sequence
  Non-cyclic GFR-binding peptide
  MOD_RES (3), (37), (39): Xaa is C or S
  MOD_RES (17), (18), (19), (20), (21): Xaa is A or G
  MOD_RES (22), (23), (24), (25): Xaa is A or G or is absent
LEXVPTEEEPLTMLYYXXXXXXXXXEQLSNFLQHNKXEX

SEQ ID NO: 30935 - protein, 33 aa, Artificial Sequence
  Non-cyclic GFR-binding peptide
  MOD_RES (32), (32): Xaa is C or S
APTKLRPVQVRKIDDSSNVIKKATVNMVVRSXG

SEQ ID NO: 30936 - protein, 38 aa, Artificial Sequence
  Non-cyclic GFR-binding peptide
  MOD_RES (1), (2), (36), (38): Xaa is C or S
  MOD_RES (16), (17), (18), (19), (20): Xaa is A or G
  MOD_RES (21), (22), (23), (24): Xaa is A or G or is absent
XXVPTELRSVKMAKVXXXXXXXXXKEVQVDMVVEGXGX

SEQ ID NO: 30937 - protein, 34 aa, Artificial Sequence
  Non-cyclic GFR-binding peptide
  MOD_RES (1), (32), (34): Xaa is C or S
XVSQDLRPVQIRKIIGKTPKIKKATVMIVKSXKX

SEQ ID NO: 30938 - protein, 39 aa, Artificial Sequence
  Non-cyclic GFR-binding peptide
  MOD_RES (2), (3), (37), (39): Xaa is C or S
  MOD_RES (17), (18), (19), (20), (21): Xaa is A or G
  MOD_RES (22), (23), (24), (25): Xaa is A or G or is absent
AXXVPTELSNITMQIMXXXXXXXXXIGEMSEMVVEGXGX

SEQ ID NO: 30939 - protein, 34 aa, Artificial Sequence
  Non-cyclic GFR-binding peptide
  MOD_RES (1), (34): Xaa is C or S
  MOD_RES (15), (16), (17), (18), (19): Xaa is A or G
  MOD_RES (20), (21), (22), (23): Xaa is A or G or is absent
XVPQALRPVQIRKIXXXXXXXXXKKATVMIVRSX

SEQ ID NO: 30940 - protein, 35 aa, Artificial Sequence
  Non-cyclic GFR-binding peptide
  MOD_RES (2), (2): Xaa is C or S
EXVPTEEEPLTMLYYRIKPHQGQHEQLSNFLQHNK

SEQ ID NO: 30941 - protein, 35 aa, Artificial Sequence
  Non-cyclic GFR-binding peptide
  MOD_RES (2), (2): Xaa is C or S
  MOD_RES (16), (17), (18), (19), (20): Xaa is A or G
  MOD_RES (21), (22), (23), (24): Xaa is A or G or is absent
TXAPTKLRSVKVAKVXXXXXXXXXKEVQVNMVVRS

SEQ ID NO: 30942 - protein, 38 aa, Artificial Sequence
  Non-cyclic GFR-binding peptide
  MOD_RES (4), (5): Xaa is C or S
  MOD_RES (19), (20), (21), (22), (23): Xaa is A or G
  MOD_RES (24), (25), (26), (27): Xaa is A or G or is absent
PKAXXVPTELSNITMQIMXXXXXXXXXIGEMSEMVVEG

SEQ ID NO: 30943 - protein, 38 aa, Artificial Sequence
  Non-cyclic GFR-binding peptide
  MOD_RES (4), (4): Xaa is C or S
  MOD_RES (20), (21), (22), (23), (24): Xaa is A or G
  MOD_RES (25), (26), (27), (28): Xaa is A or G or is absent
NVQXRPTQVQLEPLTVLYYXXXXXXXXXEQLSNTLEDH

SEQ ID NO: 30944 - protein, 36 aa, Artificial Sequence
  Non-cyclic GFR-binding peptide
  MOD_RES (1), (2), (34), (36): Xaa is C or S
XXAPTQLRPVQVRKIDDSSNVIKKATVNMVVRAXGX

SEQ ID NO: 30945 - protein, 33 aa, Artificial Sequence
  Non-cyclic GFR-binding peptide
  MOD_RES (33), (33): Xaa is C or S
  MOD_RES (14), (15), (16), (17), (18): Xaa is A or G
  MOD_RES (19), (20), (21), (22): Xaa is A or G or is absent
VPQDLRSVKIAKVXXXXXXXXXKEVQVMVVKSX

SEQ ID NO: 30946 - protein, 37 aa, Artificial Sequence
  Non-cyclic GFR-binding peptide
  MOD_RES (3), (35), (37): Xaa is C or S
PTXAPTKLSNITVQIMDDSSNVIIGEMSNMVVRSXGX

SEQ ID NO: 30947 - protein, 35 aa, Artificial Sequence
  Non-cyclic GFR-binding peptide
  MOD_RES (1), (2): Xaa is C or S
  MOD_RES (16), (17), (18), (19), (20): Xaa is A or G
  MOD_RES (21), (22), (23), (24): Xaa is A or G or is absent
XXAPTKLRPVQVRKIXXXXXXXXXKKATVNMVVRS

SEQ ID NO: 30948 - protein, 37 aa, Artificial Sequence
  Non-cyclic GFR-binding peptide
  MOD_RES (3), (3): Xaa is C or S
VKXQPSRVHHEPLTVLYYEYVRKKPKLEQLSNRLEEH

SEQ ID NO: 30949 - protein, 33 aa, Artificial Sequence
  Non-cyclic GFR-binding peptide
  MOD_RES (31), (33): Xaa is C or S
VPQDLRPVQIRKIVGRTPKVKKATVMVVKSXKX

SEQ ID NO: 30950 - protein, 41 aa, Artificial Sequence
  Non-cyclic GFR-binding peptide
  MOD_RES (5), (39), (41): Xaa is C or S
  MOD_RES (19), (20), (21), (22), (23): Xaa is A or G
  MOD_RES (24), (25), (26), (27): Xaa is A or G or is absent
EGLEXVPTEEEPLTMLYYXXXXXXXXXEQLSNFLQHNKXEX

SEQ ID NO: 30951 - protein, 33 aa, Artificial Sequence
  Non-cyclic GFR-binding peptide
  MOD_RES (1), (1): Xaa is C or S
  MOD_RES (15), (16), (17), (18), (19): Xaa is A or G
  MOD_RES (20), (21), (22), (23): Xaa is A or G or is absent
XAPTKLSNITVQIMXXXXXXXXXIGEMSNMVVR

SEQ ID NO: 30952 - protein, 34 aa, Artificial Sequence
  Non-cyclic GFR-binding peptide
  MOD_RES (1), (2), (34): Xaa is C or S
XXVPTELSNITMQIMDEYDKVVIGEMSEMVVEGX

SEQ ID NO: 30953 - protein, 34 aa, Artificial Sequence
  Non-cyclic GFR-binding peptide
  MOD_RES (32), (34): Xaa is C or S
APTKLRSVKVAKVDDSSNVIKEVQVNMVVRSXGX

SEQ ID NO: 30954 - protein, 37 aa, Artificial Sequence
  Non-cyclic GFR-binding peptide
  MOD_RES (4), (5), (37): Xaa is C or S
PKAXXVPTELRPVQMRKIDENEKVVKKATVDMVVEGX

SEQ ID NO: 30955 - protein, 36 aa, Artificial Sequence
  Non-cyclic GFR-binding peptide
  MOD_RES (2), (34), (36): Xaa is C or S
TXAPTKLRSVKVAKVDDSSNVIKEVQVNMVVRSXGX

SEQ ID NO: 30956 - protein, 39 aa, Artificial Sequence
  Non-cyclic GFR-binding peptide
  MOD_RES (5), (6), (37), (39): Xaa is C or S
SASPXXVSQDLSNITIQIMIGKTPKIIGEMSMIVKSXKX

SEQ ID NO: 30957 - protein, 40 aa, Artificial Sequence
  Non-cyclic GFR-binding peptide
  MOD_RES (6), (7), (38), (40): Xaa is C or S
ASASPXXVPQDLSNITIQIMVGRTPKVIGEMSMVVKSXKX

SEQ ID NO: 30958 - protein, 38 aa, Artificial Sequence
  Non-cyclic GFR-binding peptide
  MOD_RES (4), (4): Xaa is C or S
NVQXRPTQVQLEPLPVVYYEIVRKKPIFEQLSNTLEDH

SEQ ID NO: 30959 - protein, 42 aa, Artificial Sequence
  Non-cyclic GFR-binding peptide
  MOD_RES (7), (41): Xaa is C or S
  MOD_RES (21), (22), (23), (24), (25): Xaa is A or G
  MOD_RES (26), (27), (28), (29): Xaa is A or G or is absent
HVTKPTXAPTKLRPVQVRKIXXXXXXXXXKKATVNMVVRSXG

SEQ ID NO: 30960 - protein, 36 aa, Artificial Sequence
  Non-cyclic GFR-binding peptide
  MOD_RES (5), (5): Xaa is C or S
TKPTXAPTKLRPVQVRKIDDSSNVIKKATVNMVVRS

SEQ ID NO: 30961 - protein, 39 aa, Artificial Sequence
  Non-cyclic GFR-binding peptide
  MOD_RES (6), (6): Xaa is C or S
DEGLEXVPTEEEPLPMVYYRIKPHQGQHEQLSNFLQHNK

SEQ ID NO: 30962 - protein, 37 aa, Artificial Sequence
  Non-cyclic GFR-binding peptide
  MOD_RES (3), (37): Xaa is C or S
  MOD_RES (17), (18), (19), (20), (21): Xaa is A or G
  MOD_RES (22), (23), (24), (25): Xaa is A or G or is absent
PTXAPTKLRPVQVRKIXXXXXXXXXKKATVNMVVRSX

SEQ ID NO: 30963 - protein, 38 aa, Artificial Sequence
  Non-cyclic GFR-binding peptide
  MOD_RES (1), (2), (35), (37): Xaa is C or S
  MOD_RES (16), (17), (18), (19), (20): Xaa is A or G
  MOD_RES (21), (22), (23), (24): Xaa is A or G or is absent
XXVPQALRSVKIAKVXXXXXXXXXKEVQVMIVRSXKXS

SEQ ID NO: 30964 - protein, 40 aa, Artificial Sequence
  Non-cyclic GFR-binding peptide
  MOD_RES (6), (7), (40): Xaa is C or S
  MOD_RES (21), (22), (23), (24), (25): Xaa is A or G
  MOD_RES (26), (27), (28), (29): Xaa is A or G or is absent
ASASPXXVSQDLRPVQIRKIXXXXXXXXXKKATVMIVKSX

SEQ ID NO: 30965 - protein, 34 aa, Artificial Sequence
  Non-cyclic GFR-binding peptide
  MOD_RES (34), (34): Xaa is C or S
  MOD_RES (14), (15), (16), (17), (18): Xaa is A or G
  MOD_RES (19), (20), (21), (22): Xaa is A or G or is absent
APTQLRSVKVAKVXXXXXXXXXKEVQVNMVVRAX

SEQ ID NO: 30966 - protein, 38 aa, Artificial Sequence
  Non-cyclic GFR-binding peptide
  MOD_RES (5), (6): Xaa is C or S
  MOD_RES (20), (21), (22), (23), (24): Xaa is A or G
  MOD_RES (25), (26), (27), (28): Xaa is A or G or is absent
IPKAXXVPTELRSVKMAKVXXXXXXXXXKEVQVEMVVE

SEQ ID NO: 30967 - protein, 38 aa, Artificial Sequence
  Non-cyclic GFR-binding peptide
  MOD_RES (5), (6), (38): Xaa is C or S
IPKAXXVPTELRPVQMRKIDENEKVVKKATVDMVVEGX

SEQ ID NO: 30968 - protein, 35 aa, Artificial Sequence
  Non-cyclic GFR-binding peptide
  MOD_RES (16), (17), (18), (19), (20): Xaa is A or G
  MOD_RES (21), (22), (23), (24): Xaa is A or G or is absent
RPTQVQLEPLPVVYYXXXXXXXXXEQLSNTLEDHL

SEQ ID NO: 30969 - protein, 34 aa, Artificial Sequence
  Non-cyclic GFR-binding peptide
  MOD_RES (1), (2): Xaa is C or S
  MOD_RES (16), (17), (18), (19), (20): Xaa is A or G
  MOD_RES (21), (22), (23), (24): Xaa is A or G or is absent
XXVPQDLRPVQIRKIXXXXXXXXXKKATVMVVKS

SEQ ID NO: 30970 - protein, 34 aa, Artificial Sequence
  Non-cyclic GFR-binding peptide
  MOD_RES (1), (33): Xaa is C or S
XVPTELRSVKMAKVDEYDKVVKEVQVEMVVEGXG

SEQ ID NO: 30971 - protein, 37 aa, Artificial Sequence
  Non-cyclic GFR-binding peptide
  MOD_RES (5), (6): Xaa is C or S
VPKPXXAPTQLSNITVQIMDDSSNVIIGEMSNMVVRA

SEQ ID NO: 30972 - protein, 39 aa, Artificial Sequence
  Non-cyclic GFR-binding peptide
  MOD_RES (5), (6): Xaa is C or S
  MOD_RES (20), (21), (22), (23), (24): Xaa is A or G
  MOD_RES (25), (26), (27), (28): Xaa is A or G or is absent
VPKPXXAPTKLRSVKVAKVXXXXXXXXXKEVQVNMVVRS

SEQ ID NO: 30973 - protein, 40 aa, Artificial Sequence
  Non-cyclic GFR-binding peptide
  MOD_RES (5), (6), (40): Xaa is C or S
  MOD_RES (20), (21), (22), (23), (24): Xaa is A or G
  MOD_RES (25), (26), (27), (28): Xaa is A or G or is absent
IPKAXXVPTELRSVKMAKVXXXXXXXXXKEVQVEMVVEGX

SEQ ID NO: 30974 - protein, 40 aa, Artificial Sequence
  Non-cyclic GFR-binding peptide
  MOD_RES (4), (5), (39): Xaa is C or S
  MOD_RES (19), (20), (21), (22), (23): Xaa is A or G
  MOD_RES (24), (25), (26), (27): Xaa is A or G or is absent
PKPXXAPTKLRPVQVRKIXXXXXXXXXKKATVNMVVRSXG

SEQ ID NO: 30975 - protein, 34 aa, Artificial Sequence
  Non-cyclic GFR-binding peptide
  MOD_RES (1), (33): Xaa is C or S
XVPTELRPVQMRKIDENEKVVKKATVDMVVEGXG

SEQ ID NO: 30976 - protein, 44 aa, Artificial Sequence
  Non-cyclic GFR-binding peptide
  MOD_RES (6), (7), (41), (43): Xaa is C or S
  MOD_RES (21), (22), (23), (24), (25): Xaa is A or G
  MOD_RES (26), (27), (28), (29): Xaa is A or G or is absent
KIPKAXXVPTELRSVKMAKVXXXXXXXXXKEVQVDMVVEGXGXR

SEQ ID NO: 30977 - protein, 39 aa, Artificial Sequence
  Non-cyclic GFR-binding peptide
  MOD_RES (3), (3): Xaa is C or S
VQXRPTQVQLEPLTVLYYEIVRKKPIFEQLSNTLEDHLA

SEQ ID NO: 30978 - protein, 33 aa, Artificial Sequence
  Non-cyclic GFR-binding peptide
  MOD_RES (1), (1): Xaa is C or S
  MOD_RES (15), (16), (17), (18), (19): Xaa is A or G
  MOD_RES (20), (21), (22), (23): Xaa is A or G or is absent
XVSQDLSNITIQIMXXXXXXXXXIGEMSMIVKS

SEQ ID NO: 30979 - protein, 32 aa, Artificial Sequence
  Non-cyclic GFR-binding peptide
  MOD_RES (32), (32): Xaa is C or S
VPTELRPVQMRKIDEYDKVVKKATVEMVVEGX

SEQ ID NO: 30980 - protein, 35 aa, Artificial Sequence
  Non-cyclic GFR-binding peptide
  MOD_RES (3), (4), (35): Xaa is C or S
SPXXVSQDLRSVKIAKVIGKTPKIKEVQVMIVKSX

SEQ ID NO: 30981 - protein, 37 aa, Artificial Sequence
  Non-cyclic GFR-binding peptide
  MOD_RES (3), (4), (35), (37): Xaa is C or S
SPXXVPQDLRPVQIRKIVGRTPKVKKATVMVVKSXKX

SEQ ID NO: 30982 - protein, 37 aa, Artificial Sequence
  Non-cyclic GFR-binding peptide
  MOD_RES (2), (3), (35), (37): Xaa is C or S
AXXVPTELRPVQMRKIDEYDKVVKKATVEMVVEGXGX

SEQ ID NO: 30983 - protein, 38 aa, Artificial Sequence
  Non-cyclic GFR-binding peptide
  MOD_RES (5), (6): Xaa is C or S
  MOD_RES (20), (21), (22), (23), (24): Xaa is A or G
  MOD_RES (25), (26), (27), (28): Xaa is A or G or is absent
IPKAXXVPTELRPVQMRKIXXXXXXXXXKKATVEMVVE

SEQ ID NO: 30984 - protein, 42 aa, Artificial Sequence
  Non-cyclic GFR-binding peptide
  MOD_RES (6), (7), (40), (42): Xaa is C or S
  MOD_RES (21), (22), (23), (24), (25): Xaa is A or G
  MOD_RES (26), (27), (28), (29): Xaa is A or G or is absent
ASASPXXVSQDLSNITIQIMXXXXXXXXXIGEMSMIVKSXKX

SEQ ID NO: 30985 - protein, 42 aa, Artificial Sequence
  Non-cyclic GFR-binding peptide
  MOD_RES (7), (39), (41): Xaa is C or S
HVTKPTXAPTKLSNITVQIMDDSSNVIIGEMSNMVVRSXGXH

SEQ ID NO: 30986 - protein, 36 aa, Artificial Sequence
  Non-cyclic GFR-binding peptide
  MOD_RES (2), (3), (34), (36): Xaa is C or S
PXXVPQALSNITIQIMVGRKPKVIGEMSMIVRSXKX

SEQ ID NO: 30987 - protein, 34 aa, Artificial Sequence
  Non-cyclic GFR-binding peptide
  MOD_RES (1), (2): Xaa is C or S
  MOD_RES (16), (17), (18), (19), (20): Xaa is A or G
  MOD_RES (21), (22), (23), (24): Xaa is A or G or is absent
XXVPQDLRSVKIAKVXXXXXXXXXKEVQVMVVKS

SEQ ID NO: 30988 - protein, 36 aa, Artificial Sequence
  Non-cyclic GFR-binding peptide
  MOD_RES (1), (2), (34), (36): Xaa is C or S
XXVPTELRPVQMRKIDEYDKVVKKATVEMVVEGXGX

SEQ ID NO: 30989 - protein, 35 aa, Artificial Sequence
  Non-cyclic GFR-binding peptide
  MOD_RES (34), (34): Xaa is C or S
  MOD_RES (14), (15), (16), (17), (18): Xaa is A or G
  MOD_RES (19), (20), (21), (22): Xaa is A or G or is absent
VPTEEEPLPMVYYXXXXXXXXXEQLSNFLQHNKXE

SEQ ID NO: 30990 - protein, 41 aa, Artificial Sequence
  Non-cyclic GFR-binding peptide
  MOD_RES (4), (5), (39), (41): Xaa is C or S
  MOD_RES (19), (20), (21), (22), (23): Xaa is A or G
  MOD_RES (24), (25), (26), (27): Xaa is A or G or is absent
PKPXXAPTKLRPVQVRKIXXXXXXXXXKKATVNMVVRSXGX

SEQ ID NO: 30991 - protein, 35 aa, Artificial Sequence
  Non-cyclic GFR-binding peptide
  MOD_RES (2), (3), (34): Xaa is C or S
PXXVPQDLSNITIQIMVGRTPKVIGEMSMVVKSXK

SEQ ID NO: 30992 - protein, 30 aa, Artificial Sequence
  Non-cyclic GFR-binding peptide
VSQDLSNITIQIMIGKTPKIIGEMSMIVKS

SEQ ID NO: 30993 - protein, 39 aa, Artificial Sequence
  Non-cyclic GFR-binding peptide
  MOD_RES (6), (7), (38): Xaa is C or S
ASASPXXVPQDLSNITIQIMVGRTPKVIGEMSMVVKSXK

SEQ ID NO: 30994 - protein, 39 aa, Artificial Sequence
  Non-cyclic GFR-binding peptide
  MOD_RES (3), (4), (38): Xaa is C or S
  MOD_RES (18), (19), (20), (21), (22): Xaa is A or G
  MOD_RES (23), (24), (25), (26): Xaa is A or G or is absent
KAXXVPTELSNITMQIMXXXXXXXXXIGEMSEMVVEGXG

SEQ ID NO: 30995 - protein, 39 aa, Artificial Sequence
  Non-cyclic GFR-binding peptide
  MOD_RES (4), (5), (39): Xaa is C or S
  MOD_RES (19), (20), (21), (22), (23): Xaa is A or G
  MOD_RES (24), (25), (26), (27): Xaa is A or G or is absent
PKAXXVPTELSNITMQIMXXXXXXXXXIGEMSEMVVEGX

SEQ ID NO: 30996 - protein, 40 aa, Artificial Sequence
  Non-cyclic GFR-binding peptide
  MOD_RES (3), (40): Xaa is C or S
  MOD_RES (19), (20), (21), (22), (23): Xaa is A or G
  MOD_RES (24), (25), (26), (27): Xaa is A or G or is absent
VQXRPTQVQLEPLPVVYYXXXXXXXXXEQLSNTLEDHLAX

SEQ ID NO: 30997 - protein, 42 aa, Artificial Sequence
  Non-cyclic GFR-binding peptide
  MOD_RES (6), (7), (40), (42): Xaa is C or S
  MOD_RES (21), (22), (23), (24), (25): Xaa is A or G
  MOD_RES (26), (27), (28), (29): Xaa is A or G or is absent
ASAAPXXVPQALSNITIQIMXXXXXXXXXIGEMSMIVRSXKX

SEQ ID NO: 30998 - protein, 33 aa, Artificial Sequence
  Non-cyclic GFR-binding peptide
  MOD_RES (2), (3): Xaa is C or S
PXXVSQDLRPVQIRKIIGKTPKIKKATVMIVKS

SEQ ID NO: 30999 - protein, 37 aa, Artificial Sequence
  Non-cyclic GFR-binding peptide
  MOD_RES (3), (3): Xaa is C or S
VKXQPSRVHHEPLPVVYYEYVRKKPKLEQLSNRLEEH

SEQ ID NO: 31000 - protein, 36 aa, Artificial Sequence
  Non-cyclic GFR-binding peptide
  MOD_RES (3), (3): Xaa is C or S
  MOD_RES (17), (18), (19), (20), (21): Xaa is A or G
  MOD_RES (22), (23), (24), (25): Xaa is A or G or is absent
PTXAPTKLRPVQVRKIXXXXXXXXXKKATVNMVVRS

SEQ ID NO: 31001 - protein, 34 aa, Artificial Sequence
  Non-cyclic GFR-binding peptide
RPTQVQLEPLPVVYYEIVRKKPIFEQLSNTLEDH

SEQ ID NO: 31002 - protein, 34 aa, Artificial Sequence
  Non-cyclic GFR-binding peptide
  MOD_RES (3), (4): Xaa is C or S
SPXXVPQDLSNITIQIMVGRTPKVIGEMSMVVKS

SEQ ID NO: 31003 - protein, 43 aa, Artificial Sequence
  Non-cyclic GFR-binding peptide
  MOD_RES (5), (6), (40), (42): Xaa is C or S
  MOD_RES (20), (21), (22), (23), (24): Xaa is A or G
  MOD_RES (25), (26), (27), (28): Xaa is A or G or is absent
IPKAXXVPTELSNITMQIMXXXXXXXXXIGEMSDMVVEGXGXR

SEQ ID NO: 31004 - protein, 41 aa, Artificial Sequence
  Non-cyclic GFR-binding peptide
  MOD_RES (4), (5), (39), (41): Xaa is C or S
  MOD_RES (19), (20), (21), (22), (23): Xaa is A or G
  MOD_RES (24), (25), (26), (27): Xaa is A or G or is absent
PKPXXAPTKLSNITVQIMXXXXXXXXXIGEMSNMVVRSXGX

SEQ ID NO: 31005 - protein, 33 aa, Artificial Sequence
  Non-cyclic GFR-binding peptide
  MOD_RES (1), (32): Xaa is C or S
XVPQDLRSVKIAKVVGRTPKVKEVQVMVVKSXK

SEQ ID NO: 31006 - protein, 39 aa, Artificial Sequence
  Non-cyclic GFR-binding peptide
  MOD_RES (4), (36), (38): Xaa is C or S
KPTXAPTKLSNITVQIMDDSSNVIIGEMSNMVVRSXGXH

SEQ ID NO: 31007 - protein, 36 aa, Artificial Sequence
  Non-cyclic GFR-binding peptide
  MOD_RES (3), (4), (36): Xaa is C or S
KPXXAPTKLRPVQVRKIDDSSNVIKKATVNMVVRSX

SEQ ID NO: 31008 - protein, 34 aa, Artificial Sequence
  Non-cyclic GFR-binding peptide
  MOD_RES (2), (3), (34): Xaa is C or S
PXXVPQDLSNITIQIMVGRTPKVIGEMSMVVKSX

SEQ ID NO: 31009 - protein, 36 aa, Artificial Sequence
  Non-cyclic GFR-binding peptide
  MOD_RES (3), (4), (36): Xaa is C or S
KPXXAPTQLRSVKVAKVDDSSNVIKEVQVNMVVRAX

SEQ ID NO: 31010 - protein, 39 aa, Artificial Sequence
  Non-cyclic GFR-binding peptide
  MOD_RES (2), (3), (36), (38): Xaa is C or S
  MOD_RES (17), (18), (19), (20), (21): Xaa is A or G
  MOD_RES (22), (23), (24), (25): Xaa is A or G or is absent
PXXVPQALRSVKIAKVXXXXXXXXXKEVQVMIVRSXKXS

SEQ ID NO: 31011 - protein, 39 aa, Artificial Sequence
  Non-cyclic GFR-binding peptide
  MOD_RES (5), (6), (39): Xaa is C or S
  MOD_RES (20), (21), (22), (23), (24): Xaa is A or G
  MOD_RES (25), (26), (27), (28): Xaa is A or G or is absent
SASPXXVSQDLSNITIQIMXXXXXXXXXIGEMSMIVKSX

SEQ ID NO: 31012 - protein, 35 aa, Artificial Sequence
  Non-cyclic GFR-binding peptide
  MOD_RES (5), (5): Xaa is C or S
TKPTXAPTKLRSVKVAKVDDSSNVIKEVQVNMVVR

SEQ ID NO: 31013 - protein, 41 aa, Artificial Sequence
  Non-cyclic GFR-binding peptide
  MOD_RES (6), (40): Xaa is C or S
  MOD_RES (20), (21), (22), (23), (24): Xaa is A or G
  MOD_RES (25), (26), (27), (28): Xaa is A or G or is absent
VTKPTXAPTKLSNITVQIMXXXXXXXXXIGEMSNMVVRSXG

SEQ ID NO: 31014 - protein, 37 aa, Artificial Sequence
  Non-cyclic GFR-binding peptide
  MOD_RES (2), (3), (35), (37): Xaa is C or S
AXXVPTELRPVQMRKIDENEKVVKKATVDMVVEGXGX

SEQ ID NO: 31015 - protein, 43 aa, Artificial Sequence
  Non-cyclic GFR-binding peptide
  MOD_RES (5), (6), (40), (42): Xaa is C or S
  MOD_RES (20), (21), (22), (23), (24): Xaa is A or G
  MOD_RES (25), (26), (27), (28): Xaa is A or G or is absent
VPKPXXAPTKLRPVQVRKIXXXXXXXXXKKATVNMVVRSXGXH

SEQ ID NO: 31016 - protein, 36 aa, Artificial Sequence
  Non-cyclic GFR-binding peptide
  MOD_RES (3), (4): Xaa is C or S
  MOD_RES (18), (19), (20), (21), (22): Xaa is A or G
  MOD_RES (23), (24), (25), (26): Xaa is A or G or is absent
KPXXAPTQLRPVQVRKIXXXXXXXXXKKATVNMVVR

SEQ ID NO: 31017 - protein, 36 aa, Artificial Sequence
  Non-cyclic GFR-binding peptide
  MOD_RES (5), (6): Xaa is C or S
SASPXXVSQDLRSVKIAKVIGKTPKIKEVQVMIVKS

SEQ ID NO: 31018 - protein, 38 aa, Artificial Sequence
  Non-cyclic GFR-binding peptide
  MOD_RES (4), (5), (36), (38): Xaa is C or S
ASPXXVPQDLSNITIQIMVGRTPKVIGEMSMVVKSXKX

SEQ ID NO: 31019 - protein, 38 aa, Artificial Sequence
  Non-cyclic GFR-binding peptide
  MOD_RES (4), (5), (36), (38): Xaa is C or S
ASPXXVPQDLRSVKIAKVVGRTPKVKEVQVMVVKSXKX

SEQ ID NO: 31020 - protein, 38 aa, Artificial Sequence
  Non-cyclic GFR-binding peptide
  MOD_RES (3), (37): Xaa is C or S
  MOD_RES (17), (18), (19), (20), (21): Xaa is A or G
  MOD_RES (22), (23), (24), (25): Xaa is A or G or is absent
PTXAPTKLSNITVQIMXXXXXXXXXIGEMSNMVVRSXG

SEQ ID NO: 31021 - protein, 36 aa, Artificial Sequence
  Non-cyclic GFR-binding peptide
  MOD_RES (1), (2), (34), (36): Xaa is C or S
XXVPTELRPVQMRKIDENEKVVKKATVDMVVEGXGX

SEQ ID NO: 31022 - protein, 33 aa, Artificial Sequence
  Non-cyclic GFR-binding peptide
  MOD_RES (1), (33): Xaa is C or S
XVPTELRSVKMAKVDEYDKVVKEVQVEMVVEGX

SEQ ID NO: 31023 - protein, 34 aa, Artificial Sequence
  Non-cyclic GFR-binding peptide
  MOD_RES (15), (16), (17), (18), (19): Xaa is A or G
  MOD_RES (20), (21), (22), (23): Xaa is A or G or is absent
PSRVHHEPLTVLYYXXXXXXXXXEQLSNRLEEHL

SEQ ID NO: 31024 - protein, 33 aa, Artificial Sequence
  Non-cyclic GFR-binding peptide
  MOD_RES (1), (32): Xaa is C or S
XVSQDLRSVKIAKVIGKTPKIKEVQVMIVKSXK

SEQ ID NO: 31025 - protein, 37 aa, Artificial Sequence
  Non-cyclic GFR-binding peptide
  MOD_RES (1), (34), (36): Xaa is C or S
  MOD_RES (15), (16), (17), (18), (19): Xaa is A or G
  MOD_RES (20), (21), (22), (23): Xaa is A or G or is absent
XVSQDLRSVKIAKVXXXXXXXXXKEVQVMIVKSXKXS

SEQ ID NO: 31026 - protein, 35 aa, Artificial Sequence
  Non-cyclic GFR-binding peptide
  MOD_RES (32), (34): Xaa is C or S
VPTELRPVQMRKIDENEKVVKKATVDMVVEGXGXR

SEQ ID NO: 31027 - protein, 39 aa, Artificial Sequence
  Non-cyclic GFR-binding peptide
  MOD_RES (6), (7), (38): Xaa is C or S
ASASPXXVSQDLSNITIQIMIGKTPKIIGEMSMIVKSXK

SEQ ID NO: 31028 - protein, 36 aa, Artificial Sequence
  Non-cyclic GFR-binding peptide
  MOD_RES (1), (2), (34), (36): Xaa is C or S
XXAPTKLRPVQVRKIDDSSNVIKKATVNMVVRSXGX

SEQ ID NO: 31029 - protein, 38 aa, Artificial Sequence
  Non-cyclic GFR-binding peptide
  MOD_RES (2), (3), (36), (38): Xaa is C or S
  MOD_RES (17), (18), (19), (20), (21): Xaa is A or G
  MOD_RES (22), (23), (24), (25): Xaa is A or G or is absent
PXXVPQALRSVKIAKVXXXXXXXXXKEVQVMIVRSXKX

SEQ ID NO: 31030 - protein, 34 aa, Artificial Sequence
  Non-cyclic GFR-binding peptide
  MOD_RES (16), (17), (18), (19), (20): Xaa is A or G
  MOD_RES (21), (22), (23), (24): Xaa is A or G or is absent
RPTQVQLEPLTVLYYXXXXXXXXXEQLSNTLEDH

SEQ ID NO: 31031 - protein, 37 aa, Artificial Sequence
  Non-cyclic GFR-binding peptide
  MOD_RES (4), (5), (37): Xaa is C or S
PKPXXAPTQLSNITVQIMDDSSNVIIGEMSNMVVRAX

SEQ ID NO: 31032 - protein, 40 aa, Artificial Sequence
  Non-cyclic GFR-binding peptide
  MOD_RES (4), (38), (40): Xaa is C or S
  MOD_RES (18), (19), (20), (21), (22): Xaa is A or G
  MOD_RES (23), (24), (25), (26): Xaa is A or G or is absent
KPTXAPTKLRSVKVAKVXXXXXXXXXKEVQVNMVVRSXGX

SEQ ID NO: 31033 - protein, 34 aa, Artificial Sequence
  Non-cyclic GFR-binding peptide
  MOD_RES (16), (17), (18), (19), (20): Xaa is A or G
  MOD_RES (21), (22), (23), (24): Xaa is A or G or is absent
RPTQVQLEPLPVVYYXXXXXXXXXEQLSNTLEDH

SEQ ID NO: 31034 - protein, 38 aa, Artificial Sequence
  Non-cyclic GFR-binding peptide
  MOD_RES (5), (37): Xaa is C or S
TKPTXAPTKLRSVKVAKVDDSSNVIKEVQVNMVVRSXG

SEQ ID NO: 31035 - protein, 40 aa, Artificial Sequence
  Non-cyclic GFR-binding peptide
  MOD_RES (5), (6), (40): Xaa is C or S
  MOD_RES (20), (21), (22), (23), (24): Xaa is A or G
  MOD_RES (25), (26), (27), (28): Xaa is A or G or is absent
IPKAXXVPTELSNITMQIMXXXXXXXXXIGEMSDMVVEGX

SEQ ID NO: 31036 - protein, 41 aa, Artificial Sequence
  Non-cyclic GFR-binding peptide
  MOD_RES (1), (38), (40): Xaa is C or S
XQPSRVHHEPLTVLYYEYVRKKPKLEQLSNRLEEHLEXAXA

SEQ ID NO: 31037 - protein, 36 aa, Artificial Sequence
  Non-cyclic GFR-binding peptide
  MOD_RES (1), (33), (35): Xaa is C or S
XVPTELSNITMQIMDENEKVVIGEMSDMVVEGXGXR

SEQ ID NO: 31038 - protein, 37 aa, Artificial Sequence
  Non-cyclic GFR-binding peptide
  MOD_RES (1), (1): Xaa is C or S
  MOD_RES (17), (18), (19), (20), (21): Xaa is A or G
  MOD_RES (22), (23), (24), (25): Xaa is A or G or is absent
XQPSRVHHEPLPVVYYXXXXXXXXXEQLSNRLEEHLE

SEQ ID NO: 31039 - protein, 37 aa, Artificial Sequence
  Non-cyclic GFR-binding peptide
  MOD_RES (1), (2), (36): Xaa is C or S
  MOD_RES (16), (17), (18), (19), (20): Xaa is A or G
  MOD_RES (21), (22), (23), (24): Xaa is A or G or is absent
XXAPTQLSNITVQIMXXXXXXXXXIGEMSNMVVRAXG

SEQ ID NO: 31040 - protein, 39 aa, Artificial Sequence
  Non-cyclic GFR-binding peptide
  MOD_RES (5), (6): Xaa is C or S
  MOD_RES (20), (21), (22), (23), (24): Xaa is A or G
  MOD_RES (25), (26), (27), (28): Xaa is A or G or is absent
IPKAXXVPTELSNITMQIMXXXXXXXXXIGEMSEMVVEG

SEQ ID NO: 31041 - protein, 37 aa, Artificial Sequence
  Non-cyclic GFR-binding peptide
  MOD_RES (2), (3), (37): Xaa is C or S
  MOD_RES (17), (18), (19), (20), (21): Xaa is A or G
  MOD_RES (22), (23), (24), (25): Xaa is A or G or is absent
AXXVPTELRPVQMRKIXXXXXXXXXKKATVEMVVEGX

SEQ ID NO: 31042 - protein, 39 aa, Artificial Sequence
  Non-cyclic GFR-binding peptide
  MOD_RES (4), (5), (39): Xaa is C or S
  MOD_RES (19), (20), (21), (22), (23): Xaa is A or G
  MOD_RES (24), (25), (26), (27): Xaa is A or G or is absent
PKPXXAPTKLRPVQVRKIXXXXXXXXXKKATVNMVVRSX

SEQ ID NO: 31043 - protein, 36 aa, Artificial Sequence
  Non-cyclic GFR-binding peptide
  MOD_RES (3), (4): Xaa is C or S
  MOD_RES (18), (19), (20), (21), (22): Xaa is A or G
  MOD_RES (23), (24), (25), (26): Xaa is A or G or is absent
SPXXVSQDLRPVQIRKIXXXXXXXXXKKATVMIVKS

SEQ ID NO: 31044 - protein, 35 aa, Artificial Sequence
  Non-cyclic GFR-binding peptide
  MOD_RES (1), (2), (34): Xaa is C or S
XXVPTELSNITMQIMDEYDKVVIGEMSEMVVEGXG

SEQ ID NO: 31045 - protein, 33 aa, Artificial Sequence
  Non-cyclic GFR-binding peptide
  MOD_RES (1), (1): Xaa is C or S
  MOD_RES (15), (16), (17), (18), (19): Xaa is A or G
  MOD_RES (20), (21), (22), (23): Xaa is A or G or is absent
XAPTQLRPVQVRKIXXXXXXXXXKKATVNMVVR

SEQ ID NO: 31046 - protein, 39 aa, Artificial Sequence
  Non-cyclic GFR-binding peptide
  MOD_RES (1), (2), (36), (38): Xaa is C or S
  MOD_RES (16), (17), (18), (19), (20): Xaa is A or G
  MOD_RES (21), (22), (23), (24): Xaa is A or G or is absent
XXAPTQLRPVQVRKIXXXXXXXXXKKATVNMVVRAXGXH

SEQ ID NO: 31047 - protein, 40 aa, Artificial Sequence
  Non-cyclic GFR-binding peptide
  MOD_RES (1), (38), (40): Xaa is C or S
XRPTQVQLEPLPVVYYEIVRKKPIFEQLSNTLEDHLAXKX

SEQ ID NO: 31048 - protein, 41 aa, Artificial Sequence
  Non-cyclic GFR-binding peptide
  MOD_RES (4), (5), (39), (41): Xaa is C or S
  MOD_RES (19), (20), (21), (22), (23): Xaa is A or G
  MOD_RES (24), (25), (26), (27): Xaa is A or G or is absent
PKPXXAPTKLRSVKVAKVXXXXXXXXXKEVQVNMVVRSXGX

SEQ ID NO: 31049 - protein, 35 aa, Artificial Sequence
  Non-cyclic GFR-binding peptide
  MOD_RES (32), (34): Xaa is C or S
APTKLRPVQVRKIDDSSNVIKKATVNMVVRSXGXH

SEQ ID NO: 31050 - protein, 36 aa, Artificial Sequence
  Non-cyclic GFR-binding peptide
  MOD_RES (2), (3): Xaa is C or S
  MOD_RES (17), (18), (19), (20), (21): Xaa is A or G
  MOD_RES (22), (23), (24), (25): Xaa is A or G or is absent
AXXVPTELRSVKMAKVXXXXXXXXXKEVQVEMVVEG

SEQ ID NO: 31051 - protein, 32 aa, Artificial Sequence
  Non-cyclic GFR-binding peptide
  MOD_RES (31), (31): Xaa is C or S
VPQDLSNITIQIMVGRTPKVIGEMSMVVKSXK

SEQ ID NO: 31052 - protein, 33 aa, Artificial Sequence
  Non-cyclic GFR-binding peptide
  MOD_RES (32), (32): Xaa is C or S
APTQLRPVQVRKIDDSSNVIKKATVNMVVRAXG

SEQ ID NO: 31053 - protein, 41 aa, Artificial Sequence
  Non-cyclic GFR-binding peptide
  MOD_RES (6), (7), (39), (41): Xaa is C or S
YVPKPXXAPTKLRPVQVRKIDDSSNVIKKATVNMVVRSXGX

SEQ ID NO: 31054 - protein, 42 aa, Artificial Sequence
  Non-cyclic GFR-binding peptide
  MOD_RES (5), (39), (41): Xaa is C or S
  MOD_RES (19), (20), (21), (22), (23): Xaa is A or G
  MOD_RES (24), (25), (26), (27): Xaa is A or G or is absent
EGLEXVPTEEEPLTMLYYXXXXXXXXXEQLSNFLQHNKXEXR

SEQ ID NO: 31055 - protein, 37 aa, Artificial Sequence
  Non-cyclic GFR-binding peptide
  MOD_RES (2), (34), (36): Xaa is C or S
TXAPTKLSNITVQIMDDSSNVIIGEMSNMVVRSXGXH

SEQ ID NO: 31056 - protein, 37 aa, Artificial Sequence
  Non-cyclic GFR-binding peptide
  MOD_RES (1), (2), (36): Xaa is C or S
  MOD_RES (16), (17), (18), (19), (20): Xaa is A or G
  MOD_RES (21), (22), (23), (24): Xaa is A or G or is absent
XXVPTELSNITMQIMXXXXXXXXXIGEMSDMVVEGXG

SEQ ID NO: 31057 - protein, 39 aa, Artificial Sequence
  Non-cyclic GFR-binding peptide
  MOD_RES (3), (37), (39): Xaa is C or S
  MOD_RES (17), (18), (19), (20), (21): Xaa is A or G
  MOD_RES (22), (23), (24), (25): Xaa is A or G or is absent
PTXAPTKLRSVKVAKVXXXXXXXXXKEVQVNMVVRSXGX

SEQ ID NO: 31058 - protein, 37 aa, Artificial Sequence
  Non-cyclic GFR-binding peptide
  MOD_RES (4), (5): Xaa is C or S
  MOD_RES (19), (20), (21), (22), (23): Xaa is A or G
  MOD_RES (24), (25), (26), (27): Xaa is A or G or is absent
PKAXXVPTELRSVKMAKVXXXXXXXXXKEVQVDMVVE

SEQ ID NO: 31059 - protein, 35 aa, Artificial Sequence
  Non-cyclic GFR-binding peptide
  MOD_RES (1), (2): Xaa is C or S
  MOD_RES (16), (17), (18), (19), (20): Xaa is A or G
  MOD_RES (21), (22), (23), (24): Xaa is A or G or is absent
XXAPTKLRSVKVAKVXXXXXXXXXKEVQVNMVVRS

SEQ ID NO: 31060 - protein, 41 aa, Artificial Sequence
  Non-cyclic GFR-binding peptide
  MOD_RES (6), (7), (40): Xaa is C or S
  MOD_RES (21), (22), (23), (24), (25): Xaa is A or G
  MOD_RES (26), (27), (28), (29): Xaa is A or G or is absent
ASASPXXVPQDLRPVQIRKIXXXXXXXXXKKATVMVVKSXK

SEQ ID NO: 31061 - protein, 33 aa, Artificial Sequence
  Non-cyclic GFR-binding peptide
  MOD_RES (1), (32): Xaa is C or S
XVSQDLSNITIQIMIGKTPKIIGEMSMIVKSXK

SEQ ID NO: 31062 - protein, 39 aa, Artificial Sequence
  Non-cyclic GFR-binding peptide
  MOD_RES (3), (3): Xaa is C or S
  MOD_RES (19), (20), (21), (22), (23): Xaa is A or G
  MOD_RES (24), (25), (26), (27): Xaa is A or G or is absent
VKXQPSRVHHEPLPVVYYXXXXXXXXXEQLSNRLEEHLE

SEQ ID NO: 31063 - protein, 38 aa, Artificial Sequence
  Non-cyclic GFR-binding peptide
  MOD_RES (5), (5): Xaa is C or S
EGLEXVPTEEEPLPMVYYRIKPHQGQHEQLSNFLQHNK

SEQ ID NO: 31064 - protein, 39 aa, Artificial Sequence
  Non-cyclic GFR-binding peptide
  MOD_RES (2), (36), (38): Xaa is C or S
  MOD_RES (16), (17), (18), (19), (20): Xaa is A or G
  MOD_RES (21), (22), (23), (24): Xaa is A or G or is absent
EXVPTEEEPLPMVYYXXXXXXXXXEQLSNFLQHNKXEXR

SEQ ID NO: 31065 - protein, 36 aa, Artificial Sequence
  Non-cyclic GFR-binding peptide
  MOD_RES (2), (2): Xaa is C or S
QXRPTQVQLEPLTVLYYEIVRKKPIFEQLSNTLEDH

SEQ ID NO: 31066 - protein, 40 aa, Artificial Sequence
  Non-cyclic GFR-binding peptide
  MOD_RES (6), (7), (39): Xaa is C or S
KIPKAXXVPTELSNITMQIMDENEKVVIGEMSDMVVEGXG

SEQ ID NO: 31067 - protein, 37 aa, Artificial Sequence
  Non-cyclic GFR-binding peptide
  MOD_RES (4), (5), (36): Xaa is C or S
AAPXXVPQALSNITIQIMVGRKPKVIGEMSMIVRSXK

SEQ ID NO: 31068 - protein, 34 aa, Artificial Sequence
  Non-cyclic GFR-binding peptide
  MOD_RES (32), (34): Xaa is C or S
VPTELRSVKMAKVDENEKVVKEVQVDMVVEGXGX

SEQ ID NO: 31069 - protein, 36 aa, Artificial Sequence
  Non-cyclic GFR-binding peptide
  MOD_RES (35), (35): Xaa is C or S
TQVQLEPLPVVYYEIVRKKPIFEQLSNTLEDHLAXK

SEQ ID NO: 31070 - protein, 37 aa, Artificial Sequence
  Non-cyclic GFR-binding peptide
  MOD_RES (34), (36): Xaa is C or S
  MOD_RES (14), (15), (16), (17), (18): Xaa is A or G
  MOD_RES (19), (20), (21), (22): Xaa is A or G or is absent
VPTELRSVKMAKVXXXXXXXXXKEVQVDMVVEGXGXR

SEQ ID NO: 31071 - protein, 35 aa, Artificial Sequence
  Non-cyclic GFR-binding peptide
  MOD_RES (4), (5): Xaa is C or S
PKAXXVPTELRSVKMAKVDENEKVVKEVQVDMVVE

SEQ ID NO: 31072 - protein, 30 aa, Artificial Sequence
  Non-cyclic GFR-binding peptide
VPTELRPVQMRKIDEYDKVVKKATVEMVVE

SEQ ID NO: 31073 - protein, 32 aa, Artificial Sequence
  Non-cyclic GFR-binding peptide
  MOD_RES (14), (15), (16), (17), (18): Xaa is A or G
  MOD_RES (19), (20), (21), (22): Xaa is A or G or is absent
VSQDLSNITIQIMXXXXXXXXXIGEMSMIVKS

SEQ ID NO: 31074 - protein, 37 aa, Artificial Sequence
  Non-cyclic GFR-binding peptide
  MOD_RES (4), (5): Xaa is C or S
  MOD_RES (19), (20), (21), (22), (23): Xaa is A or G
  MOD_RES (24), (25), (26), (27): Xaa is A or G or is absent
PKPXXAPTKLRPVQVRKIXXXXXXXXXKKATVNMVVR

SEQ ID NO: 31075 - protein, 42 aa, Artificial Sequence
  Non-cyclic GFR-binding peptide
  MOD_RES (6), (7), (39), (41): Xaa is C or S
SIPKAXXVPTELRPVQMRKIDEYDKVVKKATVEMVVEGXGXR

SEQ ID NO: 31076 - protein, 38 aa, Artificial Sequence
  Non-cyclic GFR-binding peptide
  MOD_RES (1), (2), (35), (37): Xaa is C or S
  MOD_RES (16), (17), (18), (19), (20): Xaa is A or G
  MOD_RES (21), (22), (23), (24): Xaa is A or G or is absent
XXVPQALSNITIQIMXXXXXXXXXIGEMSMIVRSXKXS

SEQ ID NO: 31077 - protein, 35 aa, Artificial Sequence
  Non-cyclic GFR-binding peptide
  MOD_RES (1), (35): Xaa is C or S
  MOD_RES (15), (16), (17), (18), (19): Xaa is A or G
  MOD_RES (20), (21), (22), (23): Xaa is A or G or is absent
XVPTELSNITMQIMXXXXXXXXXIGEMSDMVVEGX

SEQ ID NO: 31078 - protein, 35 aa, Artificial Sequence
  Non-cyclic GFR-binding peptide
  MOD_RES (1), (35): Xaa is C or S
  MOD_RES (15), (16), (17), (18), (19): Xaa is A or G
  MOD_RES (20), (21), (22), (23): Xaa is A or G or is absent
XAPTQLRSVKVAKVXXXXXXXXXKEVQVNMVVRAX

SEQ ID NO: 31079 - protein, 39 aa, Artificial Sequence
  Non-cyclic GFR-binding peptide
  MOD_RES (6), (7), (38): Xaa is C or S
ASASPXXVPQDLRSVKIAKVVGRTPKVKEVQVMVVKSXK

SEQ ID NO: 31080 - protein, 38 aa, Artificial Sequence
  Non-cyclic GFR-binding peptide
  MOD_RES (4), (5), (37): Xaa is C or S
PKPXXAPTQLSNITVQIMDDSSNVIIGEMSNMVVRAXG

SEQ ID NO: 31081 - protein, 39 aa, Artificial Sequence
  Non-cyclic GFR-binding peptide
  MOD_RES (4), (5), (39): Xaa is C or S
  MOD_RES (19), (20), (21), (22), (23): Xaa is A or G
  MOD_RES (24), (25), (26), (27): Xaa is A or G or is absent
PKAXXVPTELRPVQMRKIXXXXXXXXXKKATVDMVVEGX

SEQ ID NO: 31082 - protein, 33 aa, Artificial Sequence
  Non-cyclic GFR-binding peptide
  MOD_RES (15), (16), (17), (18), (19): Xaa is A or G
  MOD_RES (20), (21), (22), (23): Xaa is A or G or is absent
PSRVHHEPLPVVYYXXXXXXXXXEQLSNRLEEH

SEQ ID NO: 31083 - protein, 40 aa, Artificial Sequence
  Non-cyclic GFR-binding peptide
  MOD_RES (4), (5), (39): Xaa is C or S
  MOD_RES (19), (20), (21), (22), (23): Xaa is A or G
  MOD_RES (24), (25), (26), (27): Xaa is A or G or is absent
PKPXXAPTQLSNITVQIMXXXXXXXXXIGEMSNMVVRAXG

SEQ ID NO: 31084 - protein, 38 aa, Artificial Sequence
  Non-cyclic GFR-binding peptide
  MOD_RES (4), (5), (38): Xaa is C or S
  MOD_RES (19), (20), (21), (22), (23): Xaa is A or G
  MOD_RES (24), (25), (26), (27): Xaa is A or G or is absent
AAPXXVPQALRSVKIAKVXXXXXXXXXKEVQVMIVRSX

SEQ ID NO: 31085 - protein, 36 aa, Artificial Sequence
  Non-cyclic GFR-binding peptide
  MOD_RES (1), (2), (33), (35): Xaa is C or S
XXVPQALRPVQIRKIVGRKPKVKKATVMIVRSXKXS

SEQ ID NO: 31086 - protein, 40 aa, Artificial Sequence
  Non-cyclic GFR-binding peptide
  MOD_RES (5), (37), (39): Xaa is C or S
TKPTXAPTKLRPVQVRKIDDSSNVIKKATVNMVVRSXGXH

SEQ ID NO: 31087 - protein, 32 aa, Artificial Sequence
  Non-cyclic GFR-binding peptide
  MOD_RES (14), (15), (16), (17), (18): Xaa is A or G
  MOD_RES (19), (20), (21), (22): Xaa is A or G or is absent
APTQLRSVKVAKVXXXXXXXXXKEVQVNMVVR

SEQ ID NO: 31088 - protein, 38 aa, Artificial Sequence
  Non-cyclic GFR-binding peptide
  MOD_RES (5), (6): Xaa is C or S
  MOD_RES (20), (21), (22), (23), (24): Xaa is A or G
  MOD_RES (25), (26), (27), (28): Xaa is A or G or is absent
VPKPXXAPTQLRSVKVAKVXXXXXXXXXKEVQVNMVVR

SEQ ID NO: 31089 - protein, 40 aa, Artificial Sequence
  Non-cyclic GFR-binding peptide
  MOD_RES (5), (6), (39): Xaa is C or S
  MOD_RES (20), (21), (22), (23), (24): Xaa is A or G
  MOD_RES (25), (26), (27), (28): Xaa is A or G or is absent
SASPXXVPQDLRPVQIRKIXXXXXXXXXKKATVMVVKSXK

SEQ ID NO: 31090 - protein, 40 aa, Artificial Sequence
  Non-cyclic GFR-binding peptide
  MOD_RES (6), (40): Xaa is C or S
DEGLEXVPTEEEPLTMLYYRIKPHQGQHEQLSNFLQHNKX

SEQ ID NO: 31091 - protein, 37 aa, Artificial Sequence
  Non-cyclic GFR-binding peptide
  MOD_RES (1), (2), (35), (37): Xaa is C or S
  MOD_RES (16), (17), (18), (19), (20): Xaa is A or G
  MOD_RES (21), (22), (23), (24): Xaa is A or G or is absent
XXVPQDLSNITIQIMXXXXXXXXXIGEMSMVVKSXKX

SEQ ID NO: 31092 - protein, 32 aa, Artificial Sequence
  Non-cyclic GFR-binding peptide
  MOD_RES (14), (15), (16), (17), (18): Xaa is A or G
  MOD_RES (19), (20), (21), (22): Xaa is A or G or is absent
VPQALSNITIQIMXXXXXXXXXIGEMSMIVRS

SEQ ID NO: 31093 - protein, 34 aa, Artificial Sequence
  Non-cyclic GFR-binding peptide
  MOD_RES (1), (1): Xaa is C or S
  MOD_RES (15), (16), (17), (18), (19): Xaa is A or G
  MOD_RES (20), (21), (22), (23): Xaa is A or G or is absent
XAPTKLRPVQVRKIXXXXXXXXXKKATVNMVVRS

SEQ ID NO: 31094 - protein, 40 aa, Artificial Sequence
  Non-cyclic GFR-binding peptide
  MOD_RES (6), (7): Xaa is C or S
  MOD_RES (21), (22), (23), (24), (25): Xaa is A or G
  MOD_RES (26), (27), (28), (29): Xaa is A or G or is absent
SIPKAXXVPTELSNITMQIMXXXXXXXXXIGEMSEMVVEG

SEQ ID NO: 31095 - protein, 39 aa, Artificial Sequence
  Non-cyclic GFR-binding peptide
  MOD_RES (3), (3): Xaa is C or S
  MOD_RES (19), (20), (21), (22), (23): Xaa is A or G
  MOD_RES (24), (25), (26), (27): Xaa is A or G or is absent
VQXRPTQVQLEPLTVLYYXXXXXXXXXEQLSNTLEDHLA

SEQ ID NO: 31096 - protein, 37 aa, Artificial Sequence
  Non-cyclic GFR-binding peptide
  MOD_RES (4), (5), (36): Xaa is C or S
ASPXXVPQDLRPVQIRKIVGRTPKVKKATVMVVKSXK

SEQ ID NO: 31097 - protein, 42 aa, Artificial Sequence
  Non-cyclic GFR-binding peptide
  MOD_RES (6), (7), (39), (41): Xaa is C or S
KIPKAXXVPTELRSVKMAKVDENEKVVKEVQVDMVVEGXGXR

SEQ ID NO: 31098 - protein, 35 aa, Artificial Sequence
  Non-cyclic GFR-binding peptide
  MOD_RES (2), (3), (35): Xaa is C or S
AXXVPTELRPVQMRKIDEYDKVVKKATVEMVVEGX

SEQ ID NO: 31099 - protein, 37 aa, Artificial Sequence
  Non-cyclic GFR-binding peptide
  MOD_RES (3), (35), (37): Xaa is C or S
PTXAPTKLRSVKVAKVDDSSNVIKEVQVNMVVRSXGX

SEQ ID NO: 31100 - protein, 35 aa, Artificial Sequence
  Non-cyclic GFR-binding peptide
  MOD_RES (4), (5): Xaa is C or S
AAPXXVPQALSNITIQIMVGRKPKVIGEMSMIVRS

SEQ ID NO: 31101 - protein, 34 aa, Artificial Sequence
  Non-cyclic GFR-binding peptide
  MOD_RES (31), (33): Xaa is C or S
VSQDLSNITIQIMIGKTPKIIGEMSMIVKSXKXS

SEQ ID NO: 31102 - protein, 39 aa, Artificial Sequence
  Non-cyclic GFR-binding peptide
  MOD_RES (2), (3), (36), (38): Xaa is C or S
  MOD_RES (17), (18), (19), (20), (21): Xaa is A or G
  MOD_RES (22), (23), (24), (25): Xaa is A or G or is absent
PXXVPQALRPVQIRKIXXXXXXXXXKKATVMIVRSXKXS

SEQ ID NO: 31103 - protein, 37 aa, Artificial Sequence
  Non-cyclic GFR-binding peptide
  MOD_RES (37), (37): Xaa is C or S
RPTQVQLEPLTVLYYEIVRKKPIFEQLSNTLEDHLAX

SEQ ID NO: 31104 - protein, 40 aa, Artificial Sequence
  Non-cyclic GFR-binding peptide
  MOD_RES (6), (40): Xaa is C or S
  MOD_RES (20), (21), (22), (23), (24): Xaa is A or G
  MOD_RES (25), (26), (27), (28): Xaa is A or G or is absent
DEGLEXVPTEEEPLTMLYYXXXXXXXXXEQLSNFLQHNKX

SEQ ID NO: 31105 - protein, 41 aa, Artificial Sequence
  Non-cyclic GFR-binding peptide
  MOD_RES (5), (6), (38), (40): Xaa is C or S
IPKAXXVPTELSNITMQIMDEYDKVVIGEMSEMVVEGXGXR

SEQ ID NO: 31106 - protein, 33 aa, Artificial Sequence
  Non-cyclic GFR-binding peptide
  MOD_RES (1), (2): Xaa is C or S
XXVPTELRPVQMRKIDENEKVVKKATVDMVVEG

SEQ ID NO: 31107 - protein, 35 aa, Artificial Sequence
  Non-cyclic GFR-binding peptide
  MOD_RES (1), (2), (34): Xaa is C or S
XXAPTQLRSVKVAKVDDSSNVIKEVQVNMVVRAXG

SEQ ID NO: 31108 - protein, 33 aa, Artificial Sequence
  Non-cyclic GFR-binding peptide
  MOD_RES (1), (2), (33): Xaa is C or S
XXVPQDLSNITIQIMVGRTPKVIGEMSMVVKSX

SEQ ID NO: 31109 - protein, 38 aa, Artificial Sequence
  Non-cyclic GFR-binding peptide
  MOD_RES (5), (5): Xaa is C or S
EGLEXVPTEEEPLTMLYYRIKPHQGQHEQLSNFLQHNK

SEQ ID NO: 31110 - protein, 44 aa, Artificial Sequence
  Non-cyclic GFR-binding peptide
  MOD_RES (7), (41), (43): Xaa is C or S
  MOD_RES (21), (22), (23), (24), (25): Xaa is A or G
  MOD_RES (26), (27), (28), (29): Xaa is A or G or is absent
HVTKPTXAPTKLRSVKVAKVXXXXXXXXXKEVQVNMVVRSXGXH

SEQ ID NO: 31111 - protein, 37 aa, Artificial Sequence
  Non-cyclic GFR-binding peptide
  MOD_RES (37), (37): Xaa is C or S
QPSRVHHEPLTVLYYEYVRKKPKLEQLSNRLEEHLEX

SEQ ID NO: 31112 - protein, 39 aa, Artificial Sequence
  Non-cyclic GFR-binding peptide
  MOD_RES (4), (5), (37), (39): Xaa is C or S
PKPXXAPTQLRPVQVRKIDDSSNVIKKATVNMVVRAXGX

SEQ ID NO: 31113 - protein, 41 aa, Artificial Sequence
  Non-cyclic GFR-binding peptide
  MOD_RES (1), (38), (40): Xaa is C or S
  MOD_RES (17), (18), (19), (20), (21): Xaa is A or G
  MOD_RES (22), (23), (24), (25): Xaa is A or G or is absent
XRPTQVQLEPLPVVYYXXXXXXXXXEQLSNTLEDHLAXKXE

SEQ ID NO: 31114 - protein, 33 aa, Artificial Sequence
  Non-cyclic GFR-binding peptide
  MOD_RES (15), (16), (17), (18), (19): Xaa is A or G
  MOD_RES (20), (21), (22), (23): Xaa is A or G or is absent
PSRVHHEPLTVLYYXXXXXXXXXEQLSNRLEEH

SEQ ID NO: 31115 - protein, 37 aa, Artificial Sequence
  Non-cyclic GFR-binding peptide
  MOD_RES (4), (36): Xaa is C or S
KPTXAPTKLRSVKVAKVDDSSNVIKEVQVNMVVRSXG

SEQ ID NO: 31116 - protein, 34 aa, Artificial Sequence
  Non-cyclic GFR-binding peptide
  MOD_RES (1), (2), (33): Xaa is C or S
XXVSQDLSNITIQIMIGKTPKIIGEMSMIVKSXK

SEQ ID NO: 31117 - protein, 35 aa, Artificial Sequence
  Non-cyclic GFR-binding peptide
PTQVQLEPLPVVYYEIVRKKPIFEQLSNTLEDHLA

SEQ ID NO: 31118 - protein, 38 aa, Artificial Sequence
  Non-cyclic GFR-binding peptide
  MOD_RES (3), (4), (36), (38): Xaa is C or S
KPXXAPTKLRPVQVRKIDDSSNVIKKATVNMVVRSXGX

SEQ ID NO: 31119 - protein, 42 aa, Artificial Sequence
  Non-cyclic GFR-binding peptide
  MOD_RES (2), (39), (41): Xaa is C or S
  MOD_RES (18), (19), (20), (21), (22): Xaa is A or G
  MOD_RES (23), (24), (25), (26): Xaa is A or G or is absent
KXQPSRVHHEPLPVVYYXXXXXXXXXEQLSNRLEEHLEXAXA

SEQ ID NO: 31120 - protein, 36 aa, Artificial Sequence
  Non-cyclic GFR-binding peptide
  MOD_RES (1), (35): Xaa is C or S
  MOD_RES (15), (16), (17), (18), (19): Xaa is A or G
  MOD_RES (20), (21), (22), (23): Xaa is A or G or is absent
XVPTELRSVKMAKVXXXXXXXXXKEVQVEMVVEGXG

SEQ ID NO: 31121 - protein, 35 aa, Artificial Sequence
  Non-cyclic GFR-binding peptide
  MOD_RES (1), (35): Xaa is C or S
  MOD_RES (15), (16), (17), (18), (19): Xaa is A or G
  MOD_RES (20), (21), (22), (23): Xaa is A or G or is absent
XVPTELRSVKMAKVXXXXXXXXXKEVQVEMVVEGX

SEQ ID NO: 31122 - protein, 34 aa, Artificial Sequence
  Non-cyclic GFR-binding peptide
  MOD_RES (32), (34): Xaa is C or S
VPTELRSVKMAKVDEYDKVVKEVQVEMVVEGXGX

SEQ ID NO: 31123 - protein, 38 aa, Artificial Sequence
  Non-cyclic GFR-binding peptide
  MOD_RES (3), (4), (36), (38): Xaa is C or S
KPXXAPTQLRPVQVRKIDDSSNVIKKATVNMVVRAXGX

SEQ ID NO: 31124 - protein, 41 aa, Artificial Sequence
  Non-cyclic GFR-binding peptide
  MOD_RES (5), (6), (40): Xaa is C or S
  MOD_RES (20), (21), (22), (23), (24): Xaa is A or G
  MOD_RES (25), (26), (27), (28): Xaa is A or G or is absent
IPKAXXVPTELSNITMQIMXXXXXXXXXIGEMSEMVVEGXG

SEQ ID NO: 31125 - protein, 37 aa, Artificial Sequence
  Non-cyclic GFR-binding peptide
  MOD_RES (4), (5): Xaa is C or S
  MOD_RES (19), (20), (21), (22), (23): Xaa is A or G
  MOD_RES (24), (25), (26), (27): Xaa is A or G or is absent
ASPXXVPQDLRSVKIAKVXXXXXXXXXKEVQVMVVKS

SEQ ID NO: 31126 - protein, 38 aa, Artificial Sequence
  Non-cyclic GFR-binding peptide
  MOD_RES (4), (5), (37): Xaa is C or S
PKPXXAPTKLSNITVQIMDDSSNVIIGEMSNMVVRSXG

SEQ ID NO: 31127 - protein, 38 aa, Artificial Sequence
  Non-cyclic GFR-binding peptide
  MOD_RES (2), (3), (37): Xaa is C or S
  MOD_RES (17), (18), (19), (20), (21): Xaa is A or G
  MOD_RES (22), (23), (24), (25): Xaa is A or G or is absent
PXXAPTKLRSVKVAKVXXXXXXXXXKEVQVNMVVRSXG

SEQ ID NO: 31128 - protein, 32 aa, Artificial Sequence
  Non-cyclic GFR-binding peptide
  MOD_RES (31), (31): Xaa is C or S
VPQDLRSVKIAKVVGRTPKVKEVQVMVVKSXK

SEQ ID NO: 31129 - protein, 32 aa, Artificial Sequence
  Non-cyclic GFR-binding peptide
  MOD_RES (14), (15), (16), (17), (18): Xaa is A or G
  MOD_RES (19), (20), (21), (22): Xaa is A or G or is absent
VPTELSNITMQIMXXXXXXXXXIGEMSEMVVE

SEQ ID NO: 31130 - protein, 37 aa, Artificial Sequence
  Non-cyclic GFR-binding peptide
  MOD_RES (5), (6), (37): Xaa is C or S
SASPXXVPQDLRPVQIRKIVGRTPKVKKATVMVVKSX

SEQ ID NO: 31131 - protein, 31 aa, Artificial Sequence
  Non-cyclic GFR-binding peptide
  MOD_RES (1), (1): Xaa is C or S
XVPQALRSVKIAKVVGRKPKVKEVQVMIVRS

SEQ ID NO: 31132 - protein, 35 aa, Artificial Sequence
  Non-cyclic GFR-binding peptide
  MOD_RES (1), (2), (34): Xaa is C or S
XXAPTKLRSVKVAKVDDSSNVIKEVQVNMVVRSXG

SEQ ID NO: 31133 - protein, 42 aa, Artificial Sequence
  Non-cyclic GFR-binding peptide
  MOD_RES (4), (41): Xaa is C or S
SVKXQPSRVHHEPLPVVYYEYVRKKPKLEQLSNRLEEHLEXA

SEQ ID NO: 31134 - protein, 39 aa, Artificial Sequence
  Non-cyclic GFR-binding peptide
  MOD_RES (37), (39): Xaa is C or S
  MOD_RES (16), (17), (18), (19), (20): Xaa is A or G
  MOD_RES (21), (22), (23), (24): Xaa is A or G or is absent
QPSRVHHEPLTVLYYXXXXXXXXXEQLSNRLEEHLEXAX

SEQ ID NO: 31135 - protein, 43 aa, Artificial Sequence
  Non-cyclic GFR-binding peptide
  MOD_RES (4), (41), (43): Xaa is C or S
NVQXRPTQVQLEPLTVLYYEIVRKKPIFEQLSNTLEDHLAXKX

SEQ ID NO: 31136 - protein, 40 aa, Artificial Sequence
  Non-cyclic GFR-binding peptide
  MOD_RES (4), (38), (40): Xaa is C or S
  MOD_RES (18), (19), (20), (21), (22): Xaa is A or G
  MOD_RES (23), (24), (25), (26): Xaa is A or G or is absent
KPTXAPTKLRPVQVRKIXXXXXXXXXKKATVNMVVRSXGX

SEQ ID NO: 31137 - protein, 36 aa, Artificial Sequence
  Non-cyclic GFR-binding peptide
  MOD_RES (3), (3): Xaa is C or S
  MOD_RES (17), (18), (19), (20), (21): Xaa is A or G
  MOD_RES (22), (23), (24), (25): Xaa is A or G or is absent
PTXAPTKLRSVKVAKVXXXXXXXXXKEVQVNMVVRS

SEQ ID NO: 31138 - protein, 35 aa, Artificial Sequence
  Non-cyclic GFR-binding peptide
  MOD_RES (1), (1): Xaa is C or S
  MOD_RES (17), (18), (19), (20), (21): Xaa is A or G
  MOD_RES (22), (23), (24), (25): Xaa is A or G or is absent
XQPSRVHHEPLPVVYYXXXXXXXXXEQLSNRLEEH

SEQ ID NO: 31139 - protein, 39 aa, Artificial Sequence
  Non-cyclic GFR-binding peptide
  MOD_RES (3), (4), (36), (38): Xaa is C or S
KPXXAPTKLRPVQVRKIDDSSNVIKKATVNMVVRSXGXH

SEQ ID NO: 31140 - protein, 39 aa, Artificial Sequence
  Non-cyclic GFR-binding peptide
  MOD_RES (1), (38): Xaa is C or S
  MOD_RES (17), (18), (19), (20), (21): Xaa is A or G
  MOD_RES (22), (23), (24), (25): Xaa is A or G or is absent
XQPSRVHHEPLPVVYYXXXXXXXXXEQLSNRLEEHLEXA

SEQ ID NO: 31141 - protein, 34 aa, Artificial Sequence
  Non-cyclic GFR-binding peptide
  MOD_RES (3), (4): Xaa is C or S
KAXXVPTELRPVQMRKIDENEKVVKKATVDMVVE

SEQ ID NO: 31142 - protein, 37 aa, Artificial Sequence
  Non-cyclic GFR-binding peptide
  MOD_RES (3), (4), (37): Xaa is C or S
  MOD_RES (18), (19), (20), (21), (22): Xaa is A or G
  MOD_RES (23), (24), (25), (26): Xaa is A or G or is absent
APXXVPQALRSVKIAKVXXXXXXXXXKEVQVMIVRSX

SEQ ID NO: 31143 - protein, 35 aa, Artificial Sequence
  Non-cyclic GFR-binding peptide
  MOD_RES (1), (1): Xaa is C or S
  MOD_RES (17), (18), (19), (20), (21): Xaa is A or G
  MOD_RES (22), (23), (24), (25): Xaa is A or G or is absent
XQPSRVHHEPLTVLYYXXXXXXXXXEQLSNRLEEH

SEQ ID NO: 31144 - protein, 41 aa, Artificial Sequence
  Non-cyclic GFR-binding peptide
  MOD_RES (6), (7), (39), (41): Xaa is C or S
SIPKAXXVPTELSNITMQIMDEYDKVVIGEMSEMVVEGXGX

SEQ ID NO: 31145 - protein, 37 aa, Artificial Sequence
  Non-cyclic GFR-binding peptide
  MOD_RES (4), (5): Xaa is C or S
  MOD_RES (19), (20), (21), (22), (23): Xaa is A or G
  MOD_RES (24), (25), (26), (27): Xaa is A or G or is absent
ASPXXVPQDLRPVQIRKIXXXXXXXXXKKATVMVVKS

SEQ ID NO: 31146 - protein, 33 aa, Artificial Sequence
  Non-cyclic GFR-binding peptide
  MOD_RES (14), (15), (16), (17), (18): Xaa is A or G
  MOD_RES (19), (20), (21), (22): Xaa is A or G or is absent
TQVQLEPLPVVYYXXXXXXXXXEQLSNTLEDHL

SEQ ID NO: 31147 - protein, 31 aa, Artificial Sequence
  Non-cyclic GFR-binding peptide
  MOD_RES (31), (31): Xaa is C or S
VPQALRPVQIRKIVGRKPKVKKATVMIVRSX

SEQ ID NO: 31148 - protein, 35 aa, Artificial Sequence
  Non-cyclic GFR-binding peptide
  MOD_RES (1), (2), (33), (35): Xaa is C or S
XXVPQALSNITIQIMVGRKPKVIGEMSMIVRSXKX

SEQ ID NO: 31149 - protein, 39 aa, Artificial Sequence
  Non-cyclic GFR-binding peptide
  MOD_RES (5), (6): Xaa is C or S
  MOD_RES (20), (21), (22), (23), (24): Xaa is A or G
  MOD_RES (25), (26), (27), (28): Xaa is A or G or is absent
VPKPXXAPTKLRPVQVRKIXXXXXXXXXKKATVNMVVRS

SEQ ID NO: 31150 - protein, 36 aa, Artificial Sequence
  Non-cyclic GFR-binding peptide
  MOD_RES (2), (3): Xaa is C or S
  MOD_RES (17), (18), (19), (20), (21): Xaa is A or G
  MOD_RES (22), (23), (24), (25): Xaa is A or G or is absent
AXXVPTELRPVQMRKIXXXXXXXXXKKATVEMVVEG

SEQ ID NO: 31151 - protein, 40 aa, Artificial Sequence
  Non-cyclic GFR-binding peptide
  MOD_RES (6), (7): Xaa is C or S
  MOD_RES (21), (22), (23), (24), (25): Xaa is A or G
  MOD_RES (26), (27), (28), (29): Xaa is A or G or is absent
KIPKAXXVPTELSNITMQIMXXXXXXXXXIGEMSDMVVEG

SEQ ID NO: 31152 - protein, 33 aa, Artificial Sequence
  Non-cyclic GFR-binding peptide
  MOD_RES (2), (3): Xaa is C or S
PXXVSQDLRSVKIAKVIGKTPKIKEVQVMIVKS

SEQ ID NO: 31153 - protein, 38 aa, Artificial Sequence
  Non-cyclic GFR-binding peptide
  MOD_RES (5), (6), (37): Xaa is C or S
SASPXXVSQDLSNITIQIMIGKTPKIIGEMSMIVKSXK

SEQ ID NO: 31154 - protein, 39 aa, Artificial Sequence
  Non-cyclic GFR-binding peptide
  MOD_RES (2), (3), (37), (39): Xaa is C or S
  MOD_RES (17), (18), (19), (20), (21): Xaa is A or G
  MOD_RES (22), (23), (24), (25): Xaa is A or G or is absent
AXXVPTELRPVQMRKIXXXXXXXXXKKATVEMVVEGXGX

SEQ ID NO: 31155 - protein, 33 aa, Artificial Sequence
  Non-cyclic GFR-binding peptide
  MOD_RES (33), (33): Xaa is C or S
  MOD_RES (14), (15), (16), (17), (18): Xaa is A or G
  MOD_RES (19), (20), (21), (22): Xaa is A or G or is absent
VPQALRSVKIAKVXXXXXXXXXKEVQVMIVRSX

SEQ ID NO: 31156 - protein, 31 aa, Artificial Sequence
  Non-cyclic GFR-binding peptide
  MOD_RES (1), (1): Xaa is C or S
XVPTELRPVQMRKIDENEKVVKKATVDMVVE

SEQ ID NO: 31157 - protein, 39 aa, Artificial Sequence
  Non-cyclic GFR-binding peptide
  MOD_RES (4), (4): Xaa is C or S
  MOD_RES (20), (21), (22), (23), (24): Xaa is A or G
  MOD_RES (25), (26), (27), (28): Xaa is A or G or is absent
NVQXRPTQVQLEPLPVVYYXXXXXXXXXEQLSNTLEDHL

SEQ ID NO: 31158 - protein, 36 aa, Artificial Sequence
  Non-cyclic GFR-binding peptide
  MOD_RES (1), (34), (36): Xaa is C or S
  MOD_RES (15), (16), (17), (18), (19): Xaa is A or G
  MOD_RES (20), (21), (22), (23): Xaa is A or G or is absent
XVSQDLRPVQIRKIXXXXXXXXXKKATVMIVKSXKX

SEQ ID NO: 31159 - protein, 34 aa, Artificial Sequence
  Non-cyclic GFR-binding peptide
  MOD_RES (3), (3): Xaa is C or S
PTXAPTKLRSVKVAKVDDSSNVIKEVQVNMVVRS

SEQ ID NO: 31160 - protein, 37 aa, Artificial Sequence
  Non-cyclic GFR-binding peptide
  MOD_RES (1), (2), (34), (36): Xaa is C or S
XXVPTELSNITMQIMDEYDKVVIGEMSEMVVEGXGXR

SEQ ID NO: 31161 - protein, 38 aa, Artificial Sequence
  Non-cyclic GFR-binding peptide
  MOD_RES (1), (35), (37): Xaa is C or S
  MOD_RES (15), (16), (17), (18), (19): Xaa is A or G
  MOD_RES (20), (21), (22), (23): Xaa is A or G or is absent
XAPTKLRPVQVRKIXXXXXXXXXKKATVNMVVRSXGXH

SEQ ID NO: 31162 - protein, 36 aa, Artificial Sequence
  Non-cyclic GFR-binding peptide
  MOD_RES (34), (36): Xaa is C or S
  MOD_RES (14), (15), (16), (17), (18): Xaa is A or G
  MOD_RES (19), (20), (21), (22): Xaa is A or G or is absent
VPTEEEPLPMVYYXXXXXXXXXEQLSNFLQHNKXEX

SEQ ID NO: 31163 - protein, 40 aa, Artificial Sequence
  Non-cyclic GFR-binding peptide
  MOD_RES (4), (5), (38), (40): Xaa is C or S
  MOD_RES (19), (20), (21), (22), (23): Xaa is A or G
  MOD_RES (24), (25), (26), (27): Xaa is A or G or is absent
ASPXXVSQDLSNITIQIMXXXXXXXXXIGEMSMIVKSXKX

SEQ ID NO: 31164 - protein, 34 aa, Artificial Sequence
  Non-cyclic GFR-binding peptide
SRVHHEPLTVLYYEYVRKKPKLEQLSNRLEEHLE

SEQ ID NO: 31165 - protein, 36 aa, Artificial Sequence
  Non-cyclic GFR-binding peptide
  MOD_RES (4), (5): Xaa is C or S
PKPXXAPTQLRSVKVAKVDDSSNVIKEVQVNMVVRA

SEQ ID NO: 31166 - protein, 39 aa, Artificial Sequence
  Non-cyclic GFR-binding peptide
  MOD_RES (2), (3), (36), (38): Xaa is C or S
  MOD_RES (17), (18), (19), (20), (21): Xaa is A or G
  MOD_RES (22), (23), (24), (25): Xaa is A or G or is absent
PXXVPQALSNITIQIMXXXXXXXXXIGEMSMIVRSXKXS

SEQ ID NO: 31167 - protein, 35 aa, Artificial Sequence
  Non-cyclic GFR-binding peptide
  MOD_RES (3), (4): Xaa is C or S
KPXXAPTKLSNITVQIMDDSSNVIIGEMSNMVVRS

SEQ ID NO: 31168 - protein, 37 aa, Artificial Sequence
  Non-cyclic GFR-binding peptide
  MOD_RES (5), (6), (37): Xaa is C or S
SASPXXVSQDLRPVQIRKIIGKTPKIKKATVMIVKSX

SEQ ID NO: 31169 - protein, 39 aa, Artificial Sequence
  Non-cyclic GFR-binding peptide
  MOD_RES (4), (5), (37), (39): Xaa is C or S
PKPXXAPTKLRPVQVRKIDDSSNVIKKATVNMVVRSXGX

SEQ ID NO: 31170 - protein, 33 aa, Artificial Sequence
  Non-cyclic GFR-binding peptide
  MOD_RES (1), (2): Xaa is C or S
XXAPTKLRPVQVRKIDDSSNVIKKATVNMVVRS

SEQ ID NO: 31171 - protein, 38 aa, Artificial Sequence
  Non-cyclic GFR-binding peptide
  MOD_RES (5), (6), (37): Xaa is C or S
SASPXXVSQDLRSVKIAKVIGKTPKIKEVQVMIVKSXK

SEQ ID NO: 31172 - protein, 34 aa, Artificial Sequence
  Non-cyclic GFR-binding peptide
  MOD_RES (2), (3), (34): Xaa is C or S
PXXVPQALRSVKIAKVVGRKPKVKEVQVMIVRSX

SEQ ID NO: 31173 - protein, 37 aa, Artificial Sequence
  Non-cyclic GFR-binding peptide
  MOD_RES (5), (6): Xaa is C or S
IPKAXXVPTELSNITMQIMDEYDKVVIGEMSEMVVEG

SEQ ID NO: 31174 - protein, 37 aa, Artificial Sequence
  Non-cyclic GFR-binding peptide
  MOD_RES (3), (4), (35), (37): Xaa is C or S
SPXXVPQDLRSVKIAKVVGRTPKVKEVQVMVVKSXKX

SEQ ID NO: 31175 - protein, 37 aa, Artificial Sequence
  Non-cyclic GFR-binding peptide
  MOD_RES (3), (4), (36): Xaa is C or S
KAXXVPTELSNITMQIMDENEKVVIGEMSDMVVEGXG

SEQ ID NO: 31176 - protein, 39 aa, Artificial Sequence
  Non-cyclic GFR-binding peptide
  MOD_RES (6), (38): Xaa is C or S
VTKPTXAPTKLSNITVQIMDDSSNVIIGEMSNMVVRSXG

SEQ ID NO: 31177 - protein, 37 aa, Artificial Sequence
  Non-cyclic GFR-binding peptide
  MOD_RES (3), (4), (35), (37): Xaa is C or S
SPXXVSQDLRSVKIAKVIGKTPKIKEVQVMIVKSXKX

SEQ ID NO: 31178 - protein, 35 aa, Artificial Sequence
  Non-cyclic GFR-binding peptide
  MOD_RES (34), (34): Xaa is C or S
VPTEEEPLPMVYYRIKPHQGQHEQLSNFLQHNKXE

SEQ ID NO: 31179 - protein, 35 aa, Artificial Sequence
  Non-cyclic GFR-binding peptide
  MOD_RES (2), (3), (34): Xaa is C or S
PXXVSQDLRPVQIRKIIGKTPKIKKATVMIVKSXK

SEQ ID NO: 31180 - protein, 41 aa, Artificial Sequence
  Non-cyclic GFR-binding peptide
  MOD_RES (6), (7), (41): Xaa is C or S
  MOD_RES (21), (22), (23), (24), (25): Xaa is A or G
  MOD_RES (26), (27), (28), (29): Xaa is A or G or is absent
YVPKPXXAPTKLRPVQVRKIXXXXXXXXXKKATVNMVVRSX

SEQ ID NO: 31181 - protein, 34 aa, Artificial Sequence
  Non-cyclic GFR-binding peptide
  MOD_RES (3), (4): Xaa is C or S
SPXXVSQDLSNITIQIMIGKTPKIIGEMSMIVKS

SEQ ID NO: 31182 - protein, 38 aa, Artificial Sequence
  Non-cyclic GFR-binding peptide
  MOD_RES (6), (7), (38): Xaa is C or S
ASASPXXVSQDLRPVQIRKIIGKTPKIKKATVMIVKSX

SEQ ID NO: 31183 - protein, 43 aa, Artificial Sequence
  Non-cyclic GFR-binding peptide
  MOD_RES (6), (7), (40), (42): Xaa is C or S
  MOD_RES (21), (22), (23), (24), (25): Xaa is A or G
  MOD_RES (26), (27), (28), (29): Xaa is A or G or is absent
ASASPXXVPQDLRSVKIAKVXXXXXXXXXKEVQVMVVKSXKXS

SEQ ID NO: 31184 - protein, 38 aa, Artificial Sequence
  Non-cyclic GFR-binding peptide
  MOD_RES (2), (3), (35), (37): Xaa is C or S
AXXVPTELRSVKMAKVDEYDKVVKEVQVEMVVEGXGXR

SEQ ID NO: 31185 - protein, 39 aa, Artificial Sequence
  Non-cyclic GFR-binding peptide
  MOD_RES (4), (36), (38): Xaa is C or S
KPTXAPTKLRSVKVAKVDDSSNVIKEVQVNMVVRSXGXH

SEQ ID NO: 31186 - protein, 39 aa, Artificial Sequence
  Non-cyclic GFR-binding peptide
  MOD_RES (3), (4), (37), (39): Xaa is C or S
  MOD_RES (18), (19), (20), (21), (22): Xaa is A or G
  MOD_RES (23), (24), (25), (26): Xaa is A or G or is absent
APXXVPQALSNITIQIMXXXXXXXXXIGEMSMIVRSXKX

SEQ ID NO: 31187 - protein, 37 aa, Artificial Sequence
  Non-cyclic GFR-binding peptide
  MOD_RES (4), (5), (36): Xaa is C or S
AAPXXVPQALRSVKIAKVVGRKPKVKEVQVMIVRSXK

SEQ ID NO: 31188 - protein, 31 aa, Artificial Sequence
  Non-cyclic GFR-binding peptide
VPTELRPVQMRKIDEYDKVVKKATVEMVVEG

SEQ ID NO: 31189 - protein, 38 aa, Artificial Sequence
  Non-cyclic GFR-binding peptide
  MOD_RES (5), (37): Xaa is C or S
TKPTXAPTKLRPVQVRKIDDSSNVIKKATVNMVVRSXG

SEQ ID NO: 31190 - protein, 36 aa, Artificial Sequence
  Non-cyclic GFR-binding peptide
  MOD_RES (5), (6): Xaa is C or S
VPKPXXAPTQLSNITVQIMDDSSNVIIGEMSNMVVR

SEQ ID NO: 31191 - protein, 38 aa, Artificial Sequence
  Non-cyclic GFR-binding peptide
  MOD_RES (1), (2), (35), (37): Xaa is C or S
  MOD_RES (16), (17), (18), (19), (20): Xaa is A or G
  MOD_RES (21), (22), (23), (24): Xaa is A or G or is absent
XXVPQALRPVQIRKIXXXXXXXXXKKATVMIVRSXKXS

SEQ ID NO: 31192 - protein, 39 aa, Artificial Sequence
  Non-cyclic GFR-binding peptide
  MOD_RES (4), (5), (38): Xaa is C or S
  MOD_RES (19), (20), (21), (22), (23): Xaa is A or G
  MOD_RES (24), (25), (26), (27): Xaa is A or G or is absent
ASPXXVSQDLSNITIQIMXXXXXXXXXIGEMSMIVKSXK

SEQ ID NO: 31193 - protein, 39 aa, Artificial Sequence
  Non-cyclic GFR-binding peptide
  MOD_RES (6), (6): Xaa is C or S
DEGLEXVPTEEEPLTMLYYRIKPHQGQHEQLSNFLQHNK

SEQ ID NO: 31194 - protein, 40 aa, Artificial Sequence
  Non-cyclic GFR-binding peptide
  MOD_RES (4), (38), (40): Xaa is C or S
  MOD_RES (18), (19), (20), (21), (22): Xaa is A or G
  MOD_RES (23), (24), (25), (26): Xaa is A or G or is absent
KPTXAPTKLSNITVQIMXXXXXXXXXIGEMSNMVVRSXGX

SEQ ID NO: 31195 - protein, 32 aa, Artificial Sequence
  Non-cyclic GFR-binding peptide
  MOD_RES (1), (2): Xaa is C or S
XXVPTELRPVQMRKIDENEKVVKKATVDMVVE

SEQ ID NO: 31196 - protein, 40 aa, Artificial Sequence
  Non-cyclic GFR-binding peptide
  MOD_RES (3), (4), (37), (39): Xaa is C or S
  MOD_RES (18), (19), (20), (21), (22): Xaa is A or G
  MOD_RES (23), (24), (25), (26): Xaa is A or G or is absent
APXXVPQALRPVQIRKIXXXXXXXXXKKATVMIVRSXKXS

SEQ ID NO: 31197 - protein, 38 aa, Artificial Sequence
  Non-cyclic GFR-binding peptide
  MOD_RES (1), (3), (37), (38): Xaa is C or S
  MOD_RES (15), (16), (17), (18), (19): Xaa is A or G
  MOD_RES (20), (21), (22), (23): Xaa is A or G or is absent
XGXRDVVMGRYKKLXXXXXXXXXFYLMSIANMKTPTXX

SEQ ID NO: 31198 - protein, 38 aa, Artificial Sequence
  Non-cyclic GFR-binding peptide
  MOD_RES (32), (33): Xaa is C or S
RDVVMGRYKKLIIQQKDNFYLMSIANMKTPTXXPGASG

SEQ ID NO: 31199 - protein, 36 aa, Artificial Sequence
  Non-cyclic GFR-binding peptide
  MOD_RES (33), (34): Xaa is C or S
  MOD_RES (11), (12), (13), (14), (15): Xaa is A or G
  MOD_RES (16), (17), (18), (19): Xaa is A or G or is absent
EEVIMRYKKLXXXXXXXXXFYLMSIANTKVPAXXTS

SEQ ID NO: 31200 - protein, 41 aa, Artificial Sequence
  Non-cyclic GFR-binding peptide
  MOD_RES (2), (36), (37): Xaa is C or S
  MOD_RES (14), (15), (16), (17), (18): Xaa is A or G
  MOD_RES (19), (20), (21), (22): Xaa is A or G or is absent
GXRDVVMGRYKKLXXXXXXXXXFYLMSIANMKTPTXXPGAS

SEQ ID NO: 31201 - protein, 39 aa, Artificial Sequence
  Non-cyclic GFR-binding peptide
  MOD_RES (1), (3), (36), (37): Xaa is C or S
  MOD_RES (14), (15), (16), (17), (18): Xaa is A or G
  MOD_RES (19), (20), (21), (22): Xaa is A or G or is absent
XGXEEVIMRYKKLXXXXXXXXXFYLMSIANTKVPAXXTS

SEQ ID NO: 31202 - protein, 31 aa, Artificial Sequence
  Non-cyclic GFR-binding peptide
  MOD_RES (1), (1): Xaa is C or S
XEEVIMRYKKLLLVRGNDFYLMSIANTKVPA

SEQ ID NO: 31203 - protein, 39 aa, Artificial Sequence
  Non-cyclic GFR-binding peptide
  MOD_RES (2), (35), (36): Xaa is C or S
  MOD_RES (13), (14), (15), (16), (17): Xaa is A or G
  MOD_RES (18), (19), (20), (21): Xaa is A or G or is absent
GXEEVIMRYKKLXXXXXXXXXFYLMSIANTKVPAXXTSP

SEQ ID NO: 31204 - protein, 37 aa, Artificial Sequence
  Non-cyclic GFR-binding peptide
  MOD_RES (2), (4), (36), (37): Xaa is C or S
SXGXRDVVMGRYKKLIIQQKDNFYLMSIANMKTPTXX

SEQ ID NO: 31205 - protein, 37 aa, Artificial Sequence
  Non-cyclic GFR-binding peptide
  MOD_RES (2), (34), (35): Xaa is C or S
GXRDVVMGRYKKLIIQQKDNFYLMSIANMKTPTXXPG

SEQ ID NO: 31206 - protein, 40 aa, Artificial Sequence
  Non-cyclic GFR-binding peptide
  MOD_RES (2), (4), (36), (37): Xaa is C or S
SXGXRDVVMGRYKKLIIQQKDNFYLMSIANMKTPTXXPGA

SEQ ID NO: 31207 - protein, 41 aa, Artificial Sequence
  Non-cyclic GFR-binding peptide
  MOD_RES (1), (3), (35), (36): Xaa is C or S
XGXRDVVMGRYKKLIIQQKDNFYLMSIANMKTPTXXPGASG

SEQ ID NO: 31208 - protein, 34 aa, Artificial Sequence
  Non-cyclic GFR-binding peptide
  MOD_RES (1), (32), (33): Xaa is C or S
XEEVIMRYKKLLLVRGNDFYLMSIANTKVPAXXT

SEQ ID NO: 31209 - protein, 35 aa, Artificial Sequence
  Non-cyclic GFR-binding peptide
  MOD_RES (2), (34), (35): Xaa is C or S
GXRDVVMGRYKKLIIQQKDNFYLMSIANMKTPTXX

SEQ ID NO: 31210 - protein, 35 aa, Artificial Sequence
  Non-cyclic GFR-binding peptide
  MOD_RES (1), (34), (35): Xaa is C or S
  MOD_RES (12), (13), (14), (15), (16): Xaa is A or G
  MOD_RES (17), (18), (19), (20): Xaa is A or G or is absent
XEEVIMRYKKLXXXXXXXXXFYLMSIANTKVPAXX

SEQ ID NO: 31211 - protein, 32 aa, Artificial Sequence
  Non-cyclic GFR-binding peptide
  MOD_RES (32), (32): Xaa is C or S
RDVVMGRYKKLIIQQKDNFYLMSIANMKTPTX

SEQ ID NO: 31212 - protein, 37 aa, Artificial Sequence
  Non-cyclic GFR-binding peptide
  MOD_RES (34), (35): Xaa is C or S
  MOD_RES (12), (13), (14), (15), (16): Xaa is A or G
  MOD_RES (17), (18), (19), (20): Xaa is A or G or is absent
RDVVMGRYKKLXXXXXXXXXFYLMSIANMKTPTXXPG

SEQ ID NO: 31213 - protein, 42 aa, Artificial Sequence
  Non-cyclic GFR-binding peptide
  MOD_RES (2), (36), (37): Xaa is C or S
  MOD_RES (14), (15), (16), (17), (18): Xaa is A or G
  MOD_RES (19), (20), (21), (22): Xaa is A or G or is absent
GXRDVVMGRYKKLXXXXXXXXXFYLMSIANMKTPTXXPGASG

SEQ ID NO: 31214 - protein, 34 aa, Artificial Sequence
  Non-cyclic GFR-binding peptide
  MOD_RES (2), (4): Xaa is C or S
LXGXEEVIMRYKKLLLVRGNDFYLMSIANTKVPA

SEQ ID NO: 31215 - protein, 39 aa, Artificial Sequence
  Non-cyclic GFR-binding peptide
  MOD_RES (2), (36), (37): Xaa is C or S
  MOD_RES (14), (15), (16), (17), (18): Xaa is A or G
  MOD_RES (19), (20), (21), (22): Xaa is A or G or is absent
GXRDVVMGRYKKLXXXXXXXXXFYLMSIANMKTPTXXPG

SEQ ID NO: 31216 - protein, 40 aa, Artificial Sequence
  Non-cyclic GFR-binding peptide
  MOD_RES (1), (3), (35), (36): Xaa is C or S
XGXRDVVMGRYKKLIIQQKDNFYLMSIANMKTPTXXPGAS

SEQ ID NO: 31217 - protein, 37 aa, Artificial Sequence
  Non-cyclic GFR-binding peptide
  MOD_RES (1), (3), (37): Xaa is C or S
  MOD_RES (15), (16), (17), (18), (19): Xaa is A or G
  MOD_RES (20), (21), (22), (23): Xaa is A or G or is absent
XGXRDVVMGRYKKLXXXXXXXXXFYLMSIANMKTPTX

SEQ ID NO: 31218 - protein, 33 aa, Artificial Sequence
  Non-cyclic GFR-binding peptide
  MOD_RES (12), (13), (14), (15), (16): Xaa is A or G
  MOD_RES (17), (18), (19), (20): Xaa is A or G or is absent
RDVVMGRYKKLXXXXXXXXXFYLMSIANMKTPT

SEQ ID NO: 31219 - protein, 39 aa, Artificial Sequence
  Non-cyclic GFR-binding peptide
  MOD_RES (1), (3), (37), (38): Xaa is C or S
  MOD_RES (15), (16), (17), (18), (19): Xaa is A or G
  MOD_RES (20), (21), (22), (23): Xaa is A or G or is absent
XGXRDVVMGRYKKLXXXXXXXXXFYLMSIANMKTPTXXP

SEQ ID NO: 31220 - protein, 38 aa, Artificial Sequence
  Non-cyclic GFR-binding peptide
  MOD_RES (2), (36), (37): Xaa is C or S
  MOD_RES (14), (15), (16), (17), (18): Xaa is A or G
  MOD_RES (19), (20), (21), (22): Xaa is A or G or is absent
GXRDVVMGRYKKLXXXXXXXXXFYLMSIANMKTPTXXP

SEQ ID NO: 31221 - protein, 34 aa, Artificial Sequence
  Non-cyclic GFR-binding peptide
  MOD_RES (31), (32): Xaa is C or S
DVVMGRYKKLIIQQKDNFYLMSIANMKTPTXXPG

SEQ ID NO: 31222 - protein, 37 aa, Artificial Sequence
  Non-cyclic GFR-binding peptide
  MOD_RES (1), (34), (35): Xaa is C or S
  MOD_RES (12), (13), (14), (15), (16): Xaa is A or G
  MOD_RES (17), (18), (19), (20): Xaa is A or G or is absent
XEEVIMRYKKLXXXXXXXXXFYLMSIANTKVPAXXTS

SEQ ID NO: 31223 - protein, 38 aa, Artificial Sequence
  Non-cyclic GFR-binding peptide
  MOD_RES (2), (34), (35): Xaa is C or S
GXRDVVMGRYKKLIIQQKDNFYLMSIANMKTPTXXPGA

SEQ ID NO: 31224 - protein, 36 aa, Artificial Sequence
  Non-cyclic GFR-binding peptide
  MOD_RES (31), (32): Xaa is C or S
EEVIMRYKKLLLVRGNDFYLMSIANTKVPAXXTSPV

SEQ ID NO: 31225 - protein, 41 aa, Artificial Sequence
  Non-cyclic GFR-binding peptide
  MOD_RES (1), (3), (36), (37): Xaa is C or S
  MOD_RES (14), (15), (16), (17), (18): Xaa is A or G
  MOD_RES (19), (20), (21), (22): Xaa is A or G or is absent
XGXEEVIMRYKKLXXXXXXXXXFYLMSIANTKVPAXXTSPV

SEQ ID NO: 31226 - protein, 37 aa, Artificial Sequence
  Non-cyclic GFR-binding peptide
  MOD_RES (1), (35), (36): Xaa is C or S
  MOD_RES (13), (14), (15), (16), (17): Xaa is A or G
  MOD_RES (18), (19), (20), (21): Xaa is A or G or is absent
XRDVVMGRYKKLXXXXXXXXXFYLMSIANMKTPTXXP

SEQ ID NO: 31227 - protein, 36 aa, Artificial Sequence
  Non-cyclic GFR-binding peptide
  MOD_RES (2), (4): Xaa is C or S
  MOD_RES (15), (16), (17), (18), (19): Xaa is A or G
  MOD_RES (20), (21), (22), (23): Xaa is A or G or is absent
LXGXEEVIMRYKKLXXXXXXXXXFYLMSIANTKVPA

SEQ ID NO: 31228 - protein, 36 aa, Artificial Sequence
  Non-cyclic GFR-binding peptide
  MOD_RES (31), (32): Xaa is C or S
DVVMGRYKKLIIQQKDNFYLMSIANMKTPTXXPGAS

SEQ ID NO: 31229 - protein, 44 aa, Artificial Sequence
  Non-cyclic GFR-binding peptide
  MOD_RES (2), (4), (38), (39): Xaa is C or S
  MOD_RES (16), (17), (18), (19), (20): Xaa is A or G
  MOD_RES (21), (22), (23), (24): Xaa is A or G or is absent
SXGXRDVVMGRYKKLXXXXXXXXXFYLMSIANMKTPTXXPGASG

SEQ ID NO: 31230 - protein, 35 aa, Artificial Sequence
  Non-cyclic GFR-binding peptide
  MOD_RES (2), (4): Xaa is C or S
SXGXRDVVMGRYKKLIIQQKDNFYLMSIANMKTPT

SEQ ID NO: 31231 - protein, 35 aa, Artificial Sequence
  Non-cyclic GFR-binding peptide
  MOD_RES (32), (33): Xaa is C or S
RDVVMGRYKKLIIQQKDNFYLMSIANMKTPTXXPG

SEQ ID NO: 31232 - protein, 34 aa, Artificial Sequence
  Non-cyclic GFR-binding peptide
  MOD_RES (31), (32): Xaa is C or S
EEVIMRYKKLLLVRGNDFYLMSIANTKVPAXXTS

SEQ ID NO: 31233 - protein, 35 aa, Artificial Sequence
  Non-cyclic GFR-binding peptide
  MOD_RES (2), (35): Xaa is C or S
  MOD_RES (13), (14), (15), (16), (17): Xaa is A or G
  MOD_RES (18), (19), (20), (21): Xaa is A or G or is absent
GXEEVIMRYKKLXXXXXXXXXFYLMSIANTKVPAX

SEQ ID NO: 31234 - protein, 41 aa, Artificial Sequence
  Non-cyclic GFR-binding peptide
  MOD_RES (2), (35), (36): Xaa is C or S
  MOD_RES (13), (14), (15), (16), (17): Xaa is A or G
  MOD_RES (18), (19), (20), (21): Xaa is A or G or is absent
GXEEVIMRYKKLXXXXXXXXXFYLMSIANTKVPAXXTSPVR

SEQ ID NO: 31235 - protein, 30 aa, Artificial Sequence
  Non-cyclic GFR-binding peptide
EEVIMRYKKLLLVRGNDFYLMSIANTKVPA

SEQ ID NO: 31236 - protein, 40 aa, Artificial Sequence
  Non-cyclic GFR-binding peptide
  MOD_RES (2), (35), (36): Xaa is C or S
  MOD_RES (13), (14), (15), (16), (17): Xaa is A or G
  MOD_RES (18), (19), (20), (21): Xaa is A or G or is absent
GXEEVIMRYKKLXXXXXXXXXFYLMSIANTKVPAXXTSPV

SEQ ID NO: 31237 - protein, 39 aa, Artificial Sequence
  Non-cyclic GFR-binding peptide
  MOD_RES (1), (35), (36): Xaa is C or S
  MOD_RES (13), (14), (15), (16), (17): Xaa is A or G
  MOD_RES (18), (19), (20), (21): Xaa is A or G or is absent
XRDVVMGRYKKLXXXXXXXXXFYLMSIANMKTPTXXPGA

SEQ ID NO: 31238 - protein, 37 aa, Artificial Sequence
  Non-cyclic GFR-binding peptide
  MOD_RES (1), (33), (34): Xaa is C or S
XRDVVMGRYKKLIIQQKDNFYLMSIANMKTPTXXPGA

SEQ ID NO: 31239 - protein, 34 aa, Artificial Sequence
  Non-cyclic GFR-binding peptide
  MOD_RES (32), (33): Xaa is C or S
RDVVMGRYKKLIIQQKDNFYLMSIANMKTPTXXP

SEQ ID NO: 31240 - protein, 34 aa, Artificial Sequence
  Non-cyclic GFR-binding peptide
  MOD_RES (33), (34): Xaa is C or S
  MOD_RES (11), (12), (13), (14), (15): Xaa is A or G
  MOD_RES (16), (17), (18), (19): Xaa is A or G or is absent
DVVMGRYKKLXXXXXXXXXFYLMSIANMKTPTXX

SEQ ID NO: 31241 - protein, 38 aa, Artificial Sequence
  Non-cyclic GFR-binding peptide
  MOD_RES (34), (35): Xaa is C or S
  MOD_RES (12), (13), (14), (15), (16): Xaa is A or G
  MOD_RES (17), (18), (19), (20): Xaa is A or G or is absent
RDVVMGRYKKLXXXXXXXXXFYLMSIANMKTPTXXPGA

SEQ ID NO: 31242 - protein, 38 aa, Artificial Sequence
  Non-cyclic GFR-binding peptide
  MOD_RES (1), (3), (35), (36): Xaa is C or S
XGXRDVVMGRYKKLIIQQKDNFYLMSIANMKTPTXXPG

SEQ ID NO: 31243 - protein, 35 aa, Artificial Sequence
  Non-cyclic GFR-binding peptide
  MOD_RES (33), (34): Xaa is C or S
  MOD_RES (11), (12), (13), (14), (15): Xaa is A or G
  MOD_RES (16), (17), (18), (19): Xaa is A or G or is absent
EEVIMRYKKLXXXXXXXXXFYLMSIANTKVPAXXT

SEQ ID NO: 31244 - protein, 34 aa, Artificial Sequence
  Non-cyclic GFR-binding peptide
  MOD_RES (1), (33), (34): Xaa is C or S
XRDVVMGRYKKLIIQQKDNFYLMSIANMKTPTXX

SEQ ID NO: 31245 - protein, 32 aa, Artificial Sequence
  Non-cyclic GFR-binding peptide
  MOD_RES (11), (12), (13), (14), (15): Xaa is A or G
  MOD_RES (16), (17), (18), (19): Xaa is A or G or is absent
EEVIMRYKKLXXXXXXXXXFYLMSIANTKVPA

SEQ ID NO: 31246 - protein, 38 aa, Artificial Sequence
  Non-cyclic GFR-binding peptide
  MOD_RES (2), (4), (35), (36): Xaa is C or S
LXGXEEVIMRYKKLLLVRGNDFYLMSIANTKVPAXXTS

SEQ ID NO: 31247 - protein, 34 aa, Artificial Sequence
  Non-cyclic GFR-binding peptide
  MOD_RES (1), (1): Xaa is C or S
  MOD_RES (13), (14), (15), (16), (17): Xaa is A or G
  MOD_RES (18), (19), (20), (21): Xaa is A or G or is absent
XRDVVMGRYKKLXXXXXXXXXFYLMSIANMKTPT

SEQ ID NO: 31248 - protein, 39 aa, Artificial Sequence
  Non-cyclic GFR-binding peptide
  MOD_RES (2), (4), (35), (36): Xaa is C or S
LXGXEEVIMRYKKLLLVRGNDFYLMSIANTKVPAXXTSP

SEQ ID NO: 31249 - protein, 31 aa, Artificial Sequence
  Non-cyclic GFR-binding peptide
RDVVMGRYKKLIIQQKDNFYLMSIANMKTPT

SEQ ID NO: 31250 - protein, 33 aa, Artificial Sequence
  Non-cyclic GFR-binding peptide
  MOD_RES (1), (3): Xaa is C or S
XGXEEVIMRYKKLLLVRGNDFYLMSIANTKVPA

SEQ ID NO: 31251 - protein, 33 aa, Artificial Sequence
  Non-cyclic GFR-binding peptide
  MOD_RES (31), (32): Xaa is C or S
DVVMGRYKKLIIQQKDNFYLMSIANMKTPTXXP

SEQ ID NO: 31252 - protein, 36 aa, Artificial Sequence
  Non-cyclic GFR-binding peptide
  MOD_RES (33), (34): Xaa is C or S
  MOD_RES (11), (12), (13), (14), (15): Xaa is A or G
  MOD_RES (16), (17), (18), (19): Xaa is A or G or is absent
DVVMGRYKKLXXXXXXXXXFYLMSIANMKTPTXXPG

SEQ ID NO: 31253 - protein, 38 aa, Artificial Sequence
  Non-cyclic GFR-binding peptide
  MOD_RES (2), (4), (37), (38): Xaa is C or S
  MOD_RES (15), (16), (17), (18), (19): Xaa is A or G
  MOD_RES (20), (21), (22), (23): Xaa is A or G or is absent
LXGXEEVIMRYKKLXXXXXXXXXFYLMSIANTKVPAXX

SEQ ID NO: 31254 - protein, 36 aa, Artificial Sequence
  Non-cyclic GFR-binding peptide
  MOD_RES (1), (33), (34): Xaa is C or S
XRDVVMGRYKKLIIQQKDNFYLMSIANMKTPTXXPG

SEQ ID NO: 31255 - protein, 37 aa, Artificial Sequence
  Non-cyclic GFR-binding peptide
  MOD_RES (1), (3), (35), (36): Xaa is C or S
XGXRDVVMGRYKKLIIQQKDNFYLMSIANMKTPTXXP

SEQ ID NO: 31256 - protein, 36 aa, Artificial Sequence
  Non-cyclic GFR-binding peptide
  MOD_RES (1), (32), (33): Xaa is C or S
XEEVIMRYKKLLLVRGNDFYLMSIANTKVPAXXTSP

SEQ ID NO: 31257 - protein, 38 aa, Artificial Sequence
  Non-cyclic GFR-binding peptide
  MOD_RES (33), (34): Xaa is C or S
  MOD_RES (11), (12), (13), (14), (15): Xaa is A or G
  MOD_RES (16), (17), (18), (19): Xaa is A or G or is absent
DVVMGRYKKLXXXXXXXXXFYLMSIANMKTPTXXPGAS

SEQ ID NO: 31258 - protein, 32 aa, Artificial Sequence
  Non-cyclic GFR-binding peptide
  MOD_RES (31), (32): Xaa is C or S
DVVMGRYKKLIIQQKDNFYLMSIANMKTPTXX

SEQ ID NO: 31259 - protein, 39 aa, Artificial Sequence
  Non-cyclic GFR-binding peptide
  MOD_RES (1), (3), (35), (36): Xaa is C or S
XGXRDVVMGRYKKLIIQQKDNFYLMSIANMKTPTXXPGA

SEQ ID NO: 31260 - protein, 37 aa, Artificial Sequence
  Non-cyclic GFR-binding peptide
  MOD_RES (31), (32): Xaa is C or S
EEVIMRYKKLLLVRGNDFYLMSIANTKVPAXXTSPVR

SEQ ID NO: 31261 - protein, 32 aa, Artificial Sequence
  Non-cyclic GFR-binding peptide
  MOD_RES (1), (1): Xaa is C or S
XRDVVMGRYKKLIIQQKDNFYLMSIANMKTPT

SEQ ID NO: 31262 - protein, 41 aa, Artificial Sequence
  Non-cyclic GFR-binding peptide
  MOD_RES (2), (4), (37), (38): Xaa is C or S
  MOD_RES (15), (16), (17), (18), (19): Xaa is A or G
  MOD_RES (20), (21), (22), (23): Xaa is A or G or is absent
LXGXEEVIMRYKKLXXXXXXXXXFYLMSIANTKVPAXXTSP

SEQ ID NO: 31263 - protein, 41 aa, Artificial Sequence
  Non-cyclic GFR-binding peptide
  MOD_RES (2), (4), (35), (36): Xaa is C or S
LXGXEEVIMRYKKLLLVRGNDFYLMSIANTKVPAXXTSPVR

SEQ ID NO: 31264 - protein, 36 aa, Artificial Sequence
  Non-cyclic GFR-binding peptide
  MOD_RES (1), (34), (35): Xaa is C or S
  MOD_RES (12), (13), (14), (15), (16): Xaa is A or G
  MOD_RES (17), (18), (19), (20): Xaa is A or G or is absent
XEEVIMRYKKLXXXXXXXXXFYLMSIANTKVPAXXT

SEQ ID NO: 31265 - protein, 34 aa, Artificial Sequence
  Non-cyclic GFR-binding peptide
  MOD_RES (1), (3), (34): Xaa is C or S
XGXEEVIMRYKKLLLVRGNDFYLMSIANTKVPAX

SEQ ID NO: 31266 - protein, 37 aa, Artificial Sequence
  Non-cyclic GFR-binding peptide
  MOD_RES (2), (4), (35), (36): Xaa is C or S
LXGXEEVIMRYKKLLLVRGNDFYLMSIANTKVPAXXT

SEQ ID NO: 31267 - protein, 35 aa, Artificial Sequence
  Non-cyclic GFR-binding peptide
  MOD_RES (1), (3), (34), (35): Xaa is C or S
XGXEEVIMRYKKLLLVRGNDFYLMSIANTKVPAXX

SEQ ID NO: 31268 - protein, 36 aa, Artificial Sequence
  Non-cyclic GFR-binding peptide
  MOD_RES (2), (4), (35), (36): Xaa is C or S
LXGXEEVIMRYKKLLLVRGNDFYLMSIANTKVPAXX

SEQ ID NO: 31269 - protein, 36 aa, Artificial Sequence
  Non-cyclic GFR-binding peptide
  MOD_RES (1), (3): Xaa is C or S
  MOD_RES (15), (16), (17), (18), (19): Xaa is A or G
  MOD_RES (20), (21), (22), (23): Xaa is A or G or is absent
XGXRDVVMGRYKKLXXXXXXXXXFYLMSIANMKTPT

SEQ ID NO: 31270 - protein, 36 aa, Artificial Sequence
  Non-cyclic GFR-binding peptide
  MOD_RES (2), (35), (36): Xaa is C or S
  MOD_RES (13), (14), (15), (16), (17): Xaa is A or G
  MOD_RES (18), (19), (20), (21): Xaa is A or G or is absent
GXEEVIMRYKKLXXXXXXXXXFYLMSIANTKVPAXX

SEQ ID NO: 31271 - protein, 38 aa, Artificial Sequence
  Non-cyclic GFR-binding peptide
  MOD_RES (1), (33), (34): Xaa is C or S
XRDVVMGRYKKLIIQQKDNFYLMSIANMKTPTXXPGAS

SEQ ID NO: 31272 - protein, 40 aa, Artificial Sequence
  Non-cyclic GFR-binding peptide
  MOD_RES (2), (36), (37): Xaa is C or S
  MOD_RES (14), (15), (16), (17), (18): Xaa is A or G
  MOD_RES (19), (20), (21), (22): Xaa is A or G or is absent
GXRDVVMGRYKKLXXXXXXXXXFYLMSIANMKTPTXXPGA

SEQ ID NO: 31273 - protein, 34 aa, Artificial Sequence
  Non-cyclic GFR-binding peptide
  MOD_RES (2), (34): Xaa is C or S
GXRDVVMGRYKKLIIQQKDNFYLMSIANMKTPTX

SEQ ID NO: 31274 - protein, 37 aa, Artificial Sequence
  Non-cyclic GFR-binding peptide
  MOD_RES (2), (33), (34): Xaa is C or S
GXEEVIMRYKKLLLVRGNDFYLMSIANTKVPAXXTSP

SEQ ID NO: 31275 - protein, 42 aa, Artificial Sequence
  Non-cyclic GFR-binding peptide
  MOD_RES (2), (4), (38), (39): Xaa is C or S
  MOD_RES (16), (17), (18), (19), (20): Xaa is A or G
  MOD_RES (21), (22), (23), (24): Xaa is A or G or is absent
SXGXRDVVMGRYKKLXXXXXXXXXFYLMSIANMKTPTXXPGA

SEQ ID NO: 31276 - protein, 37 aa, Artificial Sequence
  Non-cyclic GFR-binding peptide
  MOD_RES (2), (36), (37): Xaa is C or S
  MOD_RES (14), (15), (16), (17), (18): Xaa is A or G
  MOD_RES (19), (20), (21), (22): Xaa is A or G or is absent
GXRDVVMGRYKKLXXXXXXXXXFYLMSIANMKTPTXX

SEQ ID NO: 31277 - protein, 34 aa, Artificial Sequence
  Non-cyclic GFR-binding peptide
  MOD_RES (34), (34): Xaa is C or S
  MOD_RES (12), (13), (14), (15), (16): Xaa is A or G
  MOD_RES (17), (18), (19), (20): Xaa is A or G or is absent
RDVVMGRYKKLXXXXXXXXXFYLMSIANMKTPTX

SEQ ID NO: 31278 - protein, 34 aa, Artificial Sequence
  Non-cyclic GFR-binding peptide
  MOD_RES (2), (33), (34): Xaa is C or S
GXEEVIMRYKKLLLVRGNDFYLMSIANTKVPAXX

SEQ ID NO: 31279 - protein, 33 aa, Artificial Sequence
  Non-cyclic GFR-binding peptide
  MOD_RES (32), (33): Xaa is C or S
RDVVMGRYKKLIIQQKDNFYLMSIANMKTPTXX

SEQ ID NO: 31280 - protein, 36 aa, Artificial Sequence
  Non-cyclic GFR-binding peptide
  MOD_RES (32), (33): Xaa is C or S
RDVVMGRYKKLIIQQKDNFYLMSIANMKTPTXXPGA

SEQ ID NO: 31281 - protein, 39 aa, Artificial Sequence
  Non-cyclic GFR-binding peptide
  MOD_RES (34), (35): Xaa is C or S
  MOD_RES (12), (13), (14), (15), (16): Xaa is A or G
  MOD_RES (17), (18), (19), (20): Xaa is A or G or is absent
RDVVMGRYKKLXXXXXXXXXFYLMSIANMKTPTXXPGAS

SEQ ID NO: 31282 - protein, 38 aa, Artificial Sequence
  Non-cyclic GFR-binding peptide
  MOD_RES (1), (34), (35): Xaa is C or S
  MOD_RES (12), (13), (14), (15), (16): Xaa is A or G
  MOD_RES (17), (18), (19), (20): Xaa is A or G or is absent
XEEVIMRYKKLXXXXXXXXXFYLMSIANTKVPAXXTSP

SEQ ID NO: 31283 - protein, 33 aa, Artificial Sequence
  Non-cyclic GFR-binding peptide
  MOD_RES (1), (33): Xaa is C or S
XRDVVMGRYKKLIIQQKDNFYLMSIANMKTPTX

SEQ ID NO: 31284 - protein, 34 aa, Artificial Sequence
  Non-cyclic GFR-binding peptide
  MOD_RES (33), (34): Xaa is C or S
  MOD_RES (11), (12), (13), (14), (15): Xaa is A or G
  MOD_RES (16), (17), (18), (19): Xaa is A or G or is absent
EEVIMRYKKLXXXXXXXXXFYLMSIANTKVPAXX

SEQ ID NO: 31285 - protein, 39 aa, Artificial Sequence
  Non-cyclic GFR-binding peptide
  MOD_RES (2), (4), (36), (37): Xaa is C or S
SXGXRDVVMGRYKKLIIQQKDNFYLMSIANMKTPTXXPG

SEQ ID NO: 31286 - protein, 37 aa, Artificial Sequence
  Non-cyclic GFR-binding peptide
  MOD_RES (31), (32): Xaa is C or S
DVVMGRYKKLIIQQKDNFYLMSIANMKTPTXXPGASG

SEQ ID NO: 31287 - protein, 38 aa, Artificial Sequence
  Non-cyclic GFR-binding peptide
  MOD_RES (2), (33), (34): Xaa is C or S
GXEEVIMRYKKLLLVRGNDFYLMSIANTKVPAXXTSPV

SEQ ID NO: 31288 - protein, 34 aa, Artificial Sequence
  Non-cyclic GFR-binding peptide
  MOD_RES (1), (34): Xaa is C or S
  MOD_RES (12), (13), (14), (15), (16): Xaa is A or G
  MOD_RES (17), (18), (19), (20): Xaa is A or G or is absent
XEEVIMRYKKLXXXXXXXXXFYLMSIANTKVPAX

SEQ ID NO: 31289 - protein, 38 aa, Artificial Sequence
  Non-cyclic GFR-binding peptide
  MOD_RES (1), (35), (36): Xaa is C or S
  MOD_RES (13), (14), (15), (16), (17): Xaa is A or G
  MOD_RES (18), (19), (20), (21): Xaa is A or G or is absent
XRDVVMGRYKKLXXXXXXXXXFYLMSIANMKTPTXXPG

SEQ ID NO: 31290 - protein, 39 aa, Artificial Sequence
  Non-cyclic GFR-binding peptide
  MOD_RES (1), (33), (34): Xaa is C or S
XRDVVMGRYKKLIIQQKDNFYLMSIANMKTPTXXPGASG

SEQ ID NO: 31291 - protein, 40 aa, Artificial Sequence
  Non-cyclic GFR-binding peptide
  MOD_RES (2), (4), (38), (39): Xaa is C or S
  MOD_RES (16), (17), (18), (19), (20): Xaa is A or G
  MOD_RES (21), (22), (23), (24): Xaa is A or G or is absent
SXGXRDVVMGRYKKLXXXXXXXXXFYLMSIANMKTPTXXP

SEQ ID NO: 31292 - protein, 36 aa, Artificial Sequence
  Non-cyclic GFR-binding peptide
  MOD_RES (1), (3), (34), (35): Xaa is C or S
XGXEEVIMRYKKLLLVRGNDFYLMSIANTKVPAXXT

SEQ ID NO: 31293 - protein, 38 aa, Artificial Sequence
  Non-cyclic GFR-binding peptide
  MOD_RES (2), (35), (36): Xaa is C or S
  MOD_RES (13), (14), (15), (16), (17): Xaa is A or G
  MOD_RES (18), (19), (20), (21): Xaa is A or G or is absent
GXEEVIMRYKKLXXXXXXXXXFYLMSIANTKVPAXXTS

SEQ ID NO: 31294 - protein, 39 aa, Artificial Sequence
  Non-cyclic GFR-binding peptide
  MOD_RES (2), (4), (38), (39): Xaa is C or S
  MOD_RES (16), (17), (18), (19), (20): Xaa is A or G
  MOD_RES (21), (22), (23), (24): Xaa is A or G or is absent
SXGXRDVVMGRYKKLXXXXXXXXXFYLMSIANMKTPTXX

SEQ ID NO: 31295 - protein, 40 aa, Artificial Sequence
  Non-cyclic GFR-binding peptide
  MOD_RES (1), (3), (37), (38): Xaa is C or S
  MOD_RES (15), (16), (17), (18), (19): Xaa is A or G
  MOD_RES (20), (21), (22), (23): Xaa is A or G or is absent
XGXRDVVMGRYKKLXXXXXXXXXFYLMSIANMKTPTXXPG

SEQ ID NO: 31296 - protein, 38 aa, Artificial Sequence
  Non-cyclic GFR-binding peptide
  MOD_RES (1), (32), (33): Xaa is C or S
XEEVIMRYKKLLLVRGNDFYLMSIANTKVPAXXTSPVR

SEQ ID NO: 31297 - protein, 40 aa, Artificial Sequence
  Non-cyclic GFR-binding peptide
  MOD_RES (34), (35): Xaa is C or S
  MOD_RES (12), (13), (14), (15), (16): Xaa is A or G
  MOD_RES (17), (18), (19), (20): Xaa is A or G or is absent
RDVVMGRYKKLXXXXXXXXXFYLMSIANMKTPTXXPGASG

SEQ ID NO: 31298 - protein, 35 aa, Artificial Sequence
  Non-cyclic GFR-binding peptide
  MOD_RES (31), (32): Xaa is C or S
DVVMGRYKKLIIQQKDNFYLMSIANMKTPTXXPGA

SEQ ID NO: 31299 - protein, 35 aa, Artificial Sequence
  Non-cyclic GFR-binding peptide
  MOD_RES (33), (34): Xaa is C or S
  MOD_RES (11), (12), (13), (14), (15): Xaa is A or G
  MOD_RES (16), (17), (18), (19): Xaa is A or G or is absent
DVVMGRYKKLXXXXXXXXXFYLMSIANMKTPTXXP

SEQ ID NO: 31300 - protein, 33 aa, Artificial Sequence
  Non-cyclic GFR-binding peptide
  MOD_RES (2), (33): Xaa is C or S
GXEEVIMRYKKLLLVRGNDFYLMSIANTKVPAX

SEQ ID NO: 31301 - protein, 30 aa, Artificial Sequence
  Non-cyclic GFR-binding peptide
DVVMGRYKKLIIQQKDNFYLMSIANMKTPT

SEQ ID NO: 31302 - protein, 34 aa, Artificial Sequence
  Non-cyclic GFR-binding peptide
  MOD_RES (1), (3): Xaa is C or S
XGXRDVVMGRYKKLIIQQKDNFYLMSIANMKTPT

SEQ ID NO: 31303 - protein, 40 aa, Artificial Sequence
  Non-cyclic GFR-binding peptide
  MOD_RES (1), (3), (36), (37): Xaa is C or S
  MOD_RES (14), (15), (16), (17), (18): Xaa is A or G
  MOD_RES (19), (20), (21), (22): Xaa is A or G or is absent
XGXEEVIMRYKKLXXXXXXXXXFYLMSIANTKVPAXXTSP

SEQ ID NO: 31304 - protein, 40 aa, Artificial Sequence
  Non-cyclic GFR-binding peptide
  MOD_RES (1), (35), (36): Xaa is C or S
  MOD_RES (13), (14), (15), (16), (17): Xaa is A or G
  MOD_RES (18), (19), (20), (21): Xaa is A or G or is absent
XRDVVMGRYKKLXXXXXXXXXFYLMSIANMKTPTXXPGAS

SEQ ID NO: 31305 - protein, 39 aa, Artificial Sequence
  Non-cyclic GFR-binding peptide
  MOD_RES (2), (4), (37), (38): Xaa is C or S
  MOD_RES (15), (16), (17), (18), (19): Xaa is A or G
  MOD_RES (20), (21), (22), (23): Xaa is A or G or is absent
LXGXEEVIMRYKKLXXXXXXXXXFYLMSIANTKVPAXXT

SEQ ID NO: 31306 - protein, 31 aa, Artificial Sequence
  Non-cyclic GFR-binding peptide
  MOD_RES (31), (31): Xaa is C or S
DVVMGRYKKLIIQQKDNFYLMSIANMKTPTX

SEQ ID NO: 31307 - protein, 38 aa, Artificial Sequence
  Non-cyclic GFR-binding peptide
  MOD_RES (1), (3), (36), (37): Xaa is C or S
  MOD_RES (14), (15), (16), (17), (18): Xaa is A or G
  MOD_RES (19), (20), (21), (22): Xaa is A or G or is absent
XGXEEVIMRYKKLXXXXXXXXXFYLMSIANTKVPAXXT

SEQ ID NO: 31308 - protein, 36 aa, Artificial Sequence
  Non-cyclic GFR-binding peptide
  MOD_RES (34), (35): Xaa is C or S
  MOD_RES (12), (13), (14), (15), (16): Xaa is A or G
  MOD_RES (17), (18), (19), (20): Xaa is A or G or is absent
RDVVMGRYKKLXXXXXXXXXFYLMSIANMKTPTXXP

SEQ ID NO: 31309 - protein, 35 aa, Artificial Sequence
  Non-cyclic GFR-binding peptide
  MOD_RES (1), (3): Xaa is C or S
  MOD_RES (14), (15), (16), (17), (18): Xaa is A or G
  MOD_RES (19), (20), (21), (22): Xaa is A or G or is absent
XGXEEVIMRYKKLXXXXXXXXXFYLMSIANTKVPA

SEQ ID NO: 31310 - protein, 37 aa, Artificial Sequence
  Non-cyclic GFR-binding peptide
  MOD_RES (33), (34): Xaa is C or S
  MOD_RES (11), (12), (13), (14), (15): Xaa is A or G
  MOD_RES (16), (17), (18), (19): Xaa is A or G or is absent
DVVMGRYKKLXXXXXXXXXFYLMSIANMKTPTXXPGA

SEQ ID NO: 31311 - protein, 42 aa, Artificial Sequence
  Non-cyclic GFR-binding peptide
  MOD_RES (2), (4), (36), (37): Xaa is C or S
SXGXRDVVMGRYKKLIIQQKDNFYLMSIANMKTPTXXPGASG

SEQ ID NO: 31312 - protein, 36 aa, Artificial Sequence
  Non-cyclic GFR-binding peptide
  MOD_RES (1), (3), (36): Xaa is C or S
  MOD_RES (14), (15), (16), (17), (18): Xaa is A or G
  MOD_RES (19), (20), (21), (22): Xaa is A or G or is absent
XGXEEVIMRYKKLXXXXXXXXXFYLMSIANTKVPAX

SEQ ID NO: 31313 - protein, 36 aa, Artificial Sequence
  Non-cyclic GFR-binding peptide
  MOD_RES (2), (33), (34): Xaa is C or S
GXEEVIMRYKKLLLVRGNDFYLMSIANTKVPAXXTS

SEQ ID NO: 31314 - protein, 37 aa, Artificial Sequence
  Non-cyclic GFR-binding peptide
  MOD_RES (2), (35), (36): Xaa is C or S
  MOD_RES (13), (14), (15), (16), (17): Xaa is A or G
  MOD_RES (18), (19), (20), (21): Xaa is A or G or is absent
GXEEVIMRYKKLXXXXXXXXXFYLMSIANTKVPAXXT

SEQ ID NO: 31315 - protein, 35 aa, Artificial Sequence
  Non-cyclic GFR-binding peptide
  MOD_RES (2), (2): Xaa is C or S
  MOD_RES (14), (15), (16), (17), (18): Xaa is A or G
  MOD_RES (19), (20), (21), (22): Xaa is A or G or is absent
GXRDVVMGRYKKLXXXXXXXXXFYLMSIANMKTPT

SEQ ID NO: 31316 - protein, 40 aa, Artificial Sequence
  Non-cyclic GFR-binding peptide
  MOD_RES (2), (34), (35): Xaa is C or S
GXRDVVMGRYKKLIIQQKDNFYLMSIANMKTPTXXPGASG

SEQ ID NO: 31317 - protein, 33 aa, Artificial Sequence
  Non-cyclic GFR-binding peptide
  MOD_RES (33), (33): Xaa is C or S
  MOD_RES (11), (12), (13), (14), (15): Xaa is A or G
  MOD_RES (16), (17), (18), (19): Xaa is A or G or is absent
EEVIMRYKKLXXXXXXXXXFYLMSIANTKVPAX

SEQ ID NO: 31318 - protein, 35 aa, Artificial Sequence
  Non-cyclic GFR-binding peptide
  MOD_RES (34), (35): Xaa is C or S
  MOD_RES (12), (13), (14), (15), (16): Xaa is A or G
  MOD_RES (17), (18), (19), (20): Xaa is A or G or is absent
RDVVMGRYKKLXXXXXXXXXFYLMSIANMKTPTXX

SEQ ID NO: 31319 - protein, 36 aa, Artificial Sequence
  Non-cyclic GFR-binding peptide
  MOD_RES (1), (3), (35), (36): Xaa is C or S
XGXRDVVMGRYKKLIIQQKDNFYLMSIANMKTPTXX

SEQ ID NO: 31320 - protein, 39 aa, Artificial Sequence
  Non-cyclic GFR-binding peptide
  MOD_RES (2), (33), (34): Xaa is C or S
GXEEVIMRYKKLLLVRGNDFYLMSIANTKVPAXXTSPVR

SEQ ID NO: 31321 - protein, 38 aa, Artificial Sequence
  Non-cyclic GFR-binding peptide
  MOD_RES (33), (34): Xaa is C or S
  MOD_RES (11), (12), (13), (14), (15): Xaa is A or G
  MOD_RES (16), (17), (18), (19): Xaa is A or G or is absent
EEVIMRYKKLXXXXXXXXXFYLMSIANTKVPAXXTSPV

SEQ ID NO: 31322 - protein, 39 aa, Artificial Sequence
  Non-cyclic GFR-binding peptide
  MOD_RES (33), (34): Xaa is C or S
  MOD_RES (11), (12), (13), (14), (15): Xaa is A or G
  MOD_RES (16), (17), (18), (19): Xaa is A or G or is absent
DVVMGRYKKLXXXXXXXXXFYLMSIANMKTPTXXPGASG

SEQ ID NO: 31323 - protein, 37 aa, Artificial Sequence
  Non-cyclic GFR-binding peptide
  MOD_RES (1), (3), (34), (35): Xaa is C or S
XGXEEVIMRYKKLLLVRGNDFYLMSIANTKVPAXXTS

SEQ ID NO: 31324 - protein, 40 aa, Artificial Sequence
  Non-cyclic GFR-binding peptide
  MOD_RES (2), (4), (37), (38): Xaa is C or S
  MOD_RES (15), (16), (17), (18), (19): Xaa is A or G
  MOD_RES (20), (21), (22), (23): Xaa is A or G or is absent
LXGXEEVIMRYKKLXXXXXXXXXFYLMSIANTKVPAXXTS

SEQ ID NO: 31325 - protein, 33 aa, Artificial Sequence
  Non-cyclic GFR-binding peptide
  MOD_RES (31), (32): Xaa is C or S
EEVIMRYKKLLLVRGNDFYLMSIANTKVPAXXT

SEQ ID NO: 31326 - protein, 43 aa, Artificial Sequence
  Non-cyclic GFR-binding peptide
  MOD_RES (2), (4), (38), (39): Xaa is C or S
  MOD_RES (16), (17), (18), (19), (20): Xaa is A or G
  MOD_RES (21), (22), (23), (24): Xaa is A or G or is absent
SXGXRDVVMGRYKKLXXXXXXXXXFYLMSIANMKTPTXXPGAS

SEQ ID NO: 31327 - protein, 35 aa, Artificial Sequence
  Non-cyclic GFR-binding peptide
  MOD_RES (1), (35): Xaa is C or S
  MOD_RES (13), (14), (15), (16), (17): Xaa is A or G
  MOD_RES (18), (19), (20), (21): Xaa is A or G or is absent
XRDVVMGRYKKLXXXXXXXXXFYLMSIANMKTPTX

SEQ ID NO: 31328 - protein, 38 aa, Artificial Sequence
  Non-cyclic GFR-binding peptide
  MOD_RES (1), (3), (34), (35): Xaa is C or S
XGXEEVIMRYKKLLLVRGNDFYLMSIANTKVPAXXTSP

SEQ ID NO: 31329 - protein, 34 aa, Artificial Sequence
  Non-cyclic GFR-binding peptide
  MOD_RES (2), (2): Xaa is C or S
  MOD_RES (13), (14), (15), (16), (17): Xaa is A or G
  MOD_RES (18), (19), (20), (21): Xaa is A or G or is absent
GXEEVIMRYKKLXXXXXXXXXFYLMSIANTKVPA

SEQ ID NO: 31330 - protein, 37 aa, Artificial Sequence
  Non-cyclic GFR-binding peptide
  MOD_RES (1), (32), (33): Xaa is C or S
XEEVIMRYKKLLLVRGNDFYLMSIANTKVPAXXTSPV

SEQ ID NO: 31331 - protein, 41 aa, Artificial Sequence
  Non-cyclic GFR-binding peptide
  MOD_RES (2), (4), (36), (37): Xaa is C or S
SXGXRDVVMGRYKKLIIQQKDNFYLMSIANMKTPTXXPGAS

SEQ ID NO: 31332 - protein, 33 aa, Artificial Sequence
  Non-cyclic GFR-binding peptide
  MOD_RES (2), (2): Xaa is C or S
GXRDVVMGRYKKLIIQQKDNFYLMSIANMKTPT

SEQ ID NO: 31333 - protein, 37 aa, Artificial Sequence
  Non-cyclic GFR-binding peptide
  MOD_RES (32), (33): Xaa is C or S
RDVVMGRYKKLIIQQKDNFYLMSIANMKTPTXXPGAS

SEQ ID NO: 31334 - protein, 32 aa, Artificial Sequence
  Non-cyclic GFR-binding peptide
  MOD_RES (2), (2): Xaa is C or S
GXEEVIMRYKKLLLVRGNDFYLMSIANTKVPA

SEQ ID NO: 31335 - protein, 42 aa, Artificial Sequence
  Non-cyclic GFR-binding peptide
  MOD_RES (1), (3), (37), (38): Xaa is C or S
  MOD_RES (15), (16), (17), (18), (19): Xaa is A or G
  MOD_RES (20), (21), (22), (23): Xaa is A or G or is absent
XGXRDVVMGRYKKLXXXXXXXXXFYLMSIANMKTPTXXPGAS

SEQ ID NO: 31336 - protein, 40 aa, Artificial Sequence
  Non-cyclic GFR-binding peptide
  MOD_RES (1), (34), (35): Xaa is C or S
  MOD_RES (12), (13), (14), (15), (16): Xaa is A or G
  MOD_RES (17), (18), (19), (20): Xaa is A or G or is absent
XEEVIMRYKKLXXXXXXXXXFYLMSIANTKVPAXXTSPVR

SEQ ID NO: 31337 - protein, 36 aa, Artificial Sequence
  Non-cyclic GFR-binding peptide
  MOD_RES (2), (34), (35): Xaa is C or S
GXRDVVMGRYKKLIIQQKDNFYLMSIANMKTPTXXP

SEQ ID NO: 31338 - protein, 37 aa, Artificial Sequence
  Non-cyclic GFR-binding peptide
  MOD_RES (2), (4), (37): Xaa is C or S
  MOD_RES (15), (16), (17), (18), (19): Xaa is A or G
  MOD_RES (20), (21), (22), (23): Xaa is A or G or is absent
LXGXEEVIMRYKKLXXXXXXXXXFYLMSIANTKVPAX

SEQ ID NO: 31339 - protein, 40 aa, Artificial Sequence
  Non-cyclic GFR-binding peptide
  MOD_RES (2), (4), (35), (36): Xaa is C or S
LXGXEEVIMRYKKLLLVRGNDFYLMSIANTKVPAXXTSPV

SEQ ID NO: 31340 - protein, 38 aa, Artificial Sequence
  Non-cyclic GFR-binding peptide
  MOD_RES (2), (4), (38): Xaa is C or S
  MOD_RES (16), (17), (18), (19), (20): Xaa is A or G
  MOD_RES (21), (22), (23), (24): Xaa is A or G or is absent
SXGXRDVVMGRYKKLXXXXXXXXXFYLMSIANMKTPTX

SEQ ID NO: 31341 - protein, 39 aa, Artificial Sequence
  Non-cyclic GFR-binding peptide
  MOD_RES (33), (34): Xaa is C or S
  MOD_RES (11), (12), (13), (14), (15): Xaa is A or G
  MOD_RES (16), (17), (18), (19): Xaa is A or G or is absent
EEVIMRYKKLXXXXXXXXXFYLMSIANTKVPAXXTSPVR

SEQ ID NO: 31342 - protein, 39 aa, Artificial Sequence
  Non-cyclic GFR-binding peptide
  MOD_RES (2), (34), (35): Xaa is C or S
GXRDVVMGRYKKLIIQQKDNFYLMSIANMKTPTXXPGAS

SEQ ID NO: 31343 - protein, 33 aa, Artificial Sequence
  Non-cyclic GFR-binding peptide
  MOD_RES (1), (1): Xaa is C or S
  MOD_RES (12), (13), (14), (15), (16): Xaa is A or G
  MOD_RES (17), (18), (19), (20): Xaa is A or G or is absent
XEEVIMRYKKLXXXXXXXXXFYLMSIANTKVPA

SEQ ID NO: 31344 - protein, 39 aa, Artificial Sequence
  Non-cyclic GFR-binding peptide
  MOD_RES (1), (3), (34), (35): Xaa is C or S
XGXEEVIMRYKKLLLVRGNDFYLMSIANTKVPAXXTSPV

SEQ ID NO: 31345 - protein, 41 aa, Artificial Sequence
  Non-cyclic GFR-binding peptide
  MOD_RES (1), (35), (36): Xaa is C or S
  MOD_RES (13), (14), (15), (16), (17): Xaa is A or G
  MOD_RES (18), (19), (20), (21): Xaa is A or G or is absent
XRDVVMGRYKKLXXXXXXXXXFYLMSIANMKTPTXXPGASG

SEQ ID NO: 31346 - protein, 37 aa, Artificial Sequence
  Non-cyclic GFR-binding peptide
  MOD_RES (2), (4): Xaa is C or S
  MOD_RES (16), (17), (18), (19), (20): Xaa is A or G
  MOD_RES (21), (22), (23), (24): Xaa is A or G or is absent
SXGXRDVVMGRYKKLXXXXXXXXXFYLMSIANMKTPT

SEQ ID NO: 31347 - protein, 35 aa, Artificial Sequence
  Non-cyclic GFR-binding peptide
  MOD_RES (1), (33), (34): Xaa is C or S
XRDVVMGRYKKLIIQQKDNFYLMSIANMKTPTXXP

SEQ ID NO: 31348 - protein, 35 aa, Artificial Sequence
  Non-cyclic GFR-binding peptide
  MOD_RES (2), (33), (34): Xaa is C or S
GXEEVIMRYKKLLLVRGNDFYLMSIANTKVPAXXT

SEQ ID NO: 31349 - protein, 32 aa, Artificial Sequence
  Non-cyclic GFR-binding peptide
  MOD_RES (1), (32): Xaa is C or S
XEEVIMRYKKLLLVRGNDFYLMSIANTKVPAX

SEQ ID NO: 31350 - protein, 36 aa, Artificial Sequence
  Non-cyclic GFR-binding peptide
  MOD_RES (2), (36): Xaa is C or S
  MOD_RES (14), (15), (16), (17), (18): Xaa is A or G
  MOD_RES (19), (20), (21), (22): Xaa is A or G or is absent
GXRDVVMGRYKKLXXXXXXXXXFYLMSIANMKTPTX

SEQ ID NO: 31351 - protein, 42 aa, Artificial Sequence
  Non-cyclic GFR-binding peptide
  MOD_RES (1), (3), (36), (37): Xaa is C or S
  MOD_RES (14), (15), (16), (17), (18): Xaa is A or G
  MOD_RES (19), (20), (21), (22): Xaa is A or G or is absent
XGXEEVIMRYKKLXXXXXXXXXFYLMSIANTKVPAXXTSPVR

SEQ ID NO: 31352 - protein, 35 aa, Artificial Sequence
  Non-cyclic GFR-binding peptide
  MOD_RES (2), (4), (35): Xaa is C or S
LXGXEEVIMRYKKLLLVRGNDFYLMSIANTKVPAX

SEQ ID NO: 31353 - protein, 41 aa, Artificial Sequence
  Non-cyclic GFR-binding peptide
  MOD_RES (1), (3), (37), (38): Xaa is C or S
  MOD_RES (15), (16), (17), (18), (19): Xaa is A or G
  MOD_RES (20), (21), (22), (23): Xaa is A or G or is absent
XGXRDVVMGRYKKLXXXXXXXXXFYLMSIANMKTPTXXPGA

SEQ ID NO: 31354 - protein, 35 aa, Artificial Sequence
  Non-cyclic GFR-binding peptide
  MOD_RES (31), (32): Xaa is C or S
EEVIMRYKKLLLVRGNDFYLMSIANTKVPAXXTSP

SEQ ID NO: 31355 - protein, 43 aa, Artificial Sequence
  Non-cyclic GFR-binding peptide
  MOD_RES (1), (3), (37), (38): Xaa is C or S
  MOD_RES (15), (16), (17), (18), (19): Xaa is A or G
  MOD_RES (20), (21), (22), (23): Xaa is A or G or is absent
XGXRDVVMGRYKKLXXXXXXXXXFYLMSIANMKTPTXXPGASG

SEQ ID NO: 31356 - protein, 42 aa, Artificial Sequence
  Non-cyclic GFR-binding peptide
  MOD_RES (2), (4), (37), (38): Xaa is C or S
  MOD_RES (15), (16), (17), (18), (19): Xaa is A or G
  MOD_RES (20), (21), (22), (23): Xaa is A or G or is absent
LXGXEEVIMRYKKLXXXXXXXXXFYLMSIANTKVPAXXTSPV

SEQ ID NO: 31357 - protein, 43 aa, Artificial Sequence
  Non-cyclic GFR-binding peptide
  MOD_RES (2), (4), (37), (38): Xaa is C or S
  MOD_RES (15), (16), (17), (18), (19): Xaa is A or G
  MOD_RES (20), (21), (22), (23): Xaa is A or G or is absent
LXGXEEVIMRYKKLXXXXXXXXXFYLMSIANTKVPAXXTSPVR

SEQ ID NO: 31358 - protein, 35 aa, Artificial Sequence
  Non-cyclic GFR-binding peptide
  MOD_RES (1), (32), (33): Xaa is C or S
XEEVIMRYKKLLLVRGNDFYLMSIANTKVPAXXTS

SEQ ID NO: 31359 - protein, 39 aa, Artificial Sequence
  Non-cyclic GFR-binding peptide
  MOD_RES (1), (34), (35): Xaa is C or S
  MOD_RES (12), (13), (14), (15), (16): Xaa is A or G
  MOD_RES (17), (18), (19), (20): Xaa is A or G or is absent
XEEVIMRYKKLXXXXXXXXXFYLMSIANTKVPAXXTSPV

SEQ ID NO: 31360 - protein, 36 aa, Artificial Sequence
  Non-cyclic GFR-binding peptide
  MOD_RES (2), (4), (36): Xaa is C or S
SXGXRDVVMGRYKKLIIQQKDNFYLMSIANMKTPTX

SEQ ID NO: 31361 - protein, 32 aa, Artificial Sequence
  Non-cyclic GFR-binding peptide
  MOD_RES (31), (32): Xaa is C or S
EEVIMRYKKLLLVRGNDFYLMSIANTKVPAXX

SEQ ID NO: 31362 - protein, 35 aa, Artificial Sequence
  Non-cyclic GFR-binding peptide
  MOD_RES (1), (3), (35): Xaa is C or S
XGXRDVVMGRYKKLIIQQKDNFYLMSIANMKTPTX

SEQ ID NO: 31363 - protein, 40 aa, Artificial Sequence
  Non-cyclic GFR-binding peptide
  MOD_RES (1), (3), (34), (35): Xaa is C or S
XGXEEVIMRYKKLLLVRGNDFYLMSIANTKVPAXXTSPVR

SEQ ID NO: 31364 - protein, 36 aa, Artificial Sequence
  Non-cyclic GFR-binding peptide
  MOD_RES (1), (35), (36): Xaa is C or S
  MOD_RES (13), (14), (15), (16), (17): Xaa is A or G
  MOD_RES (18), (19), (20), (21): Xaa is A or G or is absent
XRDVVMGRYKKLXXXXXXXXXFYLMSIANMKTPTXX

SEQ ID NO: 31365 - protein, 33 aa, Artificial Sequence
  Non-cyclic GFR-binding peptide
  MOD_RES (33), (33): Xaa is C or S
  MOD_RES (11), (12), (13), (14), (15): Xaa is A or G
  MOD_RES (16), (17), (18), (19): Xaa is A or G or is absent
DVVMGRYKKLXXXXXXXXXFYLMSIANMKTPTX

SEQ ID NO: 31366 - protein, 37 aa, Artificial Sequence
  Non-cyclic GFR-binding peptide
  MOD_RES (1), (3), (36), (37): Xaa is C or S
  MOD_RES (14), (15), (16), (17), (18): Xaa is A or G
  MOD_RES (19), (20), (21), (22): Xaa is A or G or is absent
XGXEEVIMRYKKLXXXXXXXXXFYLMSIANTKVPAXX

SEQ ID NO: 31367 - protein, 38 aa, Artificial Sequence
  Non-cyclic GFR-binding peptide
  MOD_RES (2), (4), (36), (37): Xaa is C or S
SXGXRDVVMGRYKKLIIQQKDNFYLMSIANMKTPTXXP

SEQ ID NO: 31368 - protein, 33 aa, Artificial Sequence
  Non-cyclic GFR-binding peptide
  MOD_RES (1), (32), (33): Xaa is C or S
XEEVIMRYKKLLLVRGNDFYLMSIANTKVPAXX

SEQ ID NO: 31369 - protein, 37 aa, Artificial Sequence
  Non-cyclic GFR-binding peptide
  MOD_RES (33), (34): Xaa is C or S
  MOD_RES (11), (12), (13), (14), (15): Xaa is A or G
  MOD_RES (16), (17), (18), (19): Xaa is A or G or is absent
EEVIMRYKKLXXXXXXXXXFYLMSIANTKVPAXXTSP

SEQ ID NO: 31370 - protein, 32 aa, Artificial Sequence
  Non-cyclic GFR-binding peptide
  MOD_RES (11), (12), (13), (14), (15): Xaa is A or G
  MOD_RES (16), (17), (18), (19): Xaa is A or G or is absent
DVVMGRYKKLXXXXXXXXXFYLMSIANMKTPT

SEQ ID NO: 31371 - protein, 41 aa, Artificial Sequence
  Non-cyclic GFR-binding peptide
  MOD_RES (2), (4), (38), (39): Xaa is C or S
  MOD_RES (16), (17), (18), (19), (20): Xaa is A or G
  MOD_RES (21), (22), (23), (24): Xaa is A or G or is absent
SXGXRDVVMGRYKKLXXXXXXXXXFYLMSIANMKTPTXXPG

SEQ ID NO: 31372 - protein, 31 aa, Artificial Sequence
  Non-cyclic GFR-binding peptide
  MOD_RES (31), (31): Xaa is C or S
EEVIMRYKKLLLVRGNDFYLMSIANTKVPAX

SEQ ID NO: 31373 - protein, 38 aa, Artificial Sequence
  Non-cyclic GFR-binding peptide
  MOD_RES (1), (2), (36), (38): Xaa is C or S
  MOD_RES (16), (17), (18), (19), (20): Xaa is A or G
  MOD_RES (21), (22), (23), (24): Xaa is A or G or is absent
XXTPTKMNAISMLYFXXXXXXXXXLKKYRGMVVDRXGX

SEQ ID NO: 31374 - protein, 38 aa, Artificial Sequence
  Non-cyclic GFR-binding peptide
  MOD_RES (6), (7): Xaa is C or S
GSAGPXXTPTKMNAISMLYFNDKQQIILKKYRGMVVDR

SEQ ID NO: 31375 - protein, 36 aa, Artificial Sequence
  Non-cyclic GFR-binding peptide
  MOD_RES (3), (4): Xaa is C or S
  MOD_RES (18), (19), (20), (21), (22): Xaa is A or G
  MOD_RES (23), (24), (25), (26): Xaa is A or G or is absent
STXXAPVKTNAISMLYFXXXXXXXXXLKKYRMIVEE

SEQ ID NO: 31376 - protein, 41 aa, Artificial Sequence
  Non-cyclic GFR-binding peptide
  MOD_RES (5), (6), (40): Xaa is C or S
  MOD_RES (20), (21), (22), (23), (24): Xaa is A or G
  MOD_RES (25), (26), (27), (28): Xaa is A or G or is absent
SAGPXXTPTKMNAISMLYFXXXXXXXXXLKKYRGMVVDRXG

SEQ ID NO: 31377 - protein, 39 aa, Artificial Sequence
  Non-cyclic GFR-binding peptide
  MOD_RES (3), (4), (37), (39): Xaa is C or S
  MOD_RES (18), (19), (20), (21), (22): Xaa is A or G
  MOD_RES (23), (24), (25), (26): Xaa is A or G or is absent
STXXAPVKTNAISMLYFXXXXXXXXXLKKYRMIVEEXGX

SEQ ID NO: 31378 - protein, 31 aa, Artificial Sequence
  Non-cyclic GFR-binding peptide
  MOD_RES (31), (31): Xaa is C or S
APVKTNAISMLYFDNGRVLLLKKYRMIVEEX

SEQ ID NO: 31379 - protein, 39 aa, Artificial Sequence
  Non-cyclic GFR-binding peptide
  MOD_RES (4), (5), (38): Xaa is C or S
  MOD_RES (19), (20), (21), (22), (23): Xaa is A or G
  MOD_RES (24), (25), (26), (27): Xaa is A or G or is absent
PSTXXAPVKTNAISMLYFXXXXXXXXXLKKYRMIVEEXG

SEQ ID NO: 31380 - protein, 37 aa, Artificial Sequence
  Non-cyclic GFR-binding peptide
  MOD_RES (1), (2), (34), (36): Xaa is C or S
XXTPTKMNAISMLYFNDKQQIILKKYRGMVVDRXGXS

SEQ ID NO: 31381 - protein, 37 aa, Artificial Sequence
  Non-cyclic GFR-binding peptide
  MOD_RES (3), (4), (36): Xaa is C or S
GPXXTPTKMNAISMLYFNDKQQIILKKYRGMVVDRXG

SEQ ID NO: 31382 - protein, 40 aa, Artificial Sequence
  Non-cyclic GFR-binding peptide
  MOD_RES (4), (5), (37), (39): Xaa is C or S
AGPXXTPTKMNAISMLYFNDKQQIILKKYRGMVVDRXGXS

SEQ ID NO: 31383 - protein, 41 aa, Artificial Sequence
  Non-cyclic GFR-binding peptide
  MOD_RES (6), (7), (39), (41): Xaa is C or S
GSAGPXXTPTKMNAISMLYFNDKQQIILKKYRGMVVDRXGX

SEQ ID NO: 31384 - protein, 34 aa, Artificial Sequence
  Non-cyclic GFR-binding peptide
  MOD_RES (2), (3), (34): Xaa is C or S
TXXAPVKTNAISMLYFDNGRVLLLKKYRMIVEEX

SEQ ID NO: 31385 - protein, 35 aa, Artificial Sequence
  Non-cyclic GFR-binding peptide
  MOD_RES (1), (2), (34): Xaa is C or S
XXTPTKMNAISMLYFNDKQQIILKKYRGMVVDRXG

SEQ ID NO: 31386 - protein, 35 aa, Artificial Sequence
  Non-cyclic GFR-binding peptide
  MOD_RES (1), (2), (35): Xaa is C or S
  MOD_RES (16), (17), (18), (19), (20): Xaa is A or G
  MOD_RES (21), (22), (23), (24): Xaa is A or G or is absent
XXAPVKTNAISMLYFXXXXXXXXXLKKYRMIVEEX

SEQ ID NO: 31387 - protein, 32 aa, Artificial Sequence
  Non-cyclic GFR-binding peptide
  MOD_RES (1), (1): Xaa is C or S
XTPTKMNAISMLYFNDKQQIILKKYRGMVVDR

SEQ ID NO: 31388 - protein, 37 aa, Artificial Sequence
  Non-cyclic GFR-binding peptide
  MOD_RES (3), (4): Xaa is C or S
  MOD_RES (18), (19), (20), (21), (22): Xaa is A or G
  MOD_RES (23), (24), (25), (26): Xaa is A or G or is absent
GPXXTPTKMNAISMLYFXXXXXXXXXLKKYRGMVVDR

SEQ ID NO: 31389 - protein, 42 aa, Artificial Sequence
  Non-cyclic GFR-binding peptide
  MOD_RES (6), (7), (41): Xaa is C or S
  MOD_RES (21), (22), (23), (24), (25): Xaa is A or G
  MOD_RES (26), (27), (28), (29): Xaa is A or G or is absent
GSAGPXXTPTKMNAISMLYFXXXXXXXXXLKKYRGMVVDRXG

SEQ ID NO: 31390 - protein, 34 aa, Artificial Sequence
  Non-cyclic GFR-binding peptide
  MOD_RES (31), (33): Xaa is C or S
APVKTNAISMLYFDNGRVLLLKKYRMIVEEXGXL

SEQ ID NO: 31391 - protein, 39 aa, Artificial Sequence
  Non-cyclic GFR-binding peptide
  MOD_RES (3), (4), (38): Xaa is C or S
  MOD_RES (18), (19), (20), (21), (22): Xaa is A or G
  MOD_RES (23), (24), (25), (26): Xaa is A or G or is absent
GPXXTPTKMNAISMLYFXXXXXXXXXLKKYRGMVVDRXG

SEQ ID NO: 31392 - protein, 40 aa, Artificial Sequence
  Non-cyclic GFR-binding peptide
  MOD_RES (5), (6), (38), (40): Xaa is C or S
SAGPXXTPTKMNAISMLYFNDKQQIILKKYRGMVVDRXGX

SEQ ID NO: 31393 - protein, 37 aa, Artificial Sequence
  Non-cyclic GFR-binding peptide
  MOD_RES (1), (35), (37): Xaa is C or S
  MOD_RES (15), (16), (17), (18), (19): Xaa is A or G
  MOD_RES (20), (21), (22), (23): Xaa is A or G or is absent
XTPTKMNAISMLYFXXXXXXXXXLKKYRGMVVDRXGX

SEQ ID NO: 31394 - protein, 33 aa, Artificial Sequence
  Non-cyclic GFR-binding peptide
  MOD_RES (14), (15), (16), (17), (18): Xaa is A or G
  MOD_RES (19), (20), (21), (22): Xaa is A or G or is absent
TPTKMNAISMLYFXXXXXXXXXLKKYRGMVVDR

SEQ ID NO: 31395 - protein, 39 aa, Artificial Sequence
  Non-cyclic GFR-binding peptide
  MOD_RES (2), (3), (37), (39): Xaa is C or S
  MOD_RES (17), (18), (19), (20), (21): Xaa is A or G
  MOD_RES (22), (23), (24), (25): Xaa is A or G or is absent
PXXTPTKMNAISMLYFXXXXXXXXXLKKYRGMVVDRXGX

SEQ ID NO: 31396 - protein, 38 aa, Artificial Sequence
  Non-cyclic GFR-binding peptide
  MOD_RES (2), (3), (37): Xaa is C or S
  MOD_RES (17), (18), (19), (20), (21): Xaa is A or G
  MOD_RES (22), (23), (24), (25): Xaa is A or G or is absent
PXXTPTKMNAISMLYFXXXXXXXXXLKKYRGMVVDRXG

SEQ ID NO: 31397 - protein, 34 aa, Artificial Sequence
  Non-cyclic GFR-binding peptide
  MOD_RES (3), (4): Xaa is C or S
GPXXTPTKMNAISMLYFNDKQQIILKKYRGMVVD

SEQ ID NO: 31398 - protein, 37 aa, Artificial Sequence
  Non-cyclic GFR-binding peptide
  MOD_RES (3), (4), (37): Xaa is C or S
  MOD_RES (18), (19), (20), (21), (22): Xaa is A or G
  MOD_RES (23), (24), (25), (26): Xaa is A or G or is absent
STXXAPVKTNAISMLYFXXXXXXXXXLKKYRMIVEEX

SEQ ID NO: 31399 - protein, 38 aa, Artificial Sequence
  Non-cyclic GFR-binding peptide
  MOD_RES (4), (5), (37): Xaa is C or S
AGPXXTPTKMNAISMLYFNDKQQIILKKYRGMVVDRXG

SEQ ID NO: 31400 - protein, 36 aa, Artificial Sequence
  Non-cyclic GFR-binding peptide
  MOD_RES (5), (6): Xaa is C or S
VPSTXXAPVKTNAISMLYFDNGRVLLLKKYRMIVEE

SEQ ID NO: 31401 - protein, 41 aa, Artificial Sequence
  Non-cyclic GFR-binding peptide
  MOD_RES (5), (6), (39), (41): Xaa is C or S
  MOD_RES (20), (21), (22), (23), (24): Xaa is A or G
  MOD_RES (25), (26), (27), (28): Xaa is A or G or is absent
VPSTXXAPVKTNAISMLYFXXXXXXXXXLKKYRMIVEEXGX

SEQ ID NO: 31402 - protein, 37 aa, Artificial Sequence
  Non-cyclic GFR-binding peptide
  MOD_RES (2), (3), (37): Xaa is C or S
  MOD_RES (17), (18), (19), (20), (21): Xaa is A or G
  MOD_RES (22), (23), (24), (25): Xaa is A or G or is absent
PXXTPTKMNAISMLYFXXXXXXXXXLKKYRGMVVDRX

SEQ ID NO: 31403 - protein, 36 aa, Artificial Sequence
  Non-cyclic GFR-binding peptide
  MOD_RES (33), (35): Xaa is C or S
  MOD_RES (14), (15), (16), (17), (18): Xaa is A or G
  MOD_RES (19), (20), (21), (22): Xaa is A or G or is absent
APVKTNAISMLYFXXXXXXXXXLKKYRMIVEEXGXL

SEQ ID NO: 31404 - protein, 36 aa, Artificial Sequence
  Non-cyclic GFR-binding peptide
  MOD_RES (5), (6): Xaa is C or S
SAGPXXTPTKMNAISMLYFNDKQQIILKKYRGMVVD

SEQ ID NO: 31405 - protein, 44 aa, Artificial Sequence
  Non-cyclic GFR-binding peptide
  MOD_RES (6), (7), (41), (43): Xaa is C or S
  MOD_RES (21), (22), (23), (24), (25): Xaa is A or G
  MOD_RES (26), (27), (28), (29): Xaa is A or G or is absent
GSAGPXXTPTKMNAISMLYFXXXXXXXXXLKKYRGMVVDRXGXS

SEQ ID NO: 31406 - protein, 35 aa, Artificial Sequence
  Non-cyclic GFR-binding peptide
  MOD_RES (32), (34): Xaa is C or S
TPTKMNAISMLYFNDKQQIILKKYRGMVVDRXGXS

SEQ ID NO: 31407 - protein, 35 aa, Artificial Sequence
  Non-cyclic GFR-binding peptide
  MOD_RES (3), (4): Xaa is C or S
GPXXTPTKMNAISMLYFNDKQQIILKKYRGMVVDR

SEQ ID NO: 31408 - protein, 34 aa, Artificial Sequence
  Non-cyclic GFR-binding peptide
  MOD_RES (3), (4): Xaa is C or S
STXXAPVKTNAISMLYFDNGRVLLLKKYRMIVEE

SEQ ID NO: 31409 - protein, 35 aa, Artificial Sequence
  Non-cyclic GFR-binding peptide
  MOD_RES (1), (34): Xaa is C or S
  MOD_RES (15), (16), (17), (18), (19): Xaa is A or G
  MOD_RES (20), (21), (22), (23): Xaa is A or G or is absent
XAPVKTNAISMLYFXXXXXXXXXLKKYRMIVEEXG

SEQ ID NO: 31410 - protein, 41 aa, Artificial Sequence
  Non-cyclic GFR-binding peptide
  MOD_RES (6), (7), (40): Xaa is C or S
  MOD_RES (21), (22), (23), (24), (25): Xaa is A or G
  MOD_RES (26), (27), (28), (29): Xaa is A or G or is absent
RVPSTXXAPVKTNAISMLYFXXXXXXXXXLKKYRMIVEEXG

SEQ ID NO: 31411 - protein, 30 aa, Artificial Sequence
  Non-cyclic GFR-binding peptide
APVKTNAISMLYFDNGRVLLLKKYRMIVEE

SEQ ID NO: 31412 - protein, 40 aa, Artificial Sequence
  Non-cyclic GFR-binding peptide
  MOD_RES (5), (6), (39): Xaa is C or S
  MOD_RES (20), (21), (22), (23), (24): Xaa is A or G
  MOD_RES (25), (26), (27), (28): Xaa is A or G or is absent
VPSTXXAPVKTNAISMLYFXXXXXXXXXLKKYRMIVEEXG

SEQ ID NO: 31413 - protein, 39 aa, Artificial Sequence
  Non-cyclic GFR-binding peptide
  MOD_RES (4), (5), (39): Xaa is C or S
  MOD_RES (19), (20), (21), (22), (23): Xaa is A or G
  MOD_RES (24), (25), (26), (27): Xaa is A or G or is absent
AGPXXTPTKMNAISMLYFXXXXXXXXXLKKYRGMVVDRX

SEQ ID NO: 31414 - protein, 37 aa, Artificial Sequence
  Non-cyclic GFR-binding peptide
  MOD_RES (4), (5), (37): Xaa is C or S
AGPXXTPTKMNAISMLYFNDKQQIILKKYRGMVVDRX

SEQ ID NO: 31415 - protein, 34 aa, Artificial Sequence
  Non-cyclic GFR-binding peptide
  MOD_RES (2), (3): Xaa is C or S
PXXTPTKMNAISMLYFNDKQQIILKKYRGMVVDR

SEQ ID NO: 31416 - protein, 34 aa, Artificial Sequence
  Non-cyclic GFR-binding peptide
  MOD_RES (1), (2): Xaa is C or S
  MOD_RES (16), (17), (18), (19), (20): Xaa is A or G
  MOD_RES (21), (22), (23), (24): Xaa is A or G or is absent
XXTPTKMNAISMLYFXXXXXXXXXLKKYRGMVVD

SEQ ID NO: 31417 - protein, 38 aa, Artificial Sequence
  Non-cyclic GFR-binding peptide
  MOD_RES (4), (5): Xaa is C or S
  MOD_RES (19), (20), (21), (22), (23): Xaa is A or G
  MOD_RES (24), (25), (26), (27): Xaa is A or G or is absent
AGPXXTPTKMNAISMLYFXXXXXXXXXLKKYRGMVVDR

SEQ ID NO: 31418 - protein, 38 aa, Artificial Sequence
  Non-cyclic GFR-binding peptide
  MOD_RES (3), (4), (36), (38): Xaa is C or S
GPXXTPTKMNAISMLYFNDKQQIILKKYRGMVVDRXGX

SEQ ID NO: 31419 - protein, 35 aa, Artificial Sequence
  Non-cyclic GFR-binding peptide
  MOD_RES (2), (3): Xaa is C or S
  MOD_RES (17), (18), (19), (20), (21): Xaa is A or G
  MOD_RES (22), (23), (24), (25): Xaa is A or G or is absent
TXXAPVKTNAISMLYFXXXXXXXXXLKKYRMIVEE

SEQ ID NO: 31420 - protein, 34 aa, Artificial Sequence
  Non-cyclic GFR-binding peptide
  MOD_RES (1), (2), (34): Xaa is C or S
XXTPTKMNAISMLYFNDKQQIILKKYRGMVVDRX

SEQ ID NO: 31421 - protein, 32 aa, Artificial Sequence
  Non-cyclic GFR-binding peptide
  MOD_RES (14), (15), (16), (17), (18): Xaa is A or G
  MOD_RES (19), (20), (21), (22): Xaa is A or G or is absent
APVKTNAISMLYFXXXXXXXXXLKKYRMIVEE

SEQ ID NO: 31422 - protein, 38 aa, Artificial Sequence
  Non-cyclic GFR-binding peptide
  MOD_RES (3), (4), (35), (37): Xaa is C or S
STXXAPVKTNAISMLYFDNGRVLLLKKYRMIVEEXGXL

SEQ ID NO: 31423 - protein, 34 aa, Artificial Sequence
  Non-cyclic GFR-binding peptide
  MOD_RES (34), (34): Xaa is C or S
  MOD_RES (14), (15), (16), (17), (18): Xaa is A or G
  MOD_RES (19), (20), (21), (22): Xaa is A or G or is absent
TPTKMNAISMLYFXXXXXXXXXLKKYRGMVVDRX

SEQ ID NO: 31424 - protein, 39 aa, Artificial Sequence
  Non-cyclic GFR-binding peptide
  MOD_RES (4), (5), (36), (38): Xaa is C or S
PSTXXAPVKTNAISMLYFDNGRVLLLKKYRMIVEEXGXL

SEQ ID NO: 31425 - protein, 31 aa, Artificial Sequence
  Non-cyclic GFR-binding peptide
TPTKMNAISMLYFNDKQQIILKKYRGMVVDR

SEQ ID NO: 31426 - protein, 33 aa, Artificial Sequence
  Non-cyclic GFR-binding peptide
  MOD_RES (31), (33): Xaa is C or S
APVKTNAISMLYFDNGRVLLLKKYRMIVEEXGX

SEQ ID NO: 31427 - protein, 33 aa, Artificial Sequence
  Non-cyclic GFR-binding peptide
  MOD_RES (2), (3): Xaa is C or S
PXXTPTKMNAISMLYFNDKQQIILKKYRGMVVD

SEQ ID NO: 31428 - protein, 36 aa, Artificial Sequence
  Non-cyclic GFR-binding peptide
  MOD_RES (3), (4): Xaa is C or S
  MOD_RES (18), (19), (20), (21), (22): Xaa is A or G
  MOD_RES (23), (24), (25), (26): Xaa is A or G or is absent
GPXXTPTKMNAISMLYFXXXXXXXXXLKKYRGMVVD

SEQ ID NO: 31429 - protein, 38 aa, Artificial Sequence
  Non-cyclic GFR-binding peptide
  MOD_RES (1), (2), (35), (37): Xaa is C or S
  MOD_RES (16), (17), (18), (19), (20): Xaa is A or G
  MOD_RES (21), (22), (23), (24): Xaa is A or G or is absent
XXAPVKTNAISMLYFXXXXXXXXXLKKYRMIVEEXGXL

SEQ ID NO: 31430 - protein, 36 aa, Artificial Sequence
  Non-cyclic GFR-binding peptide
  MOD_RES (3), (4), (36): Xaa is C or S
GPXXTPTKMNAISMLYFNDKQQIILKKYRGMVVDRX

SEQ ID NO: 31431 - protein, 37 aa, Artificial Sequence
  Non-cyclic GFR-binding peptide
  MOD_RES (2), (3), (35), (37): Xaa is C or S
PXXTPTKMNAISMLYFNDKQQIILKKYRGMVVDRXGX

SEQ ID NO: 31432 - protein, 36 aa, Artificial Sequence
  Non-cyclic GFR-binding peptide
  MOD_RES (4), (5), (36): Xaa is C or S
PSTXXAPVKTNAISMLYFDNGRVLLLKKYRMIVEEX

SEQ ID NO: 31433 - protein, 38 aa, Artificial Sequence
  Non-cyclic GFR-binding peptide
  MOD_RES (5), (6): Xaa is C or S
  MOD_RES (20), (21), (22), (23), (24): Xaa is A or G
  MOD_RES (25), (26), (27), (28): Xaa is A or G or is absent
SAGPXXTPTKMNAISMLYFXXXXXXXXXLKKYRGMVVD

SEQ ID NO: 31434 - protein, 32 aa, Artificial Sequence
  Non-cyclic GFR-binding peptide
  MOD_RES (1), (2): Xaa is C or S
XXTPTKMNAISMLYFNDKQQIILKKYRGMVVD

SEQ ID NO: 31435 - protein, 39 aa, Artificial Sequence
  Non-cyclic GFR-binding peptide
  MOD_RES (4), (5), (37), (39): Xaa is C or S
AGPXXTPTKMNAISMLYFNDKQQIILKKYRGMVVDRXGX

SEQ ID NO: 31436 - protein, 37 aa, Artificial Sequence
  Non-cyclic GFR-binding peptide
  MOD_RES (6), (7): Xaa is C or S
RVPSTXXAPVKTNAISMLYFDNGRVLLLKKYRMIVEE

SEQ ID NO: 31437 - protein, 32 aa, Artificial Sequence
  Non-cyclic GFR-binding peptide
  MOD_RES (32), (32): Xaa is C or S
TPTKMNAISMLYFNDKQQIILKKYRGMVVDRX

SEQ ID NO: 31438 - protein, 41 aa, Artificial Sequence
  Non-cyclic GFR-binding peptide
  MOD_RES (4), (5), (38), (40): Xaa is C or S
  MOD_RES (19), (20), (21), (22), (23): Xaa is A or G
  MOD_RES (24), (25), (26), (27): Xaa is A or G or is absent
PSTXXAPVKTNAISMLYFXXXXXXXXXLKKYRMIVEEXGXL

SEQ ID NO: 31439 - protein, 41 aa, Artificial Sequence
  Non-cyclic GFR-binding peptide
  MOD_RES (6), (7), (38), (40): Xaa is C or S
RVPSTXXAPVKTNAISMLYFDNGRVLLLKKYRMIVEEXGXL

SEQ ID NO: 31440 - protein, 36 aa, Artificial Sequence
  Non-cyclic GFR-binding peptide
  MOD_RES (2), (3), (36): Xaa is C or S
  MOD_RES (17), (18), (19), (20), (21): Xaa is A or G
  MOD_RES (22), (23), (24), (25): Xaa is A or G or is absent
TXXAPVKTNAISMLYFXXXXXXXXXLKKYRMIVEEX

SEQ ID NO: 31441 - protein, 34 aa, Artificial Sequence
  Non-cyclic GFR-binding peptide
  MOD_RES (1), (32), (34): Xaa is C or S
XAPVKTNAISMLYFDNGRVLLLKKYRMIVEEXGX

SEQ ID NO: 31442 - protein, 37 aa, Artificial Sequence
  Non-cyclic GFR-binding peptide
  MOD_RES (2), (3), (34), (36): Xaa is C or S
TXXAPVKTNAISMLYFDNGRVLLLKKYRMIVEEXGXL

SEQ ID NO: 31443 - protein, 35 aa, Artificial Sequence
  Non-cyclic GFR-binding peptide
  MOD_RES (1), (2), (33), (35): Xaa is C or S
XXAPVKTNAISMLYFDNGRVLLLKKYRMIVEEXGX

SEQ ID NO: 31444 - protein, 36 aa, Artificial Sequence
  Non-cyclic GFR-binding peptide
  MOD_RES (1), (2), (33), (35): Xaa is C or S
XXAPVKTNAISMLYFDNGRVLLLKKYRMIVEEXGXL

SEQ ID NO: 31445 - protein, 36 aa, Artificial Sequence
  Non-cyclic GFR-binding peptide
  MOD_RES (34), (36): Xaa is C or S
  MOD_RES (14), (15), (16), (17), (18): Xaa is A or G
  MOD_RES (19), (20), (21), (22): Xaa is A or G or is absent
TPTKMNAISMLYFXXXXXXXXXLKKYRGMVVDRXGX

SEQ ID NO: 31446 - protein, 36 aa, Artificial Sequence
  Non-cyclic GFR-binding peptide
  MOD_RES (1), (2), (35): Xaa is C or S
  MOD_RES (16), (17), (18), (19), (20): Xaa is A or G
  MOD_RES (21), (22), (23), (24): Xaa is A or G or is absent
XXAPVKTNAISMLYFXXXXXXXXXLKKYRMIVEEXG

SEQ ID NO: 31447 - protein, 38 aa, Artificial Sequence
  Non-cyclic GFR-binding peptide
  MOD_RES (5), (6), (38): Xaa is C or S
SAGPXXTPTKMNAISMLYFNDKQQIILKKYRGMVVDRX

SEQ ID NO: 31448 - protein, 40 aa, Artificial Sequence
  Non-cyclic GFR-binding peptide
  MOD_RES (4), (5), (39): Xaa is C or S
  MOD_RES (19), (20), (21), (22), (23): Xaa is A or G
  MOD_RES (24), (25), (26), (27): Xaa is A or G or is absent
AGPXXTPTKMNAISMLYFXXXXXXXXXLKKYRGMVVDRXG

SEQ ID NO: 31449 - protein, 34 aa, Artificial Sequence
  Non-cyclic GFR-binding peptide
  MOD_RES (1), (33): Xaa is C or S
XTPTKMNAISMLYFNDKQQIILKKYRGMVVDRXG

SEQ ID NO: 31450 - protein, 37 aa, Artificial Sequence
  Non-cyclic GFR-binding peptide
  MOD_RES (4), (5), (36): Xaa is C or S
PSTXXAPVKTNAISMLYFDNGRVLLLKKYRMIVEEXG

SEQ ID NO: 31451 - protein, 42 aa, Artificial Sequence
  Non-cyclic GFR-binding peptide
  MOD_RES (4), (5), (39), (41): Xaa is C or S
  MOD_RES (19), (20), (21), (22), (23): Xaa is A or G
  MOD_RES (24), (25), (26), (27): Xaa is A or G or is absent
AGPXXTPTKMNAISMLYFXXXXXXXXXLKKYRGMVVDRXGXS

SEQ ID NO: 31452 - protein, 37 aa, Artificial Sequence
  Non-cyclic GFR-binding peptide
  MOD_RES (1), (2), (36): Xaa is C or S
  MOD_RES (16), (17), (18), (19), (20): Xaa is A or G
  MOD_RES (21), (22), (23), (24): Xaa is A or G or is absent
XXTPTKMNAISMLYFXXXXXXXXXLKKYRGMVVDRXG

SEQ ID NO: 31453 - protein, 34 aa, Artificial Sequence
  Non-cyclic GFR-binding peptide
  MOD_RES (1), (1): Xaa is C or S
  MOD_RES (15), (16), (17), (18), (19): Xaa is A or G
  MOD_RES (20), (21), (22), (23): Xaa is A or G or is absent
XTPTKMNAISMLYFXXXXXXXXXLKKYRGMVVDR

SEQ ID NO: 31454 - protein, 34 aa, Artificial Sequence
  Non-cyclic GFR-binding peptide
  MOD_RES (1), (2), (33): Xaa is C or S
XXAPVKTNAISMLYFDNGRVLLLKKYRMIVEEXG

SEQ ID NO: 31455 - protein, 33 aa, Artificial Sequence
  Non-cyclic GFR-binding peptide
  MOD_RES (1), (2): Xaa is C or S
XXTPTKMNAISMLYFNDKQQIILKKYRGMVVDR

SEQ ID NO: 31456 - protein, 36 aa, Artificial Sequence
  Non-cyclic GFR-binding peptide
  MOD_RES (4), (5): Xaa is C or S
AGPXXTPTKMNAISMLYFNDKQQIILKKYRGMVVDR

SEQ ID NO: 31457 - protein, 39 aa, Artificial Sequence
  Non-cyclic GFR-binding peptide
  MOD_RES (5), (6): Xaa is C or S
  MOD_RES (20), (21), (22), (23), (24): Xaa is A or G
  MOD_RES (25), (26), (27), (28): Xaa is A or G or is absent
SAGPXXTPTKMNAISMLYFXXXXXXXXXLKKYRGMVVDR

SEQ ID NO: 31458 - protein, 38 aa, Artificial Sequence
  Non-cyclic GFR-binding peptide
  MOD_RES (4), (5), (38): Xaa is C or S
  MOD_RES (19), (20), (21), (22), (23): Xaa is A or G
  MOD_RES (24), (25), (26), (27): Xaa is A or G or is absent
PSTXXAPVKTNAISMLYFXXXXXXXXXLKKYRMIVEEX

SEQ ID NO: 31459 - protein, 33 aa, Artificial Sequence
  Non-cyclic GFR-binding peptide
  MOD_RES (1), (33): Xaa is C or S
XTPTKMNAISMLYFNDKQQIILKKYRGMVVDRX

SEQ ID NO: 31460 - protein, 34 aa, Artificial Sequence
  Non-cyclic GFR-binding peptide
  MOD_RES (1), (2): Xaa is C or S
  MOD_RES (16), (17), (18), (19), (20): Xaa is A or G
  MOD_RES (21), (22), (23), (24): Xaa is A or G or is absent
XXAPVKTNAISMLYFXXXXXXXXXLKKYRMIVEE

SEQ ID NO: 31461 - protein, 39 aa, Artificial Sequence
  Non-cyclic GFR-binding peptide
  MOD_RES (3), (4), (36), (38): Xaa is C or S
GPXXTPTKMNAISMLYFNDKQQIILKKYRGMVVDRXGXS

SEQ ID NO: 31462 - protein, 37 aa, Artificial Sequence
  Non-cyclic GFR-binding peptide
  MOD_RES (6), (7): Xaa is C or S
GSAGPXXTPTKMNAISMLYFNDKQQIILKKYRGMVVD

SEQ ID NO: 31463 - protein, 38 aa, Artificial Sequence
  Non-cyclic GFR-binding peptide
  MOD_RES (5), (6), (37): Xaa is C or S
VPSTXXAPVKTNAISMLYFDNGRVLLLKKYRMIVEEXG

SEQ ID NO: 31464 - protein, 34 aa, Artificial Sequence
  Non-cyclic GFR-binding peptide
  MOD_RES (1), (34): Xaa is C or S
  MOD_RES (15), (16), (17), (18), (19): Xaa is A or G
  MOD_RES (20), (21), (22), (23): Xaa is A or G or is absent
XAPVKTNAISMLYFXXXXXXXXXLKKYRMIVEEX

SEQ ID NO: 31465 - protein, 38 aa, Artificial Sequence
  Non-cyclic GFR-binding peptide
  MOD_RES (3), (4), (38): Xaa is C or S
  MOD_RES (18), (19), (20), (21), (22): Xaa is A or G
  MOD_RES (23), (24), (25), (26): Xaa is A or G or is absent
GPXXTPTKMNAISMLYFXXXXXXXXXLKKYRGMVVDRX

SEQ ID NO: 31466 - protein, 39 aa, Artificial Sequence
  Non-cyclic GFR-binding peptide
  MOD_RES (6), (7), (39): Xaa is C or S
GSAGPXXTPTKMNAISMLYFNDKQQIILKKYRGMVVDRX

SEQ ID NO: 31467 - protein, 40 aa, Artificial Sequence
  Non-cyclic GFR-binding peptide
  MOD_RES (2), (3), (37), (39): Xaa is C or S
  MOD_RES (17), (18), (19), (20), (21): Xaa is A or G
  MOD_RES (22), (23), (24), (25): Xaa is A or G or is absent
PXXTPTKMNAISMLYFXXXXXXXXXLKKYRGMVVDRXGXS

SEQ ID NO: 31468 - protein, 36 aa, Artificial Sequence
  Non-cyclic GFR-binding peptide
  MOD_RES (2), (3), (34), (36): Xaa is C or S
TXXAPVKTNAISMLYFDNGRVLLLKKYRMIVEEXGX

SEQ ID NO: 31469 - protein, 38 aa, Artificial Sequence
  Non-cyclic GFR-binding peptide
  MOD_RES (3), (4), (37): Xaa is C or S
  MOD_RES (18), (19), (20), (21), (22): Xaa is A or G
  MOD_RES (23), (24), (25), (26): Xaa is A or G or is absent
STXXAPVKTNAISMLYFXXXXXXXXXLKKYRMIVEEXG

SEQ ID NO: 31470 - protein, 39 aa, Artificial Sequence
  Non-cyclic GFR-binding peptide
  MOD_RES (1), (2), (36), (38): Xaa is C or S
  MOD_RES (16), (17), (18), (19), (20): Xaa is A or G
  MOD_RES (21), (22), (23), (24): Xaa is A or G or is absent
XXTPTKMNAISMLYFXXXXXXXXXLKKYRGMVVDRXGXS

SEQ ID NO: 31471 - protein, 40 aa, Artificial Sequence
  Non-cyclic GFR-binding peptide
  MOD_RES (3), (4), (38), (40): Xaa is C or S
  MOD_RES (18), (19), (20), (21), (22): Xaa is A or G
  MOD_RES (23), (24), (25), (26): Xaa is A or G or is absent
GPXXTPTKMNAISMLYFXXXXXXXXXLKKYRGMVVDRXGX

SEQ ID NO: 31472 - protein, 38 aa, Artificial Sequence
  Non-cyclic GFR-binding peptide
  MOD_RES (6), (7), (38): Xaa is C or S
RVPSTXXAPVKTNAISMLYFDNGRVLLLKKYRMIVEEX

SEQ ID NO: 31473 - protein, 40 aa, Artificial Sequence
  Non-cyclic GFR-binding peptide
  MOD_RES (6), (7): Xaa is C or S
  MOD_RES (21), (22), (23), (24), (25): Xaa is A or G
  MOD_RES (26), (27), (28), (29): Xaa is A or G or is absent
GSAGPXXTPTKMNAISMLYFXXXXXXXXXLKKYRGMVVDR

SEQ ID NO: 31474 - protein, 35 aa, Artificial Sequence
  Non-cyclic GFR-binding peptide
  MOD_RES (4), (5): Xaa is C or S
AGPXXTPTKMNAISMLYFNDKQQIILKKYRGMVVD

SEQ ID NO: 31475 - protein, 35 aa, Artificial Sequence
  Non-cyclic GFR-binding peptide
  MOD_RES (2), (3): Xaa is C or S
  MOD_RES (17), (18), (19), (20), (21): Xaa is A or G
  MOD_RES (22), (23), (24), (25): Xaa is A or G or is absent
PXXTPTKMNAISMLYFXXXXXXXXXLKKYRGMVVD

SEQ ID NO: 31476 - protein, 33 aa, Artificial Sequence
  Non-cyclic GFR-binding peptide
  MOD_RES (1), (32): Xaa is C or S
XAPVKTNAISMLYFDNGRVLLLKKYRMIVEEXG

SEQ ID NO: 31477 - protein, 30 aa, Artificial Sequence
  Non-cyclic GFR-binding peptide
TPTKMNAISMLYFNDKQQIILKKYRGMVVD

SEQ ID NO: 31478 - protein, 34 aa, Artificial Sequence
  Non-cyclic GFR-binding peptide
  MOD_RES (32), (34): Xaa is C or S
TPTKMNAISMLYFNDKQQIILKKYRGMVVDRXGX

SEQ ID NO: 31479 - protein, 40 aa, Artificial Sequence
  Non-cyclic GFR-binding peptide
  MOD_RES (4), (5), (38), (40): Xaa is C or S
  MOD_RES (19), (20), (21), (22), (23): Xaa is A or G
  MOD_RES (24), (25), (26), (27): Xaa is A or G or is absent
PSTXXAPVKTNAISMLYFXXXXXXXXXLKKYRMIVEEXGX

SEQ ID NO: 31480 - protein, 40 aa, Artificial Sequence
  Non-cyclic GFR-binding peptide
  MOD_RES (5), (6), (40): Xaa is C or S
  MOD_RES (20), (21), (22), (23), (24): Xaa is A or G
  MOD_RES (25), (26), (27), (28): Xaa is A or G or is absent
SAGPXXTPTKMNAISMLYFXXXXXXXXXLKKYRGMVVDRX

SEQ ID NO: 31481 - protein, 39 aa, Artificial Sequence
  Non-cyclic GFR-binding peptide
  MOD_RES (2), (3), (36), (38): Xaa is C or S
  MOD_RES (17), (18), (19), (20), (21): Xaa is A or G
  MOD_RES (22), (23), (24), (25): Xaa is A or G or is absent
TXXAPVKTNAISMLYFXXXXXXXXXLKKYRMIVEEXGXL

SEQ ID NO: 31482 - protein, 31 aa, Artificial Sequence
  Non-cyclic GFR-binding peptide
  MOD_RES (1), (1): Xaa is C or S
XTPTKMNAISMLYFNDKQQIILKKYRGMVVD

SEQ ID NO: 31483 - protein, 38 aa, Artificial Sequence
  Non-cyclic GFR-binding peptide
  MOD_RES (2), (3), (36), (38): Xaa is C or S
  MOD_RES (17), (18), (19), (20), (21): Xaa is A or G
  MOD_RES (22), (23), (24), (25): Xaa is A or G or is absent
TXXAPVKTNAISMLYFXXXXXXXXXLKKYRMIVEEXGX

SEQ ID NO: 31484 - protein, 36 aa, Artificial Sequence
  Non-cyclic GFR-binding peptide
  MOD_RES (2), (3): Xaa is C or S
  MOD_RES (17), (18), (19), (20), (21): Xaa is A or G
  MOD_RES (22), (23), (24), (25): Xaa is A or G or is absent
PXXTPTKMNAISMLYFXXXXXXXXXLKKYRGMVVDR

SEQ ID NO: 31485 - protein, 35 aa, Artificial Sequence
  Non-cyclic GFR-binding peptide
  MOD_RES (33), (35): Xaa is C or S
  MOD_RES (14), (15), (16), (17), (18): Xaa is A or G
  MOD_RES (19), (20), (21), (22): Xaa is A or G or is absent
APVKTNAISMLYFXXXXXXXXXLKKYRMIVEEXGX

SEQ ID NO: 31486 - protein, 37 aa, Artificial Sequence
  Non-cyclic GFR-binding peptide
  MOD_RES (4), (5): Xaa is C or S
  MOD_RES (19), (20), (21), (22), (23): Xaa is A or G
  MOD_RES (24), (25), (26), (27): Xaa is A or G or is absent
AGPXXTPTKMNAISMLYFXXXXXXXXXLKKYRGMVVD

SEQ ID NO: 31487 - protein, 42 aa, Artificial Sequence
  Non-cyclic GFR-binding peptide
  MOD_RES (6), (7), (39), (41): Xaa is C or S
GSAGPXXTPTKMNAISMLYFNDKQQIILKKYRGMVVDRXGXS

SEQ ID NO: 31488 - protein, 36 aa, Artificial Sequence
  Non-cyclic GFR-binding peptide
  MOD_RES (1), (34), (36): Xaa is C or S
  MOD_RES (15), (16), (17), (18), (19): Xaa is A or G
  MOD_RES (20), (21), (22), (23): Xaa is A or G or is absent
XAPVKTNAISMLYFXXXXXXXXXLKKYRMIVEEXGX

SEQ ID NO: 31489 - protein, 36 aa, Artificial Sequence
  Non-cyclic GFR-binding peptide
  MOD_RES (3), (4), (35): Xaa is C or S
STXXAPVKTNAISMLYFDNGRVLLLKKYRMIVEEXG

SEQ ID NO: 31490 - protein, 37 aa, Artificial Sequence
  Non-cyclic GFR-binding peptide
  MOD_RES (2), (3), (36): Xaa is C or S
  MOD_RES (17), (18), (19), (20), (21): Xaa is A or G
  MOD_RES (22), (23), (24), (25): Xaa is A or G or is absent
TXXAPVKTNAISMLYFXXXXXXXXXLKKYRMIVEEXG

SEQ ID NO: 31491 - protein, 35 aa, Artificial Sequence
  Non-cyclic GFR-binding peptide
  MOD_RES (34), (34): Xaa is C or S
  MOD_RES (14), (15), (16), (17), (18): Xaa is A or G
  MOD_RES (19), (20), (21), (22): Xaa is A or G or is absent
TPTKMNAISMLYFXXXXXXXXXLKKYRGMVVDRXG

SEQ ID NO: 31492 - protein, 40 aa, Artificial Sequence
  Non-cyclic GFR-binding peptide
  MOD_RES (6), (7), (39): Xaa is C or S
GSAGPXXTPTKMNAISMLYFNDKQQIILKKYRGMVVDRXG

SEQ ID NO: 31493 - protein, 33 aa, Artificial Sequence
  Non-cyclic GFR-binding peptide
  MOD_RES (1), (1): Xaa is C or S
  MOD_RES (15), (16), (17), (18), (19): Xaa is A or G
  MOD_RES (20), (21), (22), (23): Xaa is A or G or is absent
XAPVKTNAISMLYFXXXXXXXXXLKKYRMIVEE

SEQ ID NO: 31494 - protein, 35 aa, Artificial Sequence
  Non-cyclic GFR-binding peptide
  MOD_RES (1), (2): Xaa is C or S
  MOD_RES (16), (17), (18), (19), (20): Xaa is A or G
  MOD_RES (21), (22), (23), (24): Xaa is A or G or is absent
XXTPTKMNAISMLYFXXXXXXXXXLKKYRGMVVDR

SEQ ID NO: 31495 - protein, 36 aa, Artificial Sequence
  Non-cyclic GFR-binding peptide
  MOD_RES (1), (2), (34), (36): Xaa is C or S
XXTPTKMNAISMLYFNDKQQIILKKYRGMVVDRXGX

SEQ ID NO: 31496 - protein, 39 aa, Artificial Sequence
  Non-cyclic GFR-binding peptide
  MOD_RES (6), (7), (38): Xaa is C or S
RVPSTXXAPVKTNAISMLYFDNGRVLLLKKYRMIVEEXG

SEQ ID NO: 31497 - protein, 38 aa, Artificial Sequence
  Non-cyclic GFR-binding peptide
  MOD_RES (5), (6): Xaa is C or S
  MOD_RES (20), (21), (22), (23), (24): Xaa is A or G
  MOD_RES (25), (26), (27), (28): Xaa is A or G or is absent
VPSTXXAPVKTNAISMLYFXXXXXXXXXLKKYRMIVEE

SEQ ID NO: 31498 - protein, 39 aa, Artificial Sequence
  Non-cyclic GFR-binding peptide
  MOD_RES (6), (7): Xaa is C or S
  MOD_RES (21), (22), (23), (24), (25): Xaa is A or G
  MOD_RES (26), (27), (28), (29): Xaa is A or G or is absent
GSAGPXXTPTKMNAISMLYFXXXXXXXXXLKKYRGMVVD

SEQ ID NO: 31499 - protein, 37 aa, Artificial Sequence
  Non-cyclic GFR-binding peptide
  MOD_RES (3), (4), (35), (37): Xaa is C or S
STXXAPVKTNAISMLYFDNGRVLLLKKYRMIVEEXGX

SEQ ID NO: 31500 - protein, 40 aa, Artificial Sequence
  Non-cyclic GFR-binding peptide
  MOD_RES (3), (4), (37), (39): Xaa is C or S
  MOD_RES (18), (19), (20), (21), (22): Xaa is A or G
  MOD_RES (23), (24), (25), (26): Xaa is A or G or is absent
STXXAPVKTNAISMLYFXXXXXXXXXLKKYRMIVEEXGXL

SEQ ID NO: 31501 - protein, 33 aa, Artificial Sequence
  Non-cyclic GFR-binding peptide
  MOD_RES (2), (3): Xaa is C or S
TXXAPVKTNAISMLYFDNGRVLLLKKYRMIVEE

SEQ ID NO: 31502 - protein, 43 aa, Artificial Sequence
  Non-cyclic GFR-binding peptide
  MOD_RES (5), (6), (40), (42): Xaa is C or S
  MOD_RES (20), (21), (22), (23), (24): Xaa is A or G
  MOD_RES (25), (26), (27), (28): Xaa is A or G or is absent
SAGPXXTPTKMNAISMLYFXXXXXXXXXLKKYRGMVVDRXGXS

SEQ ID NO: 31503 - protein, 35 aa, Artificial Sequence
  Non-cyclic GFR-binding peptide
  MOD_RES (1), (35): Xaa is C or S
  MOD_RES (15), (16), (17), (18), (19): Xaa is A or G
  MOD_RES (20), (21), (22), (23): Xaa is A or G or is absent
XTPTKMNAISMLYFXXXXXXXXXLKKYRGMVVDRX

SEQ ID NO: 31504 - protein, 38 aa, Artificial Sequence
  Non-cyclic GFR-binding peptide
  MOD_RES (4), (5), (36), (38): Xaa is C or S
PSTXXAPVKTNAISMLYFDNGRVLLLKKYRMIVEEXGX

SEQ ID NO: 31505 - protein, 34 aa, Artificial Sequence
  Non-cyclic GFR-binding peptide
  MOD_RES (33), (33): Xaa is C or S
  MOD_RES (14), (15), (16), (17), (18): Xaa is A or G
  MOD_RES (19), (20), (21), (22): Xaa is A or G or is absent
APVKTNAISMLYFXXXXXXXXXLKKYRMIVEEXG

SEQ ID NO: 31506 - protein, 37 aa, Artificial Sequence
  Non-cyclic GFR-binding peptide
  MOD_RES (5), (6), (37): Xaa is C or S
VPSTXXAPVKTNAISMLYFDNGRVLLLKKYRMIVEEX

SEQ ID NO: 31507 - protein, 41 aa, Artificial Sequence
  Non-cyclic GFR-binding peptide
  MOD_RES (5), (6), (38), (40): Xaa is C or S
SAGPXXTPTKMNAISMLYFNDKQQIILKKYRGMVVDRXGXS

SEQ ID NO: 31508 - protein, 33 aa, Artificial Sequence
  Non-cyclic GFR-binding peptide
  MOD_RES (32), (32): Xaa is C or S
TPTKMNAISMLYFNDKQQIILKKYRGMVVDRXG

SEQ ID NO: 31509 - protein, 37 aa, Artificial Sequence
  Non-cyclic GFR-binding peptide
  MOD_RES (5), (6): Xaa is C or S
SAGPXXTPTKMNAISMLYFNDKQQIILKKYRGMVVDR

SEQ ID NO: 31510 - protein, 32 aa, Artificial Sequence
  Non-cyclic GFR-binding peptide
  MOD_RES (31), (31): Xaa is C or S
APVKTNAISMLYFDNGRVLLLKKYRMIVEEXG

SEQ ID NO: 31511 - protein, 42 aa, Artificial Sequence
  Non-cyclic GFR-binding peptide
  MOD_RES (5), (6), (40), (42): Xaa is C or S
  MOD_RES (20), (21), (22), (23), (24): Xaa is A or G
  MOD_RES (25), (26), (27), (28): Xaa is A or G or is absent
SAGPXXTPTKMNAISMLYFXXXXXXXXXLKKYRGMVVDRXGX

SEQ ID NO: 31512 - protein, 40 aa, Artificial Sequence
  Non-cyclic GFR-binding peptide
  MOD_RES (6), (7), (40): Xaa is C or S
  MOD_RES (21), (22), (23), (24), (25): Xaa is A or G
  MOD_RES (26), (27), (28), (29): Xaa is A or G or is absent
RVPSTXXAPVKTNAISMLYFXXXXXXXXXLKKYRMIVEEX

SEQ ID NO: 31513 - protein, 36 aa, Artificial Sequence
  Non-cyclic GFR-binding peptide
  MOD_RES (2), (3), (35): Xaa is C or S
PXXTPTKMNAISMLYFNDKQQIILKKYRGMVVDRXG

SEQ ID NO: 31514 - protein, 37 aa, Artificial Sequence
  Non-cyclic GFR-binding peptide
  MOD_RES (1), (34), (36): Xaa is C or S
  MOD_RES (15), (16), (17), (18), (19): Xaa is A or G
  MOD_RES (20), (21), (22), (23): Xaa is A or G or is absent
XAPVKTNAISMLYFXXXXXXXXXLKKYRMIVEEXGXL

SEQ ID NO: 31515 - protein, 40 aa, Artificial Sequence
  Non-cyclic GFR-binding peptide
  MOD_RES (5), (6), (37), (39): Xaa is C or S
VPSTXXAPVKTNAISMLYFDNGRVLLLKKYRMIVEEXGXL

SEQ ID NO: 31516 - protein, 38 aa, Artificial Sequence
  Non-cyclic GFR-binding peptide
  MOD_RES (1), (35), (37): Xaa is C or S
  MOD_RES (15), (16), (17), (18), (19): Xaa is A or G
  MOD_RES (20), (21), (22), (23): Xaa is A or G or is absent
XTPTKMNAISMLYFXXXXXXXXXLKKYRGMVVDRXGXS

SEQ ID NO: 31517 - protein, 39 aa, Artificial Sequence
  Non-cyclic GFR-binding peptide
  MOD_RES (6), (7): Xaa is C or S
  MOD_RES (21), (22), (23), (24), (25): Xaa is A or G
  MOD_RES (26), (27), (28), (29): Xaa is A or G or is absent
RVPSTXXAPVKTNAISMLYFXXXXXXXXXLKKYRMIVEE

SEQ ID NO: 31518 - protein, 39 aa, Artificial Sequence
  Non-cyclic GFR-binding peptide
  MOD_RES (5), (6), (38): Xaa is C or S
SAGPXXTPTKMNAISMLYFNDKQQIILKKYRGMVVDRXG

SEQ ID NO: 31519 - protein, 33 aa, Artificial Sequence
  Non-cyclic GFR-binding peptide
  MOD_RES (33), (33): Xaa is C or S
  MOD_RES (14), (15), (16), (17), (18): Xaa is A or G
  MOD_RES (19), (20), (21), (22): Xaa is A or G or is absent
APVKTNAISMLYFXXXXXXXXXLKKYRMIVEEX

SEQ ID NO: 31520 - protein, 39 aa, Artificial Sequence
  Non-cyclic GFR-binding peptide
  MOD_RES (5), (6), (37), (39): Xaa is C or S
VPSTXXAPVKTNAISMLYFDNGRVLLLKKYRMIVEEXGX

SEQ ID NO: 31521 - protein, 41 aa, Artificial Sequence
  Non-cyclic GFR-binding peptide
  MOD_RES (6), (7), (41): Xaa is C or S
  MOD_RES (21), (22), (23), (24), (25): Xaa is A or G
  MOD_RES (26), (27), (28), (29): Xaa is A or G or is absent
GSAGPXXTPTKMNAISMLYFXXXXXXXXXLKKYRGMVVDRX

SEQ ID NO: 31522 - protein, 37 aa, Artificial Sequence
  Non-cyclic GFR-binding peptide
  MOD_RES (34), (36): Xaa is C or S
  MOD_RES (14), (15), (16), (17), (18): Xaa is A or G
  MOD_RES (19), (20), (21), (22): Xaa is A or G or is absent
TPTKMNAISMLYFXXXXXXXXXLKKYRGMVVDRXGXS

SEQ ID NO: 31523 - protein, 35 aa, Artificial Sequence
  Non-cyclic GFR-binding peptide
  MOD_RES (2), (3), (35): Xaa is C or S
PXXTPTKMNAISMLYFNDKQQIILKKYRGMVVDRX

SEQ ID NO: 31524 - protein, 35 aa, Artificial Sequence
  Non-cyclic GFR-binding peptide
  MOD_RES (2), (3), (34): Xaa is C or S
TXXAPVKTNAISMLYFDNGRVLLLKKYRMIVEEXG

SEQ ID NO: 31525 - protein, 32 aa, Artificial Sequence
  Non-cyclic GFR-binding peptide
  MOD_RES (1), (32): Xaa is C or S
XAPVKTNAISMLYFDNGRVLLLKKYRMIVEEX

SEQ ID NO: 31526 - protein, 36 aa, Artificial Sequence
  Non-cyclic GFR-binding peptide
  MOD_RES (1), (35): Xaa is C or S
  MOD_RES (15), (16), (17), (18), (19): Xaa is A or G
  MOD_RES (20), (21), (22), (23): Xaa is A or G or is absent
XTPTKMNAISMLYFXXXXXXXXXLKKYRGMVVDRXG

SEQ ID NO: 31527 - protein, 42 aa, Artificial Sequence
  Non-cyclic GFR-binding peptide
  MOD_RES (6), (7), (40), (42): Xaa is C or S
  MOD_RES (21), (22), (23), (24), (25): Xaa is A or G
  MOD_RES (26), (27), (28), (29): Xaa is A or G or is absent
RVPSTXXAPVKTNAISMLYFXXXXXXXXXLKKYRMIVEEXGX

SEQ ID NO: 31528 - protein, 35 aa, Artificial Sequence
  Non-cyclic GFR-binding peptide
  MOD_RES (1), (32), (34): Xaa is C or S
XAPVKTNAISMLYFDNGRVLLLKKYRMIVEEXGXL

SEQ ID NO: 31529 - protein, 41 aa, Artificial Sequence
  Non-cyclic GFR-binding peptide
  MOD_RES (4), (5), (39), (41): Xaa is C or S
  MOD_RES (19), (20), (21), (22), (23): Xaa is A or G
  MOD_RES (24), (25), (26), (27): Xaa is A or G or is absent
AGPXXTPTKMNAISMLYFXXXXXXXXXLKKYRGMVVDRXGX

SEQ ID NO: 31530 - protein, 35 aa, Artificial Sequence
  Non-cyclic GFR-binding peptide
  MOD_RES (4), (5): Xaa is C or S
PSTXXAPVKTNAISMLYFDNGRVLLLKKYRMIVEE

SEQ ID NO: 31531 - protein, 43 aa, Artificial Sequence
  Non-cyclic GFR-binding peptide
  MOD_RES (6), (7), (41), (43): Xaa is C or S
  MOD_RES (21), (22), (23), (24), (25): Xaa is A or G
  MOD_RES (26), (27), (28), (29): Xaa is A or G or is absent
GSAGPXXTPTKMNAISMLYFXXXXXXXXXLKKYRGMVVDRXGX

SEQ ID NO: 31532 - protein, 42 aa, Artificial Sequence
  Non-cyclic GFR-binding peptide
  MOD_RES (5), (6), (39), (41): Xaa is C or S
  MOD_RES (20), (21), (22), (23), (24): Xaa is A or G
  MOD_RES (25), (26), (27), (28): Xaa is A or G or is absent
VPSTXXAPVKTNAISMLYFXXXXXXXXXLKKYRMIVEEXGXL

SEQ ID NO: 31533 - protein, 43 aa, Artificial Sequence
  Non-cyclic GFR-binding peptide
  MOD_RES (6), (7), (40), (42): Xaa is C or S
  MOD_RES (21), (22), (23), (24), (25): Xaa is A or G
  MOD_RES (26), (27), (28), (29): Xaa is A or G or is absent
RVPSTXXAPVKTNAISMLYFXXXXXXXXXLKKYRMIVEEXGXL

SEQ ID NO: 31534 - protein, 35 aa, Artificial Sequence
  Non-cyclic GFR-binding peptide
  MOD_RES (3), (4), (35): Xaa is C or S
STXXAPVKTNAISMLYFDNGRVLLLKKYRMIVEEX

SEQ ID NO: 31535 - protein, 39 aa, Artificial Sequence
  Non-cyclic GFR-binding peptide
  MOD_RES (5), (6), (39): Xaa is C or S
  MOD_RES (20), (21), (22), (23), (24): Xaa is A or G
  MOD_RES (25), (26), (27), (28): Xaa is A or G or is absent
VPSTXXAPVKTNAISMLYFXXXXXXXXXLKKYRMIVEEX

SEQ ID NO: 31536 - protein, 36 aa, Artificial Sequence
  Non-cyclic GFR-binding peptide
  MOD_RES (1), (33), (35): Xaa is C or S
XTPTKMNAISMLYFNDKQQIILKKYRGMVVDRXGXS

SEQ ID NO: 31537 - protein, 32 aa, Artificial Sequence
  Non-cyclic GFR-binding peptide
  MOD_RES (1), (2): Xaa is C or S
XXAPVKTNAISMLYFDNGRVLLLKKYRMIVEE

SEQ ID NO: 31538 - protein, 35 aa, Artificial Sequence
  Non-cyclic GFR-binding peptide
  MOD_RES (1), (33), (35): Xaa is C or S
XTPTKMNAISMLYFNDKQQIILKKYRGMVVDRXGX

SEQ ID NO: 31539 - protein, 40 aa, Artificial Sequence
  Non-cyclic GFR-binding peptide
  MOD_RES (6), (7), (38), (40): Xaa is C or S
RVPSTXXAPVKTNAISMLYFDNGRVLLLKKYRMIVEEXGX

SEQ ID NO: 31540 - protein, 36 aa, Artificial Sequence
  Non-cyclic GFR-binding peptide
  MOD_RES (1), (2), (36): Xaa is C or S
  MOD_RES (16), (17), (18), (19), (20): Xaa is A or G
  MOD_RES (21), (22), (23), (24): Xaa is A or G or is absent
XXTPTKMNAISMLYFXXXXXXXXXLKKYRGMVVDRX

SEQ ID NO: 31541 - protein, 33 aa, Artificial Sequence
  Non-cyclic GFR-binding peptide
  MOD_RES (1), (1): Xaa is C or S
  MOD_RES (15), (16), (17), (18), (19): Xaa is A or G
  MOD_RES (20), (21), (22), (23): Xaa is A or G or is absent
XTPTKMNAISMLYFXXXXXXXXXLKKYRGMVVD

SEQ ID NO: 31542 - protein, 37 aa, Artificial Sequence
  Non-cyclic GFR-binding peptide
  MOD_RES (1), (2), (35), (37): Xaa is C or S
  MOD_RES (16), (17), (18), (19), (20): Xaa is A or G
  MOD_RES (21), (22), (23), (24): Xaa is A or G or is absent
XXAPVKTNAISMLYFXXXXXXXXXLKKYRMIVEEXGX

SEQ ID NO: 31543 - protein, 38 aa, Artificial Sequence
  Non-cyclic GFR-binding peptide
  MOD_RES (2), (3), (35), (37): Xaa is C or S
PXXTPTKMNAISMLYFNDKQQIILKKYRGMVVDRXGXS

SEQ ID NO: 31544 - protein, 33 aa, Artificial Sequence
  Non-cyclic GFR-binding peptide
  MOD_RES (1), (2), (33): Xaa is C or S
XXAPVKTNAISMLYFDNGRVLLLKKYRMIVEEX

SEQ ID NO: 31545 - protein, 37 aa, Artificial Sequence
  Non-cyclic GFR-binding peptide
  MOD_RES (4), (5): Xaa is C or S
  MOD_RES (19), (20), (21), (22), (23): Xaa is A or G
  MOD_RES (24), (25), (26), (27): Xaa is A or G or is absent
PSTXXAPVKTNAISMLYFXXXXXXXXXLKKYRMIVEE

SEQ ID NO: 31546 - protein, 32 aa, Artificial Sequence
  Non-cyclic GFR-binding peptide
  MOD_RES (14), (15), (16), (17), (18): Xaa is A or G
  MOD_RES (19), (20), (21), (22): Xaa is A or G or is absent
TPTKMNAISMLYFXXXXXXXXXLKKYRGMVVD

SEQ ID NO: 31547 - protein, 41 aa, Artificial Sequence
  Non-cyclic GFR-binding peptide
  MOD_RES (3), (4), (38), (40): Xaa is C or S
  MOD_RES (18), (19), (20), (21), (22): Xaa is A or G
  MOD_RES (23), (24), (25), (26): Xaa is A or G or is absent
GPXXTPTKMNAISMLYFXXXXXXXXXLKKYRGMVVDRXGXS

SEQ ID NO: 31548 - protein, 31 aa, Artificial Sequence
  Non-cyclic GFR-binding peptide
  MOD_RES (1), (1): Xaa is C or S
XAPVKTNAISMLYFDNGRVLLLKKYRMIVEE

SEQ ID NO: 31549 - protein, 31 aa, Artificial Sequence
  Non-cyclic GFR-binding peptide
  MOD_RES (31), (31): Xaa is C or S
SRVIMPIKGYVKPKRGVFYLINIPSLAQPVX

SEQ ID NO: 31550 - protein, 36 aa, Artificial Sequence
  Non-cyclic GFR-binding peptide
  MOD_RES (31), (32): Xaa is C or S
EVTMNEYKFKVVNKNEDLYLISIPEMKEPVXXPEPI

SEQ ID NO: 31551 - protein, 32 aa, Artificial Sequence
  Non-cyclic GFR-binding peptide
  MOD_RES (31), (32): Xaa is C or S
EVTMNRHKRLVVNKNEDYYLISTASMKEPVXX

SEQ ID NO: 31552 - protein, 38 aa, Artificial Sequence
  Non-cyclic GFR-binding peptide
  MOD_RES (33), (34): Xaa is C or S
  MOD_RES (11), (12), (13), (14), (15): Xaa is A or G
  MOD_RES (16), (17), (18), (19): Xaa is A or G or is absent
SKVVMPIKGYXXXXXXXXXFYLINIPSLDQPVXXPSAS

SEQ ID NO: 31553 - protein, 39 aa, Artificial Sequence
  Non-cyclic GFR-binding peptide
  MOD_RES (1), (33), (34): Xaa is C or S
XSEVTMNRYKKLVVNKNEDFYLISIANMKEPVXXPEPIG

SEQ ID NO: 31554 - protein, 33 aa, Artificial Sequence
  Non-cyclic GFR-binding peptide
  MOD_RES (1), (33): Xaa is C or S
XSEVVMDYHYKLVVNNASDKYLISIPSLRTPVX

SEQ ID NO: 31555 - protein, 32 aa, Artificial Sequence
  Non-cyclic GFR-binding peptide
  MOD_RES (32), (32): Xaa is C or S
SEVVMDEYKFKVVNNASDLYLISIPELRTPVX

SEQ ID NO: 31556 - protein, 33 aa, Artificial Sequence
  Non-cyclic GFR-binding peptide
  MOD_RES (1), (32), (33): Xaa is C or S
XSRVIMPIKGYVKPKRGVFYLINIPSLAQPVXX

SEQ ID NO: 31557 - protein, 43 aa, Artificial Sequence
  Non-cyclic GFR-binding peptide
  MOD_RES (1), (3), (37), (38): Xaa is C or S
  MOD_RES (15), (16), (17), (18), (19): Xaa is A or G
  MOD_RES (20), (21), (22), (23): Xaa is A or G or is absent
XGXRDVVMGRHKRLXXXXXXXXXYYLMSTASMKTPTXXPGASG

SEQ ID NO: 31558 - protein, 39 aa, Artificial Sequence
  Non-cyclic GFR-binding peptide
  MOD_RES (34), (35): Xaa is C or S
  MOD_RES (12), (13), (14), (15), (16): Xaa is A or G
  MOD_RES (17), (18), (19), (20): Xaa is A or G or is absent
ESVAMGRHKRLXXXXXXXXXYYLISTASLKTPVXXAKSA

SEQ ID NO: 31559 - protein, 44 aa, Artificial Sequence
  Non-cyclic GFR-binding peptide
  MOD_RES (2), (4), (38), (39): Xaa is C or S
  MOD_RES (16), (17), (18), (19), (20): Xaa is A or G
  MOD_RES (21), (22), (23), (24): Xaa is A or G or is absent
SXGXRDVVMGEYKFKXXXXXXXXXLYLMSIPEMKTPTXXPGASG

SEQ ID NO: 31560 - protein, 38 aa, Artificial Sequence
  Non-cyclic GFR-binding peptide
  MOD_RES (1), (3), (37), (38): Xaa is C or S
  MOD_RES (15), (16), (17), (18), (19): Xaa is A or G
  MOD_RES (20), (21), (22), (23): Xaa is A or G or is absent
XGXSEVVMDEYKFKXXXXXXXXXLYLISIPELRTPVXX

SEQ ID NO: 31561 - protein, 34 aa, Artificial Sequence
  Non-cyclic GFR-binding peptide
  MOD_RES (1), (32), (33): Xaa is C or S
XSKVVMPIKGYVKPTRGVFYLINIPSLDQPVXXP

SEQ ID NO: 31562 - protein, 37 aa, Artificial Sequence
  Non-cyclic GFR-binding peptide
  MOD_RES (32), (33): Xaa is C or S
SEVTMNRYKKLVVNKNEDFYLISIANMKEPVXXPEPI

SEQ ID NO: 31563 - protein, 35 aa, Artificial Sequence
  Non-cyclic GFR-binding peptide
  MOD_RES (32), (33): Xaa is C or S
SEVTMNRHKRLVVNKNEDYYLISTASMKEPVXXPE

SEQ ID NO: 31564 - protein, 37 aa, Artificial Sequence
  Non-cyclic GFR-binding peptide
  MOD_RES (31), (32): Xaa is C or S
DVVMGYHYKLIIQQKDNKYLMSIPSMKTPTXXPGASG

SEQ ID NO: 31565 - protein, 37 aa, Artificial Sequence
  Non-cyclic GFR-binding peptide
  MOD_RES (33), (34): Xaa is C or S
  MOD_RES (11), (12), (13), (14), (15): Xaa is A or G
  MOD_RES (16), (17), (18), (19): Xaa is A or G or is absent
EVVMDRHKRLXXXXXXXXXYYLISTASLRAPVXXSAP

SEQ ID NO: 31566 - protein, 38 aa, Artificial Sequence
  Non-cyclic GFR-binding peptide
  MOD_RES (2), (35), (36): Xaa is C or S
  MOD_RES (13), (14), (15), (16), (17): Xaa is A or G
  MOD_RES (18), (19), (20), (21): Xaa is A or G or is absent
GXEEVIMRHKRLXXXXXXXXXYYLMSTASTKVPAXXTS

SEQ ID NO: 31567 - protein, 30 aa, Artificial Sequence
  Non-cyclic GFR-binding peptide
SKVIMPIKGYIKPTKGIFYLINIPSLDQSV

SEQ ID NO: 31568 - protein, 34 aa, Artificial Sequence
  Non-cyclic GFR-binding peptide
  MOD_RES (31), (32): Xaa is C or S
SKVVMPIKGYVKPTRGVFYLINIPSLDQPVXXPS

SEQ ID NO: 31569 - protein, 37 aa, Artificial Sequence
  Non-cyclic GFR-binding peptide
  MOD_RES (32), (33): Xaa is C or S
SEVTMNEYKFKVVNKNEDLYLISIPEMKEPVXXPEPI

SEQ ID NO: 31570 - protein, 34 aa, Artificial Sequence
  Non-cyclic GFR-binding peptide
  MOD_RES (1), (34): Xaa is C or S
  MOD_RES (12), (13), (14), (15), (16): Xaa is A or G
  MOD_RES (17), (18), (19), (20): Xaa is A or G or is absent
XEEVIMRHKRLXXXXXXXXXYYLMSTASTKVPAX

SEQ ID NO: 31571 - protein, 41 aa, Artificial Sequence
  Non-cyclic GFR-binding peptide
  MOD_RES (2), (36), (37): Xaa is C or S
  MOD_RES (14), (15), (16), (17), (18): Xaa is A or G
  MOD_RES (19), (20), (21), (22): Xaa is A or G or is absent
AXSEVTMNYHYKLXXXXXXXXXKYLISIPSMKEPVXXPEPI

SEQ ID NO: 31572 - protein, 39 aa, Artificial Sequence
  Non-cyclic GFR-binding peptide
  MOD_RES (33), (34): Xaa is C or S
  MOD_RES (11), (12), (13), (14), (15): Xaa is A or G
  MOD_RES (16), (17), (18), (19): Xaa is A or G or is absent
EVVMDRHKRLXXXXXXXXXYYLISTASLRAPVXXSAPAA

SEQ ID NO: 31573 - protein, 36 aa, Artificial Sequence
  Non-cyclic GFR-binding peptide
  MOD_RES (33), (34): Xaa is C or S
  MOD_RES (11), (12), (13), (14), (15): Xaa is A or G
  MOD_RES (16), (17), (18), (19): Xaa is A or G or is absent
EVTMNYHYKLXXXXXXXXXKYLISIPSMKEPVXXPE

SEQ ID NO: 31574 - protein, 33 aa, Artificial Sequence
  Non-cyclic GFR-binding peptide
  MOD_RES (32), (33): Xaa is C or S
SEVTMNRHKRLVVNKNEDYYLISTASMKEPVXX

SEQ ID NO: 31575 - protein, 41 aa, Artificial Sequence
  Non-cyclic GFR-binding peptide
  MOD_RES (2), (4), (38), (39): Xaa is C or S
  MOD_RES (16), (17), (18), (19), (20): Xaa is A or G
  MOD_RES (21), (22), (23), (24): Xaa is A or G or is absent
RXAXSEVTMNRYKKLXXXXXXXXXFYLISIANMKEPVXXPE

SEQ ID NO: 31576 - protein, 42 aa, Artificial Sequence
  Non-cyclic GFR-binding peptide
  MOD_RES (2), (36), (37): Xaa is C or S
  MOD_RES (14), (15), (16), (17), (18): Xaa is A or G
  MOD_RES (19), (20), (21), (22): Xaa is A or G or is absent
AXSEVTMNPIKGYXXXXXXXXXFYLINIPSMKEPVXXPEPIG

SEQ ID NO: 31577 - protein, 40 aa, Artificial Sequence
  Non-cyclic GFR-binding peptide
  MOD_RES (2), (4), (38), (39): Xaa is C or S
  MOD_RES (16), (17), (18), (19), (20): Xaa is A or G
  MOD_RES (21), (22), (23), (24): Xaa is A or G or is absent
RXAXSEVTMNRYKKLXXXXXXXXXFYLISIANMKEPVXXP

SEQ ID NO: 31578 - protein, 33 aa, Artificial Sequence
  Non-cyclic GFR-binding peptide
  MOD_RES (12), (13), (14), (15), (16): Xaa is A or G
  MOD_RES (17), (18), (19), (20): Xaa is A or G or is absent
SEVVMDYHYKLXXXXXXXXXKYLISIPSLRTPV

SEQ ID NO: 31579 - protein, 37 aa, Artificial Sequence
  Non-cyclic GFR-binding peptide
  MOD_RES (2), (33), (34): Xaa is C or S
KXSKVVMPIKGYVKPTRGVFYLINIPSLDQPVXXPSA

SEQ ID NO: 31580 - protein, 34 aa, Artificial Sequence
  Non-cyclic GFR-binding peptide
  MOD_RES (1), (33), (34): Xaa is C or S
XSEVTMNPIKGYVVNKNEDFYLINIPSMKEPVXX

SEQ ID NO: 31581 - protein, 31 aa, Artificial Sequence
  Non-cyclic GFR-binding peptide
  MOD_RES (31), (31): Xaa is C or S
DVVMGYHYKLIIQQKDNKYLMSIPSMKTPTX

SEQ ID NO: 31582 - protein, 42 aa, Artificial Sequence
  Non-cyclic GFR-binding peptide
  MOD_RES (2), (4), (36), (37): Xaa is C or S
RXGXSEVVMDRHKRLVVNNASDYYLISTASLRTPVXXTPPTS

SEQ ID NO: 31583 - protein, 34 aa, Artificial Sequence
  Non-cyclic GFR-binding peptide
  MOD_RES (1), (3), (34): Xaa is C or S
XKXSRVIMPIKGYVKPKRGVFYLINIPSLAQPVX

SEQ ID NO: 31584 - protein, 38 aa, Artificial Sequence
  Non-cyclic GFR-binding peptide
  MOD_RES (1), (3), (35), (36): Xaa is C or S
XGXSEVVMDRHKRLVVNNASDYYLISTASLRTPVXXTP

SEQ ID NO: 31585 - protein, 40 aa, Artificial Sequence
  Non-cyclic GFR-binding peptide
  MOD_RES (2), (34), (35): Xaa is C or S
GXRDVVMGYHYKLIIQQKDNKYLMSIPSMKTPTXXPGASG

SEQ ID NO: 31586 - protein, 40 aa, Artificial Sequence
  Non-cyclic GFR-binding peptide
  MOD_RES (2), (4), (38), (39): Xaa is C or S
  MOD_RES (16), (17), (18), (19), (20): Xaa is A or G
  MOD_RES (21), (22), (23), (24): Xaa is A or G or is absent
RXAXSEVTMNEYKFKXXXXXXXXXLYLISIPEMKEPVXXP

SEQ ID NO: 31587 - protein, 37 aa, Artificial Sequence
  Non-cyclic GFR-binding peptide
  MOD_RES (2), (4), (36), (37): Xaa is C or S
RXAXSEVTMNEYKFKVVNKNEDLYLISIPEMKEPVXX

SEQ ID NO: 31588 - protein, 37 aa, Artificial Sequence
  Non-cyclic GFR-binding peptide
  MOD_RES (1), (3), (35), (36): Xaa is C or S
XGXSEVVMDEYKFKVVNNASDLYLISIPELRTPVXXT

SEQ ID NO: 31589 - protein, 34 aa, Artificial Sequence
  Non-cyclic GFR-binding peptide
  MOD_RES (1), (3), (34): Xaa is C or S
XGXEEVIMYHYKLLLVRGNDKYLMSIPSTKVPAX

SEQ ID NO: 31590 - protein, 36 aa, Artificial Sequence
  Non-cyclic GFR-binding peptide
  MOD_RES (1), (32), (33): Xaa is C or S
XSRVIMPIKGYVKPKRGVFYLINIPSLAQPVXXPAA

SEQ ID NO: 31591 - protein, 38 aa, Artificial Sequence
  Non-cyclic GFR-binding peptide
  MOD_RES (32), (33): Xaa is C or S
SRVVMNYHYKLIVNSSDDKYLVSIPSLKTPAXXPKPVH

SEQ ID NO: 31592 - protein, 40 aa, Artificial Sequence
  Non-cyclic GFR-binding peptide
  MOD_RES (2), (34), (35): Xaa is C or S
AXSEVTMNRYKKLVVNKNEDFYLISIANMKEPVXXPEPIG

SEQ ID NO: 31593 - protein, 34 aa, Artificial Sequence
  Non-cyclic GFR-binding peptide
  MOD_RES (32), (33): Xaa is C or S
SEVVMDEYKFKVVNNASDLYLISIPELRTPVXXT

SEQ ID NO: 31594 - protein, 36 aa, Artificial Sequence
  Non-cyclic GFR-binding peptide
  MOD_RES (2), (4), (36): Xaa is C or S
RXAXSEVTMNYHYKLVVNKNEDKYLISIPSMKEPVX

SEQ ID NO: 31595 - protein, 41 aa, Artificial Sequence
  Non-cyclic GFR-binding peptide
  MOD_RES (2), (36), (37): Xaa is C or S
  MOD_RES (14), (15), (16), (17), (18): Xaa is A or G
  MOD_RES (19), (20), (21), (22): Xaa is A or G or is absent
AXSEVTMNEYKFKXXXXXXXXXLYLISIPEMKEPVXXPEPI

SEQ ID NO: 31596 - protein, 34 aa, Artificial Sequence
  Non-cyclic GFR-binding peptide
  MOD_RES (2), (4): Xaa is C or S
SXKXSKVIMPIKGYIKPTKGIFYLINIPSLDQSV

SEQ ID NO: 31597 - protein, 37 aa, Artificial Sequence
  Non-cyclic GFR-binding peptide
  MOD_RES (2), (36), (37): Xaa is C or S
  MOD_RES (14), (15), (16), (17), (18): Xaa is A or G
  MOD_RES (19), (20), (21), (22): Xaa is A or G or is absent
AXSEVTMNEYKFKXXXXXXXXXLYLISIPEMKEPVXX

SEQ ID NO: 31598 - protein, 34 aa, Artificial Sequence
  Non-cyclic GFR-binding peptide
  MOD_RES (1), (3): Xaa is C or S
XGXRDVVMGRHKRLIIQQKDNYYLMSTASMKTPT

SEQ ID NO: 31599 - protein, 37 aa, Artificial Sequence
  Non-cyclic GFR-binding peptide
  MOD_RES (2), (34), (35): Xaa is C or S
GXSEVVMDRHKRLVVNNASDYYLISTASLRTPVXXTP

SEQ ID NO: 31600 - protein, 37 aa, Artificial Sequence
  Non-cyclic GFR-binding peptide
  MOD_RES (2), (4), (36), (37): Xaa is C or S
SXGXRDVVMGRHKRLIIQQKDNYYLMSTASMKTPTXX

SEQ ID NO: 31601 - protein, 37 aa, Artificial Sequence
  Non-cyclic GFR-binding peptide
  MOD_RES (1), (3), (34), (35): Xaa is C or S
XGXEEVIMEYKFKLLVRGNDLYLMSIPETKVPAXXTS

SEQ ID NO: 31602 - protein, 38 aa, Artificial Sequence
  Non-cyclic GFR-binding peptide
  MOD_RES (1), (3), (35), (36): Xaa is C or S
XGXESVAMGRHKRLYTVVGKDYYLISTASLKTPVXXAK

SEQ ID NO: 31603 - protein, 38 aa, Artificial Sequence
  Non-cyclic GFR-binding peptide
  MOD_RES (2), (4), (37), (38): Xaa is C or S
  MOD_RES (15), (16), (17), (18), (19): Xaa is A or G
  MOD_RES (20), (21), (22), (23): Xaa is A or G or is absent
LXGXEEVIMEYKFKXXXXXXXXXLYLMSIPETKVPAXX

SEQ ID NO: 31604 - protein, 33 aa, Artificial Sequence
  Non-cyclic GFR-binding peptide
  MOD_RES (1), (1): Xaa is C or S
  MOD_RES (12), (13), (14), (15), (16): Xaa is A or G
  MOD_RES (17), (18), (19), (20): Xaa is A or G or is absent
XEEVIMEYKFKXXXXXXXXXLYLMSIPETKVPA

SEQ ID NO: 31605 - protein, 33 aa, Artificial Sequence
  Non-cyclic GFR-binding peptide
  MOD_RES (12), (13), (14), (15), (16): Xaa is A or G
  MOD_RES (17), (18), (19), (20): Xaa is A or G or is absent
SEVVMDEYKFKXXXXXXXXXLYLISIPELRTPV

SEQ ID NO: 31606 - protein, 37 aa, Artificial Sequence
  Non-cyclic GFR-binding peptide
  MOD_RES (1), (3), (34), (35): Xaa is C or S
XKXSRVIMPIKGYVKPKRGVFYLINIPSLAQPVXXPA

SEQ ID NO: 31607 - protein, 36 aa, Artificial Sequence
  Non-cyclic GFR-binding peptide
  MOD_RES (31), (32): Xaa is C or S
EEVIMEYKFKLLVRGNDLYLMSIPETKVPAXXTSPV

SEQ ID NO: 31608 - protein, 35 aa, Artificial Sequence
  Non-cyclic GFR-binding peptide
  MOD_RES (1), (33), (34): Xaa is C or S
XSEVVMDRHKRLVVNNASDYYLISTASLRTPVXXT

SEQ ID NO: 31609 - protein, 36 aa, Artificial Sequence
  Non-cyclic GFR-binding peptide
  MOD_RES (2), (34), (35): Xaa is C or S
GXSEVVMDEYKFKVVNNASDLYLISIPELRTPVXXT

SEQ ID NO: 31610 - protein, 31 aa, Artificial Sequence
  Non-cyclic GFR-binding peptide
  MOD_RES (31), (31): Xaa is C or S
DVVMGRHKRLIIQQKDNYYLMSTASMKTPTX

SEQ ID NO: 31611 - protein, 41 aa, Artificial Sequence
  Non-cyclic GFR-binding peptide
  MOD_RES (2), (36), (37): Xaa is C or S
  MOD_RES (14), (15), (16), (17), (18): Xaa is A or G
  MOD_RES (19), (20), (21), (22): Xaa is A or G or is absent
GXRDVVMGRHKRLXXXXXXXXXYYLMSTASMKTPTXXPGAS

SEQ ID NO: 31612 - protein, 37 aa, Artificial Sequence
  Non-cyclic GFR-binding peptide
  MOD_RES (1), (33), (34): Xaa is C or S
XSEVVMDRHKRLVVNNASDYYLISTASLRTPVXXTPP

SEQ ID NO: 31613 - protein, 38 aa, Artificial Sequence
  Non-cyclic GFR-binding peptide
  MOD_RES (1), (33), (34): Xaa is C or S
XSEVTMNYHYKLVVNKNEDKYLISIPSMKEPVXXPEPI

SEQ ID NO: 31614 - protein, 36 aa, Artificial Sequence
  Non-cyclic GFR-binding peptide
  MOD_RES (33), (34): Xaa is C or S
  MOD_RES (11), (12), (13), (14), (15): Xaa is A or G
  MOD_RES (16), (17), (18), (19): Xaa is A or G or is absent
EVTMNRHKRLXXXXXXXXXYYLISTASMKEPVXXPE

SEQ ID NO: 31615 - protein, 37 aa, Artificial Sequence
  Non-cyclic GFR-binding peptide
  MOD_RES (1), (3), (37): Xaa is C or S
  MOD_RES (15), (16), (17), (18), (19): Xaa is A or G
  MOD_RES (20), (21), (22), (23): Xaa is A or G or is absent
XGXSEVVMDYHYKLXXXXXXXXXKYLISIPSLRTPVX

SEQ ID NO: 31616 - protein, 38 aa, Artificial Sequence
  Non-cyclic GFR-binding peptide
  MOD_RES (2), (36), (37): Xaa is C or S
  MOD_RES (14), (15), (16), (17), (18): Xaa is A or G
  MOD_RES (19), (20), (21), (22): Xaa is A or G or is absent
GXRDVVMGYHYKLXXXXXXXXXKYLMSIPSMKTPTXXP

SEQ ID NO: 31617 - protein, 39 aa, Artificial Sequence
  Non-cyclic GFR-binding peptide
  MOD_RES (2), (4), (37), (38): Xaa is C or S
  MOD_RES (15), (16), (17), (18), (19): Xaa is A or G
  MOD_RES (20), (21), (22), (23): Xaa is A or G or is absent
SXKXSKVIMPIKGYXXXXXXXXXFYLINIPSLDQSVXXP

SEQ ID NO: 31618 - protein, 34 aa, Artificial Sequence
  Non-cyclic GFR-binding peptide
  MOD_RES (1), (33), (34): Xaa is C or S
XRDVVMGYHYKLIIQQKDNKYLMSIPSMKTPTXX

SEQ ID NO: 31619 - protein, 38 aa, Artificial Sequence
  Non-cyclic GFR-binding peptide
  MOD_RES (2), (36), (37): Xaa is C or S
  MOD_RES (14), (15), (16), (17), (18): Xaa is A or G
  MOD_RES (19), (20), (21), (22): Xaa is A or G or is absent
AXSEVTMNYHYKLXXXXXXXXXKYLISIPSMKEPVXXP

SEQ ID NO: 31620 - protein, 39 aa, Artificial Sequence
  Non-cyclic GFR-binding peptide
  MOD_RES (1), (33), (34): Xaa is C or S
XSEVTMNEYKFKVVNKNEDLYLISIPEMKEPVXXPEPIG

SEQ ID NO: 31621 - protein, 32 aa, Artificial Sequence
  Non-cyclic GFR-binding peptide
  MOD_RES (31), (32): Xaa is C or S
EVTMNEYKFKVVNKNEDLYLISIPEMKEPVXX

SEQ ID NO: 31622 - protein, 38 aa, Artificial Sequence
  Non-cyclic GFR-binding peptide
  MOD_RES (33), (34): Xaa is C or S
  MOD_RES (11), (12), (13), (14), (15): Xaa is A or G
  MOD_RES (16), (17), (18), (19): Xaa is A or G or is absent
DVVMGEYKFKXXXXXXXXXLYLMSIPEMKTPTXXPGAS

SEQ ID NO: 31623 - protein, 36 aa, Artificial Sequence
  Non-cyclic GFR-binding peptide
  MOD_RES (31), (32): Xaa is C or S
EVTMNRHKRLVVNKNEDYYLISTASMKEPVXXPEPI

SEQ ID NO: 31624 - protein, 39 aa, Artificial Sequence
  Non-cyclic GFR-binding peptide
  MOD_RES (1), (35), (36): Xaa is C or S
  MOD_RES (13), (14), (15), (16), (17): Xaa is A or G
  MOD_RES (18), (19), (20), (21): Xaa is A or G or is absent
XRDVVMGRHKRLXXXXXXXXXYYLMSTASMKTPTXXPGA

SEQ ID NO: 31625 - protein, 41 aa, Artificial Sequence
  Non-cyclic GFR-binding peptide
  MOD_RES (2), (4), (38), (39): Xaa is C or S
  MOD_RES (16), (17), (18), (19), (20): Xaa is A or G
  MOD_RES (21), (22), (23), (24): Xaa is A or G or is absent
RXAXSEVTMNEYKFKXXXXXXXXXLYLISIPEMKEPVXXPE

SEQ ID NO: 31626 - protein, 35 aa, Artificial Sequence
  Non-cyclic GFR-binding peptide
  MOD_RES (33), (34): Xaa is C or S
  MOD_RES (11), (12), (13), (14), (15): Xaa is A or G
  MOD_RES (16), (17), (18), (19): Xaa is A or G or is absent
EVVMDRHKRLXXXXXXXXXYYLISTASLRAPVXXS

SEQ ID NO: 31627 - protein, 40 aa, Artificial Sequence
  Non-cyclic GFR-binding peptide
  MOD_RES (2), (34), (35): Xaa is C or S
AXSEVTMNEYKFKVVNKNEDLYLISIPEMKEPVXXPEPIG

SEQ ID NO: 31628 - protein, 41 aa, Artificial Sequence
  Non-cyclic GFR-binding peptide
  MOD_RES (1), (3), (35), (36): Xaa is C or S
XAXSEVTMNEYKFKVVNKNEDLYLISIPEMKEPVXXPEPIG

SEQ ID NO: 31629 - protein, 35 aa, Artificial Sequence
  Non-cyclic GFR-binding peptide
  MOD_RES (1), (32), (33): Xaa is C or S
XSRVIMPIKGYVKPKRGVFYLINIPSLAQPVXXPA

SEQ ID NO: 31630 - protein, 37 aa, Artificial Sequence
  Non-cyclic GFR-binding peptide
  MOD_RES (34), (35): Xaa is C or S
  MOD_RES (12), (13), (14), (15), (16): Xaa is A or G
  MOD_RES (17), (18), (19), (20): Xaa is A or G or is absent
SEVTMNRYKKLXXXXXXXXXFYLISIANMKEPVXXPE

SEQ ID NO: 31631 - protein, 39 aa, Artificial Sequence
  Non-cyclic GFR-binding peptide
  MOD_RES (2), (34), (35): Xaa is C or S
GXSEVVMDRHKRLVVNNASDYYLISTASLRTPVXXTPPT

SEQ ID NO: 31632 - protein, 37 aa, Artificial Sequence
  Non-cyclic GFR-binding peptide
  MOD_RES (1), (34), (35): Xaa is C or S
  MOD_RES (12), (13), (14), (15), (16): Xaa is A or G
  MOD_RES (17), (18), (19), (20): Xaa is A or G or is absent
XEEVIMYHYKLXXXXXXXXXKYLMSIPSTKVPAXXTS

SEQ ID NO: 31633 - protein, 34 aa, Artificial Sequence
  Non-cyclic GFR-binding peptide
  MOD_RES (32), (33): Xaa is C or S
RDVVMGEYKFKIIQQKDNLYLMSIPEMKTPTXXP

SEQ ID NO: 31634 - protein, 39 aa, Artificial Sequence
  Non-cyclic GFR-binding peptide
  MOD_RES (1), (35), (36): Xaa is C or S
  MOD_RES (13), (14), (15), (16), (17): Xaa is A or G
  MOD_RES (18), (19), (20), (21): Xaa is A or G or is absent
XSEVTMNEYKFKXXXXXXXXXLYLISIPEMKEPVXXPEP

SEQ ID NO: 31635 - protein, 40 aa, Artificial Sequence
  Non-cyclic GFR-binding peptide
  MOD_RES (2), (4), (35), (36): Xaa is C or S
SXKXSKVIMPIKGYIKPTKGIFYLINIPSLDQSVXXPSAS

SEQ ID NO: 31636 - protein, 38 aa, Artificial Sequence
  Non-cyclic GFR-binding peptide
  MOD_RES (2), (33), (34): Xaa is C or S
GXEEVIMYHYKLLLVRGNDKYLMSIPSTKVPAXXTSPV

SEQ ID NO: 31637 - protein, 39 aa, Artificial Sequence
  Non-cyclic GFR-binding peptide
  MOD_RES (1), (33), (34): Xaa is C or S
XRDVVMGEYKFKIIQQKDNLYLMSIPEMKTPTXXPGASG

SEQ ID NO: 31638 - protein, 40 aa, Artificial Sequence
  Non-cyclic GFR-binding peptide
  MOD_RES (34), (35): Xaa is C or S
  MOD_RES (12), (13), (14), (15), (16): Xaa is A or G
  MOD_RES (17), (18), (19), (20): Xaa is A or G or is absent
SEVTMNPIKGYXXXXXXXXXFYLINIPSMKEPVXXPEPIG

SEQ ID NO: 31639 - protein, 32 aa, Artificial Sequence
  Non-cyclic GFR-binding peptide
  MOD_RES (32), (32): Xaa is C or S
ESVAMGRHKRLYTVVGKDYYLISTASLKTPVX

SEQ ID NO: 31640 - protein, 40 aa, Artificial Sequence
  Non-cyclic GFR-binding peptide
  MOD_RES (1), (3), (36), (37): Xaa is C or S
  MOD_RES (14), (15), (16), (17), (18): Xaa is A or G
  MOD_RES (19), (20), (21), (22): Xaa is A or G or is absent
XGXEEVIMEYKFKXXXXXXXXXLYLMSIPETKVPAXXTSP

SEQ ID NO: 31641 - protein, 30 aa, Artificial Sequence
  Non-cyclic GFR-binding peptide
EVTMNPIKGYVVNKNEDFYLINIPSMKEPV

SEQ ID NO: 31642 - protein, 38 aa, Artificial Sequence
  Non-cyclic GFR-binding peptide
  MOD_RES (1), (33), (34): Xaa is C or S
XRDVVMGYHYKLIIQQKDNKYLMSIPSMKTPTXXPGAS

SEQ ID NO: 31643 - protein, 39 aa, Artificial Sequence
  Non-cyclic GFR-binding peptide
  MOD_RES (1), (3), (35), (36): Xaa is C or S
XGXSEVVMDEYKFKVVNNASDLYLISIPELRTPVXXTPP

SEQ ID NO: 31644 - protein, 38 aa, Artificial Sequence
  Non-cyclic GFR-binding peptide
  MOD_RES (2), (4), (36), (37): Xaa is C or S
RXGXSEVVMDYHYKLVVNNASDKYLISIPSLRTPVXXT

SEQ ID NO: 31645 - protein, 38 aa, Artificial Sequence
  Non-cyclic GFR-binding peptide
  MOD_RES (1), (35), (36): Xaa is C or S
  MOD_RES (13), (14), (15), (16), (17): Xaa is A or G
  MOD_RES (18), (19), (20), (21): Xaa is A or G or is absent
XSEVVMDYHYKLXXXXXXXXXKYLISIPSLRTPVXXTP

SEQ ID NO: 31646 - protein, 35 aa, Artificial Sequence
  Non-cyclic GFR-binding peptide
  MOD_RES (1), (3), (34), (35): Xaa is C or S
XKXSRVIMPIKGYVKPKRGVFYLINIPSLAQPVXX

SEQ ID NO: 31647 - protein, 35 aa, Artificial Sequence
  Non-cyclic GFR-binding peptide
  MOD_RES (2), (4): Xaa is C or S
RXAXSEVTMNYHYKLVVNKNEDKYLISIPSMKEPV

SEQ ID NO: 31648 - protein, 39 aa, Artificial Sequence
  Non-cyclic GFR-binding peptide
  MOD_RES (1), (3), (36), (37): Xaa is C or S
  MOD_RES (14), (15), (16), (17), (18): Xaa is A or G
  MOD_RES (19), (20), (21), (22): Xaa is A or G or is absent
XGXEEVIMEYKFKXXXXXXXXXLYLMSIPETKVPAXXTS

SEQ ID NO: 31649 - protein, 36 aa, Artificial Sequence
  Non-cyclic GFR-binding peptide
  MOD_RES (1), (3), (35), (36): Xaa is C or S
XGXSEVVMDRHKRLVVNNASDYYLISTASLRTPVXX

SEQ ID NO: 31650 - protein, 36 aa, Artificial Sequence
  Non-cyclic GFR-binding peptide
  MOD_RES (2), (4), (36): Xaa is C or S
RXGXSEVVMDEYKFKVVNNASDLYLISIPELRTPVX

SEQ ID NO: 31651 - protein, 39 aa, Artificial Sequence
  Non-cyclic GFR-binding peptide
  MOD_RES (2), (36), (37): Xaa is C or S
  MOD_RES (14), (15), (16), (17), (18): Xaa is A or G
  MOD_RES (19), (20), (21), (22): Xaa is A or G or is absent
AXSEVTMNPIKGYXXXXXXXXXFYLINIPSMKEPVXXPE

SEQ ID NO: 31652 - protein, 36 aa, Artificial Sequence
  Non-cyclic GFR-binding peptide
  MOD_RES (1), (3), (35), (36): Xaa is C or S
XAXSEVTMNPIKGYVVNKNEDFYLINIPSMKEPVXX

SEQ ID NO: 31653 - protein, 38 aa, Artificial Sequence
  Non-cyclic GFR-binding peptide
  MOD_RES (2), (34), (35): Xaa is C or S
GXRDVVMGEYKFKIIQQKDNLYLMSIPEMKTPTXXPGA

SEQ ID NO: 31654 - protein, 35 aa, Artificial Sequence
  Non-cyclic GFR-binding peptide
  MOD_RES (32), (33): Xaa is C or S
SEVVMDYHYKLVVNNASDKYLISIPSLRTPVXXTP

SEQ ID NO: 31655 - protein, 38 aa, Artificial Sequence
  Non-cyclic GFR-binding peptide
  MOD_RES (2), (4), (38): Xaa is C or S
  MOD_RES (16), (17), (18), (19), (20): Xaa is A or G
  MOD_RES (21), (22), (23), (24): Xaa is A or G or is absent
RXAXSEVTMNRHKRLXXXXXXXXXYYLISTASMKEPVX

SEQ ID NO: 31656 - protein, 36 aa, Artificial Sequence
  Non-cyclic GFR-binding peptide
  MOD_RES (1), (32), (33): Xaa is C or S
XEEVIMYHYKLLLVRGNDKYLMSIPSTKVPAXXTSP

SEQ ID NO: 31657 - protein, 35 aa, Artificial Sequence
  Non-cyclic GFR-binding peptide
  MOD_RES (33), (34): Xaa is C or S
  MOD_RES (11), (12), (13), (14), (15): Xaa is A or G
  MOD_RES (16), (17), (18), (19): Xaa is A or G or is absent
EEVIMRHKRLXXXXXXXXXYYLMSTASTKVPAXXT

SEQ ID NO: 31658 - protein, 37 aa, Artificial Sequence
  Non-cyclic GFR-binding peptide
  MOD_RES (1), (3), (37): Xaa is C or S
  MOD_RES (15), (16), (17), (18), (19): Xaa is A or G
  MOD_RES (20), (21), (22), (23): Xaa is A or G or is absent
XAXSEVTMNPIKGYXXXXXXXXXFYLINIPSMKEPVX

SEQ ID NO: 31659 - protein, 41 aa, Artificial Sequence
  Non-cyclic GFR-binding peptide
  MOD_RES (2), (4), (38), (39): Xaa is C or S
  MOD_RES (16), (17), (18), (19), (20): Xaa is A or G
  MOD_RES (21), (22), (23), (24): Xaa is A or G or is absent
RXGXSEVVMDYHYKLXXXXXXXXXKYLISIPSLRTPVXXTP

SEQ ID NO: 31660 - protein, 37 aa, Artificial Sequence
  Non-cyclic GFR-binding peptide
  MOD_RES (2), (4), (37): Xaa is C or S
  MOD_RES (15), (16), (17), (18), (19): Xaa is A or G
  MOD_RES (20), (21), (22), (23): Xaa is A or G or is absent
LXGXEEVIMYHYKLXXXXXXXXXKYLMSIPSTKVPAX

SEQ ID NO: 31661 - protein, 31 aa, Artificial Sequence
  Non-cyclic GFR-binding peptide
  MOD_RES (1), (1): Xaa is C or S
XSRVIMPIKGYVKPKRGVFYLINIPSLAQPV

SEQ ID NO: 31662 - protein, 37 aa, Artificial Sequence
  Non-cyclic GFR-binding peptide
  MOD_RES (2), (4): Xaa is C or S
  MOD_RES (16), (17), (18), (19), (20): Xaa is A or G
  MOD_RES (21), (22), (23), (24): Xaa is A or G or is absent
RXAXSEVTMNYHYKLXXXXXXXXXKYLISIPSMKEPV

SEQ ID NO: 31663 - protein, 37 aa, Artificial Sequence
  Non-cyclic GFR-binding peptide
  MOD_RES (2), (34), (35): Xaa is C or S
GXRDVVMGRHKRLIIQQKDNYYLMSTASMKTPTXXPG

SEQ ID NO: 31664 - protein, 36 aa, Artificial Sequence
  Non-cyclic GFR-binding peptide
  MOD_RES (1), (35), (36): Xaa is C or S
  MOD_RES (13), (14), (15), (16), (17): Xaa is A or G
  MOD_RES (18), (19), (20), (21): Xaa is A or G or is absent
XRDVVMGEYKFKXXXXXXXXXLYLMSIPEMKTPTXX

SEQ ID NO: 31665 - protein, 38 aa, Artificial Sequence
  Non-cyclic GFR-binding peptide
  MOD_RES (1), (3), (35), (36): Xaa is C or S
XAXSEVTMNEYKFKVVNKNEDLYLISIPEMKEPVXXPE

SEQ ID NO: 31666 - protein, 39 aa, Artificial Sequence
  Non-cyclic GFR-binding peptide
  MOD_RES (2), (4), (38), (39): Xaa is C or S
  MOD_RES (16), (17), (18), (19), (20): Xaa is A or G
  MOD_RES (21), (22), (23), (24): Xaa is A or G or is absent
RXAXSEVTMNRYKKLXXXXXXXXXFYLISIANMKEPVXX

SEQ ID NO: 31667 - protein, 40 aa, Artificial Sequence
  Non-cyclic GFR-binding peptide
  MOD_RES (1), (35), (36): Xaa is C or S
  MOD_RES (13), (14), (15), (16), (17): Xaa is A or G
  MOD_RES (18), (19), (20), (21): Xaa is A or G or is absent
XSEVVMDEYKFKXXXXXXXXXLYLISIPELRTPVXXTPPT

SEQ ID NO: 31668 - protein, 37 aa, Artificial Sequence
  Non-cyclic GFR-binding peptide
  MOD_RES (1), (35), (36): Xaa is C or S
  MOD_RES (13), (14), (15), (16), (17): Xaa is A or G
  MOD_RES (18), (19), (20), (21): Xaa is A or G or is absent
XSEVTMNEYKFKXXXXXXXXXLYLISIPEMKEPVXXP

SEQ ID NO: 31669 - protein, 32 aa, Artificial Sequence
  Non-cyclic GFR-binding peptide
  MOD_RES (11), (12), (13), (14), (15): Xaa is A or G
  MOD_RES (16), (17), (18), (19): Xaa is A or G or is absent
EVVMDYHYKLXXXXXXXXXKYLISIPSLRTPV

SEQ ID NO: 31670 - protein, 32 aa, Artificial Sequence
  Non-cyclic GFR-binding peptide
  MOD_RES (11), (12), (13), (14), (15): Xaa is A or G
  MOD_RES (16), (17), (18), (19): Xaa is A or G or is absent
EVVMDEYKFKXXXXXXXXXLYLISIPELRTPV

SEQ ID NO: 31671 - protein, 38 aa, Artificial Sequence
  Non-cyclic GFR-binding peptide
  MOD_RES (1), (35), (36): Xaa is C or S
  MOD_RES (13), (14), (15), (16), (17): Xaa is A or G
  MOD_RES (18), (19), (20), (21): Xaa is A or G or is absent
XSEVTMNPIKGYXXXXXXXXXFYLINIPSMKEPVXXPE

SEQ ID NO: 31672 - protein, 35 aa, Artificial Sequence
  Non-cyclic GFR-binding peptide
  MOD_RES (1), (33), (34): Xaa is C or S
XSEVVMDEYKFKVVNNASDLYLISIPELRTPVXXT

SEQ ID NO: 31673 - protein, 36 aa, Artificial Sequence
  Non-cyclic GFR-binding peptide
  MOD_RES (2), (35), (36): Xaa is C or S
  MOD_RES (13), (14), (15), (16), (17): Xaa is A or G
  MOD_RES (18), (19), (20), (21): Xaa is A or G or is absent
KXSKVVMPIKGYXXXXXXXXXFYLINIPSLDQPVXX

SEQ ID NO: 31674 - protein, 37 aa, Artificial Sequence
  Non-cyclic GFR-binding peptide
  MOD_RES (2), (36), (37): Xaa is C or S
  MOD_RES (14), (15), (16), (17), (18): Xaa is A or G
  MOD_RES (19), (20), (21), (22): Xaa is A or G or is absent
GXRDVVMGYHYKLXXXXXXXXXKYLMSIPSMKTPTXX

SEQ ID NO: 31675 - protein, 37 aa, Artificial Sequence
  Non-cyclic GFR-binding peptide
  MOD_RES (31), (32): Xaa is C or S
RVVMNEYKFKIVNSSDDLYLVSIPELKTPAXXPKPVH

SEQ ID NO: 31676 - protein, 40 aa, Artificial Sequence
  Non-cyclic GFR-binding peptide
  MOD_RES (2), (34), (35): Xaa is C or S
GXSRVVMNYHYKLIVNSSDDKYLVSIPSLKTPAXXPKPVH

SEQ ID NO: 31677 - protein, 33 aa, Artificial Sequence
  Non-cyclic GFR-binding peptide
  MOD_RES (1), (3): Xaa is C or S
XGXEEVIMYHYKLLLVRGNDKYLMSIPSTKVPA

SEQ ID NO: 31678 - protein, 39 aa, Artificial Sequence
  Non-cyclic GFR-binding peptide
  MOD_RES (34), (35): Xaa is C or S
  MOD_RES (12), (13), (14), (15), (16): Xaa is A or G
  MOD_RES (17), (18), (19), (20): Xaa is A or G or is absent
SEVTMNRHKRLXXXXXXXXXYYLISTASMKEPVXXPEPI

SEQ ID NO: 31679 - protein, 35 aa, Artificial Sequence
  Non-cyclic GFR-binding peptide
  MOD_RES (2), (35): Xaa is C or S
  MOD_RES (13), (14), (15), (16), (17): Xaa is A or G
  MOD_RES (18), (19), (20), (21): Xaa is A or G or is absent
KXSKVVMPIKGYXXXXXXXXXFYLINIPSLDQPVX

SEQ ID NO: 31680 - protein, 38 aa, Artificial Sequence
  Non-cyclic GFR-binding peptide
  MOD_RES (2), (4), (38): Xaa is C or S
  MOD_RES (16), (17), (18), (19), (20): Xaa is A or G
  MOD_RES (21), (22), (23), (24): Xaa is A or G or is absent
SXGXRDVVMGYHYKLXXXXXXXXXKYLMSIPSMKTPTX

SEQ ID NO: 31681 - protein, 37 aa, Artificial Sequence
  Non-cyclic GFR-binding peptide
  MOD_RES (32), (33): Xaa is C or S
RDVVMGRHKRLIIQQKDNYYLMSTASMKTPTXXPGAS

SEQ ID NO: 31682 - protein, 37 aa, Artificial Sequence
  Non-cyclic GFR-binding peptide
  MOD_RES (34), (35): Xaa is C or S
  MOD_RES (12), (13), (14), (15), (16): Xaa is A or G
  MOD_RES (17), (18), (19), (20): Xaa is A or G or is absent
RDVVMGRHKRLXXXXXXXXXYYLMSTASMKTPTXXPG

SEQ ID NO: 31683 - protein, 33 aa, Artificial Sequence
  Non-cyclic GFR-binding peptide
  MOD_RES (33), (33): Xaa is C or S
  MOD_RES (11), (12), (13), (14), (15): Xaa is A or G
  MOD_RES (16), (17), (18), (19): Xaa is A or G or is absent
SKVIMPIKGYXXXXXXXXXFYLINIPSLDQSVX

SEQ ID NO: 31684 - protein, 34 aa, Artificial Sequence
  Non-cyclic GFR-binding peptide
  MOD_RES (1), (34): Xaa is C or S
  MOD_RES (12), (13), (14), (15), (16): Xaa is A or G
  MOD_RES (17), (18), (19), (20): Xaa is A or G or is absent
XSRVIMPIKGYXXXXXXXXXFYLINIPSLAQPVX

SEQ ID NO: 31685 - protein, 37 aa, Artificial Sequence
  Non-cyclic GFR-binding peptide
  MOD_RES (2), (36), (37): Xaa is C or S
  MOD_RES (14), (15), (16), (17), (18): Xaa is A or G
  MOD_RES (19), (20), (21), (22): Xaa is A or G or is absent
GXRDVVMGEYKFKXXXXXXXXXLYLMSIPEMKTPTXX

SEQ ID NO: 31686 - protein, 36 aa, Artificial Sequence
  Non-cyclic GFR-binding peptide
  MOD_RES (1), (3), (34), (35): Xaa is C or S
XGXEEVIMRHKRLLLVRGNDYYLMSTASTKVPAXXT

SEQ ID NO: 31687 - protein, 37 aa, Artificial Sequence
  Non-cyclic GFR-binding peptide
  MOD_RES (32), (33): Xaa is C or S
SEVTMNPIKGYVVNKNEDFYLINIPSMKEPVXXPEPI

SEQ ID NO: 31688 - protein, 34 aa, Artificial Sequence
  Non-cyclic GFR-binding peptide
  MOD_RES (1), (3): Xaa is C or S
XGXRDVVMGYHYKLIIQQKDNKYLMSIPSMKTPT

SEQ ID NO: 31689 - protein, 41 aa, Artificial Sequence
  Non-cyclic GFR-binding peptide
  MOD_RES (2), (36), (37): Xaa is C or S
  MOD_RES (14), (15), (16), (17), (18): Xaa is A or G
  MOD_RES (19), (20), (21), (22): Xaa is A or G or is absent
GXSEVVMDYHYKLXXXXXXXXXKYLISIPSLRTPVXXTPPT

SEQ ID NO: 31690 - protein, 41 aa, Artificial Sequence
  Non-cyclic GFR-binding peptide
  MOD_RES (1), (3), (35), (36): Xaa is C or S
XGXESVAMGRHKRLYTVVGKDYYLISTASLKTPVXXAKSAK

SEQ ID NO: 31691 - protein, 38 aa, Artificial Sequence
  Non-cyclic GFR-binding peptide
  MOD_RES (1), (35), (36): Xaa is C or S
  MOD_RES (13), (14), (15), (16), (17): Xaa is A or G
  MOD_RES (18), (19), (20), (21): Xaa is A or G or is absent
XRDVVMGEYKFKXXXXXXXXXLYLMSIPEMKTPTXXPG

SEQ ID NO: 31692 - protein, 41 aa, Artificial Sequence
  Non-cyclic GFR-binding peptide
  MOD_RES (1), (3), (35), (36): Xaa is C or S
XGXSEVVMDYHYKLVVNNASDKYLISIPSLRTPVXXTPPTS

SEQ ID NO: 31693 - protein, 39 aa, Artificial Sequence
  Non-cyclic GFR-binding peptide
  MOD_RES (1), (3), (37), (38): Xaa is C or S
  MOD_RES (15), (16), (17), (18), (19): Xaa is A or G
  MOD_RES (20), (21), (22), (23): Xaa is A or G or is absent
XGXRDVVMGEYKFKXXXXXXXXXLYLMSIPEMKTPTXXP

SEQ ID NO: 31694 - protein, 37 aa, Artificial Sequence
  Non-cyclic GFR-binding peptide
  MOD_RES (32), (33): Xaa is C or S
RDVVMGEYKFKIIQQKDNLYLMSIPEMKTPTXXPGAS

SEQ ID NO: 31695 - protein, 36 aa, Artificial Sequence
  Non-cyclic GFR-binding peptide
  MOD_RES (33), (34): Xaa is C or S
  MOD_RES (11), (12), (13), (14), (15): Xaa is A or G
  MOD_RES (16), (17), (18), (19): Xaa is A or G or is absent
EEVIMEYKFKXXXXXXXXXLYLMSIPETKVPAXXTS

SEQ ID NO: 31696 - protein, 38 aa, Artificial Sequence
  Non-cyclic GFR-binding peptide
  MOD_RES (1), (33), (34): Xaa is C or S
XSEVVMDEYKFKVVNNASDLYLISIPELRTPVXXTPPT

SEQ ID NO: 31697 - protein, 38 aa, Artificial Sequence
  Non-cyclic GFR-binding peptide
  MOD_RES (1), (35), (36): Xaa is C or S
  MOD_RES (13), (14), (15), (16), (17): Xaa is A or G
  MOD_RES (18), (19), (20), (21): Xaa is A or G or is absent
XAEVVMDRHKRLXXXXXXXXXYYLISTASLRAPVXXSA

SEQ ID NO: 31698 - protein, 35 aa, Artificial Sequence
  Non-cyclic GFR-binding peptide
  MOD_RES (1), (34), (35): Xaa is C or S
  MOD_RES (12), (13), (14), (15), (16): Xaa is A or G
  MOD_RES (17), (18), (19), (20): Xaa is A or G or is absent
XSKVIMPIKGYXXXXXXXXXFYLINIPSLDQSVXX

SEQ ID NO: 31699 - protein, 36 aa, Artificial Sequence
  Non-cyclic GFR-binding peptide
  MOD_RES (31), (32): Xaa is C or S
EEVIMRHKRLLLVRGNDYYLMSTASTKVPAXXTSPV

SEQ ID NO: 31700 - protein, 30 aa, Artificial Sequence
  Non-cyclic GFR-binding peptide
DVVMGEYKFKIIQQKDNLYLMSIPEMKTPT

SEQ ID NO: 31701 - protein, 36 aa, Artificial Sequence
  Non-cyclic GFR-binding peptide
  MOD_RES (32), (33): Xaa is C or S
SEVVMDEYKFKVVNNASDLYLISIPELRTPVXXTPP

SEQ ID NO: 31702 - protein, 31 aa, Artificial Sequence
  Non-cyclic GFR-binding peptide
  MOD_RES (31), (31): Xaa is C or S
EVTMNPIKGYVVNKNEDFYLINIPSMKEPVX

SEQ ID NO: 31703 - protein, 37 aa, Artificial Sequence
  Non-cyclic GFR-binding peptide
  MOD_RES (1), (35), (36): Xaa is C or S
  MOD_RES (13), (14), (15), (16), (17): Xaa is A or G
  MOD_RES (18), (19), (20), (21): Xaa is A or G or is absent
XSEVVMDYHYKLXXXXXXXXXKYLISIPSLRTPVXXT

SEQ ID NO: 31704 - protein, 32 aa, Artificial Sequence
  Non-cyclic GFR-binding peptide
  MOD_RES (11), (12), (13), (14), (15): Xaa is A or G
  MOD_RES (16), (17), (18), (19): Xaa is A or G or is absent
EVVMDRHKRLXXXXXXXXXYYLISTASLRTPV

SEQ ID NO: 31705 - protein, 36 aa, Artificial Sequence
  Non-cyclic GFR-binding peptide
  MOD_RES (1), (32), (33): Xaa is C or S
XEEVIMEYKFKLLVRGNDLYLMSIPETKVPAXXTSP

SEQ ID NO: 31706 - protein, 38 aa, Artificial Sequence
  Non-cyclic GFR-binding peptide
  MOD_RES (34), (35): Xaa is C or S
  MOD_RES (12), (13), (14), (15), (16): Xaa is A or G
  MOD_RES (17), (18), (19), (20): Xaa is A or G or is absent
AEVVMDRHKRLXXXXXXXXXYYLISTASLRAPVXXSAP

SEQ ID NO: 31707 - protein, 35 aa, Artificial Sequence
  Non-cyclic GFR-binding peptide
  MOD_RES (1), (3), (35): Xaa is C or S
XGXAEVVMDRHKRLVVNNAADYYLISTASLRAPVX

SEQ ID NO: 31708 - protein, 35 aa, Artificial Sequence
  Non-cyclic GFR-binding peptide
  MOD_RES (1), (3), (35): Xaa is C or S
XAXSEVTMNEYKFKVVNKNEDLYLISIPEMKEPVX

SEQ ID NO: 31709 - protein, 35 aa, Artificial Sequence
  Non-cyclic GFR-binding peptide
  MOD_RES (33), (34): Xaa is C or S
  MOD_RES (11), (12), (13), (14), (15): Xaa is A or G
  MOD_RES (16), (17), (18), (19): Xaa is A or G or is absent
EEVIMEYKFKXXXXXXXXXLYLMSIPETKVPAXXT

SEQ ID NO: 31710 - protein, 35 aa, Artificial Sequence
  Non-cyclic GFR-binding peptide
  MOD_RES (1), (35): Xaa is C or S
  MOD_RES (13), (14), (15), (16), (17): Xaa is A or G
  MOD_RES (18), (19), (20), (21): Xaa is A or G or is absent
XRDVVMGEYKFKXXXXXXXXXLYLMSIPEMKTPTX

SEQ ID NO: 31711 - protein, 41 aa, Artificial Sequence
  Non-cyclic GFR-binding peptide
  MOD_RES (1), (35), (36): Xaa is C or S
  MOD_RES (13), (14), (15), (16), (17): Xaa is A or G
  MOD_RES (18), (19), (20), (21): Xaa is A or G or is absent
XSEVTMNYHYKLXXXXXXXXXKYLISIPSMKEPVXXPEPIG

SEQ ID NO: 31712 - protein, 36 aa, Artificial Sequence
  Non-cyclic GFR-binding peptide
  MOD_RES (1), (3): Xaa is C or S
  MOD_RES (15), (16), (17), (18), (19): Xaa is A or G
  MOD_RES (20), (21), (22), (23): Xaa is A or G or is absent
XAXSEVTMNEYKFKXXXXXXXXXLYLISIPEMKEPV

SEQ ID NO: 31713 - protein, 41 aa, Artificial Sequence
  Non-cyclic GFR-binding peptide
  MOD_RES (1), (3), (37), (38): Xaa is C or S
  MOD_RES (15), (16), (17), (18), (19): Xaa is A or G
  MOD_RES (20), (21), (22), (23): Xaa is A or G or is absent
XGXSEVVMDRHKRLXXXXXXXXXYYLISTASLRTPVXXTPP

SEQ ID NO: 31714 - protein, 35 aa, Artificial Sequence
  Non-cyclic GFR-binding peptide
  MOD_RES (1), (3): Xaa is C or S
  MOD_RES (14), (15), (16), (17), (18): Xaa is A or G
  MOD_RES (19), (20), (21), (22): Xaa is A or G or is absent
XKXSRVIMPIKGYXXXXXXXXXFYLINIPSLAQPV

SEQ ID NO: 31715 - protein, 40 aa, Artificial Sequence
  Non-cyclic GFR-binding peptide
  MOD_RES (2), (4), (36), (37): Xaa is C or S
RXAXSEVTMNYHYKLVVNKNEDKYLISIPSMKEPVXXPEP

SEQ ID NO: 31716 - protein, 36 aa, Artificial Sequence
  Non-cyclic GFR-binding peptide
  MOD_RES (2), (36): Xaa is C or S
  MOD_RES (14), (15), (16), (17), (18): Xaa is A or G
  MOD_RES (19), (20), (21), (22): Xaa is A or G or is absent
GXRDVVMGRHKRLXXXXXXXXXYYLMSTASMKTPTX

SEQ ID NO: 31717 - protein, 42 aa, Artificial Sequence
  Non-cyclic GFR-binding peptide
  MOD_RES (1), (3), (37), (38): Xaa is C or S
  MOD_RES (15), (16), (17), (18), (19): Xaa is A or G
  MOD_RES (20), (21), (22), (23): Xaa is A or G or is absent
XAXSEVTMNEYKFKXXXXXXXXXLYLISIPEMKEPVXXPEPI

SEQ ID NO: 31718 - protein, 37 aa, Artificial Sequence
  Non-cyclic GFR-binding peptide
  MOD_RES (2), (4): Xaa is C or S
  MOD_RES (16), (17), (18), (19), (20): Xaa is A or G
  MOD_RES (21), (22), (23), (24): Xaa is A or G or is absent
SXGXRDVVMGRHKRLXXXXXXXXXYYLMSTASMKTPT

SEQ ID NO: 31719 - protein, 39 aa, Artificial Sequence
  Non-cyclic GFR-binding peptide
  MOD_RES (2), (4), (37), (38): Xaa is C or S
  MOD_RES (15), (16), (17), (18), (19): Xaa is A or G
  MOD_RES (20), (21), (22), (23): Xaa is A or G or is absent
LXGXEEVIMRHKRLXXXXXXXXXYYLMSTASTKVPAXXT

SEQ ID NO: 31720 - protein, 39 aa, Artificial Sequence
  Non-cyclic GFR-binding peptide
  MOD_RES (1), (35), (36): Xaa is C or S
  MOD_RES (13), (14), (15), (16), (17): Xaa is A or G
  MOD_RES (18), (19), (20), (21): Xaa is A or G or is absent
XRDVVMGYHYKLXXXXXXXXXKYLMSIPSMKTPTXXPGA

SEQ ID NO: 31721 - protein, 37 aa, Artificial Sequence
  Non-cyclic GFR-binding peptide
  MOD_RES (2), (4): Xaa is C or S
  MOD_RES (16), (17), (18), (19), (20): Xaa is A or G
  MOD_RES (21), (22), (23), (24): Xaa is A or G or is absent
RXGXAEVVMDRHKRLXXXXXXXXXYYLISTASLRAPV

SEQ ID NO: 31722 - protein, 34 aa, Artificial Sequence
  Non-cyclic GFR-binding peptide
  MOD_RES (33), (34): Xaa is C or S
  MOD_RES (11), (12), (13), (14), (15): Xaa is A or G
  MOD_RES (16), (17), (18), (19): Xaa is A or G or is absent
DVVMGEYKFKXXXXXXXXXLYLMSIPEMKTPTXX

SEQ ID NO: 31723 - protein, 35 aa, Artificial Sequence
  Non-cyclic GFR-binding peptide
  MOD_RES (2), (34), (35): Xaa is C or S
GXRDVVMGYHYKLIIQQKDNKYLMSIPSMKTPTXX

SEQ ID NO: 31724 - protein, 43 aa, Artificial Sequence
  Non-cyclic GFR-binding peptide
  MOD_RES (1), (3), (37), (38): Xaa is C or S
  MOD_RES (15), (16), (17), (18), (19): Xaa is A or G
  MOD_RES (20), (21), (22), (23): Xaa is A or G or is absent
XGXSRVVMNRHKRLXXXXXXXXXYYLVSTASLKTPAXXPKPVH

SEQ ID NO: 31725 - protein, 42 aa, Artificial Sequence
  Non-cyclic GFR-binding peptide
  MOD_RES (2), (4), (36), (37): Xaa is C or S
HXGXSRVVMNRHKRLIVNSSDDYYLVSTASLKTPAXXPKPVH

SEQ ID NO: 31726 - protein, 34 aa, Artificial Sequence
  Non-cyclic GFR-binding peptide
  MOD_RES (1), (1): Xaa is C or S
  MOD_RES (13), (14), (15), (16), (17): Xaa is A or G
  MOD_RES (18), (19), (20), (21): Xaa is A or G or is absent
XRDVVMGEYKFKXXXXXXXXXLYLMSIPEMKTPT

SEQ ID NO: 31727 - protein, 35 aa, Artificial Sequence
  Non-cyclic GFR-binding peptide
  MOD_RES (2), (33), (34): Xaa is C or S
GXEEVIMYHYKLLLVRGNDKYLMSIPSTKVPAXXT

SEQ ID NO: 31728 - protein, 34 aa, Artificial Sequence
  Non-cyclic GFR-binding peptide
  MOD_RES (32), (33): Xaa is C or S
RDVVMGRHKRLIIQQKDNYYLMSTASMKTPTXXP

SEQ ID NO: 31729 - protein, 36 aa, Artificial Sequence
  Non-cyclic GFR-binding peptide
  MOD_RES (31), (32): Xaa is C or S
EEVIMYHYKLLLVRGNDKYLMSIPSTKVPAXXTSPV

SEQ ID NO: 31730 - protein, 39 aa, Artificial Sequence
  Non-cyclic GFR-binding peptide
  MOD_RES (2), (36), (37): Xaa is C or S
  MOD_RES (14), (15), (16), (17), (18): Xaa is A or G
  MOD_RES (19), (20), (21), (22): Xaa is A or G or is absent
AXSEVTMNRHKRLXXXXXXXXXYYLISTASMKEPVXXPE

SEQ ID NO: 31731 - protein, 41 aa, Artificial Sequence
  Non-cyclic GFR-binding peptide
  MOD_RES (1), (35), (36): Xaa is C or S
  MOD_RES (13), (14), (15), (16), (17): Xaa is A or G
  MOD_RES (18), (19), (20), (21): Xaa is A or G or is absent
XSRVVMNRHKRLXXXXXXXXXYYLVSTASLKTPAXXPKPVH

SEQ ID NO: 31732 - protein, 34 aa, Artificial Sequence
  Non-cyclic GFR-binding peptide
  MOD_RES (2), (34): Xaa is C or S
AXSEVTMNPIKGYVVNKNEDFYLINIPSMKEPVX

SEQ ID NO: 31733 - protein, 32 aa, Artificial Sequence
  Non-cyclic GFR-binding peptide
  MOD_RES (11), (12), (13), (14), (15): Xaa is A or G
  MOD_RES (16), (17), (18), (19): Xaa is A or G or is absent
SKVVMPIKGYXXXXXXXXXFYLINIPSLDQPV

SEQ ID NO: 31734 - protein, 38 aa, Artificial Sequence
  Non-cyclic GFR-binding peptide
  MOD_RES (2), (4), (35), (36): Xaa is C or S
SXKXSKVVMPIKGYVKPTRGVFYLINIPSLDQPVXXPS

SEQ ID NO: 31735 - protein, 37 aa, Artificial Sequence
  Non-cyclic GFR-binding peptide
  MOD_RES (1), (34), (35): Xaa is C or S
  MOD_RES (12), (13), (14), (15), (16): Xaa is A or G
  MOD_RES (17), (18), (19), (20): Xaa is A or G or is absent
XSKVVMPIKGYXXXXXXXXXFYLINIPSLDQPVXXPS

SEQ ID NO: 31736 - protein, 40 aa, Artificial Sequence
  Non-cyclic GFR-binding peptide
  MOD_RES (1), (34), (35): Xaa is C or S
  MOD_RES (12), (13), (14), (15), (16): Xaa is A or G
  MOD_RES (17), (18), (19), (20): Xaa is A or G or is absent
XEEVIMRHKRLXXXXXXXXXYYLMSTASTKVPAXXTSPVR

SEQ ID NO: 31737 - protein, 38 aa, Artificial Sequence
  Non-cyclic GFR-binding peptide
  MOD_RES (2), (34), (35): Xaa is C or S
AXSEVTMNRHKRLVVNKNEDYYLISTASMKEPVXXPEP

SEQ ID NO: 31738 - protein, 35 aa, Artificial Sequence
  Non-cyclic GFR-binding peptide
  MOD_RES (33), (34): Xaa is C or S
  MOD_RES (11), (12), (13), (14), (15): Xaa is A or G
  MOD_RES (16), (17), (18), (19): Xaa is A or G or is absent
EEVIMYHYKLXXXXXXXXXKYLMSIPSTKVPAXXT

SEQ ID NO: 31739 - protein, 38 aa, Artificial Sequence
  Non-cyclic GFR-binding peptide
  MOD_RES (2), (36), (37): Xaa is C or S
  MOD_RES (14), (15), (16), (17), (18): Xaa is A or G
  MOD_RES (19), (20), (21), (22): Xaa is A or G or is absent
GXRDVVMGEYKFKXXXXXXXXXLYLMSIPEMKTPTXXP

SEQ ID NO: 31740 - protein, 37 aa, Artificial Sequence
  Non-cyclic GFR-binding peptide
  MOD_RES (2), (4): Xaa is C or S
  MOD_RES (16), (17), (18), (19), (20): Xaa is A or G
  MOD_RES (21), (22), (23), (24): Xaa is A or G or is absent
SXGXRDVVMGEYKFKXXXXXXXXXLYLMSIPEMKTPT

SEQ ID NO: 31741 - protein, 40 aa, Artificial Sequence
  Non-cyclic GFR-binding peptide
  MOD_RES (2), (4), (36), (37): Xaa is C or S
RXGXESVAMGRHKRLYTVVGKDYYLISTASLKTPVXXAKS

SEQ ID NO: 31742 - protein, 37 aa, Artificial Sequence
  Non-cyclic GFR-binding peptide
  MOD_RES (1), (3), (37): Xaa is C or S
  MOD_RES (15), (16), (17), (18), (19): Xaa is A or G
  MOD_RES (20), (21), (22), (23): Xaa is A or G or is absent
XGXRDVVMGEYKFKXXXXXXXXXLYLMSIPEMKTPTX

SEQ ID NO: 31743 - protein, 35 aa, Artificial Sequence
  Non-cyclic GFR-binding peptide
  MOD_RES (1), (3), (35): Xaa is C or S
XGXSEVVMDYHYKLVVNNASDKYLISIPSLRTPVX

SEQ ID NO: 31744 - protein, 37 aa, Artificial Sequence
  Non-cyclic GFR-binding peptide
  MOD_RES (31), (32): Xaa is C or S
DVVMGEYKFKIIQQKDNLYLMSIPEMKTPTXXPGASG

SEQ ID NO: 31745 - protein, 30 aa, Artificial Sequence
  Non-cyclic GFR-binding peptide
EVTMNYHYKLVVNKNEDKYLISIPSMKEPV

SEQ ID NO: 31746 - protein, 35 aa, Artificial Sequence
  Non-cyclic GFR-binding peptide
  MOD_RES (1), (3), (34), (35): Xaa is C or S
XGXEEVIMYHYKLLLVRGNDKYLMSIPSTKVPAXX

SEQ ID NO: 31747 - protein, 38 aa, Artificial Sequence
  Non-cyclic GFR-binding peptide
  MOD_RES (2), (36), (37): Xaa is C or S
  MOD_RES (14), (15), (16), (17), (18): Xaa is A or G
  MOD_RES (19), (20), (21), (22): Xaa is A or G or is absent
GXAEVVMDRHKRLXXXXXXXXXYYLISTASLRAPVXXS

SEQ ID NO: 31748 - protein, 34 aa, Artificial Sequence
  Non-cyclic GFR-binding peptide
  MOD_RES (1), (33), (34): Xaa is C or S
XSEVVMDYHYKLVVNNASDKYLISIPSLRTPVXX

SEQ ID NO: 31749 - protein, 35 aa, Artificial Sequence
  Non-cyclic GFR-binding peptide
  MOD_RES (2), (2): Xaa is C or S
  MOD_RES (14), (15), (16), (17), (18): Xaa is A or G
  MOD_RES (19), (20), (21), (22): Xaa is A or G or is absent
AXSEVTMNRYKKLXXXXXXXXXFYLISIANMKEPV

SEQ ID NO: 31750 - protein, 33 aa, Artificial Sequence
  Non-cyclic GFR-binding peptide
  MOD_RES (12), (13), (14), (15), (16): Xaa is A or G
  MOD_RES (17), (18), (19), (20): Xaa is A or G or is absent
RDVVMGRHKRLXXXXXXXXXYYLMSTASMKTPT

SEQ ID NO: 31751 - protein, 37 aa, Artificial Sequence
  Non-cyclic GFR-binding peptide
  MOD_RES (2), (36), (37): Xaa is C or S
  MOD_RES (14), (15), (16), (17), (18): Xaa is A or G
  MOD_RES (19), (20), (21), (22): Xaa is A or G or is absent
AXSEVTMNYHYKLXXXXXXXXXKYLISIPSMKEPVXX

SEQ ID NO: 31752 - protein, 39 aa, Artificial Sequence
  Non-cyclic GFR-binding peptide
  MOD_RES (1), (3), (37), (38): Xaa is C or S
  MOD_RES (15), (16), (17), (18), (19): Xaa is A or G
  MOD_RES (20), (21), (22), (23): Xaa is A or G or is absent
XGXSEVVMDRHKRLXXXXXXXXXYYLISTASLRTPVXXT

SEQ ID NO: 31753 - protein, 38 aa, Artificial Sequence
  Non-cyclic GFR-binding peptide
  MOD_RES (2), (4), (36), (37): Xaa is C or S
RXAXSEVTMNPIKGYVVNKNEDFYLINIPSMKEPVXXP

SEQ ID NO: 31754 - protein, 38 aa, Artificial Sequence
  Non-cyclic GFR-binding peptide
  MOD_RES (2), (34), (35): Xaa is C or S
GXSEVVMDRHKRLVVNNASDYYLISTASLRTPVXXTPP

SEQ ID NO: 31755 - protein, 41 aa, Artificial Sequence
  Non-cyclic GFR-binding peptide
  MOD_RES (2), (36), (37): Xaa is C or S
  MOD_RES (14), (15), (16), (17), (18): Xaa is A or G
  MOD_RES (19), (20), (21), (22): Xaa is A or G or is absent
GXSEVVMDEYKFKXXXXXXXXXLYLISIPELRTPVXXTPPT

SEQ ID NO: 31756 - protein, 40 aa, Artificial Sequence
  Non-cyclic GFR-binding peptide
  MOD_RES (1), (35), (36): Xaa is C or S
  MOD_RES (13), (14), (15), (16), (17): Xaa is A or G
  MOD_RES (18), (19), (20), (21): Xaa is A or G or is absent
XSEVTMNPIKGYXXXXXXXXXFYLINIPSMKEPVXXPEPI

SEQ ID NO: 31757 - protein, 31 aa, Artificial Sequence
  Non-cyclic GFR-binding peptide
RDVVMGRHKRLIIQQKDNYYLMSTASMKTPT

SEQ ID NO: 31758 - protein, 38 aa, Artificial Sequence
  Non-cyclic GFR-binding peptide
  MOD_RES (2), (36), (37): Xaa is C or S
  MOD_RES (14), (15), (16), (17), (18): Xaa is A or G
  MOD_RES (19), (20), (21), (22): Xaa is A or G or is absent
AXSEVTMNEYKFKXXXXXXXXXLYLISIPEMKEPVXXP

SEQ ID NO: 31759 - protein, 38 aa, Artificial Sequence
  Non-cyclic GFR-binding peptide
  MOD_RES (2), (35), (36): Xaa is C or S
  MOD_RES (13), (14), (15), (16), (17): Xaa is A or G
  MOD_RES (18), (19), (20), (21): Xaa is A or G or is absent
GXEEVIMYHYKLXXXXXXXXXKYLMSIPSTKVPAXXTS

SEQ ID NO: 31760 - protein, 37 aa, Artificial Sequence
  Non-cyclic GFR-binding peptide
  MOD_RES (1), (33), (34): Xaa is C or S
XSEVVMDEYKFKVVNNASDLYLISIPELRTPVXXTPP

SEQ ID NO: 31761 - protein, 36 aa, Artificial Sequence
  Non-cyclic GFR-binding peptide
  MOD_RES (2), (35), (36): Xaa is C or S
  MOD_RES (13), (14), (15), (16), (17): Xaa is A or G
  MOD_RES (18), (19), (20), (21): Xaa is A or G or is absent
KXSKVIMPIKGYXXXXXXXXXFYLINIPSLDQSVXX

SEQ ID NO: 31762 - protein, 32 aa, Artificial Sequence
  Non-cyclic GFR-binding peptide
  MOD_RES (32), (32): Xaa is C or S
SEVVMDRHKRLVVNNASDYYLISTASLRTPVX

SEQ ID NO: 31763 - protein, 39 aa, Artificial Sequence
  Non-cyclic GFR-binding peptide
  MOD_RES (2), (4), (36), (37): Xaa is C or S
RXGXAEVVMDRHKRLVVNNAADYYLISTASLRAPVXXSA

SEQ ID NO: 31764 - protein, 30 aa, Artificial Sequence
  Non-cyclic GFR-binding peptide
SRVIMPIKGYVKPKRGVFYLINIPSLAQPV

SEQ ID NO: 31765 - protein, 39 aa, Artificial Sequence
  Non-cyclic GFR-binding peptide
  MOD_RES (2), (4), (38), (39): Xaa is C or S
  MOD_RES (16), (17), (18), (19), (20): Xaa is A or G
  MOD_RES (21), (22), (23), (24): Xaa is A or G or is absent
SXGXRDVVMGYHYKLXXXXXXXXXKYLMSIPSMKTPTXX

SEQ ID NO: 31766 - protein, 37 aa, Artificial Sequence
  Non-cyclic GFR-binding peptide
  MOD_RES (2), (34), (35): Xaa is C or S
GXRDVVMGEYKFKIIQQKDNLYLMSIPEMKTPTXXPG

SEQ ID NO: 31767 - protein, 39 aa, Artificial Sequence
  Non-cyclic GFR-binding peptide
  MOD_RES (33), (34): Xaa is C or S
  MOD_RES (11), (12), (13), (14), (15): Xaa is A or G
  MOD_RES (16), (17), (18), (19): Xaa is A or G or is absent
EVTMNYHYKLXXXXXXXXXKYLISIPSMKEPVXXPEPIG

SEQ ID NO: 31768 - protein, 33 aa, Artificial Sequence
  Non-cyclic GFR-binding peptide
  MOD_RES (12), (13), (14), (15), (16): Xaa is A or G
  MOD_RES (17), (18), (19), (20): Xaa is A or G or is absent
SEVTMNEYKFKXXXXXXXXXLYLISIPEMKEPV

SEQ ID NO: 31769 - protein, 38 aa, Artificial Sequence
  Non-cyclic GFR-binding peptide
  MOD_RES (1), (32), (33): Xaa is C or S
XSKVVMPIKGYVKPTRGVFYLINIPSLDQPVXXPSASA

SEQ ID NO: 31770 - protein, 37 aa, Artificial Sequence
  Non-cyclic GFR-binding peptide
  MOD_RES (2), (34), (35): Xaa is C or S
AXSEVTMNRHKRLVVNKNEDYYLISTASMKEPVXXPE

SEQ ID NO: 31771 - protein, 33 aa, Artificial Sequence
  Non-cyclic GFR-binding peptide
  MOD_RES (32), (33): Xaa is C or S
RDVVMGEYKFKIIQQKDNLYLMSIPEMKTPTXX

SEQ ID NO: 31772 - protein, 35 aa, Artificial Sequence
  Non-cyclic GFR-binding peptide
  MOD_RES (1), (35): Xaa is C or S
  MOD_RES (13), (14), (15), (16), (17): Xaa is A or G
  MOD_RES (18), (19), (20), (21): Xaa is A or G or is absent
XSEVTMNEYKFKXXXXXXXXXLYLISIPEMKEPVX

SEQ ID NO: 31773 - protein, 40 aa, Artificial Sequence
  Non-cyclic GFR-binding peptide
  MOD_RES (2), (36), (37): Xaa is C or S
  MOD_RES (14), (15), (16), (17), (18): Xaa is A or G
  MOD_RES (19), (20), (21), (22): Xaa is A or G or is absent
GXRDVVMGRHKRLXXXXXXXXXYYLMSTASMKTPTXXPGA

SEQ ID NO: 31774 - protein, 39 aa, Artificial Sequence
  Non-cyclic GFR-binding peptide
  MOD_RES (33), (34): Xaa is C or S
  MOD_RES (11), (12), (13), (14), (15): Xaa is A or G
  MOD_RES (16), (17), (18), (19): Xaa is A or G or is absent
EVTMNEYKFKXXXXXXXXXLYLISIPEMKEPVXXPEPIG

SEQ ID NO: 31775 - protein, 41 aa, Artificial Sequence
  Non-cyclic GFR-binding peptide
  MOD_RES (1), (3), (35), (36): Xaa is C or S
XGXSRVVMNEYKFKIVNSSDDLYLVSIPELKTPAXXPKPVH

SEQ ID NO: 31776 - protein, 41 aa, Artificial Sequence
  Non-cyclic GFR-binding peptide
  MOD_RES (1), (3), (36), (37): Xaa is C or S
  MOD_RES (14), (15), (16), (17), (18): Xaa is A or G
  MOD_RES (19), (20), (21), (22): Xaa is A or G or is absent
XKXSKVVMPIKGYXXXXXXXXXFYLINIPSLDQPVXXPSAS

SEQ ID NO: 31777 - protein, 34 aa, Artificial Sequence
  Non-cyclic GFR-binding peptide
  MOD_RES (31), (32): Xaa is C or S
DVVMGEYKFKIIQQKDNLYLMSIPEMKTPTXXPG

SEQ ID NO: 31778 - protein, 35 aa, Artificial Sequence
  Non-cyclic GFR-binding peptide
  MOD_RES (1), (33), (34): Xaa is C or S
XAEVVMDRHKRLVVNNAADYYLISTASLRAPVXXS

SEQ ID NO: 31779 - protein, 36 aa, Artificial Sequence
  Non-cyclic GFR-binding peptide
  MOD_RES (1), (34), (35): Xaa is C or S
  MOD_RES (12), (13), (14), (15), (16): Xaa is A or G
  MOD_RES (17), (18), (19), (20): Xaa is A or G or is absent
XEEVIMRHKRLXXXXXXXXXYYLMSTASTKVPAXXT

SEQ ID NO: 31780 - protein, 36 aa, Artificial Sequence
  Non-cyclic GFR-binding peptide
  MOD_RES (1), (3), (35), (36): Xaa is C or S
XGXSEVVMDYHYKLVVNNASDKYLISIPSLRTPVXX

SEQ ID NO: 31781 - protein, 38 aa, Artificial Sequence
  Non-cyclic GFR-binding peptide
  MOD_RES (1), (3), (34), (35): Xaa is C or S
XKXSKVIMPIKGYIKPTKGIFYLINIPSLDQSVXXPSA

SEQ ID NO: 31782 - protein, 39 aa, Artificial Sequence
  Non-cyclic GFR-binding peptide
  MOD_RES (34), (35): Xaa is C or S
  MOD_RES (12), (13), (14), (15), (16): Xaa is A or G
  MOD_RES (17), (18), (19), (20): Xaa is A or G or is absent
SEVTMNRYKKLXXXXXXXXXFYLISIANMKEPVXXPEPI

SEQ ID NO: 31783 - protein, 32 aa, Artificial Sequence
  Non-cyclic GFR-binding peptide
  MOD_RES (11), (12), (13), (14), (15): Xaa is A or G
  MOD_RES (16), (17), (18), (19): Xaa is A or G or is absent
DVVMGYHYKLXXXXXXXXXKYLMSIPSMKTPT

SEQ ID NO: 31784 - protein, 38 aa, Artificial Sequence
  Non-cyclic GFR-binding peptide
  MOD_RES (2), (4), (38): Xaa is C or S
  MOD_RES (16), (17), (18), (19), (20): Xaa is A or G
  MOD_RES (21), (22), (23), (24): Xaa is A or G or is absent
RXAXSEVTMNRYKKLXXXXXXXXXFYLISIANMKEPVX

SEQ ID NO: 31785 - protein, 36 aa, Artificial Sequence
  Non-cyclic GFR-binding peptide
  MOD_RES (2), (4), (36): Xaa is C or S
SXGXRDVVMGYHYKLIIQQKDNKYLMSIPSMKTPTX

SEQ ID NO: 31786 - protein, 33 aa, Artificial Sequence
  Non-cyclic GFR-binding peptide
  MOD_RES (31), (32): Xaa is C or S
EVTMNRHKRLVVNKNEDYYLISTASMKEPVXXP

SEQ ID NO: 31787 - protein, 34 aa, Artificial Sequence
  Non-cyclic GFR-binding peptide
  MOD_RES (2), (34): Xaa is C or S
AXSEVTMNRHKRLVVNKNEDYYLISTASMKEPVX

SEQ ID NO: 31788 - protein, 37 aa, Artificial Sequence
  Non-cyclic GFR-binding peptide
  MOD_RES (32), (33): Xaa is C or S
SEVTMNRHKRLVVNKNEDYYLISTASMKEPVXXPEPI

SEQ ID NO: 31789 - protein, 35 aa, Artificial Sequence
  Non-cyclic GFR-binding peptide
  MOD_RES (32), (33): Xaa is C or S
SEVTMNEYKFKVVNKNEDLYLISIPEMKEPVXXPE

SEQ ID NO: 31790 - protein, 36 aa, Artificial Sequence
  Non-cyclic GFR-binding peptide
  MOD_RES (1), (33), (34): Xaa is C or S
XSEVVMDEYKFKVVNNASDLYLISIPELRTPVXXTP

SEQ ID NO: 31791 - protein, 34 aa, Artificial Sequence
  Non-cyclic GFR-binding peptide
  MOD_RES (2), (33), (34): Xaa is C or S
KXSRVIMPIKGYVKPKRGVFYLINIPSLAQPVXX

SEQ ID NO: 31792 - protein, 36 aa, Artificial Sequence
  Non-cyclic GFR-binding peptide
  MOD_RES (2), (36): Xaa is C or S
  MOD_RES (14), (15), (16), (17), (18): Xaa is A or G
  MOD_RES (19), (20), (21), (22): Xaa is A or G or is absent
AXSEVTMNRHKRLXXXXXXXXXYYLISTASMKEPVX

SEQ ID NO: 31793 - protein, 38 aa, Artificial Sequence
  Non-cyclic GFR-binding peptide
  MOD_RES (2), (4), (38): Xaa is C or S
  MOD_RES (16), (17), (18), (19), (20): Xaa is A or G
  MOD_RES (21), (22), (23), (24): Xaa is A or G or is absent
RXGXESVAMGRHKRLXXXXXXXXXYYLISTASLKTPVX

SEQ ID NO: 31794 - protein, 33 aa, Artificial Sequence
  Non-cyclic GFR-binding peptide
  MOD_RES (32), (33): Xaa is C or S
SEVTMNEYKFKVVNKNEDLYLISIPEMKEPVXX

SEQ ID NO: 31795 - protein, 34 aa, Artificial Sequence
  Non-cyclic GFR-binding peptide
  MOD_RES (2), (34): Xaa is C or S
GXSEVVMDEYKFKVVNNASDLYLISIPELRTPVX

SEQ ID NO: 31796 - protein, 34 aa, Artificial Sequence
  Non-cyclic GFR-binding peptide
  MOD_RES (33), (34): Xaa is C or S
  MOD_RES (11), (12), (13), (14), (15): Xaa is A or G
  MOD_RES (16), (17), (18), (19): Xaa is A or G or is absent
EVVMDYHYKLXXXXXXXXXKYLISIPSLRTPVXX

SEQ ID NO: 31797 - protein, 35 aa, Artificial Sequence
  Non-cyclic GFR-binding peptide
  MOD_RES (2), (4): Xaa is C or S
RXGXSEVVMDRHKRLVVNNASDYYLISTASLRTPV

SEQ ID NO: 31798 - protein, 34 aa, Artificial Sequence
  Non-cyclic GFR-binding peptide
  MOD_RES (2), (34): Xaa is C or S
GXRDVVMGRHKRLIIQQKDNYYLMSTASMKTPTX

SEQ ID NO: 31799 - protein, 37 aa, Artificial Sequence
  Non-cyclic GFR-binding peptide
  MOD_RES (2), (4), (37): Xaa is C or S
  MOD_RES (15), (16), (17), (18), (19): Xaa is A or G
  MOD_RES (20), (21), (22), (23): Xaa is A or G or is absent
LXGXEEVIMEYKFKXXXXXXXXXLYLMSIPETKVPAX

SEQ ID NO: 31800 - protein, 39 aa, Artificial Sequence
  Non-cyclic GFR-binding peptide
  MOD_RES (1), (3), (35), (36): Xaa is C or S
XGXSEVVMDRHKRLVVNNASDYYLISTASLRTPVXXTPP

SEQ ID NO: 31801 - protein, 32 aa, Artificial Sequence
  Non-cyclic GFR-binding peptide
  MOD_RES (31), (32): Xaa is C or S
EVTMNPIKGYVVNKNEDFYLINIPSMKEPVXX

SEQ ID NO: 31802 - protein, 42 aa, Artificial Sequence
  Non-cyclic GFR-binding peptide
  MOD_RES (2), (4), (38), (39): Xaa is C or S
  MOD_RES (16), (17), (18), (19), (20): Xaa is A or G
  MOD_RES (21), (22), (23), (24): Xaa is A or G or is absent
SXGXRDVVMGYHYKLXXXXXXXXXKYLMSIPSMKTPTXXPGA

SEQ ID NO: 31803 - protein, 38 aa, Artificial Sequence
  Non-cyclic GFR-binding peptide
  MOD_RES (2), (4), (36), (37): Xaa is C or S
RXGXESVAMGRHKRLYTVVGKDYYLISTASLKTPVXXA

SEQ ID NO: 31804 - protein, 37 aa, Artificial Sequence
  Non-cyclic GFR-binding peptide
  MOD_RES (2), (4), (36), (37): Xaa is C or S
SXGXRDVVMGEYKFKIIQQKDNLYLMSIPEMKTPTXX

SEQ ID NO: 31805 - protein, 32 aa, Artificial Sequence
  Non-cyclic GFR-binding peptide
  MOD_RES (1), (32): Xaa is C or S
XEEVIMRHKRLLLVRGNDYYLMSTASTKVPAX

SEQ ID NO: 31806 - protein, 42 aa, Artificial Sequence
  Non-cyclic GFR-binding peptide
  MOD_RES (2), (4), (37), (38): Xaa is C or S
  MOD_RES (15), (16), (17), (18), (19): Xaa is A or G
  MOD_RES (20), (21), (22), (23): Xaa is A or G or is absent
SXKXSRVIMPIKGYXXXXXXXXXFYLINIPSLAQPVXXPAAS

SEQ ID NO: 31807 - protein, 35 aa, Artificial Sequence
  Non-cyclic GFR-binding peptide
  MOD_RES (34), (35): Xaa is C or S
  MOD_RES (12), (13), (14), (15), (16): Xaa is A or G
  MOD_RES (17), (18), (19), (20): Xaa is A or G or is absent
RDVVMGYHYKLXXXXXXXXXKYLMSIPSMKTPTXX

SEQ ID NO: 31808 - protein, 32 aa, Artificial Sequence
  Non-cyclic GFR-binding peptide
  MOD_RES (11), (12), (13), (14), (15): Xaa is A or G
  MOD_RES (16), (17), (18), (19): Xaa is A or G or is absent
DVVMGRHKRLXXXXXXXXXYYLMSTASMKTPT

SEQ ID NO: 31809 - protein, 43 aa, Artificial Sequence
  Non-cyclic GFR-binding peptide
  MOD_RES (1), (3), (37), (38): Xaa is C or S
  MOD_RES (15), (16), (17), (18), (19): Xaa is A or G
  MOD_RES (20), (21), (22), (23): Xaa is A or G or is absent
XGXESVAMGRHKRLXXXXXXXXXYYLISTASLKTPVXXAKSAK

SEQ ID NO: 31810 - protein, 40 aa, Artificial Sequence
  Non-cyclic GFR-binding peptide
  MOD_RES (1), (34), (35): Xaa is C or S
  MOD_RES (12), (13), (14), (15), (16): Xaa is A or G
  MOD_RES (17), (18), (19), (20): Xaa is A or G or is absent
XEEVIMEYKFKXXXXXXXXXLYLMSIPETKVPAXXTSPVR

SEQ ID NO: 31811 - protein, 34 aa, Artificial Sequence
  Non-cyclic GFR-binding peptide
  MOD_RES (31), (32): Xaa is C or S
DVVMGRHKRLIIQQKDNYYLMSTASMKTPTXXPG

SEQ ID NO: 31812 - protein, 44 aa, Artificial Sequence
  Non-cyclic GFR-binding peptide
  MOD_RES (2), (4), (38), (39): Xaa is C or S
  MOD_RES (16), (17), (18), (19), (20): Xaa is A or G
  MOD_RES (21), (22), (23), (24): Xaa is A or G or is absent
RXAXSEVTMNYHYKLXXXXXXXXXKYLISIPSMKEPVXXPEPIG

SEQ ID NO: 31813 - protein, 35 aa, Artificial Sequence
  Non-cyclic GFR-binding peptide
  MOD_RES (33), (34): Xaa is C or S
  MOD_RES (11), (12), (13), (14), (15): Xaa is A or G
  MOD_RES (16), (17), (18), (19): Xaa is A or G or is absent
DVVMGYHYKLXXXXXXXXXKYLMSIPSMKTPTXXP

SEQ ID NO: 31814 - protein, 40 aa, Artificial Sequence
  Non-cyclic GFR-binding peptide
  MOD_RES (2), (34), (35): Xaa is C or S
GXAEVVMDRHKRLVVNNAADYYLISTASLRAPVXXSAPAA

SEQ ID NO: 31815 - protein, 34 aa, Artificial Sequence
  Non-cyclic GFR-binding peptide
  MOD_RES (34), (34): Xaa is C or S
  MOD_RES (12), (13), (14), (15), (16): Xaa is A or G
  MOD_RES (17), (18), (19), (20): Xaa is A or G or is absent
RDVVMGEYKFKXXXXXXXXXLYLMSIPEMKTPTX

SEQ ID NO: 31816 - protein, 33 aa, Artificial Sequence
  Non-cyclic GFR-binding peptide
  MOD_RES (12), (13), (14), (15), (16): Xaa is A or G
  MOD_RES (17), (18), (19), (20): Xaa is A or G or is absent
SEVTMNYHYKLXXXXXXXXXKYLISIPSMKEPV

SEQ ID NO: 31817 - protein, 34 aa, Artificial Sequence
  Non-cyclic GFR-binding peptide
  MOD_RES (33), (34): Xaa is C or S
  MOD_RES (11), (12), (13), (14), (15): Xaa is A or G
  MOD_RES (16), (17), (18), (19): Xaa is A or G or is absent
EVVMDEYKFKXXXXXXXXXLYLISIPELRTPVXX

SEQ ID NO: 31818 - protein, 40 aa, Artificial Sequence
  Non-cyclic GFR-binding peptide
  MOD_RES (2), (4), (35), (36): Xaa is C or S
LXGXEEVIMRHKRLLLVRGNDYYLMSTASTKVPAXXTSPV

SEQ ID NO: 31819 - protein, 40 aa, Artificial Sequence
  Non-cyclic GFR-binding peptide
  MOD_RES (34), (35): Xaa is C or S
  MOD_RES (12), (13), (14), (15), (16): Xaa is A or G
  MOD_RES (17), (18), (19), (20): Xaa is A or G or is absent
SEVVMDRHKRLXXXXXXXXXYYLISTASLRTPVXXTPPTS

SEQ ID NO: 31820 - protein, 41 aa, Artificial Sequence
  Non-cyclic GFR-binding peptide
  MOD_RES (1), (3), (36), (37): Xaa is C or S
  MOD_RES (14), (15), (16), (17), (18): Xaa is A or G
  MOD_RES (19), (20), (21), (22): Xaa is A or G or is absent
XKXSRVIMPIKGYXXXXXXXXXFYLINIPSLAQPVXXPAAS

SEQ ID NO: 31821 - protein, 34 aa, Artificial Sequence
  Non-cyclic GFR-binding peptide
  MOD_RES (2), (2): Xaa is C or S
  MOD_RES (13), (14), (15), (16), (17): Xaa is A or G
  MOD_RES (18), (19), (20), (21): Xaa is A or G or is absent
GXEEVIMRHKRLXXXXXXXXXYYLMSTASTKVPA

SEQ ID NO: 31822 - protein, 38 aa, Artificial Sequence
  Non-cyclic GFR-binding peptide
  MOD_RES (2), (34), (35): Xaa is C or S
GXESVAMGRHKRLYTVVGKDYYLISTASLKTPVXXAKS

SEQ ID NO: 31823 - protein, 42 aa, Artificial Sequence
  Non-cyclic GFR-binding peptide
  MOD_RES (2), (4), (38), (39): Xaa is C or S
  MOD_RES (16), (17), (18), (19), (20): Xaa is A or G
  MOD_RES (21), (22), (23), (24): Xaa is A or G or is absent
RXGXESVAMGRHKRLXXXXXXXXXYYLISTASLKTPVXXAKS

SEQ ID NO: 31824 - protein, 34 aa, Artificial Sequence
  Non-cyclic GFR-binding peptide
  MOD_RES (33), (34): Xaa is C or S
  MOD_RES (11), (12), (13), (14), (15): Xaa is A or G
  MOD_RES (16), (17), (18), (19): Xaa is A or G or is absent
EVVMDRHKRLXXXXXXXXXYYLISTASLRAPVXX

SEQ ID NO: 31825 - protein, 34 aa, Artificial Sequence
  Non-cyclic GFR-binding peptide
  MOD_RES (33), (34): Xaa is C or S
  MOD_RES (11), (12), (13), (14), (15): Xaa is A or G
  MOD_RES (16), (17), (18), (19): Xaa is A or G or is absent
EVVMDRHKRLXXXXXXXXXYYLISTASLRTPVXX

SEQ ID NO: 31826 - protein, 36 aa, Artificial Sequence
  Non-cyclic GFR-binding peptide
  MOD_RES (2), (33), (34): Xaa is C or S
GXEEVIMRHKRLLLVRGNDYYLMSTASTKVPAXXTS

SEQ ID NO: 31827 - protein, 39 aa, Artificial Sequence
  Non-cyclic GFR-binding peptide
  MOD_RES (2), (35), (36): Xaa is C or S
  MOD_RES (13), (14), (15), (16), (17): Xaa is A or G
  MOD_RES (18), (19), (20), (21): Xaa is A or G or is absent
KXSKVVMPIKGYXXXXXXXXXFYLINIPSLDQPVXXPSA

SEQ ID NO: 31828 - protein, 38 aa, Artificial Sequence
  Non-cyclic GFR-binding peptide
  MOD_RES (33), (34): Xaa is C or S
  MOD_RES (11), (12), (13), (14), (15): Xaa is A or G
  MOD_RES (16), (17), (18), (19): Xaa is A or G or is absent
EVVMDRHKRLXXXXXXXXXYYLISTASLRAPVXXSAPA

SEQ ID NO: 31829 - protein, 36 aa, Artificial Sequence
  Non-cyclic GFR-binding peptide
  MOD_RES (1), (3), (36): Xaa is C or S
  MOD_RES (14), (15), (16), (17), (18): Xaa is A or G
  MOD_RES (19), (20), (21), (22): Xaa is A or G or is absent
XKXSKVIMPIKGYXXXXXXXXXFYLINIPSLDQSVX

SEQ ID NO: 31830 - protein, 31 aa, Artificial Sequence
  Non-cyclic GFR-binding peptide
SEVVMDYHYKLVVNNASDKYLISIPSLRTPV

SEQ ID NO: 31831 - protein, 39 aa, Artificial Sequence
  Non-cyclic GFR-binding peptide
  MOD_RES (2), (34), (35): Xaa is C or S
GXRDVVMGRHKRLIIQQKDNYYLMSTASMKTPTXXPGAS

SEQ ID NO: 31832 - protein, 34 aa, Artificial Sequence
  Non-cyclic GFR-binding peptide
  MOD_RES (34), (34): Xaa is C or S
  MOD_RES (12), (13), (14), (15), (16): Xaa is A or G
  MOD_RES (17), (18), (19), (20): Xaa is A or G or is absent
RDVVMGYHYKLXXXXXXXXXKYLMSIPSMKTPTX

SEQ ID NO: 31833 - protein, 41 aa, Artificial Sequence
  Non-cyclic GFR-binding peptide
  MOD_RES (2), (4), (35), (36): Xaa is C or S
LXGXEEVIMYHYKLLLVRGNDKYLMSIPSTKVPAXXTSPVR

SEQ ID NO: 31834 - protein, 35 aa, Artificial Sequence
  Non-cyclic GFR-binding peptide
  MOD_RES (1), (3): Xaa is C or S
  MOD_RES (14), (15), (16), (17), (18): Xaa is A or G
  MOD_RES (19), (20), (21), (22): Xaa is A or G or is absent
XGXEEVIMEYKFKXXXXXXXXXLYLMSIPETKVPA

SEQ ID NO: 31835 - protein, 32 aa, Artificial Sequence
  Non-cyclic GFR-binding peptide
  MOD_RES (1), (1): Xaa is C or S
XSEVTMNRHKRLVVNKNEDYYLISTASMKEPV

SEQ ID NO: 31836 - protein, 42 aa, Artificial Sequence
  Non-cyclic GFR-binding peptide
  MOD_RES (2), (36), (37): Xaa is C or S
  MOD_RES (14), (15), (16), (17), (18): Xaa is A or G
  MOD_RES (19), (20), (21), (22): Xaa is A or G or is absent
GXSRVVMNEYKFKXXXXXXXXXLYLVSIPELKTPAXXPKPVH

SEQ ID NO: 31837 - protein, 40 aa, Artificial Sequence
  Non-cyclic GFR-binding peptide
  MOD_RES (2), (36), (37): Xaa is C or S
  MOD_RES (14), (15), (16), (17), (18): Xaa is A or G
  MOD_RES (19), (20), (21), (22): Xaa is A or G or is absent
AXSEVTMNPIKGYXXXXXXXXXFYLINIPSMKEPVXXPEP

SEQ ID NO: 31838 - protein, 37 aa, Artificial Sequence
  Non-cyclic GFR-binding peptide
  MOD_RES (32), (33): Xaa is C or S
SEVVMDYHYKLVVNNASDKYLISIPSLRTPVXXTPPT

SEQ ID NO: 31839 - protein, 33 aa, Artificial Sequence
  Non-cyclic GFR-binding peptide
  MOD_RES (2), (33): Xaa is C or S
KXSRVIMPIKGYVKPKRGVFYLINIPSLAQPVX

SEQ ID NO: 31840 - protein, 35 aa, Artificial Sequence
  Non-cyclic GFR-binding peptide
  MOD_RES (34), (35): Xaa is C or S
  MOD_RES (12), (13), (14), (15), (16): Xaa is A or G
  MOD_RES (17), (18), (19), (20): Xaa is A or G or is absent
SEVVMDRHKRLXXXXXXXXXYYLISTASLRTPVXX

SEQ ID NO: 31841 - protein, 38 aa, Artificial Sequence
  Non-cyclic GFR-binding peptide
  MOD_RES (1), (3), (37), (38): Xaa is C or S
  MOD_RES (15), (16), (17), (18), (19): Xaa is A or G
  MOD_RES (20), (21), (22), (23): Xaa is A or G or is absent
XAXSEVTMNEYKFKXXXXXXXXXLYLISIPEMKEPVXX

SEQ ID NO: 31842 - protein, 36 aa, Artificial Sequence
  Non-cyclic GFR-binding peptide
  MOD_RES (31), (32): Xaa is C or S
EVTMNPIKGYVVNKNEDFYLINIPSMKEPVXXPEPI

SEQ ID NO: 31843 - protein, 31 aa, Artificial Sequence
  Non-cyclic GFR-binding peptide
SEVVMDEYKFKVVNNASDLYLISIPELRTPV

SEQ ID NO: 31844 - protein, 37 aa, Artificial Sequence
  Non-cyclic GFR-binding peptide
  MOD_RES (1), (33), (34): Xaa is C or S
XRDVVMGEYKFKIIQQKDNLYLMSIPEMKTPTXXPGA

SEQ ID NO: 31845 - protein, 39 aa, Artificial Sequence
  Non-cyclic GFR-binding peptide
  MOD_RES (2), (34), (35): Xaa is C or S
GXSEVVMDEYKFKVVNNASDLYLISIPELRTPVXXTPPT

SEQ ID NO: 31846 - protein, 37 aa, Artificial Sequence
  Non-cyclic GFR-binding peptide
  MOD_RES (1), (3), (37): Xaa is C or S
  MOD_RES (15), (16), (17), (18), (19): Xaa is A or G
  MOD_RES (20), (21), (22), (23): Xaa is A or G or is absent
XAXSEVTMNYHYKLXXXXXXXXXKYLISIPSMKEPVX

SEQ ID NO: 31847 - protein, 44 aa, Artificial Sequence
  Non-cyclic GFR-binding peptide
  MOD_RES (2), (4), (38), (39): Xaa is C or S
  MOD_RES (16), (17), (18), (19), (20): Xaa is A or G
  MOD_RES (21), (22), (23), (24): Xaa is A or G or is absent
HXGXSRVVMNYHYKLXXXXXXXXXKYLVSIPSLKTPAXXPKPVH

SEQ ID NO: 31848 - protein, 38 aa, Artificial Sequence
  Non-cyclic GFR-binding peptide
  MOD_RES (2), (4), (38): Xaa is C or S
  MOD_RES (16), (17), (18), (19), (20): Xaa is A or G
  MOD_RES (21), (22), (23), (24): Xaa is A or G or is absent
RXAXSEVTMNEYKFKXXXXXXXXXLYLISIPEMKEPVX

SEQ ID NO: 31849 - protein, 36 aa, Artificial Sequence
  Non-cyclic GFR-binding peptide
  MOD_RES (1), (32), (33): Xaa is C or S
XEEVIMRHKRLLLVRGNDYYLMSTASTKVPAXXTSP

SEQ ID NO: 31850 - protein, 34 aa, Artificial Sequence
  Non-cyclic GFR-binding peptide
  MOD_RES (34), (34): Xaa is C or S
  MOD_RES (12), (13), (14), (15), (16): Xaa is A or G
  MOD_RES (17), (18), (19), (20): Xaa is A or G or is absent
SEVVMDRHKRLXXXXXXXXXYYLISTASLRTPVX

SEQ ID NO: 31851 - protein, 33 aa, Artificial Sequence
  Non-cyclic GFR-binding peptide
  MOD_RES (1), (33): Xaa is C or S
XRDVVMGYHYKLIIQQKDNKYLMSIPSMKTPTX

SEQ ID NO: 31852 - protein, 37 aa, Artificial Sequence
  Non-cyclic GFR-binding peptide
  MOD_RES (31), (32): Xaa is C or S
SVAMGRHKRLYTVVGKDYYLISTASLKTPVXXAKSAK

SEQ ID NO: 31853 - protein, 36 aa, Artificial Sequence
  Non-cyclic GFR-binding peptide
  MOD_RES (34), (35): Xaa is C or S
  MOD_RES (12), (13), (14), (15), (16): Xaa is A or G
  MOD_RES (17), (18), (19), (20): Xaa is A or G or is absent
SEVTMNYHYKLXXXXXXXXXKYLISIPSMKEPVXXP

SEQ ID NO: 31854 - protein, 42 aa, Artificial Sequence
  Non-cyclic GFR-binding peptide
  MOD_RES (2), (4), (36), (37): Xaa is C or S
SXGXRDVVMGRHKRLIIQQKDNYYLMSTASMKTPTXXPGASG

SEQ ID NO: 31855 - protein, 43 aa, Artificial Sequence
  Non-cyclic GFR-binding peptide
  MOD_RES (2), (4), (38), (39): Xaa is C or S
  MOD_RES (16), (17), (18), (19), (20): Xaa is A or G
  MOD_RES (21), (22), (23), (24): Xaa is A or G or is absent
RXAXSEVTMNPIKGYXXXXXXXXXFYLINIPSMKEPVXXPEPI

SEQ ID NO: 31856 - protein, 35 aa, Artificial Sequence
  Non-cyclic GFR-binding peptide
  MOD_RES (33), (34): Xaa is C or S
  MOD_RES (11), (12), (13), (14), (15): Xaa is A or G
  MOD_RES (16), (17), (18), (19): Xaa is A or G or is absent
EVTMNRHKRLXXXXXXXXXYYLISTASMKEPVXXP

SEQ ID NO: 31857 - protein, 36 aa, Artificial Sequence
  Non-cyclic GFR-binding peptide
  MOD_RES (32), (33): Xaa is C or S
SEVVMDRHKRLVVNNASDYYLISTASLRTPVXXTPP

SEQ ID NO: 31858 - protein, 37 aa, Artificial Sequence
  Non-cyclic GFR-binding peptide
  MOD_RES (1), (3), (35), (36): Xaa is C or S
XGXSEVVMDRHKRLVVNNASDYYLISTASLRTPVXXT

SEQ ID NO: 31859 - protein, 37 aa, Artificial Sequence
  Non-cyclic GFR-binding peptide
  MOD_RES (2), (33), (34): Xaa is C or S
GXEEVIMYHYKLLLVRGNDKYLMSIPSTKVPAXXTSP

SEQ ID NO: 31860 - protein, 43 aa, Artificial Sequence
  Non-cyclic GFR-binding peptide
  MOD_RES (1), (3), (37), (38): Xaa is C or S
  MOD_RES (15), (16), (17), (18), (19): Xaa is A or G
  MOD_RES (20), (21), (22), (23): Xaa is A or G or is absent
XGXAEVVMDRHKRLXXXXXXXXXYYLISTASLRAPVXXSAPAA

SEQ ID NO: 31861 - protein, 35 aa, Artificial Sequence
  Non-cyclic GFR-binding peptide
  MOD_RES (31), (32): Xaa is C or S
EVTMNRYKKLVVNKNEDFYLISIANMKEPVXXPEP

SEQ ID NO: 31862 - protein, 32 aa, Artificial Sequence
  Non-cyclic GFR-binding peptide
  MOD_RES (2), (2): Xaa is C or S
GXEEVIMEYKFKLLVRGNDLYLMSIPETKVPA

SEQ ID NO: 31863 - protein, 43 aa, Artificial Sequence
  Non-cyclic GFR-binding peptide
  MOD_RES (2), (4), (38), (39): Xaa is C or S
  MOD_RES (16), (17), (18), (19), (20): Xaa is A or G
  MOD_RES (21), (22), (23), (24): Xaa is A or G or is absent
RXAXSEVTMNRHKRLXXXXXXXXXYYLISTASMKEPVXXPEPI

SEQ ID NO: 31864 - protein, 37 aa, Artificial Sequence
  Non-cyclic GFR-binding peptide
  MOD_RES (2), (4): Xaa is C or S
  MOD_RES (16), (17), (18), (19), (20): Xaa is A or G
  MOD_RES (21), (22), (23), (24): Xaa is A or G or is absent
RXGXSEVVMDYHYKLXXXXXXXXXKYLISIPSLRTPV

SEQ ID NO: 31865 - protein, 35 aa, Artificial Sequence
  Non-cyclic GFR-binding peptide
  MOD_RES (33), (34): Xaa is C or S
  MOD_RES (11), (12), (13), (14), (15): Xaa is A or G
  MOD_RES (16), (17), (18), (19): Xaa is A or G or is absent
DVVMGRHKRLXXXXXXXXXYYLMSTASMKTPTXXP

SEQ ID NO: 31866 - protein, 33 aa, Artificial Sequence
  Non-cyclic GFR-binding peptide
  MOD_RES (31), (32): Xaa is C or S
EVTMNEYKFKVVNKNEDLYLISIPEMKEPVXXP

SEQ ID NO: 31867 - protein, 39 aa, Artificial Sequence
  Non-cyclic GFR-binding peptide
  MOD_RES (2), (4), (36), (37): Xaa is C or S
RXGXSEVVMDYHYKLVVNNASDKYLISIPSLRTPVXXTP

SEQ ID NO: 31868 - protein, 36 aa, Artificial Sequence
  Non-cyclic GFR-binding peptide
  MOD_RES (2), (34), (35): Xaa is C or S
GXSEVVMDYHYKLVVNNASDKYLISIPSLRTPVXXT

SEQ ID NO: 31869 - protein, 35 aa, Artificial Sequence
  Non-cyclic GFR-binding peptide
  MOD_RES (1), (32), (33): Xaa is C or S
XSKVVMPIKGYVKPTRGVFYLINIPSLDQPVXXPS

SEQ ID NO: 31870 - protein, 42 aa, Artificial Sequence
  Non-cyclic GFR-binding peptide
  MOD_RES (2), (4), (38), (39): Xaa is C or S
  MOD_RES (16), (17), (18), (19), (20): Xaa is A or G
  MOD_RES (21), (22), (23), (24): Xaa is A or G or is absent
RXAXSEVTMNRYKKLXXXXXXXXXFYLISIANMKEPVXXPEP

SEQ ID NO: 31871 - protein, 33 aa, Artificial Sequence
  Non-cyclic GFR-binding peptide
  MOD_RES (33), (33): Xaa is C or S
  MOD_RES (11), (12), (13), (14), (15): Xaa is A or G
  MOD_RES (16), (17), (18), (19): Xaa is A or G or is absent
EVVMDEYKFKXXXXXXXXXLYLISIPELRTPVX

SEQ ID NO: 31872 - protein, 38 aa, Artificial Sequence
  Non-cyclic GFR-binding peptide
  MOD_RES (2), (4), (38): Xaa is C or S
  MOD_RES (16), (17), (18), (19), (20): Xaa is A or G
  MOD_RES (21), (22), (23), (24): Xaa is A or G or is absent
RXGXSEVVMDRHKRLXXXXXXXXXYYLISTASLRTPVX

SEQ ID NO: 31873 - protein, 36 aa, Artificial Sequence
  Non-cyclic GFR-binding peptide
  MOD_RES (1), (35), (36): Xaa is C or S
  MOD_RES (13), (14), (15), (16), (17): Xaa is A or G
  MOD_RES (18), (19), (20), (21): Xaa is A or G or is absent
XSEVTMNPIKGYXXXXXXXXXFYLINIPSMKEPVXX

SEQ ID NO: 31874 - protein, 35 aa, Artificial Sequence
  Non-cyclic GFR-binding peptide
  MOD_RES (31), (32): Xaa is C or S
SKVVMPIKGYVKPTRGVFYLINIPSLDQPVXXPSA

SEQ ID NO: 31875 - protein, 40 aa, Artificial Sequence
  Non-cyclic GFR-binding peptide
  MOD_RES (1), (3), (34), (35): Xaa is C or S
XKXSRVIMPIKGYVKPKRGVFYLINIPSLAQPVXXPAASA

SEQ ID NO: 31876 - protein, 42 aa, Artificial Sequence
  Non-cyclic GFR-binding peptide
  MOD_RES (2), (4), (37), (38): Xaa is C or S
  MOD_RES (15), (16), (17), (18), (19): Xaa is A or G
  MOD_RES (20), (21), (22), (23): Xaa is A or G or is absent
SXKXSKVVMPIKGYXXXXXXXXXFYLINIPSLDQPVXXPSAS

SEQ ID NO: 31877 - protein, 34 aa, Artificial Sequence
  Non-cyclic GFR-binding peptide
  MOD_RES (1), (1): Xaa is C or S
  MOD_RES (13), (14), (15), (16), (17): Xaa is A or G
  MOD_RES (18), (19), (20), (21): Xaa is A or G or is absent
XSEVTMNEYKFKXXXXXXXXXLYLISIPEMKEPV

SEQ ID NO: 31878 - protein, 40 aa, Artificial Sequence
  Non-cyclic GFR-binding peptide
  MOD_RES (1), (3), (34), (35): Xaa is C or S
XGXEEVIMEYKFKLLVRGNDLYLMSIPETKVPAXXTSPVR

SEQ ID NO: 31879 - protein, 41 aa, Artificial Sequence
  Non-cyclic GFR-binding peptide
  MOD_RES (1), (3), (37), (38): Xaa is C or S
  MOD_RES (15), (16), (17), (18), (19): Xaa is A or G
  MOD_RES (20), (21), (22), (23): Xaa is A or G or is absent
XGXAEVVMDRHKRLXXXXXXXXXYYLISTASLRAPVXXSAP

SEQ ID NO: 31880 - protein, 42 aa, Artificial Sequence
  Non-cyclic GFR-binding peptide
  MOD_RES (2), (4), (38), (39): Xaa is C or S
  MOD_RES (16), (17), (18), (19), (20): Xaa is A or G
  MOD_RES (21), (22), (23), (24): Xaa is A or G or is absent
RXAXSEVTMNEYKFKXXXXXXXXXLYLISIPEMKEPVXXPEP

SEQ ID NO: 31881 - protein, 34 aa, Artificial Sequence
  Non-cyclic GFR-binding peptide
  MOD_RES (2), (2): Xaa is C or S
  MOD_RES (13), (14), (15), (16), (17): Xaa is A or G
  MOD_RES (18), (19), (20), (21): Xaa is A or G or is absent
KXSKVVMPIKGYXXXXXXXXXFYLINIPSLDQPV

SEQ ID NO: 31882 - protein, 39 aa, Artificial Sequence
  Non-cyclic GFR-binding peptide
  MOD_RES (34), (35): Xaa is C or S
  MOD_RES (12), (13), (14), (15), (16): Xaa is A or G
  MOD_RES (17), (18), (19), (20): Xaa is A or G or is absent
RDVVMGYHYKLXXXXXXXXXKYLMSIPSMKTPTXXPGAS

SEQ ID NO: 31883 - protein, 38 aa, Artificial Sequence
  Non-cyclic GFR-binding peptide
  MOD_RES (2), (4), (37), (38): Xaa is C or S
  MOD_RES (15), (16), (17), (18), (19): Xaa is A or G
  MOD_RES (20), (21), (22), (23): Xaa is A or G or is absent
SXKXSKVIMPIKGYXXXXXXXXXFYLINIPSLDQSVXX

SEQ ID NO: 31884 - protein, 41 aa, Artificial Sequence
  Non-cyclic GFR-binding peptide
  MOD_RES (2), (4), (38), (39): Xaa is C or S
  MOD_RES (16), (17), (18), (19), (20): Xaa is A or G
  MOD_RES (21), (22), (23), (24): Xaa is A or G or is absent
RXAXSEVTMNRHKRLXXXXXXXXXYYLISTASMKEPVXXPE

SEQ ID NO: 31885 - protein, 34 aa, Artificial Sequence
  Non-cyclic GFR-binding peptide
  MOD_RES (31), (32): Xaa is C or S
DVVMGYHYKLIIQQKDNKYLMSIPSMKTPTXXPG

SEQ ID NO: 31886 - protein, 34 aa, Artificial Sequence
  Non-cyclic GFR-binding peptide
  MOD_RES (2), (34): Xaa is C or S
GXESVAMGRHKRLYTVVGKDYYLISTASLKTPVX

SEQ ID NO: 31887 - protein, 35 aa, Artificial Sequence
  Non-cyclic GFR-binding peptide
  MOD_RES (2), (35): Xaa is C or S
  MOD_RES (13), (14), (15), (16), (17): Xaa is A or G
  MOD_RES (18), (19), (20), (21): Xaa is A or G or is absent
GXEEVIMRHKRLXXXXXXXXXYYLMSTASTKVPAX

SEQ ID NO: 31888 - protein, 35 aa, Artificial Sequence
  Non-cyclic GFR-binding peptide
  MOD_RES (2), (2): Xaa is C or S
  MOD_RES (14), (15), (16), (17), (18): Xaa is A or G
  MOD_RES (19), (20), (21), (22): Xaa is A or G or is absent
GXRDVVMGEYKFKXXXXXXXXXLYLMSIPEMKTPT

SEQ ID NO: 31889 - protein, 38 aa, Artificial Sequence
  Non-cyclic GFR-binding peptide
  MOD_RES (34), (35): Xaa is C or S
  MOD_RES (12), (13), (14), (15), (16): Xaa is A or G
  MOD_RES (17), (18), (19), (20): Xaa is A or G or is absent
SEVVMDRHKRLXXXXXXXXXYYLISTASLRTPVXXTPP

SEQ ID NO: 31890 - protein, 33 aa, Artificial Sequence
  Non-cyclic GFR-binding peptide
  MOD_RES (33), (33): Xaa is C or S
  MOD_RES (11), (12), (13), (14), (15): Xaa is A or G
  MOD_RES (16), (17), (18), (19): Xaa is A or G or is absent
EVTMNRYKKLXXXXXXXXXFYLISIANMKEPVX

SEQ ID NO: 31891 - protein, 33 aa, Artificial Sequence
  Non-cyclic GFR-binding peptide
  MOD_RES (32), (33): Xaa is C or S
RDVVMGYHYKLIIQQKDNKYLMSIPSMKTPTXX

SEQ ID NO: 31892 - protein, 38 aa, Artificial Sequence
  Non-cyclic GFR-binding peptide
  MOD_RES (2), (4), (38): Xaa is C or S
  MOD_RES (16), (17), (18), (19), (20): Xaa is A or G
  MOD_RES (21), (22), (23), (24): Xaa is A or G or is absent
RXGXSEVVMDEYKFKXXXXXXXXXLYLISIPELRTPVX

SEQ ID NO: 31893 - protein, 34 aa, Artificial Sequence
  Non-cyclic GFR-binding peptide
  MOD_RES (2), (34): Xaa is C or S
GXSEVVMDYHYKLVVNNASDKYLISIPSLRTPVX

SEQ ID NO: 31894 - protein, 39 aa, Artificial Sequence
  Non-cyclic GFR-binding peptide
  MOD_RES (34), (35): Xaa is C or S
  MOD_RES (12), (13), (14), (15), (16): Xaa is A or G
  MOD_RES (17), (18), (19), (20): Xaa is A or G or is absent
RDVVMGEYKFKXXXXXXXXXLYLMSIPEMKTPTXXPGAS

SEQ ID NO: 31895 - protein, 35 aa, Artificial Sequence
  Non-cyclic GFR-binding peptide
  MOD_RES (1), (34), (35): Xaa is C or S
  MOD_RES (12), (13), (14), (15), (16): Xaa is A or G
  MOD_RES (17), (18), (19), (20): Xaa is A or G or is absent
XSKVVMPIKGYXXXXXXXXXFYLINIPSLDQPVXX

SEQ ID NO: 31896 - protein, 37 aa, Artificial Sequence
  Non-cyclic GFR-binding peptide
  MOD_RES (2), (4), (36), (37): Xaa is C or S
RXGXSEVVMDYHYKLVVNNASDKYLISIPSLRTPVXX

SEQ ID NO: 31897 - protein, 36 aa, Artificial Sequence
  Non-cyclic GFR-binding peptide
  MOD_RES (1), (33), (34): Xaa is C or S
XESVAMGRHKRLYTVVGKDYYLISTASLKTPVXXAK

SEQ ID NO: 31898 - protein, 43 aa, Artificial Sequence
  Non-cyclic GFR-binding peptide
  MOD_RES (2), (4), (37), (38): Xaa is C or S
  MOD_RES (15), (16), (17), (18), (19): Xaa is A or G
  MOD_RES (20), (21), (22), (23): Xaa is A or G or is absent
SXKXSKVIMPIKGYXXXXXXXXXFYLINIPSLDQSVXXPSASA

SEQ ID NO: 31899 - protein, 35 aa, Artificial Sequence
  Non-cyclic GFR-binding peptide
  MOD_RES (2), (34), (35): Xaa is C or S
AXSEVTMNYHYKLVVNKNEDKYLISIPSMKEPVXX

SEQ ID NO: 31900 - protein, 41 aa, Artificial Sequence
  Non-cyclic GFR-binding peptide
  MOD_RES (2), (4), (35), (36): Xaa is C or S
SXKXSRVIMPIKGYVKPKRGVFYLINIPSLAQPVXXPAASA

SEQ ID NO: 31901 - protein, 40 aa, Artificial Sequence
  Non-cyclic GFR-binding peptide
  MOD_RES (1), (34), (35): Xaa is C or S
  MOD_RES (12), (13), (14), (15), (16): Xaa is A or G
  MOD_RES (17), (18), (19), (20): Xaa is A or G or is absent
XSKVVMPIKGYXXXXXXXXXFYLINIPSLDQPVXXPSASA

SEQ ID NO: 31902 - protein, 39 aa, Artificial Sequence
  Non-cyclic GFR-binding peptide
  MOD_RES (34), (35): Xaa is C or S
  MOD_RES (12), (13), (14), (15), (16): Xaa is A or G
  MOD_RES (17), (18), (19), (20): Xaa is A or G or is absent
SEVVMDRHKRLXXXXXXXXXYYLISTASLRTPVXXTPPT

SEQ ID NO: 31903 - protein, 36 aa, Artificial Sequence
  Non-cyclic GFR-binding peptide
  MOD_RES (2), (36): Xaa is C or S
  MOD_RES (14), (15), (16), (17), (18): Xaa is A or G
  MOD_RES (19), (20), (21), (22): Xaa is A or G or is absent
AXSEVTMNPIKGYXXXXXXXXXFYLINIPSMKEPVX

SEQ ID NO: 31904 - protein, 33 aa, Artificial Sequence
  Non-cyclic GFR-binding peptide
  MOD_RES (31), (32): Xaa is C or S
EVTMNYHYKLVVNKNEDKYLISIPSMKEPVXXP

SEQ ID NO: 31905 - protein, 35 aa, Artificial Sequence
  Non-cyclic GFR-binding peptide
  MOD_RES (33), (34): Xaa is C or S
  MOD_RES (11), (12), (13), (14), (15): Xaa is A or G
  MOD_RES (16), (17), (18), (19): Xaa is A or G or is absent
EVTMNYHYKLXXXXXXXXXKYLISIPSMKEPVXXP

SEQ ID NO: 31906 - protein, 37 aa, Artificial Sequence
  Non-cyclic GFR-binding peptide
  MOD_RES (2), (35), (36): Xaa is C or S
  MOD_RES (13), (14), (15), (16), (17): Xaa is A or G
  MOD_RES (18), (19), (20), (21): Xaa is A or G or is absent
GXEEVIMEYKFKXXXXXXXXXLYLMSIPETKVPAXXT

SEQ ID NO: 31907 - protein, 40 aa, Artificial Sequence
  Non-cyclic GFR-binding peptide
  MOD_RES (2), (4), (36), (37): Xaa is C or S
RXGXAEVVMDRHKRLVVNNAADYYLISTASLRAPVXXSAP

SEQ ID NO: 31908 - protein, 34 aa, Artificial Sequence
  Non-cyclic GFR-binding peptide
  MOD_RES (33), (34): Xaa is C or S
  MOD_RES (11), (12), (13), (14), (15): Xaa is A or G
  MOD_RES (16), (17), (18), (19): Xaa is A or G or is absent
DVVMGYHYKLXXXXXXXXXKYLMSIPSMKTPTXX

SEQ ID NO: 31909 - protein, 41 aa, Artificial Sequence
  Non-cyclic GFR-binding peptide
  MOD_RES (2), (4), (38), (39): Xaa is C or S
  MOD_RES (16), (17), (18), (19), (20): Xaa is A or G
  MOD_RES (21), (22), (23), (24): Xaa is A or G or is absent
SXGXRDVVMGRHKRLXXXXXXXXXYYLMSTASMKTPTXXPG

SEQ ID NO: 31910 - protein, 37 aa, Artificial Sequence
  Non-cyclic GFR-binding peptide
  MOD_RES (1), (35), (36): Xaa is C or S
  MOD_RES (13), (14), (15), (16), (17): Xaa is A or G
  MOD_RES (18), (19), (20), (21): Xaa is A or G or is absent
XSEVTMNRYKKLXXXXXXXXXFYLISIANMKEPVXXP

SEQ ID NO: 31911 - protein, 39 aa, Artificial Sequence
  Non-cyclic GFR-binding peptide
  MOD_RES (2), (4), (36), (37): Xaa is C or S
SXGXRDVVMGYHYKLIIQQKDNKYLMSIPSMKTPTXXPG

SEQ ID NO: 31912 - protein, 36 aa, Artificial Sequence
  Non-cyclic GFR-binding peptide
  MOD_RES (1), (3), (34), (35): Xaa is C or S
XKXSRVIMPIKGYVKPKRGVFYLINIPSLAQPVXXP

SEQ ID NO: 31913 - protein, 36 aa, Artificial Sequence
  Non-cyclic GFR-binding peptide
  MOD_RES (34), (35): Xaa is C or S
  MOD_RES (12), (13), (14), (15), (16): Xaa is A or G
  MOD_RES (17), (18), (19), (20): Xaa is A or G or is absent
RDVVMGEYKFKXXXXXXXXXLYLMSIPEMKTPTXXP

SEQ ID NO: 31914 - protein, 35 aa, Artificial Sequence
  Non-cyclic GFR-binding peptide
  MOD_RES (34), (35): Xaa is C or S
  MOD_RES (12), (13), (14), (15), (16): Xaa is A or G
  MOD_RES (17), (18), (19), (20): Xaa is A or G or is absent
RDVVMGEYKFKXXXXXXXXXLYLMSIPEMKTPTXX

SEQ ID NO: 31915 - protein, 43 aa, Artificial Sequence
  Non-cyclic GFR-binding peptide
  MOD_RES (2), (4), (37), (38): Xaa is C or S
  MOD_RES (15), (16), (17), (18), (19): Xaa is A or G
  MOD_RES (20), (21), (22), (23): Xaa is A or G or is absent
LXGXEEVIMYHYKLXXXXXXXXXKYLMSIPSTKVPAXXTSPVR

SEQ ID NO: 31916 - protein, 39 aa, Artificial Sequence
  Non-cyclic GFR-binding peptide
  MOD_RES (2), (35), (36): Xaa is C or S
  MOD_RES (13), (14), (15), (16), (17): Xaa is A or G
  MOD_RES (18), (19), (20), (21): Xaa is A or G or is absent
GXEEVIMYHYKLXXXXXXXXXKYLMSIPSTKVPAXXTSP

SEQ ID NO: 31917 - protein, 40 aa, Artificial Sequence
  Non-cyclic GFR-binding peptide
  MOD_RES (2), (35), (36): Xaa is C or S
  MOD_RES (13), (14), (15), (16), (17): Xaa is A or G
  MOD_RES (18), (19), (20), (21): Xaa is A or G or is absent
GXEEVIMRHKRLXXXXXXXXXYYLMSTASTKVPAXXTSPV

SEQ ID NO: 31918 - protein, 35 aa, Artificial Sequence
  Non-cyclic GFR-binding peptide
  MOD_RES (1), (3), (34), (35): Xaa is C or S
XGXEEVIMEYKFKLLVRGNDLYLMSIPETKVPAXX

SEQ ID NO: 31919 - protein, 37 aa, Artificial Sequence
  Non-cyclic GFR-binding peptide
  MOD_RES (1), (3), (35), (36): Xaa is C or S
XGXAEVVMDRHKRLVVNNAADYYLISTASLRAPVXXS

SEQ ID NO: 31920 - protein, 36 aa, Artificial Sequence
  Non-cyclic GFR-binding peptide
  MOD_RES (2), (33), (34): Xaa is C or S
GXEEVIMYHYKLLLVRGNDKYLMSIPSTKVPAXXTS

SEQ ID NO: 31921 - protein, 36 aa, Artificial Sequence
  Non-cyclic GFR-binding peptide
  MOD_RES (32), (33): Xaa is C or S
RDVVMGEYKFKIIQQKDNLYLMSIPEMKTPTXXPGA

SEQ ID NO: 31922 - protein, 37 aa, Artificial Sequence
  Non-cyclic GFR-binding peptide
  MOD_RES (1), (33), (34): Xaa is C or S
XSEVTMNPIKGYVVNKNEDFYLINIPSMKEPVXXPEP

SEQ ID NO: 31923 - protein, 32 aa, Artificial Sequence
  Non-cyclic GFR-binding peptide
  MOD_RES (31), (32): Xaa is C or S
SRVIMPIKGYVKPKRGVFYLINIPSLAQPVXX

SEQ ID NO: 31924 - protein, 36 aa, Artificial Sequence
  Non-cyclic GFR-binding peptide
  MOD_RES (31), (32): Xaa is C or S
EVVMDEYKFKVVNNASDLYLISIPELRTPVXXTPPT

SEQ ID NO: 31925 - protein, 35 aa, Artificial Sequence
  Non-cyclic GFR-binding peptide
  MOD_RES (2), (2): Xaa is C or S
  MOD_RES (14), (15), (16), (17), (18): Xaa is A or G
  MOD_RES (19), (20), (21), (22): Xaa is A or G or is absent
GXRDVVMGYHYKLXXXXXXXXXKYLMSIPSMKTPT

SEQ ID NO: 31926 - protein, 35 aa, Artificial Sequence
  Non-cyclic GFR-binding peptide
  MOD_RES (33), (34): Xaa is C or S
  MOD_RES (11), (12), (13), (14), (15): Xaa is A or G
  MOD_RES (16), (17), (18), (19): Xaa is A or G or is absent
EVTMNEYKFKXXXXXXXXXLYLISIPEMKEPVXXP

SEQ ID NO: 31927 - protein, 36 aa, Artificial Sequence
  Non-cyclic GFR-binding peptide
  MOD_RES (2), (33), (34): Xaa is C or S
KXSKVVMPIKGYVKPTRGVFYLINIPSLDQPVXXPS

SEQ ID NO: 31928 - protein, 40 aa, Artificial Sequence
  Non-cyclic GFR-binding peptide
  MOD_RES (34), (35): Xaa is C or S
  MOD_RES (12), (13), (14), (15), (16): Xaa is A or G
  MOD_RES (17), (18), (19), (20): Xaa is A or G or is absent
SRVVMNRHKRLXXXXXXXXXYYLVSTASLKTPAXXPKPVH

SEQ ID NO: 31929 - protein, 36 aa, Artificial Sequence
  Non-cyclic GFR-binding peptide
  MOD_RES (1), (33), (34): Xaa is C or S
XSEVTMNPIKGYVVNKNEDFYLINIPSMKEPVXXPE

SEQ ID NO: 31930 - protein, 40 aa, Artificial Sequence
  Non-cyclic GFR-binding peptide
  MOD_RES (2), (4), (36), (37): Xaa is C or S
SXGXRDVVMGYHYKLIIQQKDNKYLMSIPSMKTPTXXPGA

SEQ ID NO: 31931 - protein, 37 aa, Artificial Sequence
  Non-cyclic GFR-binding peptide
  MOD_RES (1), (3), (37): Xaa is C or S
  MOD_RES (15), (16), (17), (18), (19): Xaa is A or G
  MOD_RES (20), (21), (22), (23): Xaa is A or G or is absent
XAXSEVTMNRYKKLXXXXXXXXXFYLISIANMKEPVX

SEQ ID NO: 31932 - protein, 37 aa, Artificial Sequence
  Non-cyclic GFR-binding peptide
  MOD_RES (1), (3), (35), (36): Xaa is C or S
XAXSEVTMNPIKGYVVNKNEDFYLINIPSMKEPVXXP

SEQ ID NO: 31933 - protein, 34 aa, Artificial Sequence
  Non-cyclic GFR-binding peptide
  MOD_RES (2), (2): Xaa is C or S
  MOD_RES (13), (14), (15), (16), (17): Xaa is A or G
  MOD_RES (18), (19), (20), (21): Xaa is A or G or is absent
KXSRVIMPIKGYXXXXXXXXXFYLINIPSLAQPV

SEQ ID NO: 31934 - protein, 35 aa, Artificial Sequence
  Non-cyclic GFR-binding peptide
  MOD_RES (2), (2): Xaa is C or S
  MOD_RES (14), (15), (16), (17), (18): Xaa is A or G
  MOD_RES (19), (20), (21), (22): Xaa is A or G or is absent
GXESVAMGRHKRLXXXXXXXXXYYLISTASLKTPV

SEQ ID NO: 31935 - protein, 41 aa, Artificial Sequence
  Non-cyclic GFR-binding peptide
  MOD_RES (1), (3), (35), (36): Xaa is C or S
XGXAEVVMDRHKRLVVNNAADYYLISTASLRAPVXXSAPAA

SEQ ID NO: 31936 - protein, 35 aa, Artificial Sequence
  Non-cyclic GFR-binding peptide
  MOD_RES (2), (4): Xaa is C or S
RXGXSEVVMDEYKFKVVNNASDLYLISIPELRTPV

SEQ ID NO: 31937 - protein, 37 aa, Artificial Sequence
  Non-cyclic GFR-binding peptide
  MOD_RES (2), (4), (36), (37): Xaa is C or S
RXAXSEVTMNPIKGYVVNKNEDFYLINIPSMKEPVXX

SEQ ID NO: 31938 - protein, 36 aa, Artificial Sequence
  Non-cyclic GFR-binding peptide
  MOD_RES (34), (35): Xaa is C or S
  MOD_RES (12), (13), (14), (15), (16): Xaa is A or G
  MOD_RES (17), (18), (19), (20): Xaa is A or G or is absent
RDVVMGYHYKLXXXXXXXXXKYLMSIPSMKTPTXXP

SEQ ID NO: 31939 - protein, 37 aa, Artificial Sequence
  Non-cyclic GFR-binding peptide
  MOD_RES (1), (33), (34): Xaa is C or S
XRDVVMGRHKRLIIQQKDNYYLMSTASMKTPTXXPGA

SEQ ID NO: 31940 - protein, 37 aa, Artificial Sequence
  Non-cyclic GFR-binding peptide
  MOD_RES (1), (35), (36): Xaa is C or S
  MOD_RES (13), (14), (15), (16), (17): Xaa is A or G
  MOD_RES (18), (19), (20), (21): Xaa is A or G or is absent
XRDVVMGRHKRLXXXXXXXXXYYLMSTASMKTPTXXP

SEQ ID NO: 31941 - protein, 40 aa, Artificial Sequence
  Non-cyclic GFR-binding peptide
  MOD_RES (2), (4), (37), (38): Xaa is C or S
  MOD_RES (15), (16), (17), (18), (19): Xaa is A or G
  MOD_RES (20), (21), (22), (23): Xaa is A or G or is absent
SXKXSKVIMPIKGYXXXXXXXXXFYLINIPSLDQSVXXPS

SEQ ID NO: 31942 - protein, 35 aa, Artificial Sequence
  Non-cyclic GFR-binding peptide
  MOD_RES (1), (33), (34): Xaa is C or S
XRDVVMGYHYKLIIQQKDNKYLMSIPSMKTPTXXP

SEQ ID NO: 31943 - protein, 36 aa, Artificial Sequence
  Non-cyclic GFR-binding peptide
  MOD_RES (32), (33): Xaa is C or S
RDVVMGRHKRLIIQQKDNYYLMSTASMKTPTXXPGA

SEQ ID NO: 31944 - protein, 41 aa, Artificial Sequence
  Non-cyclic GFR-binding peptide
  MOD_RES (1), (3), (35), (36): Xaa is C or S
XGXSEVVMDRHKRLVVNNASDYYLISTASLRTPVXXTPPTS

SEQ ID NO: 31945 - protein, 42 aa, Artificial Sequence
  Non-cyclic GFR-binding peptide
  MOD_RES (2), (36), (37): Xaa is C or S
  MOD_RES (14), (15), (16), (17), (18): Xaa is A or G
  MOD_RES (19), (20), (21), (22): Xaa is A or G or is absent
AXSEVTMNYHYKLXXXXXXXXXKYLISIPSMKEPVXXPEPIG

SEQ ID NO: 31946 - protein, 32 aa, Artificial Sequence
  Non-cyclic GFR-binding peptide
  MOD_RES (11), (12), (13), (14), (15): Xaa is A or G
  MOD_RES (16), (17), (18), (19): Xaa is A or G or is absent
EVVMDRHKRLXXXXXXXXXYYLISTASLRAPV

SEQ ID NO: 31947 - protein, 32 aa, Artificial Sequence
  Non-cyclic GFR-binding peptide
  MOD_RES (1), (1): Xaa is C or S
XSEVTMNEYKFKVVNKNEDLYLISIPEMKEPV

SEQ ID NO: 31948 - protein, 36 aa, Artificial Sequence
  Non-cyclic GFR-binding peptide
  MOD_RES (1), (3), (35), (36): Xaa is C or S
XGXSEVVMDEYKFKVVNNASDLYLISIPELRTPVXX

SEQ ID NO: 31949 - protein, 39 aa, Artificial Sequence
  Non-cyclic GFR-binding peptide
  MOD_RES (1), (35), (36): Xaa is C or S
  MOD_RES (13), (14), (15), (16), (17): Xaa is A or G
  MOD_RES (18), (19), (20), (21): Xaa is A or G or is absent
XAEVVMDRHKRLXXXXXXXXXYYLISTASLRAPVXXSAP

SEQ ID NO: 31950 - protein, 42 aa, Artificial Sequence
  Non-cyclic GFR-binding peptide
  MOD_RES (1), (3), (37), (38): Xaa is C or S
  MOD_RES (15), (16), (17), (18), (19): Xaa is A or G
  MOD_RES (20), (21), (22), (23): Xaa is A or G or is absent
XAXSEVTMNYHYKLXXXXXXXXXKYLISIPSMKEPVXXPEPI

SEQ ID NO: 31951 - protein, 40 aa, Artificial Sequence
  Non-cyclic GFR-binding peptide
  MOD_RES (1), (3), (37), (38): Xaa is C or S
  MOD_RES (15), (16), (17), (18), (19): Xaa is A or G
  MOD_RES (20), (21), (22), (23): Xaa is A or G or is absent
XGXSEVVMDRHKRLXXXXXXXXXYYLISTASLRTPVXXTP

SEQ ID NO: 31952 - protein, 37 aa, Artificial Sequence
  Non-cyclic GFR-binding peptide
  MOD_RES (31), (32): Xaa is C or S
EVTMNRYKKLVVNKNEDFYLISIANMKEPVXXPEPIG

SEQ ID NO: 31953 - protein, 36 aa, Artificial Sequence
  Non-cyclic GFR-binding peptide
  MOD_RES (1), (3): Xaa is C or S
  MOD_RES (15), (16), (17), (18), (19): Xaa is A or G
  MOD_RES (20), (21), (22), (23): Xaa is A or G or is absent
XGXSEVVMDEYKFKXXXXXXXXXLYLISIPELRTPV

SEQ ID NO: 31954 - protein, 35 aa, Artificial Sequence
  Non-cyclic GFR-binding peptide
  MOD_RES (1), (3), (34), (35): Xaa is C or S
XKXSKVIMPIKGYIKPTKGIFYLINIPSLDQSVXX

SEQ ID NO: 31955 - protein, 39 aa, Artificial Sequence
  Non-cyclic GFR-binding peptide
  MOD_RES (2), (4), (35), (36): Xaa is C or S
SXKXSKVIMPIKGYIKPTKGIFYLINIPSLDQSVXXPSA

SEQ ID NO: 31956 - protein, 34 aa, Artificial Sequence
  Non-cyclic GFR-binding peptide
  MOD_RES (33), (34): Xaa is C or S
  MOD_RES (11), (12), (13), (14), (15): Xaa is A or G
  MOD_RES (16), (17), (18), (19): Xaa is A or G or is absent
EEVIMYHYKLXXXXXXXXXKYLMSIPSTKVPAXX

SEQ ID NO: 31957 - protein, 32 aa, Artificial Sequence
  Non-cyclic GFR-binding peptide
  MOD_RES (11), (12), (13), (14), (15): Xaa is A or G
  MOD_RES (16), (17), (18), (19): Xaa is A or G or is absent
EVTMNRYKKLXXXXXXXXXFYLISIANMKEPV

SEQ ID NO: 31958 - protein, 38 aa, Artificial Sequence
  Non-cyclic GFR-binding peptide
  MOD_RES (2), (36), (37): Xaa is C or S
  MOD_RES (14), (15), (16), (17), (18): Xaa is A or G
  MOD_RES (19), (20), (21), (22): Xaa is A or G or is absent
AXSEVTMNRYKKLXXXXXXXXXFYLISIANMKEPVXXP

SEQ ID NO: 31959 - protein, 39 aa, Artificial Sequence
  Non-cyclic GFR-binding peptide
  MOD_RES (33), (34): Xaa is C or S
  MOD_RES (11), (12), (13), (14), (15): Xaa is A or G
  MOD_RES (16), (17), (18), (19): Xaa is A or G or is absent
EVTMNRHKRLXXXXXXXXXYYLISTASMKEPVXXPEPIG

SEQ ID NO: 31960 - protein, 40 aa, Artificial Sequence
  Non-cyclic GFR-binding peptide
  MOD_RES (2), (34), (35): Xaa is C or S
GXSRVVMNEYKFKIVNSSDDLYLVSIPELKTPAXXPKPVH

SEQ ID NO: 31961 - protein, 35 aa, Artificial Sequence
  Non-cyclic GFR-binding peptide
  MOD_RES (1), (34), (35): Xaa is C or S
  MOD_RES (12), (13), (14), (15), (16): Xaa is A or G
  MOD_RES (17), (18), (19), (20): Xaa is A or G or is absent
XEEVIMYHYKLXXXXXXXXXKYLMSIPSTKVPAXX

SEQ ID NO: 31962 - protein, 36 aa, Artificial Sequence
  Non-cyclic GFR-binding peptide
  MOD_RES (34), (35): Xaa is C or S
  MOD_RES (12), (13), (14), (15), (16): Xaa is A or G
  MOD_RES (17), (18), (19), (20): Xaa is A or G or is absent
SEVTMNEYKFKXXXXXXXXXLYLISIPEMKEPVXXP

SEQ ID NO: 31963 - protein, 38 aa, Artificial Sequence
  Non-cyclic GFR-binding peptide
  MOD_RES (1), (34), (35): Xaa is C or S
  MOD_RES (12), (13), (14), (15), (16): Xaa is A or G
  MOD_RES (17), (18), (19), (20): Xaa is A or G or is absent
XSKVIMPIKGYXXXXXXXXXFYLINIPSLDQSVXXPSA

SEQ ID NO: 31964 - protein, 42 aa, Artificial Sequence
  Non-cyclic GFR-binding peptide
  MOD_RES (1), (3), (37), (38): Xaa is C or S
  MOD_RES (15), (16), (17), (18), (19): Xaa is A or G
  MOD_RES (20), (21), (22), (23): Xaa is A or G or is absent
XGXSEVVMDYHYKLXXXXXXXXXKYLISIPSLRTPVXXTPPT

SEQ ID NO: 31965 - protein, 42 aa, Artificial Sequence
  Non-cyclic GFR-binding peptide
  MOD_RES (2), (4), (36), (37): Xaa is C or S
HXGXSRVVMNEYKFKIVNSSDDLYLVSIPELKTPAXXPKPVH

SEQ ID NO: 31966 - protein, 42 aa, Artificial Sequence
  Non-cyclic GFR-binding peptide
  MOD_RES (2), (36), (37): Xaa is C or S
  MOD_RES (14), (15), (16), (17), (18): Xaa is A or G
  MOD_RES (19), (20), (21), (22): Xaa is A or G or is absent
GXSRVVMNYHYKLXXXXXXXXXKYLVSIPSLKTPAXXPKPVH

SEQ ID NO: 31967 - protein, 34 aa, Artificial Sequence
  Non-cyclic GFR-binding peptide
  MOD_RES (33), (34): Xaa is C or S
  MOD_RES (11), (12), (13), (14), (15): Xaa is A or G
  MOD_RES (16), (17), (18), (19): Xaa is A or G or is absent
DVVMGRHKRLXXXXXXXXXYYLMSTASMKTPTXX

SEQ ID NO: 31968 - protein, 35 aa, Artificial Sequence
  Non-cyclic GFR-binding peptide
  MOD_RES (1), (3), (34), (35): Xaa is C or S
XKXSKVVMPIKGYVKPTRGVFYLINIPSLDQPVXX

SEQ ID NO: 31969 - protein, 33 aa, Artificial Sequence
  Non-cyclic GFR-binding peptide
  MOD_RES (31), (32): Xaa is C or S
EVTMNRYKKLVVNKNEDFYLISIANMKEPVXXP

SEQ ID NO: 31970 - protein, 39 aa, Artificial Sequence
  Non-cyclic GFR-binding peptide
  MOD_RES (33), (34): Xaa is C or S
  MOD_RES (11), (12), (13), (14), (15): Xaa is A or G
  MOD_RES (16), (17), (18), (19): Xaa is A or G or is absent
SRVIMPIKGYXXXXXXXXXFYLINIPSLAQPVXXPAASA

SEQ ID NO: 31971 - protein, 42 aa, Artificial Sequence
  Non-cyclic GFR-binding peptide
  MOD_RES (2), (4), (38), (39): Xaa is C or S
  MOD_RES (16), (17), (18), (19), (20): Xaa is A or G
  MOD_RES (21), (22), (23), (24): Xaa is A or G or is absent
RXGXAEVVMDRHKRLXXXXXXXXXYYLISTASLRAPVXXSAP

SEQ ID NO: 31972 - protein, 37 aa, Artificial Sequence
  Non-cyclic GFR-binding peptide
  MOD_RES (33), (34): Xaa is C or S
  MOD_RES (11), (12), (13), (14), (15): Xaa is A or G
  MOD_RES (16), (17), (18), (19): Xaa is A or G or is absent
EEVIMEYKFKXXXXXXXXXLYLMSIPETKVPAXXTSP

SEQ ID NO: 31973 - protein, 42 aa, Artificial Sequence
  Non-cyclic GFR-binding peptide
  MOD_RES (1), (3), (37), (38): Xaa is C or S
  MOD_RES (15), (16), (17), (18), (19): Xaa is A or G
  MOD_RES (20), (21), (22), (23): Xaa is A or G or is absent
XAXSEVTMNPIKGYXXXXXXXXXFYLINIPSMKEPVXXPEPI

SEQ ID NO: 31974 - protein, 36 aa, Artificial Sequence
  Non-cyclic GFR-binding peptide
  MOD_RES (2), (35), (36): Xaa is C or S
  MOD_RES (13), (14), (15), (16), (17): Xaa is A or G
  MOD_RES (18), (19), (20), (21): Xaa is A or G or is absent
GXEEVIMEYKFKXXXXXXXXXLYLMSIPETKVPAXX

SEQ ID NO: 31975 - protein, 41 aa, Artificial Sequence
  Non-cyclic GFR-binding peptide
  MOD_RES (2), (4), (38), (39): Xaa is C or S
  MOD_RES (16), (17), (18), (19), (20): Xaa is A or G
  MOD_RES (21), (22), (23), (24): Xaa is A or G or is absent
SXGXRDVVMGEYKFKXXXXXXXXXLYLMSIPEMKTPTXXPG

SEQ ID NO: 31976 - protein, 36 aa, Artificial Sequence
  Non-cyclic GFR-binding peptide
  MOD_RES (1), (35), (36): Xaa is C or S
  MOD_RES (13), (14), (15), (16), (17): Xaa is A or G
  MOD_RES (18), (19), (20), (21): Xaa is A or G or is absent
XAEVVMDRHKRLXXXXXXXXXYYLISTASLRAPVXX

SEQ ID NO: 31977 - protein, 39 aa, Artificial Sequence
  Non-cyclic GFR-binding peptide
  MOD_RES (33), (34): Xaa is C or S
  MOD_RES (11), (12), (13), (14), (15): Xaa is A or G
  MOD_RES (16), (17), (18), (19): Xaa is A or G or is absent
DVVMGRHKRLXXXXXXXXXYYLMSTASMKTPTXXPGASG

SEQ ID NO: 31978 - protein, 38 aa, Artificial Sequence
  Non-cyclic GFR-binding peptide
  MOD_RES (33), (34): Xaa is C or S
  MOD_RES (11), (12), (13), (14), (15): Xaa is A or G
  MOD_RES (16), (17), (18), (19): Xaa is A or G or is absent
SRVIMPIKGYXXXXXXXXXFYLINIPSLAQPVXXPAAS

SEQ ID NO: 31979 - protein, 32 aa, Artificial Sequence
  Non-cyclic GFR-binding peptide
  MOD_RES (11), (12), (13), (14), (15): Xaa is A or G
  MOD_RES (16), (17), (18), (19): Xaa is A or G or is absent
DVVMGEYKFKXXXXXXXXXLYLMSIPEMKTPT

SEQ ID NO: 31980 - protein, 40 aa, Artificial Sequence
  Non-cyclic GFR-binding peptide
  MOD_RES (1), (3), (36), (37): Xaa is C or S
  MOD_RES (14), (15), (16), (17), (18): Xaa is A or G
  MOD_RES (19), (20), (21), (22): Xaa is A or G or is absent
XGXEEVIMRHKRLXXXXXXXXXYYLMSTASTKVPAXXTSP

SEQ ID NO: 31981 - protein, 41 aa, Artificial Sequence
  Non-cyclic GFR-binding peptide
  MOD_RES (2), (36), (37): Xaa is C or S
  MOD_RES (14), (15), (16), (17), (18): Xaa is A or G
  MOD_RES (19), (20), (21), (22): Xaa is A or G or is absent
AXSEVTMNPIKGYXXXXXXXXXFYLINIPSMKEPVXXPEPI

SEQ ID NO: 31982 - protein, 35 aa, Artificial Sequence
  Non-cyclic GFR-binding peptide
  MOD_RES (1), (35): Xaa is C or S
  MOD_RES (13), (14), (15), (16), (17): Xaa is A or G
  MOD_RES (18), (19), (20), (21): Xaa is A or G or is absent
XSEVVMDYHYKLXXXXXXXXXKYLISIPSLRTPVX

SEQ ID NO: 31983 - protein, 35 aa, Artificial Sequence
  Non-cyclic GFR-binding peptide
  MOD_RES (2), (33), (34): Xaa is C or S
GXEEVIMEYKFKLLVRGNDLYLMSIPETKVPAXXT

SEQ ID NO: 31984 - protein, 39 aa, Artificial Sequence
  Non-cyclic GFR-binding peptide
  MOD_RES (2), (4), (36), (37): Xaa is C or S
RXGXESVAMGRHKRLYTVVGKDYYLISTASLKTPVXXAK

SEQ ID NO: 31985 - protein, 39 aa, Artificial Sequence
  Non-cyclic GFR-binding peptide
  MOD_RES (1), (33), (34): Xaa is C or S
XSEVTMNYHYKLVVNKNEDKYLISIPSMKEPVXXPEPIG

SEQ ID NO: 31986 - protein, 40 aa, Artificial Sequence
  Non-cyclic GFR-binding peptide
  MOD_RES (2), (34), (35): Xaa is C or S
AXSEVTMNPIKGYVVNKNEDFYLINIPSMKEPVXXPEPIG

SEQ ID NO: 31987 - protein, 39 aa, Artificial Sequence
  Non-cyclic GFR-binding peptide
  MOD_RES (34), (35): Xaa is C or S
  MOD_RES (12), (13), (14), (15), (16): Xaa is A or G
  MOD_RES (17), (18), (19), (20): Xaa is A or G or is absent
SEVVMDEYKFKXXXXXXXXXLYLISIPELRTPVXXTPPT

SEQ ID NO: 31988 - protein, 36 aa, Artificial Sequence
  Non-cyclic GFR-binding peptide
  MOD_RES (1), (33), (34): Xaa is C or S
XRDVVMGEYKFKIIQQKDNLYLMSIPEMKTPTXXPG

SEQ ID NO: 31989 - protein, 36 aa, Artificial Sequence
  Non-cyclic GFR-binding peptide
  MOD_RES (32), (33): Xaa is C or S
SEVTMNEYKFKVVNKNEDLYLISIPEMKEPVXXPEP

SEQ ID NO: 31990 - protein, 40 aa, Artificial Sequence
  Non-cyclic GFR-binding peptide
  MOD_RES (2), (4), (36), (37): Xaa is C or S
RXAXSEVTMNPIKGYVVNKNEDFYLINIPSMKEPVXXPEP

SEQ ID NO: 31991 - protein, 40 aa, Artificial Sequence
  Non-cyclic GFR-binding peptide
  MOD_RES (1), (3), (37), (38): Xaa is C or S
  MOD_RES (15), (16), (17), (18), (19): Xaa is A or G
  MOD_RES (20), (21), (22), (23): Xaa is A or G or is absent
XGXAEVVMDRHKRLXXXXXXXXXYYLISTASLRAPVXXSA

SEQ ID NO: 31992 - protein, 39 aa, Artificial Sequence
  Non-cyclic GFR-binding peptide
  MOD_RES (2), (36), (37): Xaa is C or S
  MOD_RES (14), (15), (16), (17), (18): Xaa is A or G
  MOD_RES (19), (20), (21), (22): Xaa is A or G or is absent
GXRDVVMGEYKFKXXXXXXXXXLYLMSIPEMKTPTXXPG

SEQ ID NO: 31993 - protein, 37 aa, Artificial Sequence
  Non-cyclic GFR-binding peptide
  MOD_RES (1), (35), (36): Xaa is C or S
  MOD_RES (13), (14), (15), (16), (17): Xaa is A or G
  MOD_RES (18), (19), (20), (21): Xaa is A or G or is absent
XESVAMGRHKRLXXXXXXXXXYYLISTASLKTPVXXA

SEQ ID NO: 31994 - protein, 32 aa, Artificial Sequence
  Non-cyclic GFR-binding peptide
  MOD_RES (1), (32): Xaa is C or S
XEEVIMYHYKLLLVRGNDKYLMSIPSTKVPAX

SEQ ID NO: 31995 - protein, 37 aa, Artificial Sequence
  Non-cyclic GFR-binding peptide
  MOD_RES (2), (36), (37): Xaa is C or S
  MOD_RES (14), (15), (16), (17), (18): Xaa is A or G
  MOD_RES (19), (20), (21), (22): Xaa is A or G or is absent
AXSEVTMNPIKGYXXXXXXXXXFYLINIPSMKEPVXX

SEQ ID NO: 31996 - protein, 37 aa, Artificial Sequence
  Non-cyclic GFR-binding peptide
  MOD_RES (1), (3), (36), (37): Xaa is C or S
  MOD_RES (14), (15), (16), (17), (18): Xaa is A or G
  MOD_RES (19), (20), (21), (22): Xaa is A or G or is absent
XGXEEVIMYHYKLXXXXXXXXXKYLMSIPSTKVPAXX

SEQ ID NO: 31997 - protein, 41 aa, Artificial Sequence
  Non-cyclic GFR-binding peptide
  MOD_RES (2), (4), (37), (38): Xaa is C or S
  MOD_RES (15), (16), (17), (18), (19): Xaa is A or G
  MOD_RES (20), (21), (22), (23): Xaa is A or G or is absent
SXKXSKVVMPIKGYXXXXXXXXXFYLINIPSLDQPVXXPSA

SEQ ID NO: 31998 - protein, 36 aa, Artificial Sequence
  Non-cyclic GFR-binding peptide
  MOD_RES (2), (34), (35): Xaa is C or S
GXRDVVMGYHYKLIIQQKDNKYLMSIPSMKTPTXXP

SEQ ID NO: 31999 - protein, 38 aa, Artificial Sequence
  Non-cyclic GFR-binding peptide
  MOD_RES (2), (33), (34): Xaa is C or S
GXEEVIMEYKFKLLVRGNDLYLMSIPETKVPAXXTSPV

SEQ ID NO: 32000 - protein, 36 aa, Artificial Sequence
  Non-cyclic GFR-binding peptide
  MOD_RES (31), (32): Xaa is C or S
SKVVMPIKGYVKPTRGVFYLINIPSLDQPVXXPSAS

SEQ ID NO: 32001 - protein, 39 aa, Artificial Sequence
  Non-cyclic GFR-binding peptide
  MOD_RES (2), (36), (37): Xaa is C or S
  MOD_RES (14), (15), (16), (17), (18): Xaa is A or G
  MOD_RES (19), (20), (21), (22): Xaa is A or G or is absent
GXRDVVMGYHYKLXXXXXXXXXKYLMSIPSMKTPTXXPG

SEQ ID NO: 32002 - protein, 34 aa, Artificial Sequence
  Non-cyclic GFR-binding peptide
  MOD_RES (1), (3): Xaa is C or S
XAXSEVTMNYHYKLVVNKNEDKYLISIPSMKEPV

SEQ ID NO: 32003 - protein, 36 aa, Artificial Sequence
  Non-cyclic GFR-binding peptide
  MOD_RES (2), (34), (35): Xaa is C or S
AXSEVTMNYHYKLVVNKNEDKYLISIPSMKEPVXXP

SEQ ID NO: 32004 - protein, 32 aa, Artificial Sequence
  Non-cyclic GFR-binding peptide
  MOD_RES (31), (32): Xaa is C or S
EVVMDRHKRLVVNNASDYYLISTASLRTPVXX

SEQ ID NO: 32005 - protein, 39 aa, Artificial Sequence
  Non-cyclic GFR-binding peptide
  MOD_RES (2), (34), (35): Xaa is C or S
AXSEVTMNRHKRLVVNKNEDYYLISTASMKEPVXXPEPI

SEQ ID NO: 32006 - protein, 33 aa, Artificial Sequence
  Non-cyclic GFR-binding peptide
  MOD_RES (31), (32): Xaa is C or S
EEVIMYHYKLLLVRGNDKYLMSIPSTKVPAXXT

SEQ ID NO: 32007 - protein, 36 aa, Artificial Sequence
  Non-cyclic GFR-binding peptide
  MOD_RES (31), (32): Xaa is C or S
EVTMNRYKKLVVNKNEDFYLISIANMKEPVXXPEPI

SEQ ID NO: 32008 - protein, 33 aa, Artificial Sequence
  Non-cyclic GFR-binding peptide
  MOD_RES (32), (33): Xaa is C or S
RDVVMGRHKRLIIQQKDNYYLMSTASMKTPTXX

SEQ ID NO: 32009 - protein, 36 aa, Artificial Sequence
  Non-cyclic GFR-binding peptide
  MOD_RES (2), (4), (35), (36): Xaa is C or S
SXKXSKVIMPIKGYIKPTKGIFYLINIPSLDQSVXX

SEQ ID NO: 32010 - protein, 36 aa, Artificial Sequence
  Non-cyclic GFR-binding peptide
  MOD_RES (1), (3), (35), (36): Xaa is C or S
XGXRDVVMGRHKRLIIQQKDNYYLMSTASMKTPTXX

SEQ ID NO: 32011 - protein, 34 aa, Artificial Sequence
  Non-cyclic GFR-binding peptide
  MOD_RES (2), (33), (34): Xaa is C or S
KXSKVIMPIKGYIKPTKGIFYLINIPSLDQSVXX

SEQ ID NO: 32012 - protein, 34 aa, Artificial Sequence
  Non-cyclic GFR-binding peptide
  MOD_RES (32), (33): Xaa is C or S
ESVAMGRHKRLYTVVGKDYYLISTASLKTPVXXA

SEQ ID NO: 32013 - protein, 34 aa, Artificial Sequence
  Non-cyclic GFR-binding peptide
  MOD_RES (1), (33), (34): Xaa is C or S
XSEVVMDEYKFKVVNNASDLYLISIPELRTPVXX

SEQ ID NO: 32014 - protein, 37 aa, Artificial Sequence
  Non-cyclic GFR-binding peptide
  MOD_RES (31), (32): Xaa is C or S
EVVMDYHYKLVVNNASDKYLISIPSLRTPVXXTPPTS

SEQ ID NO: 32015 - protein, 39 aa, Artificial Sequence
  Non-cyclic GFR-binding peptide
  MOD_RES (33), (34): Xaa is C or S
  MOD_RES (11), (12), (13), (14), (15): Xaa is A or G
  MOD_RES (16), (17), (18), (19): Xaa is A or G or is absent
DVVMGEYKFKXXXXXXXXXLYLMSIPEMKTPTXXPGASG

SEQ ID NO: 32016 - protein, 42 aa, Artificial Sequence
  Non-cyclic GFR-binding peptide
  MOD_RES (2), (4), (38), (39): Xaa is C or S
  MOD_RES (16), (17), (18), (19), (20): Xaa is A or G
  MOD_RES (21), (22), (23), (24): Xaa is A or G or is absent
RXGXSEVVMDYHYKLXXXXXXXXXKYLISIPSLRTPVXXTPP

SEQ ID NO: 32017 - protein, 43 aa, Artificial Sequence
  Non-cyclic GFR-binding peptide
  MOD_RES (2), (4), (38), (39): Xaa is C or S
  MOD_RES (16), (17), (18), (19), (20): Xaa is A or G
  MOD_RES (21), (22), (23), (24): Xaa is A or G or is absent
RXGXSEVVMDRHKRLXXXXXXXXXYYLISTASLRTPVXXTPPT

SEQ ID NO: 32018 - protein, 39 aa, Artificial Sequence
  Non-cyclic GFR-binding peptide
  MOD_RES (33), (34): Xaa is C or S
  MOD_RES (11), (12), (13), (14), (15): Xaa is A or G
  MOD_RES (16), (17), (18), (19): Xaa is A or G or is absent
DVVMGYHYKLXXXXXXXXXKYLMSIPSMKTPTXXPGASG

SEQ ID NO: 32019 - protein, 40 aa, Artificial Sequence
  Non-cyclic GFR-binding peptide
  MOD_RES (1), (35), (36): Xaa is C or S
  MOD_RES (13), (14), (15), (16), (17): Xaa is A or G
  MOD_RES (18), (19), (20), (21): Xaa is A or G or is absent
XRDVVMGYHYKLXXXXXXXXXKYLMSIPSMKTPTXXPGAS

SEQ ID NO: 32020 - protein, 39 aa, Artificial Sequence
  Non-cyclic GFR-binding peptide
  MOD_RES (1), (3), (34), (35): Xaa is C or S
XGXEEVIMRHKRLLLVRGNDYYLMSTASTKVPAXXTSPV

SEQ ID NO: 32021 - protein, 43 aa, Artificial Sequence
  Non-cyclic GFR-binding peptide
  MOD_RES (1), (3), (37), (38): Xaa is C or S
  MOD_RES (15), (16), (17), (18), (19): Xaa is A or G
  MOD_RES (20), (21), (22), (23): Xaa is A or G or is absent
XGXSEVVMDYHYKLXXXXXXXXXKYLISIPSLRTPVXXTPPTS

SEQ ID NO: 32022 - protein, 37 aa, Artificial Sequence
  Non-cyclic GFR-binding peptide
  MOD_RES (1), (3), (37): Xaa is C or S
  MOD_RES (15), (16), (17), (18), (19): Xaa is A or G
  MOD_RES (20), (21), (22), (23): Xaa is A or G or is absent
XAXSEVTMNEYKFKXXXXXXXXXLYLISIPEMKEPVX

SEQ ID NO: 32023 - protein, 37 aa, Artificial Sequence
  Non-cyclic GFR-binding peptide
  MOD_RES (1), (34), (35): Xaa is C or S
  MOD_RES (12), (13), (14), (15), (16): Xaa is A or G
  MOD_RES (17), (18), (19), (20): Xaa is A or G or is absent
XEEVIMEYKFKXXXXXXXXXLYLMSIPETKVPAXXTS

SEQ ID NO: 32024 - protein, 38 aa, Artificial Sequence
  Non-cyclic GFR-binding peptide
  MOD_RES (1), (33), (34): Xaa is C or S
XSEVTMNRYKKLVVNKNEDFYLISIANMKEPVXXPEPI

SEQ ID NO: 32025 - protein, 32 aa, Artificial Sequence
  Non-cyclic GFR-binding peptide
  MOD_RES (31), (32): Xaa is C or S
DVVMGYHYKLIIQQKDNKYLMSIPSMKTPTXX

SEQ ID NO: 32026 - protein, 40 aa, Artificial Sequence
  Non-cyclic GFR-binding peptide
  MOD_RES (2), (35), (36): Xaa is C or S
  MOD_RES (13), (14), (15), (16), (17): Xaa is A or G
  MOD_RES (18), (19), (20), (21): Xaa is A or G or is absent
GXEEVIMEYKFKXXXXXXXXXLYLMSIPETKVPAXXTSPV

SEQ ID NO: 32027 - protein, 34 aa, Artificial Sequence
  Non-cyclic GFR-binding peptide
  MOD_RES (33), (34): Xaa is C or S
  MOD_RES (11), (12), (13), (14), (15): Xaa is A or G
  MOD_RES (16), (17), (18), (19): Xaa is A or G or is absent
EEVIMRHKRLXXXXXXXXXYYLMSTASTKVPAXX

SEQ ID NO: 32028 - protein, 40 aa, Artificial Sequence
  Non-cyclic GFR-binding peptide
  MOD_RES (1), (34), (35): Xaa is C or S
  MOD_RES (12), (13), (14), (15), (16): Xaa is A or G
  MOD_RES (17), (18), (19), (20): Xaa is A or G or is absent
XSRVIMPIKGYXXXXXXXXXFYLINIPSLAQPVXXPAASA

SEQ ID NO: 32029 - protein, 37 aa, Artificial Sequence
  Non-cyclic GFR-binding peptide
  MOD_RES (1), (3), (37): Xaa is C or S
  MOD_RES (15), (16), (17), (18), (19): Xaa is A or G
  MOD_RES (20), (21), (22), (23): Xaa is A or G or is absent
XGXAEVVMDRHKRLXXXXXXXXXYYLISTASLRAPVX

SEQ ID NO: 32030 - protein, 37 aa, Artificial Sequence
  Non-cyclic GFR-binding peptide
  MOD_RES (33), (34): Xaa is C or S
  MOD_RES (11), (12), (13), (14), (15): Xaa is A or G
  MOD_RES (16), (17), (18), (19): Xaa is A or G or is absent
EEVIMRHKRLXXXXXXXXXYYLMSTASTKVPAXXTSP

SEQ ID NO: 32031 - protein, 38 aa, Artificial Sequence
  Non-cyclic GFR-binding peptide
  MOD_RES (1), (3), (35), (36): Xaa is C or S
XAXSEVTMNYHYKLVVNKNEDKYLISIPSMKEPVXXPE

SEQ ID NO: 32032 - protein, 35 aa, Artificial Sequence
  Non-cyclic GFR-binding peptide
  MOD_RES (2), (35): Xaa is C or S
  MOD_RES (13), (14), (15), (16), (17): Xaa is A or G
  MOD_RES (18), (19), (20), (21): Xaa is A or G or is absent
GXEEVIMYHYKLXXXXXXXXXKYLMSIPSTKVPAX

SEQ ID NO: 32033 - protein, 39 aa, Artificial Sequence
  Non-cyclic GFR-binding peptide
  MOD_RES (34), (35): Xaa is C or S
  MOD_RES (12), (13), (14), (15), (16): Xaa is A or G
  MOD_RES (17), (18), (19), (20): Xaa is A or G or is absent
AEVVMDRHKRLXXXXXXXXXYYLISTASLRAPVXXSAPA

SEQ ID NO: 32034 - protein, 40 aa, Artificial Sequence
  Non-cyclic GFR-binding peptide
  MOD_RES (1), (35), (36): Xaa is C or S
  MOD_RES (13), (14), (15), (16), (17): Xaa is A or G
  MOD_RES (18), (19), (20), (21): Xaa is A or G or is absent
XSEVVMDRHKRLXXXXXXXXXYYLISTASLRTPVXXTPPT

SEQ ID NO: 32035 - protein, 32 aa, Artificial Sequence
  Non-cyclic GFR-binding peptide
  MOD_RES (31), (32): Xaa is C or S
EVVMDEYKFKVVNNASDLYLISIPELRTPVXX

SEQ ID NO: 32036 - protein, 39 aa, Artificial Sequence
  Non-cyclic GFR-binding peptide
  MOD_RES (2), (4), (38), (39): Xaa is C or S
  MOD_RES (16), (17), (18), (19), (20): Xaa is A or G
  MOD_RES (21), (22), (23), (24): Xaa is A or G or is absent
RXGXSEVVMDRHKRLXXXXXXXXXYYLISTASLRTPVXX

SEQ ID NO: 32037 - protein, 41 aa, Artificial Sequence
  Non-cyclic GFR-binding peptide
  MOD_RES (2), (36), (37): Xaa is C or S
  MOD_RES (14), (15), (16), (17), (18): Xaa is A or G
  MOD_RES (19), (20), (21), (22): Xaa is A or G or is absent
GXAEVVMDRHKRLXXXXXXXXXYYLISTASLRAPVXXSAPA

SEQ ID NO: 32038 - protein, 40 aa, Artificial Sequence
  Non-cyclic GFR-binding peptide
  MOD_RES (34), (35): Xaa is C or S
  MOD_RES (12), (13), (14), (15), (16): Xaa is A or G
  MOD_RES (17), (18), (19), (20): Xaa is A or G or is absent
SEVTMNYHYKLXXXXXXXXXKYLISIPSMKEPVXXPEPIG

SEQ ID NO: 32039 - protein, 35 aa, Artificial Sequence
  Non-cyclic GFR-binding peptide
  MOD_RES (2), (2): Xaa is C or S
  MOD_RES (14), (15), (16), (17), (18): Xaa is A or G
  MOD_RES (19), (20), (21), (22): Xaa is A or G or is absent
GXAEVVMDRHKRLXXXXXXXXXYYLISTASLRAPV

SEQ ID NO: 32040 - protein, 36 aa, Artificial Sequence
  Non-cyclic GFR-binding peptide
  MOD_RES (1), (35), (36): Xaa is C or S
  MOD_RES (13), (14), (15), (16), (17): Xaa is A or G
  MOD_RES (18), (19), (20), (21): Xaa is A or G or is absent
XSEVVMDYHYKLXXXXXXXXXKYLISIPSLRTPVXX

SEQ ID NO: 32041 - protein, 34 aa, Artificial Sequence
  Non-cyclic GFR-binding peptide
  MOD_RES (1), (1): Xaa is C or S
  MOD_RES (13), (14), (15), (16), (17): Xaa is A or G
  MOD_RES (18), (19), (20), (21): Xaa is A or G or is absent
XRDVVMGRHKRLXXXXXXXXXYYLMSTASMKTPT

SEQ ID NO: 32042 - protein, 37 aa, Artificial Sequence
  Non-cyclic GFR-binding peptide
  MOD_RES (31), (32): Xaa is C or S
EVVMDRHKRLVVNNASDYYLISTASLRTPVXXTPPTS

SEQ ID NO: 32043 - protein, 36 aa, Artificial Sequence
  Non-cyclic GFR-binding peptide
  MOD_RES (1), (35), (36): Xaa is C or S
  MOD_RES (13), (14), (15), (16), (17): Xaa is A or G
  MOD_RES (18), (19), (20), (21): Xaa is A or G or is absent
XSEVTMNRYKKLXXXXXXXXXFYLISIANMKEPVXX

SEQ ID NO: 32044 - protein, 39 aa, Artificial Sequence
  Non-cyclic GFR-binding peptide
  MOD_RES (33), (34): Xaa is C or S
  MOD_RES (11), (12), (13), (14), (15): Xaa is A or G
  MOD_RES (16), (17), (18), (19): Xaa is A or G or is absent
RVVMNRHKRLXXXXXXXXXYYLVSTASLKTPAXXPKPVH

SEQ ID NO: 32045 - protein, 41 aa, Artificial Sequence
  Non-cyclic GFR-binding peptide
  MOD_RES (2), (4), (36), (37): Xaa is C or S
RXGXSEVVMDYHYKLVVNNASDKYLISIPSLRTPVXXTPPT

SEQ ID NO: 32046 - protein, 41 aa, Artificial Sequence
  Non-cyclic GFR-binding peptide
  MOD_RES (1), (3), (37), (38): Xaa is C or S
  MOD_RES (15), (16), (17), (18), (19): Xaa is A or G
  MOD_RES (20), (21), (22), (23): Xaa is A or G or is absent
XAXSEVTMNYHYKLXXXXXXXXXKYLISIPSMKEPVXXPEP

SEQ ID NO: 32047 - protein, 36 aa, Artificial Sequence
  Non-cyclic GFR-binding peptide
  MOD_RES (1), (3), (35), (36): Xaa is C or S
XGXAEVVMDRHKRLVVNNAADYYLISTASLRAPVXX

SEQ ID NO: 32048 - protein, 33 aa, Artificial Sequence
  Non-cyclic GFR-binding peptide
  MOD_RES (2), (2): Xaa is C or S
GXRDVVMGYHYKLIIQQKDNKYLMSIPSMKTPT

SEQ ID NO: 32049 - protein, 34 aa, Artificial Sequence
  Non-cyclic GFR-binding peptide
  MOD_RES (1), (33), (34): Xaa is C or S
XAEVVMDRHKRLVVNNAADYYLISTASLRAPVXX

SEQ ID NO: 32050 - protein, 36 aa, Artificial Sequence
  Non-cyclic GFR-binding peptide
  MOD_RES (32), (33): Xaa is C or S
RDVVMGYHYKLIIQQKDNKYLMSIPSMKTPTXXPGA

SEQ ID NO: 32051 - protein, 41 aa, Artificial Sequence
  Non-cyclic GFR-binding peptide
  MOD_RES (1), (3), (36), (37): Xaa is C or S
  MOD_RES (14), (15), (16), (17), (18): Xaa is A or G
  MOD_RES (19), (20), (21), (22): Xaa is A or G or is absent
XGXEEVIMYHYKLXXXXXXXXXKYLMSIPSTKVPAXXTSPV

SEQ ID NO: 32052 - protein, 37 aa, Artificial Sequence
  Non-cyclic GFR-binding peptide
  MOD_RES (1), (3), (35), (36): Xaa is C or S
XAXSEVTMNEYKFKVVNKNEDLYLISIPEMKEPVXXP

SEQ ID NO: 32053 - protein, 34 aa, Artificial Sequence
  Non-cyclic GFR-binding peptide
  MOD_RES (2), (2): Xaa is C or S
  MOD_RES (13), (14), (15), (16), (17): Xaa is A or G
  MOD_RES (18), (19), (20), (21): Xaa is A or G or is absent
GXEEVIMYHYKLXXXXXXXXXKYLMSIPSTKVPA

SEQ ID NO: 32054 - protein, 39 aa, Artificial Sequence
  Non-cyclic GFR-binding peptide
  MOD_RES (1), (3), (37), (38): Xaa is C or S
  MOD_RES (15), (16), (17), (18), (19): Xaa is A or G
  MOD_RES (20), (21), (22), (23): Xaa is A or G or is absent
XAXSEVTMNEYKFKXXXXXXXXXLYLISIPEMKEPVXXP

SEQ ID NO: 32055 - protein, 37 aa, Artificial Sequence
  Non-cyclic GFR-binding peptide
  MOD_RES (2), (4), (35), (36): Xaa is C or S
LXGXEEVIMYHYKLLLVRGNDKYLMSIPSTKVPAXXT

SEQ ID NO: 32056 - protein, 40 aa, Artificial Sequence
  Non-cyclic GFR-binding peptide
  MOD_RES (2), (4), (38), (39): Xaa is C or S
  MOD_RES (16), (17), (18), (19), (20): Xaa is A or G
  MOD_RES (21), (22), (23), (24): Xaa is A or G or is absent
RXGXSEVVMDRHKRLXXXXXXXXXYYLISTASLRTPVXXT

SEQ ID NO: 32057 - protein, 41 aa, Artificial Sequence
  Non-cyclic GFR-binding peptide
  MOD_RES (2), (4), (36), (37): Xaa is C or S
RXAXSEVTMNPIKGYVVNKNEDFYLINIPSMKEPVXXPEPI

SEQ ID NO: 32058 - protein, 34 aa, Artificial Sequence
  Non-cyclic GFR-binding peptide
  MOD_RES (2), (34): Xaa is C or S
GXAEVVMDRHKRLVVNNAADYYLISTASLRAPVX

SEQ ID NO: 32059 - protein, 38 aa, Artificial Sequence
  Non-cyclic GFR-binding peptide
  MOD_RES (33), (34): Xaa is C or S
  MOD_RES (11), (12), (13), (14), (15): Xaa is A or G
  MOD_RES (16), (17), (18), (19): Xaa is A or G or is absent
SKVIMPIKGYXXXXXXXXXFYLINIPSLDQSVXXPSAS

SEQ ID NO: 32060 - protein, 42 aa, Artificial Sequence
  Non-cyclic GFR-binding peptide
  MOD_RES (2), (4), (38), (39): Xaa is C or S
  MOD_RES (16), (17), (18), (19), (20): Xaa is A or G
  MOD_RES (21), (22), (23), (24): Xaa is A or G or is absent
RXAXSEVTMNRHKRLXXXXXXXXXYYLISTASMKEPVXXPEP

SEQ ID NO: 32061 - protein, 37 aa, Artificial Sequence
  Non-cyclic GFR-binding peptide
  MOD_RES (2), (36), (37): Xaa is C or S
  MOD_RES (14), (15), (16), (17), (18): Xaa is A or G
  MOD_RES (19), (20), (21), (22): Xaa is A or G or is absent
AXSEVTMNRYKKLXXXXXXXXXFYLISIANMKEPVXX

SEQ ID NO: 32062 - protein, 41 aa, Artificial Sequence
  Non-cyclic GFR-binding peptide
  MOD_RES (1), (35), (36): Xaa is C or S
  MOD_RES (13), (14), (15), (16), (17): Xaa is A or G
  MOD_RES (18), (19), (20), (21): Xaa is A or G or is absent
XSRVVMNEYKFKXXXXXXXXXLYLVSIPELKTPAXXPKPVH

SEQ ID NO: 32063 - protein, 39 aa, Artificial Sequence
  Non-cyclic GFR-binding peptide
  MOD_RES (1), (35), (36): Xaa is C or S
  MOD_RES (13), (14), (15), (16), (17): Xaa is A or G
  MOD_RES (18), (19), (20), (21): Xaa is A or G or is absent
XSEVTMNPIKGYXXXXXXXXXFYLINIPSMKEPVXXPEP

SEQ ID NO: 32064 - protein, 33 aa, Artificial Sequence
  Non-cyclic GFR-binding peptide
  MOD_RES (1), (1): Xaa is C or S
  MOD_RES (12), (13), (14), (15), (16): Xaa is A or G
  MOD_RES (17), (18), (19), (20): Xaa is A or G or is absent
XEEVIMYHYKLXXXXXXXXXKYLMSIPSTKVPA

SEQ ID NO: 32065 - protein, 41 aa, Artificial Sequence
  Non-cyclic GFR-binding peptide
  MOD_RES (1), (3), (35), (36): Xaa is C or S
XAXSEVTMNYHYKLVVNKNEDKYLISIPSMKEPVXXPEPIG

SEQ ID NO: 32066 - protein, 40 aa, Artificial Sequence
  Non-cyclic GFR-binding peptide
  MOD_RES (1), (3), (37), (38): Xaa is C or S
  MOD_RES (15), (16), (17), (18), (19): Xaa is A or G
  MOD_RES (20), (21), (22), (23): Xaa is A or G or is absent
XGXRDVVMGEYKFKXXXXXXXXXLYLMSIPEMKTPTXXPG

SEQ ID NO: 32067 - protein, 40 aa, Artificial Sequence
  Non-cyclic GFR-binding peptide
  MOD_RES (1), (35), (36): Xaa is C or S
  MOD_RES (13), (14), (15), (16), (17): Xaa is A or G
  MOD_RES (18), (19), (20), (21): Xaa is A or G or is absent
XESVAMGRHKRLXXXXXXXXXYYLISTASLKTPVXXAKSA

SEQ ID NO: 32068 - protein, 37 aa, Artificial Sequence
  Non-cyclic GFR-binding peptide
  MOD_RES (31), (32): Xaa is C or S
SKVIMPIKGYIKPTKGIFYLINIPSLDQSVXXPSASA

SEQ ID NO: 32069 - protein, 33 aa, Artificial Sequence
  Non-cyclic GFR-binding peptide
  MOD_RES (2), (33): Xaa is C or S
KXSKVIMPIKGYIKPTKGIFYLINIPSLDQSVX

SEQ ID NO: 32070 - protein, 34 aa, Artificial Sequence
  Non-cyclic GFR-binding peptide
  MOD_RES (33), (34): Xaa is C or S
  MOD_RES (11), (12), (13), (14), (15): Xaa is A or G
  MOD_RES (16), (17), (18), (19): Xaa is A or G or is absent
EEVIMEYKFKXXXXXXXXXLYLMSIPETKVPAXX

SEQ ID NO: 32071 - protein, 37 aa, Artificial Sequence
  Non-cyclic GFR-binding peptide
  MOD_RES (1), (32), (33): Xaa is C or S
XSKVVMPIKGYVKPTRGVFYLINIPSLDQPVXXPSAS

SEQ ID NO: 32072 - protein, 33 aa, Artificial Sequence
  Non-cyclic GFR-binding peptide
  MOD_RES (32), (33): Xaa is C or S
SEVVMDYHYKLVVNNASDKYLISIPSLRTPVXX

SEQ ID NO: 32073 - protein, 33 aa, Artificial Sequence
  Non-cyclic GFR-binding peptide
  MOD_RES (1), (33): Xaa is C or S
XAEVVMDRHKRLVVNNAADYYLISTASLRAPVX

SEQ ID NO: 32074 - protein, 39 aa, Artificial Sequence
  Non-cyclic GFR-binding peptide
  MOD_RES (1), (33), (34): Xaa is C or S
XRDVVMGYHYKLIIQQKDNKYLMSIPSMKTPTXXPGASG

SEQ ID NO: 32075 - protein, 31 aa, Artificial Sequence
  Non-cyclic GFR-binding peptide
  MOD_RES (31), (31): Xaa is C or S
SVAMGRHKRLYTVVGKDYYLISTASLKTPVX

SEQ ID NO: 32076 - protein, 38 aa, Artificial Sequence
  Non-cyclic GFR-binding peptide
  MOD_RES (32), (33): Xaa is C or S
SRVVMNEYKFKIVNSSDDLYLVSIPELKTPAXXPKPVH

SEQ ID NO: 32077 - protein, 38 aa, Artificial Sequence
  Non-cyclic GFR-binding peptide
  MOD_RES (2), (4), (38): Xaa is C or S
  MOD_RES (16), (17), (18), (19), (20): Xaa is A or G
  MOD_RES (21), (22), (23), (24): Xaa is A or G or is absent
RXAXSEVTMNPIKGYXXXXXXXXXFYLINIPSMKEPVX

SEQ ID NO: 32078 - protein, 43 aa, Artificial Sequence
  Non-cyclic GFR-binding peptide
  MOD_RES (2), (4), (38), (39): Xaa is C or S
  MOD_RES (16), (17), (18), (19), (20): Xaa is A or G
  MOD_RES (21), (22), (23), (24): Xaa is A or G or is absent
RXAXSEVTMNEYKFKXXXXXXXXXLYLISIPEMKEPVXXPEPI

SEQ ID NO: 32079 - protein, 38 aa, Artificial Sequence
  Non-cyclic GFR-binding peptide
  MOD_RES (2), (34), (35): Xaa is C or S
AXSEVTMNRYKKLVVNKNEDFYLISIANMKEPVXXPEP

SEQ ID NO: 32080 - protein, 36 aa, Artificial Sequence
  Non-cyclic GFR-binding peptide
  MOD_RES (2), (35), (36): Xaa is C or S
  MOD_RES (13), (14), (15), (16), (17): Xaa is A or G
  MOD_RES (18), (19), (20), (21): Xaa is A or G or is absent
GXEEVIMRHKRLXXXXXXXXXYYLMSTASTKVPAXX

SEQ ID NO: 32081 - protein, 38 aa, Artificial Sequence
  Non-cyclic GFR-binding peptide
  MOD_RES (1), (3), (36), (37): Xaa is C or S
  MOD_RES (14), (15), (16), (17), (18): Xaa is A or G
  MOD_RES (19), (20), (21), (22): Xaa is A or G or is absent
XKXSRVIMPIKGYXXXXXXXXXFYLINIPSLAQPVXXP

SEQ ID NO: 32082 - protein, 37 aa, Artificial Sequence
  Non-cyclic GFR-binding peptide
  MOD_RES (31), (32): Xaa is C or S
EVTMNEYKFKVVNKNEDLYLISIPEMKEPVXXPEPIG

SEQ ID NO: 32083 - protein, 38 aa, Artificial Sequence
  Non-cyclic GFR-binding peptide
  MOD_RES (34), (35): Xaa is C or S
  MOD_RES (12), (13), (14), (15), (16): Xaa is A or G
  MOD_RES (17), (18), (19), (20): Xaa is A or G or is absent
SEVTMNRYKKLXXXXXXXXXFYLISIANMKEPVXXPEP

SEQ ID NO: 32084 - protein, 38 aa, Artificial Sequence
  Non-cyclic GFR-binding peptide
  MOD_RES (2), (34), (35): Xaa is C or S
GXRDVVMGRHKRLIIQQKDNYYLMSTASMKTPTXXPGA

SEQ ID NO: 32085 - protein, 37 aa, Artificial Sequence
  Non-cyclic GFR-binding peptide
  MOD_RES (1), (3), (35), (36): Xaa is C or S
XGXSEVVMDYHYKLVVNNASDKYLISIPSLRTPVXXT

SEQ ID NO: 32086 - protein, 38 aa, Artificial Sequence
  Non-cyclic GFR-binding peptide
  MOD_RES (2), (34), (35): Xaa is C or S
GXAEVVMDRHKRLVVNNAADYYLISTASLRAPVXXSAP

SEQ ID NO: 32087 - protein, 32 aa, Artificial Sequence
  Non-cyclic GFR-binding peptide
  MOD_RES (1), (32): Xaa is C or S
XSRVIMPIKGYVKPKRGVFYLINIPSLAQPVX

SEQ ID NO: 32088 - protein, 36 aa, Artificial Sequence
  Non-cyclic GFR-binding peptide
  MOD_RES (2), (36): Xaa is C or S
  MOD_RES (14), (15), (16), (17), (18): Xaa is A or G
  MOD_RES (19), (20), (21), (22): Xaa is A or G or is absent
GXRDVVMGYHYKLXXXXXXXXXKYLMSIPSMKTPTX

SEQ ID NO: 32089 - protein, 36 aa, Artificial Sequence
  Non-cyclic GFR-binding peptide
  MOD_RES (2), (36): Xaa is C or S
  MOD_RES (14), (15), (16), (17), (18): Xaa is A or G
  MOD_RES (19), (20), (21), (22): Xaa is A or G or is absent
GXSEVVMDYHYKLXXXXXXXXXKYLISIPSLRTPVX

SEQ ID NO: 32090 - protein, 40 aa, Artificial Sequence
  Non-cyclic GFR-binding peptide
  MOD_RES (34), (35): Xaa is C or S
  MOD_RES (12), (13), (14), (15), (16): Xaa is A or G
  MOD_RES (17), (18), (19), (20): Xaa is A or G or is absent
SRVVMNYHYKLXXXXXXXXXKYLVSIPSLKTPAXXPKPVH

SEQ ID NO: 32091 - protein, 36 aa, Artificial Sequence
  Non-cyclic GFR-binding peptide
  MOD_RES (1), (3), (34), (35): Xaa is C or S
XGXEEVIMYHYKLLLVRGNDKYLMSIPSTKVPAXXT

SEQ ID NO: 32092 - protein, 34 aa, Artificial Sequence
  Non-cyclic GFR-binding peptide
  MOD_RES (34), (34): Xaa is C or S
  MOD_RES (12), (13), (14), (15), (16): Xaa is A or G
  MOD_RES (17), (18), (19), (20): Xaa is A or G or is absent
RDVVMGRHKRLXXXXXXXXXYYLMSTASMKTPTX

SEQ ID NO: 32093 - protein, 37 aa, Artificial Sequence
  Non-cyclic GFR-binding peptide
  MOD_RES (34), (35): Xaa is C or S
  MOD_RES (12), (13), (14), (15), (16): Xaa is A or G
  MOD_RES (17), (18), (19), (20): Xaa is A or G or is absent
SEVVMDEYKFKXXXXXXXXXLYLISIPELRTPVXXTP

SEQ ID NO: 32094 - protein, 35 aa, Artificial Sequence
  Non-cyclic GFR-binding peptide
  MOD_RES (1), (33), (34): Xaa is C or S
XSEVTMNYHYKLVVNKNEDKYLISIPSMKEPVXXP

SEQ ID NO: 32095 - protein, 33 aa, Artificial Sequence
  Non-cyclic GFR-binding peptide
  MOD_RES (2), (33): Xaa is C or S
GXEEVIMYHYKLLLVRGNDKYLMSIPSTKVPAX

SEQ ID NO: 32096 - protein, 33 aa, Artificial Sequence
  Non-cyclic GFR-binding peptide
  MOD_RES (1), (1): Xaa is C or S
  MOD_RES (12), (13), (14), (15), (16): Xaa is A or G
  MOD_RES (17), (18), (19), (20): Xaa is A or G or is absent
XSRVIMPIKGYXXXXXXXXXFYLINIPSLAQPV

SEQ ID NO: 32097 - protein, 40 aa, Artificial Sequence
  Non-cyclic GFR-binding peptide
  MOD_RES (2), (34), (35): Xaa is C or S
GXRDVVMGEYKFKIIQQKDNLYLMSIPEMKTPTXXPGASG

SEQ ID NO: 32098 - protein, 31 aa, Artificial Sequence
  Non-cyclic GFR-binding peptide
  MOD_RES (31), (31): Xaa is C or S
SKVVMPIKGYVKPTRGVFYLINIPSLDQPVX

SEQ ID NO: 32099 - protein, 37 aa, Artificial Sequence
  Non-cyclic GFR-binding peptide
  MOD_RES (1), (35), (36): Xaa is C or S
  MOD_RES (13), (14), (15), (16), (17): Xaa is A or G
  MOD_RES (18), (19), (20), (21): Xaa is A or G or is absent
XSEVTMNPIKGYXXXXXXXXXFYLINIPSMKEPVXXP

SEQ ID NO: 32100 - protein, 38 aa, Artificial Sequence
  Non-cyclic GFR-binding peptide
  MOD_RES (34), (35): Xaa is C or S
  MOD_RES (12), (13), (14), (15), (16): Xaa is A or G
  MOD_RES (17), (18), (19), (20): Xaa is A or G or is absent
RDVVMGYHYKLXXXXXXXXXKYLMSIPSMKTPTXXPGA

SEQ ID NO: 32101 - protein, 35 aa, Artificial Sequence
  Non-cyclic GFR-binding peptide
  MOD_RES (33), (34): Xaa is C or S
  MOD_RES (11), (12), (13), (14), (15): Xaa is A or G
  MOD_RES (16), (17), (18), (19): Xaa is A or G or is absent
EVVMDYHYKLXXXXXXXXXKYLISIPSLRTPVXXT

SEQ ID NO: 32102 - protein, 35 aa, Artificial Sequence
  Non-cyclic GFR-binding peptide
  MOD_RES (33), (34): Xaa is C or S
  MOD_RES (11), (12), (13), (14), (15): Xaa is A or G
  MOD_RES (16), (17), (18), (19): Xaa is A or G or is absent
EVVMDEYKFKXXXXXXXXXLYLISIPELRTPVXXT

SEQ ID NO: 32103 - protein, 37 aa, Artificial Sequence
  Non-cyclic GFR-binding peptide
  MOD_RES (33), (34): Xaa is C or S
  MOD_RES (11), (12), (13), (14), (15): Xaa is A or G
  MOD_RES (16), (17), (18), (19): Xaa is A or G or is absent
EVTMNRHKRLXXXXXXXXXYYLISTASMKEPVXXPEP

SEQ ID NO: 32104 - protein, 35 aa, Artificial Sequence
  Non-cyclic GFR-binding peptide
  MOD_RES (2), (4): Xaa is C or S
RXGXAEVVMDRHKRLVVNNAADYYLISTASLRAPV

SEQ ID NO: 32105 - protein, 40 aa, Artificial Sequence
  Non-cyclic GFR-binding peptide
  MOD_RES (2), (4), (35), (36): Xaa is C or S
LXGXEEVIMEYKFKLLVRGNDLYLMSIPETKVPAXXTSPV

SEQ ID NO: 32106 - protein, 38 aa, Artificial Sequence
  Non-cyclic GFR-binding peptide
  MOD_RES (2), (4), (35), (36): Xaa is C or S
SXKXSRVIMPIKGYVKPKRGVFYLINIPSLAQPVXXPA

SEQ ID NO: 32107 - protein, 40 aa, Artificial Sequence
  Non-cyclic GFR-binding peptide
  MOD_RES (2), (4), (38), (39): Xaa is C or S
  MOD_RES (16), (17), (18), (19), (20): Xaa is A or G
  MOD_RES (21), (22), (23), (24): Xaa is A or G or is absent
RXGXSEVVMDYHYKLXXXXXXXXXKYLISIPSLRTPVXXT

SEQ ID NO: 32108 - protein, 37 aa, Artificial Sequence
  Non-cyclic GFR-binding peptide
  MOD_RES (1), (3), (37): Xaa is C or S
  MOD_RES (15), (16), (17), (18), (19): Xaa is A or G
  MOD_RES (20), (21), (22), (23): Xaa is A or G or is absent
XAXSEVTMNRHKRLXXXXXXXXXYYLISTASMKEPVX

SEQ ID NO: 32109 - protein, 35 aa, Artificial Sequence
  Non-cyclic GFR-binding peptide
  MOD_RES (1), (3), (35): Xaa is C or S
XAXSEVTMNYHYKLVVNKNEDKYLISIPSMKEPVX

SEQ ID NO: 32110 - protein, 40 aa, Artificial Sequence
  Non-cyclic GFR-binding peptide
  MOD_RES (2), (4), (38), (39): Xaa is C or S
  MOD_RES (16), (17), (18), (19), (20): Xaa is A or G
  MOD_RES (21), (22), (23), (24): Xaa is A or G or is absent
SXGXRDVVMGRHKRLXXXXXXXXXYYLMSTASMKTPTXXP

SEQ ID NO: 32111 - protein, 34 aa, Artificial Sequence
  Non-cyclic GFR-binding peptide
  MOD_RES (33), (34): Xaa is C or S
  MOD_RES (11), (12), (13), (14), (15): Xaa is A or G
  MOD_RES (16), (17), (18), (19): Xaa is A or G or is absent
EVTMNRYKKLXXXXXXXXXFYLISIANMKEPVXX

SEQ ID NO: 32112 - protein, 32 aa, Artificial Sequence
  Non-cyclic GFR-binding peptide
  MOD_RES (2), (2): Xaa is C or S
KXSKVIMPIKGYIKPTKGIFYLINIPSLDQSV

SEQ ID NO: 32113 - protein, 35 aa, Artificial Sequence
  Non-cyclic GFR-binding peptide
  MOD_RES (1), (32), (33): Xaa is C or S
XEEVIMYHYKLLLVRGNDKYLMSIPSTKVPAXXTS

SEQ ID NO: 32114 - protein, 40 aa, Artificial Sequence
  Non-cyclic GFR-binding peptide
  MOD_RES (2), (36), (37): Xaa is C or S
  MOD_RES (14), (15), (16), (17), (18): Xaa is A or G
  MOD_RES (19), (20), (21), (22): Xaa is A or G or is absent
GXAEVVMDRHKRLXXXXXXXXXYYLISTASLRAPVXXSAP

SEQ ID NO: 32115 - protein, 33 aa, Artificial Sequence
  Non-cyclic GFR-binding peptide
  MOD_RES (31), (32): Xaa is C or S
EEVIMEYKFKLLVRGNDLYLMSIPETKVPAXXT

SEQ ID NO: 32116 - protein, 39 aa, Artificial Sequence
  Non-cyclic GFR-binding peptide
  MOD_RES (1), (3), (37), (38): Xaa is C or S
  MOD_RES (15), (16), (17), (18), (19): Xaa is A or G
  MOD_RES (20), (21), (22), (23): Xaa is A or G or is absent
XGXRDVVMGYHYKLXXXXXXXXXKYLMSIPSMKTPTXXP

SEQ ID NO: 32117 - protein, 36 aa, Artificial Sequence
  Non-cyclic GFR-binding peptide
  MOD_RES (33), (34): Xaa is C or S
  MOD_RES (11), (12), (13), (14), (15): Xaa is A or G
  MOD_RES (16), (17), (18), (19): Xaa is A or G or is absent
EVVMDRHKRLXXXXXXXXXYYLISTASLRAPVXXSA

SEQ ID NO: 32118 - protein, 36 aa, Artificial Sequence
  Non-cyclic GFR-binding peptide
  MOD_RES (2), (34), (35): Xaa is C or S
GXSEVVMDRHKRLVVNNASDYYLISTASLRTPVXXT

SEQ ID NO: 32119 - protein, 37 aa, Artificial Sequence
  Non-cyclic GFR-binding peptide
  MOD_RES (2), (34), (35): Xaa is C or S
GXSEVVMDEYKFKVVNNASDLYLISIPELRTPVXXTP

SEQ ID NO: 32120 - protein, 38 aa, Artificial Sequence
  Non-cyclic GFR-binding peptide
  MOD_RES (1), (34), (35): Xaa is C or S
  MOD_RES (12), (13), (14), (15), (16): Xaa is A or G
  MOD_RES (17), (18), (19), (20): Xaa is A or G or is absent
XSRVIMPIKGYXXXXXXXXXFYLINIPSLAQPVXXPAA

SEQ ID NO: 32121 - protein, 42 aa, Artificial Sequence
  Non-cyclic GFR-binding peptide
  MOD_RES (1), (3), (37), (38): Xaa is C or S
  MOD_RES (15), (16), (17), (18), (19): Xaa is A or G
  MOD_RES (20), (21), (22), (23): Xaa is A or G or is absent
XGXSEVVMDEYKFKXXXXXXXXXLYLISIPELRTPVXXTPPT

SEQ ID NO: 32122 - protein, 39 aa, Artificial Sequence
  Non-cyclic GFR-binding peptide
  MOD_RES (1), (33), (34): Xaa is C or S
XSEVVMDRHKRLVVNNASDYYLISTASLRTPVXXTPPTS

SEQ ID NO: 32123 - protein, 41 aa, Artificial Sequence
  Non-cyclic GFR-binding peptide
  MOD_RES (2), (36), (37): Xaa is C or S
  MOD_RES (14), (15), (16), (17), (18): Xaa is A or G
  MOD_RES (19), (20), (21), (22): Xaa is A or G or is absent
AXSEVTMNRHKRLXXXXXXXXXYYLISTASMKEPVXXPEPI

SEQ ID NO: 32124 - protein, 34 aa, Artificial Sequence
  Non-cyclic GFR-binding peptide
  MOD_RES (1), (1): Xaa is C or S
  MOD_RES (13), (14), (15), (16), (17): Xaa is A or G
  MOD_RES (18), (19), (20), (21): Xaa is A or G or is absent
XRDVVMGYHYKLXXXXXXXXXKYLMSIPSMKTPT

SEQ ID NO: 32125 - protein, 43 aa, Artificial Sequence
  Non-cyclic GFR-binding peptide
  MOD_RES (1), (3), (37), (38): Xaa is C or S
  MOD_RES (15), (16), (17), (18), (19): Xaa is A or G
  MOD_RES (20), (21), (22), (23): Xaa is A or G or is absent
XAXSEVTMNEYKFKXXXXXXXXXLYLISIPEMKEPVXXPEPIG

SEQ ID NO: 32126 - protein, 39 aa, Artificial Sequence
  Non-cyclic GFR-binding peptide
  MOD_RES (2), (4), (36), (37): Xaa is C or S
RXAXSEVTMNRYKKLVVNKNEDFYLISIANMKEPVXXPE

SEQ ID NO: 32127 - protein, 35 aa, Artificial Sequence
  Non-cyclic GFR-binding peptide
  MOD_RES (1), (32), (33): Xaa is C or S
XEEVIMRHKRLLLVRGNDYYLMSTASTKVPAXXTS

SEQ ID NO: 32128 - protein, 39 aa, Artificial Sequence
  Non-cyclic GFR-binding peptide
  MOD_RES (2), (36), (37): Xaa is C or S
  MOD_RES (14), (15), (16), (17), (18): Xaa is A or G
  MOD_RES (19), (20), (21), (22): Xaa is A or G or is absent
GXAEVVMDRHKRLXXXXXXXXXYYLISTASLRAPVXXSA

SEQ ID NO: 32129 - protein, 36 aa, Artificial Sequence
  Non-cyclic GFR-binding peptide
  MOD_RES (1), (3): Xaa is C or S
  MOD_RES (15), (16), (17), (18), (19): Xaa is A or G
  MOD_RES (20), (21), (22), (23): Xaa is A or G or is absent
XGXSEVVMDYHYKLXXXXXXXXXKYLISIPSLRTPV

SEQ ID NO: 32130 - protein, 40 aa, Artificial Sequence
  Non-cyclic GFR-binding peptide
  MOD_RES (2), (34), (35): Xaa is C or S
AXSEVTMNRHKRLVVNKNEDYYLISTASMKEPVXXPEPIG

SEQ ID NO: 32131 - protein, 36 aa, Artificial Sequence
  Non-cyclic GFR-binding peptide
  MOD_RES (1), (33), (34): Xaa is C or S
XRDVVMGRHKRLIIQQKDNYYLMSTASMKTPTXXPG

SEQ ID NO: 32132 - protein, 40 aa, Artificial Sequence
  Non-cyclic GFR-binding peptide
  MOD_RES (34), (35): Xaa is C or S
  MOD_RES (12), (13), (14), (15), (16): Xaa is A or G
  MOD_RES (17), (18), (19), (20): Xaa is A or G or is absent
RDVVMGEYKFKXXXXXXXXXLYLMSIPEMKTPTXXPGASG

SEQ ID NO: 32133 - protein, 37 aa, Artificial Sequence
  Non-cyclic GFR-binding peptide
  MOD_RES (2), (36), (37): Xaa is C or S
  MOD_RES (14), (15), (16), (17), (18): Xaa is A or G
  MOD_RES (19), (20), (21), (22): Xaa is A or G or is absent
AXSEVTMNRHKRLXXXXXXXXXYYLISTASMKEPVXX

SEQ ID NO: 32134 - protein, 38 aa, Artificial Sequence
  Non-cyclic GFR-binding peptide
  MOD_RES (2), (4), (38): Xaa is C or S
  MOD_RES (16), (17), (18), (19), (20): Xaa is A or G
  MOD_RES (21), (22), (23), (24): Xaa is A or G or is absent
RXGXSEVVMDYHYKLXXXXXXXXXKYLISIPSLRTPVX

SEQ ID NO: 32135 - protein, 39 aa, Artificial Sequence
  Non-cyclic GFR-binding peptide
  MOD_RES (1), (3), (37), (38): Xaa is C or S
  MOD_RES (15), (16), (17), (18), (19): Xaa is A or G
  MOD_RES (20), (21), (22), (23): Xaa is A or G or is absent
XGXAEVVMDRHKRLXXXXXXXXXYYLISTASLRAPVXXS

SEQ ID NO: 32136 - protein, 39 aa, Artificial Sequence
  Non-cyclic GFR-binding peptide
  MOD_RES (2), (4), (36), (37): Xaa is C or S
RXGXSEVVMDEYKFKVVNNASDLYLISIPELRTPVXXTP

SEQ ID NO: 32137 - protein, 31 aa, Artificial Sequence
  Non-cyclic GFR-binding peptide
RDVVMGEYKFKIIQQKDNLYLMSIPEMKTPT

SEQ ID NO: 32138 - protein, 38 aa, Artificial Sequence
  Non-cyclic GFR-binding peptide
  MOD_RES (1), (3), (34), (35): Xaa is C or S
XKXSKVVMPIKGYVKPTRGVFYLINIPSLDQPVXXPSA

SEQ ID NO: 32139 - protein, 36 aa, Artificial Sequence
  Non-cyclic GFR-binding peptide
  MOD_RES (2), (34), (35): Xaa is C or S
AXSEVTMNPIKGYVVNKNEDFYLINIPSMKEPVXXP

SEQ ID NO: 32140 - protein, 33 aa, Artificial Sequence
  Non-cyclic GFR-binding peptide
  MOD_RES (31), (32): Xaa is C or S
DVVMGRHKRLIIQQKDNYYLMSTASMKTPTXXP

SEQ ID NO: 32141 - protein, 35 aa, Artificial Sequence
  Non-cyclic GFR-binding peptide
  MOD_RES (2), (4): Xaa is C or S
RXAXSEVTMNPIKGYVVNKNEDFYLINIPSMKEPV

SEQ ID NO: 32142 - protein, 35 aa, Artificial Sequence
  Non-cyclic GFR-binding peptide
  MOD_RES (1), (34), (35): Xaa is C or S
  MOD_RES (12), (13), (14), (15), (16): Xaa is A or G
  MOD_RES (17), (18), (19), (20): Xaa is A or G or is absent
XEEVIMEYKFKXXXXXXXXXLYLMSIPETKVPAXX

SEQ ID NO: 32143 - protein, 39 aa, Artificial Sequence
  Non-cyclic GFR-binding peptide
  MOD_RES (33), (34): Xaa is C or S
  MOD_RES (11), (12), (13), (14), (15): Xaa is A or G
  MOD_RES (16), (17), (18), (19): Xaa is A or G or is absent
EEVIMRHKRLXXXXXXXXXYYLMSTASTKVPAXXTSPVR

SEQ ID NO: 32144 - protein, 36 aa, Artificial Sequence
  Non-cyclic GFR-binding peptide
  MOD_RES (2), (36): Xaa is C or S
  MOD_RES (14), (15), (16), (17), (18): Xaa is A or G
  MOD_RES (19), (20), (21), (22): Xaa is A or G or is absent
AXSEVTMNEYKFKXXXXXXXXXLYLISIPEMKEPVX

SEQ ID NO: 32145 - protein, 40 aa, Artificial Sequence
  Non-cyclic GFR-binding peptide
  MOD_RES (2), (34), (35): Xaa is C or S
GXSEVVMDYHYKLVVNNASDKYLISIPSLRTPVXXTPPTS

SEQ ID NO: 32146 - protein, 41 aa, Artificial Sequence
  Non-cyclic GFR-binding peptide
  MOD_RES (1), (3), (36), (37): Xaa is C or S
  MOD_RES (14), (15), (16), (17), (18): Xaa is A or G
  MOD_RES (19), (20), (21), (22): Xaa is A or G or is absent
XGXEEVIMRHKRLXXXXXXXXXYYLMSTASTKVPAXXTSPV

SEQ ID NO: 32147 - protein, 37 aa, Artificial Sequence
  Non-cyclic GFR-binding peptide
  MOD_RES (2), (4), (35), (36): Xaa is C or S
SXKXSKVVMPIKGYVKPTRGVFYLINIPSLDQPVXXP

SEQ ID NO: 32148 - protein, 37 aa, Artificial Sequence
  Non-cyclic GFR-binding peptide
  MOD_RES (1), (32), (33): Xaa is C or S
XEEVIMRHKRLLLVRGNDYYLMSTASTKVPAXXTSPV

SEQ ID NO: 32149 - protein, 33 aa, Artificial Sequence
  Non-cyclic GFR-binding peptide
  MOD_RES (1), (32), (33): Xaa is C or S
XSKVVMPIKGYVKPTRGVFYLINIPSLDQPVXX

SEQ ID NO: 32150 - protein, 33 aa, Artificial Sequence
  Non-cyclic GFR-binding peptide
  MOD_RES (1), (3): Xaa is C or S
XGXEEVIMRHKRLLLVRGNDYYLMSTASTKVPA

SEQ ID NO: 32151 - protein, 34 aa, Artificial Sequence
  Non-cyclic GFR-binding peptide
  MOD_RES (1), (3): Xaa is C or S
XGXSEVVMDRHKRLVVNNASDYYLISTASLRTPV

SEQ ID NO: 32152 - protein, 32 aa, Artificial Sequence
  Non-cyclic GFR-binding peptide
  MOD_RES (31), (32): Xaa is C or S
DVVMGRHKRLIIQQKDNYYLMSTASMKTPTXX

SEQ ID NO: 32153 - protein, 40 aa, Artificial Sequence
  Non-cyclic GFR-binding peptide
  MOD_RES (2), (35), (36): Xaa is C or S
  MOD_RES (13), (14), (15), (16), (17): Xaa is A or G
  MOD_RES (18), (19), (20), (21): Xaa is A or G or is absent
GXEEVIMYHYKLXXXXXXXXXKYLMSIPSTKVPAXXTSPV

SEQ ID NO: 32154 - protein, 35 aa, Artificial Sequence
  Non-cyclic GFR-binding peptide
  MOD_RES (34), (35): Xaa is C or S
  MOD_RES (12), (13), (14), (15), (16): Xaa is A or G
  MOD_RES (17), (18), (19), (20): Xaa is A or G or is absent
ESVAMGRHKRLXXXXXXXXXYYLISTASLKTPVXX

SEQ ID NO: 32155 - protein, 34 aa, Artificial Sequence
  Non-cyclic GFR-binding peptide
  MOD_RES (1), (1): Xaa is C or S
  MOD_RES (13), (14), (15), (16), (17): Xaa is A or G
  MOD_RES (18), (19), (20), (21): Xaa is A or G or is absent
XSEVVMDEYKFKXXXXXXXXXLYLISIPELRTPV

SEQ ID NO: 32156 - protein, 42 aa, Artificial Sequence
  Non-cyclic GFR-binding peptide
  MOD_RES (2), (4), (38), (39): Xaa is C or S
  MOD_RES (16), (17), (18), (19), (20): Xaa is A or G
  MOD_RES (21), (22), (23), (24): Xaa is A or G or is absent
RXAXSEVTMNYHYKLXXXXXXXXXKYLISIPSMKEPVXXPEP

SEQ ID NO: 32157 - protein, 38 aa, Artificial Sequence
  Non-cyclic GFR-binding peptide
  MOD_RES (2), (34), (35): Xaa is C or S
AXSEVTMNEYKFKVVNKNEDLYLISIPEMKEPVXXPEP

SEQ ID NO: 32158 - protein, 42 aa, Artificial Sequence
  Non-cyclic GFR-binding peptide
  MOD_RES (2), (36), (37): Xaa is C or S
  MOD_RES (14), (15), (16), (17), (18): Xaa is A or G
  MOD_RES (19), (20), (21), (22): Xaa is A or G or is absent
GXRDVVMGRHKRLXXXXXXXXXYYLMSTASMKTPTXXPGASG

SEQ ID NO: 32159 - protein, 38 aa, Artificial Sequence
  Non-cyclic GFR-binding peptide
  MOD_RES (1), (3), (37), (38): Xaa is C or S
  MOD_RES (15), (16), (17), (18), (19): Xaa is A or G
  MOD_RES (20), (21), (22), (23): Xaa is A or G or is absent
XGXSEVVMDYHYKLXXXXXXXXXKYLISIPSLRTPVXX

SEQ ID NO: 32160 - protein, 41 aa, Artificial Sequence
  Non-cyclic GFR-binding peptide
  MOD_RES (2), (36), (37): Xaa is C or S
  MOD_RES (14), (15), (16), (17), (18): Xaa is A or G
  MOD_RES (19), (20), (21), (22): Xaa is A or G or is absent
GXSEVVMDRHKRLXXXXXXXXXYYLISTASLRTPVXXTPPT

SEQ ID NO: 32161 - protein, 32 aa, Artificial Sequence
  Non-cyclic GFR-binding peptide
  MOD_RES (1), (1): Xaa is C or S
XAEVVMDRHKRLVVNNAADYYLISTASLRAPV

SEQ ID NO: 32162 - protein, 33 aa, Artificial Sequence
  Non-cyclic GFR-binding peptide
  MOD_RES (32), (33): Xaa is C or S
AEVVMDRHKRLVVNNAADYYLISTASLRAPVXX

SEQ ID NO: 32163 - protein, 32 aa, Artificial Sequence
  Non-cyclic GFR-binding peptide
  MOD_RES (1), (32): Xaa is C or S
XEEVIMEYKFKLLVRGNDLYLMSIPETKVPAX

SEQ ID NO: 32164 - protein, 39 aa, Artificial Sequence
  Non-cyclic GFR-binding peptide
  MOD_RES (1), (35), (36): Xaa is C or S
  MOD_RES (13), (14), (15), (16), (17): Xaa is A or G
  MOD_RES (18), (19), (20), (21): Xaa is A or G or is absent
XESVAMGRHKRLXXXXXXXXXYYLISTASLKTPVXXAKS

SEQ ID NO: 32165 - protein, 33 aa, Artificial Sequence
  Non-cyclic GFR-binding peptide
  MOD_RES (33), (33): Xaa is C or S
  MOD_RES (11), (12), (13), (14), (15): Xaa is A or G
  MOD_RES (16), (17), (18), (19): Xaa is A or G or is absent
EVVMDYHYKLXXXXXXXXXKYLISIPSLRTPVX

SEQ ID NO: 32166 - protein, 44 aa, Artificial Sequence
  Non-cyclic GFR-binding peptide
  MOD_RES (2), (4), (38), (39): Xaa is C or S
  MOD_RES (16), (17), (18), (19), (20): Xaa is A or G
  MOD_RES (21), (22), (23), (24): Xaa is A or G or is absent
RXGXESVAMGRHKRLXXXXXXXXXYYLISTASLKTPVXXAKSAK

SEQ ID NO: 32167 - protein, 37 aa, Artificial Sequence
  Non-cyclic GFR-binding peptide
  MOD_RES (2), (4), (36), (37): Xaa is C or S
RXAXSEVTMNRYKKLVVNKNEDFYLISIANMKEPVXX

SEQ ID NO: 32168 - protein, 36 aa, Artificial Sequence
  Non-cyclic GFR-binding peptide
  MOD_RES (2), (33), (34): Xaa is C or S
KXSRVIMPIKGYVKPKRGVFYLINIPSLAQPVXXPA

SEQ ID NO: 32169 - protein, 40 aa, Artificial Sequence
  Non-cyclic GFR-binding peptide
  MOD_RES (1), (35), (36): Xaa is C or S
  MOD_RES (13), (14), (15), (16), (17): Xaa is A or G
  MOD_RES (18), (19), (20), (21): Xaa is A or G or is absent
XRDVVMGRHKRLXXXXXXXXXYYLMSTASMKTPTXXPGAS

SEQ ID NO: 32170 - protein, 34 aa, Artificial Sequence
  Non-cyclic GFR-binding peptide
  MOD_RES (32), (33): Xaa is C or S
SEVTMNPIKGYVVNKNEDFYLINIPSMKEPVXXP

SEQ ID NO: 32171 - protein, 36 aa, Artificial Sequence
  Non-cyclic GFR-binding peptide
  MOD_RES (33), (34): Xaa is C or S
  MOD_RES (11), (12), (13), (14), (15): Xaa is A or G
  MOD_RES (16), (17), (18), (19): Xaa is A or G or is absent
EVVMDRHKRLXXXXXXXXXYYLISTASLRTPVXXTP

SEQ ID NO: 32172 - protein, 42 aa, Artificial Sequence
  Non-cyclic GFR-binding peptide
  MOD_RES (2), (4), (37), (38): Xaa is C or S
  MOD_RES (15), (16), (17), (18), (19): Xaa is A or G
  MOD_RES (20), (21), (22), (23): Xaa is A or G or is absent
LXGXEEVIMEYKFKXXXXXXXXXLYLMSIPETKVPAXXTSPV

SEQ ID NO: 32173 - protein, 37 aa, Artificial Sequence
  Non-cyclic GFR-binding peptide
  MOD_RES (2), (35), (36): Xaa is C or S
  MOD_RES (13), (14), (15), (16), (17): Xaa is A or G
  MOD_RES (18), (19), (20), (21): Xaa is A or G or is absent
KXSKVIMPIKGYXXXXXXXXXFYLINIPSLDQSVXXP

SEQ ID NO: 32174 - protein, 39 aa, Artificial Sequence
  Non-cyclic GFR-binding peptide
  MOD_RES (1), (3), (35), (36): Xaa is C or S
XAXSEVTMNYHYKLVVNKNEDKYLISIPSMKEPVXXPEP

SEQ ID NO: 32175 - protein, 38 aa, Artificial Sequence
  Non-cyclic GFR-binding peptide
  MOD_RES (32), (33): Xaa is C or S
RDVVMGYHYKLIIQQKDNKYLMSIPSMKTPTXXPGASG

SEQ ID NO: 32176 - protein, 37 aa, Artificial Sequence
  Non-cyclic GFR-binding peptide
  MOD_RES (1), (35), (36): Xaa is C or S
  MOD_RES (13), (14), (15), (16), (17): Xaa is A or G
  MOD_RES (18), (19), (20), (21): Xaa is A or G or is absent
XAEVVMDRHKRLXXXXXXXXXYYLISTASLRAPVXXS

SEQ ID NO: 32177 - protein, 34 aa, Artificial Sequence
  Non-cyclic GFR-binding peptide
  MOD_RES (33), (34): Xaa is C or S
  MOD_RES (11), (12), (13), (14), (15): Xaa is A or G
  MOD_RES (16), (17), (18), (19): Xaa is A or G or is absent
EVTMNRHKRLXXXXXXXXXYYLISTASMKEPVXX

SEQ ID NO: 32178 - protein, 35 aa, Artificial Sequence
  Non-cyclic GFR-binding peptide
  MOD_RES (32), (33): Xaa is C or S
SEVVMDRHKRLVVNNASDYYLISTASLRTPVXXTP

SEQ ID NO: 32179 - protein, 43 aa, Artificial Sequence
  Non-cyclic GFR-binding peptide
  MOD_RES (2), (4), (37), (38): Xaa is C or S
  MOD_RES (15), (16), (17), (18), (19): Xaa is A or G
  MOD_RES (20), (21), (22), (23): Xaa is A or G or is absent
SXKXSRVIMPIKGYXXXXXXXXXFYLINIPSLAQPVXXPAASA

SEQ ID NO: 32180 - protein, 33 aa, Artificial Sequence
  Non-cyclic GFR-binding peptide
  MOD_RES (12), (13), (14), (15), (16): Xaa is A or G
  MOD_RES (17), (18), (19), (20): Xaa is A or G or is absent
ESVAMGRHKRLXXXXXXXXXYYLISTASLKTPV

SEQ ID NO: 32181 - protein, 41 aa, Artificial Sequence
  Non-cyclic GFR-binding peptide
  MOD_RES (1), (3), (35), (36): Xaa is C or S
XGXRDVVMGEYKFKIIQQKDNLYLMSIPEMKTPTXXPGASG

SEQ ID NO: 32182 - protein, 35 aa, Artificial Sequence
  Non-cyclic GFR-binding peptide
  MOD_RES (34), (35): Xaa is C or S
  MOD_RES (12), (13), (14), (15), (16): Xaa is A or G
  MOD_RES (17), (18), (19), (20): Xaa is A or G or is absent
SEVTMNYHYKLXXXXXXXXXKYLISIPSMKEPVXX

SEQ ID NO: 32183 - protein, 36 aa, Artificial Sequence
  Non-cyclic GFR-binding peptide
  MOD_RES (34), (35): Xaa is C or S
  MOD_RES (12), (13), (14), (15), (16): Xaa is A or G
  MOD_RES (17), (18), (19), (20): Xaa is A or G or is absent
SEVTMNRHKRLXXXXXXXXXYYLISTASMKEPVXXP

SEQ ID NO: 32184 - protein, 34 aa, Artificial Sequence
  Non-cyclic GFR-binding peptide
  MOD_RES (1), (3): Xaa is C or S
XAXSEVTMNRYKKLVVNKNEDFYLISIANMKEPV

SEQ ID NO: 32185 - protein, 39 aa, Artificial Sequence
  Non-cyclic GFR-binding peptide
  MOD_RES (2), (4), (37), (38): Xaa is C or S
  MOD_RES (15), (16), (17), (18), (19): Xaa is A or G
  MOD_RES (20), (21), (22), (23): Xaa is A or G or is absent
LXGXEEVIMYHYKLXXXXXXXXXKYLMSIPSTKVPAXXT

SEQ ID NO: 32186 - protein, 35 aa, Artificial Sequence
  Non-cyclic GFR-binding peptide
  MOD_RES (32), (33): Xaa is C or S
RDVVMGEYKFKIIQQKDNLYLMSIPEMKTPTXXPG

SEQ ID NO: 32187 - protein, 38 aa, Artificial Sequence
  Non-cyclic GFR-binding peptide
  MOD_RES (2), (33), (34): Xaa is C or S
KXSRVIMPIKGYVKPKRGVFYLINIPSLAQPVXXPAAS

SEQ ID NO: 32188 - protein, 34 aa, Artificial Sequence
  Non-cyclic GFR-binding peptide
  MOD_RES (32), (33): Xaa is C or S
SEVTMNRHKRLVVNKNEDYYLISTASMKEPVXXP

SEQ ID NO: 32189 - protein, 39 aa, Artificial Sequence
  Non-cyclic GFR-binding peptide
  MOD_RES (2), (36), (37): Xaa is C or S
  MOD_RES (14), (15), (16), (17), (18): Xaa is A or G
  MOD_RES (19), (20), (21), (22): Xaa is A or G or is absent
AXSEVTMNEYKFKXXXXXXXXXLYLISIPEMKEPVXXPE

SEQ ID NO: 32190 - protein, 41 aa, Artificial Sequence
  Non-cyclic GFR-binding peptide
  MOD_RES (2), (4), (38), (39): Xaa is C or S
  MOD_RES (16), (17), (18), (19), (20): Xaa is A or G
  MOD_RES (21), (22), (23), (24): Xaa is A or G or is absent
RXGXESVAMGRHKRLXXXXXXXXXYYLISTASLKTPVXXAK

SEQ ID NO: 32191 - protein, 35 aa, Artificial Sequence
  Non-cyclic GFR-binding peptide
  MOD_RES (1), (3), (34), (35): Xaa is C or S
XGXEEVIMRHKRLLLVRGNDYYLMSTASTKVPAXX

SEQ ID NO: 32192 - protein, 37 aa, Artificial Sequence
  Non-cyclic GFR-binding peptide
  MOD_RES (33), (34): Xaa is C or S
  MOD_RES (11), (12), (13), (14), (15): Xaa is A or G
  MOD_RES (16), (17), (18), (19): Xaa is A or G or is absent
DVVMGYHYKLXXXXXXXXXKYLMSIPSMKTPTXXPGA

SEQ ID NO: 32193 - protein, 35 aa, Artificial Sequence
  Non-cyclic GFR-binding peptide
  MOD_RES (1), (35): Xaa is C or S
  MOD_RES (13), (14), (15), (16), (17): Xaa is A or G
  MOD_RES (18), (19), (20), (21): Xaa is A or G or is absent
XSEVVMDEYKFKXXXXXXXXXLYLISIPELRTPVX

SEQ ID NO: 32194 - protein, 32 aa, Artificial Sequence
  Non-cyclic GFR-binding peptide
  MOD_RES (11), (12), (13), (14), (15): Xaa is A or G
  MOD_RES (16), (17), (18), (19): Xaa is A or G or is absent
EEVIMRHKRLXXXXXXXXXYYLMSTASTKVPA

SEQ ID NO: 32195 - protein, 37 aa, Artificial Sequence
  Non-cyclic GFR-binding peptide
  MOD_RES (1), (3), (34), (35): Xaa is C or S
XKXSKVIMPIKGYIKPTKGIFYLINIPSLDQSVXXPS

SEQ ID NO: 32196 - protein, 37 aa, Artificial Sequence
  Non-cyclic GFR-binding peptide
  MOD_RES (34), (35): Xaa is C or S
  MOD_RES (12), (13), (14), (15), (16): Xaa is A or G
  MOD_RES (17), (18), (19), (20): Xaa is A or G or is absent
ESVAMGRHKRLXXXXXXXXXYYLISTASLKTPVXXAK

SEQ ID NO: 32197 - protein, 35 aa, Artificial Sequence
  Non-cyclic GFR-binding peptide
  MOD_RES (2), (4): Xaa is C or S
RXGXESVAMGRHKRLYTVVGKDYYLISTASLKTPV

SEQ ID NO: 32198 - protein, 43 aa, Artificial Sequence
  Non-cyclic GFR-binding peptide
  MOD_RES (2), (4), (38), (39): Xaa is C or S
  MOD_RES (16), (17), (18), (19), (20): Xaa is A or G
  MOD_RES (21), (22), (23), (24): Xaa is A or G or is absent
SXGXRDVVMGYHYKLXXXXXXXXXKYLMSIPSMKTPTXXPGAS

SEQ ID NO: 32199 - protein, 40 aa, Artificial Sequence
  Non-cyclic GFR-binding peptide
  MOD_RES (2), (36), (37): Xaa is C or S
  MOD_RES (14), (15), (16), (17), (18): Xaa is A or G
  MOD_RES (19), (20), (21), (22): Xaa is A or G or is absent
AXSEVTMNEYKFKXXXXXXXXXLYLISIPEMKEPVXXPEP

SEQ ID NO: 32200 - protein, 36 aa, Artificial Sequence
  Non-cyclic GFR-binding peptide
  MOD_RES (33), (34): Xaa is C or S
  MOD_RES (11), (12), (13), (14), (15): Xaa is A or G
  MOD_RES (16), (17), (18), (19): Xaa is A or G or is absent
DVVMGYHYKLXXXXXXXXXKYLMSIPSMKTPTXXPG

SEQ ID NO: 32201 - protein, 38 aa, Artificial Sequence
  Non-cyclic GFR-binding peptide
  MOD_RES (2), (36), (37): Xaa is C or S
  MOD_RES (14), (15), (16), (17), (18): Xaa is A or G
  MOD_RES (19), (20), (21), (22): Xaa is A or G or is absent
GXRDVVMGRHKRLXXXXXXXXXYYLMSTASMKTPTXXP

SEQ ID NO: 32202 - protein, 39 aa, Artificial Sequence
  Non-cyclic GFR-binding peptide
  MOD_RES (1), (33), (34): Xaa is C or S
XSEVVMDEYKFKVVNNASDLYLISIPELRTPVXXTPPTS

SEQ ID NO: 32203 - protein, 34 aa, Artificial Sequence
  Non-cyclic GFR-binding peptide
  MOD_RES (34), (34): Xaa is C or S
  MOD_RES (12), (13), (14), (15), (16): Xaa is A or G
  MOD_RES (17), (18), (19), (20): Xaa is A or G or is absent
SEVTMNYHYKLXXXXXXXXXKYLISIPSMKEPVX

SEQ ID NO: 32204 - protein, 34 aa, Artificial Sequence
  Non-cyclic GFR-binding peptide
  MOD_RES (1), (1): Xaa is C or S
  MOD_RES (13), (14), (15), (16), (17): Xaa is A or G
  MOD_RES (18), (19), (20), (21): Xaa is A or G or is absent
XSEVVMDYHYKLXXXXXXXXXKYLISIPSLRTPV

SEQ ID NO: 32205 - protein, 35 aa, Artificial Sequence
  Non-cyclic GFR-binding peptide
  MOD_RES (31), (32): Xaa is C or S
EVTMNEYKFKVVNKNEDLYLISIPEMKEPVXXPEP

SEQ ID NO: 32206 - protein, 39 aa, Artificial Sequence
  Non-cyclic GFR-binding peptide
  MOD_RES (1), (34), (35): Xaa is C or S
  MOD_RES (12), (13), (14), (15), (16): Xaa is A or G
  MOD_RES (17), (18), (19), (20): Xaa is A or G or is absent
XSKVVMPIKGYXXXXXXXXXFYLINIPSLDQPVXXPSAS

SEQ ID NO: 32207 - protein, 42 aa, Artificial Sequence
  Non-cyclic GFR-binding peptide
  MOD_RES (2), (36), (37): Xaa is C or S
  MOD_RES (14), (15), (16), (17), (18): Xaa is A or G
  MOD_RES (19), (20), (21), (22): Xaa is A or G or is absent
GXSEVVMDRHKRLXXXXXXXXXYYLISTASLRTPVXXTPPTS

SEQ ID NO: 32208 - protein, 31 aa, Artificial Sequence
  Non-cyclic GFR-binding peptide
SEVTMNYHYKLVVNKNEDKYLISIPSMKEPV

SEQ ID NO: 32209 - protein, 34 aa, Artificial Sequence
  Non-cyclic GFR-binding peptide
  MOD_RES (31), (32): Xaa is C or S
EVTMNYHYKLVVNKNEDKYLISIPSMKEPVXXPE

SEQ ID NO: 32210 - protein, 39 aa, Artificial Sequence
  Non-cyclic GFR-binding peptide
  MOD_RES (2), (4), (38), (39): Xaa is C or S
  MOD_RES (16), (17), (18), (19), (20): Xaa is A or G
  MOD_RES (21), (22), (23), (24): Xaa is A or G or is absent
RXGXSEVVMDEYKFKXXXXXXXXXLYLISIPELRTPVXX

SEQ ID NO: 32211 - protein, 40 aa, Artificial Sequence
  Non-cyclic GFR-binding peptide
  MOD_RES (2), (36), (37): Xaa is C or S
  MOD_RES (14), (15), (16), (17), (18): Xaa is A or G
  MOD_RES (19), (20), (21), (22): Xaa is A or G or is absent
AXSEVTMNRYKKLXXXXXXXXXFYLISIANMKEPVXXPEP

SEQ ID NO: 32212 - protein, 37 aa, Artificial Sequence
  Non-cyclic GFR-binding peptide
  MOD_RES (33), (34): Xaa is C or S
  MOD_RES (11), (12), (13), (14), (15): Xaa is A or G
  MOD_RES (16), (17), (18), (19): Xaa is A or G or is absent
EVVMDYHYKLXXXXXXXXXKYLISIPSLRTPVXXTPP

SEQ ID NO: 32213 - protein, 38 aa, Artificial Sequence
  Non-cyclic GFR-binding peptide
  MOD_RES (1), (3), (35), (36): Xaa is C or S
XGXRDVVMGYHYKLIIQQKDNKYLMSIPSMKTPTXXPG

SEQ ID NO: 32214 - protein, 37 aa, Artificial Sequence
  Non-cyclic GFR-binding peptide
  MOD_RES (1), (3), (37): Xaa is C or S
  MOD_RES (15), (16), (17), (18), (19): Xaa is A or G
  MOD_RES (20), (21), (22), (23): Xaa is A or G or is absent
XGXSEVVMDEYKFKXXXXXXXXXLYLISIPELRTPVX

SEQ ID NO: 32215 - protein, 34 aa, Artificial Sequence
  Non-cyclic GFR-binding peptide
  MOD_RES (1), (1): Xaa is C or S
  MOD_RES (13), (14), (15), (16), (17): Xaa is A or G
  MOD_RES (18), (19), (20), (21): Xaa is A or G or is absent
XAEVVMDRHKRLXXXXXXXXXYYLISTASLRAPV

SEQ ID NO: 32216 - protein, 35 aa, Artificial Sequence
  Non-cyclic GFR-binding peptide
  MOD_RES (1), (35): Xaa is C or S
  MOD_RES (13), (14), (15), (16), (17): Xaa is A or G
  MOD_RES (18), (19), (20), (21): Xaa is A or G or is absent
XRDVVMGYHYKLXXXXXXXXXKYLMSIPSMKTPTX

SEQ ID NO: 32217 - protein, 42 aa, Artificial Sequence
  Non-cyclic GFR-binding peptide
  MOD_RES (2), (4), (36), (37): Xaa is C or S
RXGXSEVVMDEYKFKVVNNASDLYLISIPELRTPVXXTPPTS

SEQ ID NO: 32218 - protein, 41 aa, Artificial Sequence
  Non-cyclic GFR-binding peptide
  MOD_RES (1), (3), (36), (37): Xaa is C or S
  MOD_RES (14), (15), (16), (17), (18): Xaa is A or G
  MOD_RES (19), (20), (21), (22): Xaa is A or G or is absent
XGXEEVIMEYKFKXXXXXXXXXLYLMSIPETKVPAXXTSPV

SEQ ID NO: 32219 - protein, 42 aa, Artificial Sequence
  Non-cyclic GFR-binding peptide
  MOD_RES (1), (3), (37), (38): Xaa is C or S
  MOD_RES (15), (16), (17), (18), (19): Xaa is A or G
  MOD_RES (20), (21), (22), (23): Xaa is A or G or is absent
XGXSEVVMDRHKRLXXXXXXXXXYYLISTASLRTPVXXTPPT

SEQ ID NO: 32220 - protein, 35 aa, Artificial Sequence
  Non-cyclic GFR-binding peptide
  MOD_RES (33), (34): Xaa is C or S
  MOD_RES (11), (12), (13), (14), (15): Xaa is A or G
  MOD_RES (16), (17), (18), (19): Xaa is A or G or is absent
DVVMGEYKFKXXXXXXXXXLYLMSIPEMKTPTXXP

SEQ ID NO: 32221 - protein, 33 aa, Artificial Sequence
  Non-cyclic GFR-binding peptide
  MOD_RES (32), (33): Xaa is C or S
SEVTMNRYKKLVVNKNEDFYLISIANMKEPVXX

SEQ ID NO: 32222 - protein, 36 aa, Artificial Sequence
  Non-cyclic GFR-binding peptide
  MOD_RES (1), (35), (36): Xaa is C or S
  MOD_RES (13), (14), (15), (16), (17): Xaa is A or G
  MOD_RES (18), (19), (20), (21): Xaa is A or G or is absent
XSEVTMNEYKFKXXXXXXXXXLYLISIPEMKEPVXX

SEQ ID NO: 32223 - protein, 41 aa, Artificial Sequence
  Non-cyclic GFR-binding peptide
  MOD_RES (1), (35), (36): Xaa is C or S
  MOD_RES (13), (14), (15), (16), (17): Xaa is A or G
  MOD_RES (18), (19), (20), (21): Xaa is A or G or is absent
XSRVVMNYHYKLXXXXXXXXXKYLVSIPSLKTPAXXPKPVH

SEQ ID NO: 32224 - protein, 36 aa, Artificial Sequence
  Non-cyclic GFR-binding peptide
  MOD_RES (1), (34), (35): Xaa is C or S
  MOD_RES (12), (13), (14), (15), (16): Xaa is A or G
  MOD_RES (17), (18), (19), (20): Xaa is A or G or is absent
XSKVIMPIKGYXXXXXXXXXFYLINIPSLDQSVXXP

SEQ ID NO: 32225 - protein, 44 aa, Artificial Sequence
  Non-cyclic GFR-binding peptide
  MOD_RES (2), (4), (38), (39): Xaa is C or S
  MOD_RES (16), (17), (18), (19), (20): Xaa is A or G
  MOD_RES (21), (22), (23), (24): Xaa is A or G or is absent
SXGXRDVVMGRHKRLXXXXXXXXXYYLMSTASMKTPTXXPGASG

SEQ ID NO: 32226 - protein, 38 aa, Artificial Sequence
  Non-cyclic GFR-binding peptide
  MOD_RES (32), (33): Xaa is C or S
SEVTMNPIKGYVVNKNEDFYLINIPSMKEPVXXPEPIG

SEQ ID NO: 32227 - protein, 37 aa, Artificial Sequence
  Non-cyclic GFR-binding peptide
  MOD_RES (33), (34): Xaa is C or S
  MOD_RES (11), (12), (13), (14), (15): Xaa is A or G
  MOD_RES (16), (17), (18), (19): Xaa is A or G or is absent
DVVMGEYKFKXXXXXXXXXLYLMSIPEMKTPTXXPGA

SEQ ID NO: 32228 - protein, 41 aa, Artificial Sequence
  Non-cyclic GFR-binding peptide
  MOD_RES (2), (4), (38), (39): Xaa is C or S
  MOD_RES (16), (17), (18), (19), (20): Xaa is A or G
  MOD_RES (21), (22), (23), (24): Xaa is A or G or is absent
RXGXAEVVMDRHKRLXXXXXXXXXYYLISTASLRAPVXXSA

SEQ ID NO: 32229 - protein, 41 aa, Artificial Sequence
  Non-cyclic GFR-binding peptide
  MOD_RES (1), (3), (35), (36): Xaa is C or S
XAXSEVTMNRYKKLVVNKNEDFYLISIANMKEPVXXPEPIG

SEQ ID NO: 32230 - protein, 35 aa, Artificial Sequence
  Non-cyclic GFR-binding peptide
  MOD_RES (31), (32): Xaa is C or S
SRVIMPIKGYVKPKRGVFYLINIPSLAQPVXXPAA

SEQ ID NO: 32231 - protein, 39 aa, Artificial Sequence
  Non-cyclic GFR-binding peptide
  MOD_RES (1), (3), (35), (36): Xaa is C or S
XAXSEVTMNEYKFKVVNKNEDLYLISIPEMKEPVXXPEP

SEQ ID NO: 32232 - protein, 38 aa, Artificial Sequence
  Non-cyclic GFR-binding peptide
  MOD_RES (1), (33), (34): Xaa is C or S
XAEVVMDRHKRLVVNNAADYYLISTASLRAPVXXSAPA

SEQ ID NO: 32233 - protein, 38 aa, Artificial Sequence
  Non-cyclic GFR-binding peptide
  MOD_RES (34), (35): Xaa is C or S
  MOD_RES (12), (13), (14), (15), (16): Xaa is A or G
  MOD_RES (17), (18), (19), (20): Xaa is A or G or is absent
SEVVMDEYKFKXXXXXXXXXLYLISIPELRTPVXXTPP

SEQ ID NO: 32234 - protein, 41 aa, Artificial Sequence
  Non-cyclic GFR-binding peptide
  MOD_RES (1), (35), (36): Xaa is C or S
  MOD_RES (13), (14), (15), (16), (17): Xaa is A or G
  MOD_RES (18), (19), (20), (21): Xaa is A or G or is absent
XSEVTMNRHKRLXXXXXXXXXYYLISTASMKEPVXXPEPIG

SEQ ID NO: 32235 - protein, 34 aa, Artificial Sequence
  Non-cyclic GFR-binding peptide
  MOD_RES (2), (33), (34): Xaa is C or S
GXEEVIMYHYKLLLVRGNDKYLMSIPSTKVPAXX

SEQ ID NO: 32236 - protein, 39 aa, Artificial Sequence
  Non-cyclic GFR-binding peptide
  MOD_RES (1), (35), (36): Xaa is C or S
  MOD_RES (13), (14), (15), (16), (17): Xaa is A or G
  MOD_RES (18), (19), (20), (21): Xaa is A or G or is absent
XSEVTMNRHKRLXXXXXXXXXYYLISTASMKEPVXXPEP

SEQ ID NO: 32237 - protein, 38 aa, Artificial Sequence
  Non-cyclic GFR-binding peptide
  MOD_RES (2), (4), (36), (37): Xaa is C or S
RXGXSEVVMDRHKRLVVNNASDYYLISTASLRTPVXXT

SEQ ID NO: 32238 - protein, 32 aa, Artificial Sequence
  Non-cyclic GFR-binding peptide
  MOD_RES (32), (32): Xaa is C or S
RDVVMGRHKRLIIQQKDNYYLMSTASMKTPTX

SEQ ID NO: 32239 - protein, 38 aa, Artificial Sequence
  Non-cyclic GFR-binding peptide
  MOD_RES (34), (35): Xaa is C or S
  MOD_RES (12), (13), (14), (15), (16): Xaa is A or G
  MOD_RES (17), (18), (19), (20): Xaa is A or G or is absent
SEVTMNEYKFKXXXXXXXXXLYLISIPEMKEPVXXPEP

SEQ ID NO: 32240 - protein, 34 aa, Artificial Sequence
  Non-cyclic GFR-binding peptide
  MOD_RES (1), (3), (34): Xaa is C or S
XKXSKVIMPIKGYIKPTKGIFYLINIPSLDQSVX

SEQ ID NO: 32241 - protein, 37 aa, Artificial Sequence
  Non-cyclic GFR-binding peptide
  MOD_RES (1), (32), (33): Xaa is C or S
XEEVIMYHYKLLLVRGNDKYLMSIPSTKVPAXXTSPV

SEQ ID NO: 32242 - protein, 38 aa, Artificial Sequence
  Non-cyclic GFR-binding peptide
  MOD_RES (33), (34): Xaa is C or S
  MOD_RES (11), (12), (13), (14), (15): Xaa is A or G
  MOD_RES (16), (17), (18), (19): Xaa is A or G or is absent
EEVIMEYKFKXXXXXXXXXLYLMSIPETKVPAXXTSPV

SEQ ID NO: 32243 - protein, 37 aa, Artificial Sequence
  Non-cyclic GFR-binding peptide
  MOD_RES (1), (3), (35), (36): Xaa is C or S
XGXRDVVMGEYKFKIIQQKDNLYLMSIPEMKTPTXXP

SEQ ID NO: 32244 - protein, 40 aa, Artificial Sequence
  Non-cyclic GFR-binding peptide
  MOD_RES (1), (3), (36), (37): Xaa is C or S
  MOD_RES (14), (15), (16), (17), (18): Xaa is A or G
  MOD_RES (19), (20), (21), (22): Xaa is A or G or is absent
XGXEEVIMYHYKLXXXXXXXXXKYLMSIPSTKVPAXXTSP

SEQ ID NO: 32245 - protein, 36 aa, Artificial Sequence
  Non-cyclic GFR-binding peptide
  MOD_RES (33), (34): Xaa is C or S
  MOD_RES (11), (12), (13), (14), (15): Xaa is A or G
  MOD_RES (16), (17), (18), (19): Xaa is A or G or is absent
SVAMGRHKRLXXXXXXXXXYYLISTASLKTPVXXAK

SEQ ID NO: 32246 - protein, 35 aa, Artificial Sequence
  Non-cyclic GFR-binding peptide
  MOD_RES (1), (33), (34): Xaa is C or S
XSEVTMNPIKGYVVNKNEDFYLINIPSMKEPVXXP

SEQ ID NO: 32247 - protein, 38 aa, Artificial Sequence
  Non-cyclic GFR-binding peptide
  MOD_RES (1), (3), (37), (38): Xaa is C or S
  MOD_RES (15), (16), (17), (18), (19): Xaa is A or G
  MOD_RES (20), (21), (22), (23): Xaa is A or G or is absent
XGXAEVVMDRHKRLXXXXXXXXXYYLISTASLRAPVXX

SEQ ID NO: 32248 - protein, 38 aa, Artificial Sequence
  Non-cyclic GFR-binding peptide
  MOD_RES (2), (33), (34): Xaa is C or S
KXSKVVMPIKGYVKPTRGVFYLINIPSLDQPVXXPSAS

SEQ ID NO: 32249 - protein, 39 aa, Artificial Sequence
  Non-cyclic GFR-binding peptide
  MOD_RES (2), (4), (35), (36): Xaa is C or S
SXKXSKVVMPIKGYVKPTRGVFYLINIPSLDQPVXXPSA

SEQ ID NO: 32250 - protein, 42 aa, Artificial Sequence
  Non-cyclic GFR-binding peptide
  MOD_RES (1), (3), (37), (38): Xaa is C or S
  MOD_RES (15), (16), (17), (18), (19): Xaa is A or G
  MOD_RES (20), (21), (22), (23): Xaa is A or G or is absent
XAXSEVTMNRHKRLXXXXXXXXXYYLISTASMKEPVXXPEPI

SEQ ID NO: 32251 - protein, 33 aa, Artificial Sequence
  Non-cyclic GFR-binding peptide
  MOD_RES (32), (33): Xaa is C or S
SEVVMDEYKFKVVNNASDLYLISIPELRTPVXX

SEQ ID NO: 32252 - protein, 37 aa, Artificial Sequence
  Non-cyclic GFR-binding peptide
  MOD_RES (2), (33), (34): Xaa is C or S
KXSRVIMPIKGYVKPKRGVFYLINIPSLAQPVXXPAA

SEQ ID NO: 32253 - protein, 39 aa, Artificial Sequence
  Non-cyclic GFR-binding peptide
  MOD_RES (2), (4), (37), (38): Xaa is C or S
  MOD_RES (15), (16), (17), (18), (19): Xaa is A or G
  MOD_RES (20), (21), (22), (23): Xaa is A or G or is absent
SXKXSKVVMPIKGYXXXXXXXXXFYLINIPSLDQPVXXP

SEQ ID NO: 32254 - protein, 39 aa, Artificial Sequence
  Non-cyclic GFR-binding peptide
  MOD_RES (1), (3), (36), (37): Xaa is C or S
  MOD_RES (14), (15), (16), (17), (18): Xaa is A or G
  MOD_RES (19), (20), (21), (22): Xaa is A or G or is absent
XKXSKVIMPIKGYXXXXXXXXXFYLINIPSLDQSVXXPS

SEQ ID NO: 32255 - protein, 34 aa, Artificial Sequence
  Non-cyclic GFR-binding peptide
  MOD_RES (1), (3), (34): Xaa is C or S
XGXEEVIMRHKRLLLVRGNDYYLMSTASTKVPAX

SEQ ID NO: 32256 - protein, 31 aa, Artificial Sequence
  Non-cyclic GFR-binding peptide
ESVAMGRHKRLYTVVGKDYYLISTASLKTPV

SEQ ID NO: 32257 - protein, 39 aa, Artificial Sequence
  Non-cyclic GFR-binding peptide
  MOD_RES (2), (4), (36), (37): Xaa is C or S
RXAXSEVTMNYHYKLVVNKNEDKYLISIPSMKEPVXXPE

SEQ ID NO: 32258 - protein, 40 aa, Artificial Sequence
  Non-cyclic GFR-binding peptide
  MOD_RES (1), (3), (37), (38): Xaa is C or S
  MOD_RES (15), (16), (17), (18), (19): Xaa is A or G
  MOD_RES (20), (21), (22), (23): Xaa is A or G or is absent
XGXRDVVMGYHYKLXXXXXXXXXKYLMSIPSMKTPTXXPG

SEQ ID NO: 32259 - protein, 41 aa, Artificial Sequence
  Non-cyclic GFR-binding peptide
  MOD_RES (2), (35), (36): Xaa is C or S
  MOD_RES (13), (14), (15), (16), (17): Xaa is A or G
  MOD_RES (18), (19), (20), (21): Xaa is A or G or is absent
GXEEVIMYHYKLXXXXXXXXXKYLMSIPSTKVPAXXTSPVR

SEQ ID NO: 32260 - protein, 34 aa, Artificial Sequence
  Non-cyclic GFR-binding peptide
  MOD_RES (34), (34): Xaa is C or S
  MOD_RES (12), (13), (14), (15), (16): Xaa is A or G
  MOD_RES (17), (18), (19), (20): Xaa is A or G or is absent
ESVAMGRHKRLXXXXXXXXXYYLISTASLKTPVX

SEQ ID NO: 32261 - protein, 37 aa, Artificial Sequence
  Non-cyclic GFR-binding peptide
  MOD_RES (2), (4): Xaa is C or S
  MOD_RES (16), (17), (18), (19), (20): Xaa is A or G
  MOD_RES (21), (22), (23), (24): Xaa is A or G or is absent
RXAXSEVTMNEYKFKXXXXXXXXXLYLISIPEMKEPV

SEQ ID NO: 32262 - protein, 38 aa, Artificial Sequence
  Non-cyclic GFR-binding peptide
  MOD_RES (32), (33): Xaa is C or S
RDVVMGEYKFKIIQQKDNLYLMSIPEMKTPTXXPGASG

SEQ ID NO: 32263 - protein, 35 aa, Artificial Sequence
  Non-cyclic GFR-binding peptide
  MOD_RES (2), (35): Xaa is C or S
  MOD_RES (13), (14), (15), (16), (17): Xaa is A or G
  MOD_RES (18), (19), (20), (21): Xaa is A or G or is absent
GXEEVIMEYKFKXXXXXXXXXLYLMSIPETKVPAX

SEQ ID NO: 32264 - protein, 35 aa, Artificial Sequence
  Non-cyclic GFR-binding peptide
  MOD_RES (2), (35): Xaa is C or S
  MOD_RES (13), (14), (15), (16), (17): Xaa is A or G
  MOD_RES (18), (19), (20), (21): Xaa is A or G or is absent
KXSKVIMPIKGYXXXXXXXXXFYLINIPSLDQSVX

SEQ ID NO: 32265 - protein, 40 aa, Artificial Sequence
  Non-cyclic GFR-binding peptide
  MOD_RES (2), (4), (38), (39): Xaa is C or S
  MOD_RES (16), (17), (18), (19), (20): Xaa is A or G
  MOD_RES (21), (22), (23), (24): Xaa is A or G or is absent
RXAXSEVTMNRHKRLXXXXXXXXXYYLISTASMKEPVXXP

SEQ ID NO: 32266 - protein, 38 aa, Artificial Sequence
  Non-cyclic GFR-binding peptide
  MOD_RES (33), (34): Xaa is C or S
  MOD_RES (11), (12), (13), (14), (15): Xaa is A or G
  MOD_RES (16), (17), (18), (19): Xaa is A or G or is absent
EEVIMYHYKLXXXXXXXXXKYLMSIPSTKVPAXXTSPV

SEQ ID NO: 32267 - protein, 35 aa, Artificial Sequence
  Non-cyclic GFR-binding peptide
  MOD_RES (33), (34): Xaa is C or S
  MOD_RES (11), (12), (13), (14), (15): Xaa is A or G
  MOD_RES (16), (17), (18), (19): Xaa is A or G or is absent
EVTMNRYKKLXXXXXXXXXFYLISIANMKEPVXXP

SEQ ID NO: 32268 - protein, 34 aa, Artificial Sequence
  Non-cyclic GFR-binding peptide
  MOD_RES (2), (2): Xaa is C or S
  MOD_RES (13), (14), (15), (16), (17): Xaa is A or G
  MOD_RES (18), (19), (20), (21): Xaa is A or G or is absent
KXSKVIMPIKGYXXXXXXXXXFYLINIPSLDQSV

SEQ ID NO: 32269 - protein, 30 aa, Artificial Sequence
  Non-cyclic GFR-binding peptide
EEVIMEYKFKLLVRGNDLYLMSIPETKVPA

SEQ ID NO: 32270 - protein, 32 aa, Artificial Sequence
  Non-cyclic GFR-binding peptide
  MOD_RES (32), (32): Xaa is C or S
SEVTMNRHKRLVVNKNEDYYLISTASMKEPVX

SEQ ID NO: 32271 - protein, 40 aa, Artificial Sequence
  Non-cyclic GFR-binding peptide
  MOD_RES (2), (4), (37), (38): Xaa is C or S
  MOD_RES (15), (16), (17), (18), (19): Xaa is A or G
  MOD_RES (20), (21), (22), (23): Xaa is A or G or is absent
LXGXEEVIMRHKRLXXXXXXXXXYYLMSTASTKVPAXXTS

SEQ ID NO: 32272 - protein, 35 aa, Artificial Sequence
  Non-cyclic GFR-binding peptide
  MOD_RES (31), (32): Xaa is C or S
EEVIMEYKFKLLVRGNDLYLMSIPETKVPAXXTSP

SEQ ID NO: 32273 - protein, 39 aa, Artificial Sequence
  Non-cyclic GFR-binding peptide
  MOD_RES (33), (34): Xaa is C or S
  MOD_RES (11), (12), (13), (14), (15): Xaa is A or G
  MOD_RES (16), (17), (18), (19): Xaa is A or G or is absent
EVVMDRHKRLXXXXXXXXXYYLISTASLRTPVXXTPPTS

SEQ ID NO: 32274 - protein, 35 aa, Artificial Sequence
  Non-cyclic GFR-binding peptide
  MOD_RES (1), (3): Xaa is C or S
  MOD_RES (14), (15), (16), (17), (18): Xaa is A or G
  MOD_RES (19), (20), (21), (22): Xaa is A or G or is absent
XKXSKVIMPIKGYXXXXXXXXXFYLINIPSLDQSV

SEQ ID NO: 32275 - protein, 36 aa, Artificial Sequence
  Non-cyclic GFR-binding peptide
  MOD_RES (1), (35), (36): Xaa is C or S
  MOD_RES (13), (14), (15), (16), (17): Xaa is A or G
  MOD_RES (18), (19), (20), (21): Xaa is A or G or is absent
XESVAMGRHKRLXXXXXXXXXYYLISTASLKTPVXX

SEQ ID NO: 32276 - protein, 43 aa, Artificial Sequence
  Non-cyclic GFR-binding peptide
  MOD_RES (2), (4), (38), (39): Xaa is C or S
  MOD_RES (16), (17), (18), (19), (20): Xaa is A or G
  MOD_RES (21), (22), (23), (24): Xaa is A or G or is absent
RXGXAEVVMDRHKRLXXXXXXXXXYYLISTASLRAPVXXSAPA

SEQ ID NO: 32277 - protein, 33 aa, Artificial Sequence
  Non-cyclic GFR-binding peptide
  MOD_RES (31), (32): Xaa is C or S
SRVIMPIKGYVKPKRGVFYLINIPSLAQPVXXP

SEQ ID NO: 32278 - protein, 37 aa, Artificial Sequence
  Non-cyclic GFR-binding peptide
  MOD_RES (1), (33), (34): Xaa is C or S
XSEVTMNEYKFKVVNKNEDLYLISIPEMKEPVXXPEP

SEQ ID NO: 32279 - protein, 42 aa, Artificial Sequence
  Non-cyclic GFR-binding peptide
  MOD_RES (2), (4), (36), (37): Xaa is C or S
RXAXSEVTMNPIKGYVVNKNEDFYLINIPSMKEPVXXPEPIG

SEQ ID NO: 32280 - protein, 41 aa, Artificial Sequence
  Non-cyclic GFR-binding peptide
  MOD_RES (2), (4), (38), (39): Xaa is C or S
  MOD_RES (16), (17), (18), (19), (20): Xaa is A or G
  MOD_RES (21), (22), (23), (24): Xaa is A or G or is absent
RXAXSEVTMNYHYKLXXXXXXXXXKYLISIPSMKEPVXXPE

SEQ ID NO: 32281 - protein, 37 aa, Artificial Sequence
  Non-cyclic GFR-binding peptide
  MOD_RES (33), (34): Xaa is C or S
  MOD_RES (11), (12), (13), (14), (15): Xaa is A or G
  MOD_RES (16), (17), (18), (19): Xaa is A or G or is absent
SKVVMPIKGYXXXXXXXXXFYLINIPSLDQPVXXPSA

SEQ ID NO: 32282 - protein, 30 aa, Artificial Sequence
  Non-cyclic GFR-binding peptide
EVTMNRHKRLVVNKNEDYYLISTASMKEPV

SEQ ID NO: 32283 - protein, 38 aa, Artificial Sequence
  Non-cyclic GFR-binding peptide
  MOD_RES (1), (3), (34), (35): Xaa is C or S
XGXEEVIMEYKFKLLVRGNDLYLMSIPETKVPAXXTSP

SEQ ID NO: 32284 - protein, 41 aa, Artificial Sequence
  Non-cyclic GFR-binding peptide
  MOD_RES (1), (35), (36): Xaa is C or S
  MOD_RES (13), (14), (15), (16), (17): Xaa is A or G
  MOD_RES (18), (19), (20), (21): Xaa is A or G or is absent
XESVAMGRHKRLXXXXXXXXXYYLISTASLKTPVXXAKSAK

SEQ ID NO: 32285 - protein, 32 aa, Artificial Sequence
  Non-cyclic GFR-binding peptide
  MOD_RES (2), (2): Xaa is C or S
GXEEVIMYHYKLLLVRGNDKYLMSIPSTKVPA

SEQ ID NO: 32286 - protein, 37 aa, Artificial Sequence
  Non-cyclic GFR-binding peptide
  MOD_RES (1), (3), (35), (36): Xaa is C or S
XGXRDVVMGYHYKLIIQQKDNKYLMSIPSMKTPTXXP

SEQ ID NO: 32287 - protein, 31 aa, Artificial Sequence
  Non-cyclic GFR-binding peptide
RDVVMGYHYKLIIQQKDNKYLMSIPSMKTPT

SEQ ID NO: 32288 - protein, 36 aa, Artificial Sequence
  Non-cyclic GFR-binding peptide
  MOD_RES (34), (35): Xaa is C or S
  MOD_RES (12), (13), (14), (15), (16): Xaa is A or G
  MOD_RES (17), (18), (19), (20): Xaa is A or G or is absent
SEVTMNRYKKLXXXXXXXXXFYLISIANMKEPVXXP

SEQ ID NO: 32289 - protein, 33 aa, Artificial Sequence
  Non-cyclic GFR-binding peptide
  MOD_RES (1), (3): Xaa is C or S
XKXSKVIMPIKGYIKPTKGIFYLINIPSLDQSV

SEQ ID NO: 32290 - protein, 36 aa, Artificial Sequence
  Non-cyclic GFR-binding peptide
  MOD_RES (2), (4): Xaa is C or S
  MOD_RES (15), (16), (17), (18), (19): Xaa is A or G
  MOD_RES (20), (21), (22), (23): Xaa is A or G or is absent
SXKXSRVIMPIKGYXXXXXXXXXFYLINIPSLAQPV

SEQ ID NO: 32291 - protein, 37 aa, Artificial Sequence
  Non-cyclic GFR-binding peptide
  MOD_RES (31), (32): Xaa is C or S
EVVMDRHKRLVVNNAADYYLISTASLRAPVXXSAPAA

SEQ ID NO: 32292 - protein, 38 aa, Artificial Sequence
  Non-cyclic GFR-binding peptide
  MOD_RES (2), (33), (34): Xaa is C or S
GXEEVIMRHKRLLLVRGNDYYLMSTASTKVPAXXTSPV

SEQ ID NO: 32293 - protein, 44 aa, Artificial Sequence
  Non-cyclic GFR-binding peptide
  MOD_RES (2), (4), (38), (39): Xaa is C or S
  MOD_RES (16), (17), (18), (19), (20): Xaa is A or G
  MOD_RES (21), (22), (23), (24): Xaa is A or G or is absent
HXGXSRVVMNRHKRLXXXXXXXXXYYLVSTASLKTPAXXPKPVH

SEQ ID NO: 32294 - protein, 36 aa, Artificial Sequence
  Non-cyclic GFR-binding peptide
  MOD_RES (1), (3), (36): Xaa is C or S
  MOD_RES (14), (15), (16), (17), (18): Xaa is A or G
  MOD_RES (19), (20), (21), (22): Xaa is A or G or is absent
XKXSRVIMPIKGYXXXXXXXXXFYLINIPSLAQPVX

SEQ ID NO: 32295 - protein, 32 aa, Artificial Sequence
  Non-cyclic GFR-binding peptide
  MOD_RES (1), (1): Xaa is C or S
XSEVVMDRHKRLVVNNASDYYLISTASLRTPV

SEQ ID NO: 32296 - protein, 34 aa, Artificial Sequence
  Non-cyclic GFR-binding peptide
  MOD_RES (1), (34): Xaa is C or S
  MOD_RES (12), (13), (14), (15), (16): Xaa is A or G
  MOD_RES (17), (18), (19), (20): Xaa is A or G or is absent
XSKVVMPIKGYXXXXXXXXXFYLINIPSLDQPVX

SEQ ID NO: 32297 - protein, 43 aa, Artificial Sequence
  Non-cyclic GFR-binding peptide
  MOD_RES (1), (3), (37), (38): Xaa is C or S
  MOD_RES (15), (16), (17), (18), (19): Xaa is A or G
  MOD_RES (20), (21), (22), (23): Xaa is A or G or is absent
XGXSEVVMDRHKRLXXXXXXXXXYYLISTASLRTPVXXTPPTS

SEQ ID NO: 32298 - protein, 35 aa, Artificial Sequence
  Non-cyclic GFR-binding peptide
  MOD_RES (2), (34), (35): Xaa is C or S
GXESVAMGRHKRLYTVVGKDYYLISTASLKTPVXX

SEQ ID NO: 32299 - protein, 39 aa, Artificial Sequence
  Non-cyclic GFR-binding peptide
  MOD_RES (2), (4), (37), (38): Xaa is C or S
  MOD_RES (15), (16), (17), (18), (19): Xaa is A or G
  MOD_RES (20), (21), (22), (23): Xaa is A or G or is absent
SXKXSRVIMPIKGYXXXXXXXXXFYLINIPSLAQPVXXP

SEQ ID NO: 32300 - protein, 41 aa, Artificial Sequence
  Non-cyclic GFR-binding peptide
  MOD_RES (1), (35), (36): Xaa is C or S
  MOD_RES (13), (14), (15), (16), (17): Xaa is A or G
  MOD_RES (18), (19), (20), (21): Xaa is A or G or is absent
XRDVVMGYHYKLXXXXXXXXXKYLMSIPSMKTPTXXPGASG

SEQ ID NO: 32301 - protein, 34 aa, Artificial Sequence
  Non-cyclic GFR-binding peptide
  MOD_RES (31), (32): Xaa is C or S
EEVIMYHYKLLLVRGNDKYLMSIPSTKVPAXXTS

SEQ ID NO: 32302 - protein, 36 aa, Artificial Sequence
  Non-cyclic GFR-binding peptide
  MOD_RES (2), (4), (36): Xaa is C or S
RXGXSEVVMDRHKRLVVNNASDYYLISTASLRTPVX

SEQ ID NO: 32303 - protein, 38 aa, Artificial Sequence
  Non-cyclic GFR-binding peptide
  MOD_RES (1), (3), (35), (36): Xaa is C or S
XGXRDVVMGEYKFKIIQQKDNLYLMSIPEMKTPTXXPG

SEQ ID NO: 32304 - protein, 43 aa, Artificial Sequence
  Non-cyclic GFR-binding peptide
  MOD_RES (1), (3), (37), (38): Xaa is C or S
  MOD_RES (15), (16), (17), (18), (19): Xaa is A or G
  MOD_RES (20), (21), (22), (23): Xaa is A or G or is absent
XGXSEVVMDEYKFKXXXXXXXXXLYLISIPELRTPVXXTPPTS

SEQ ID NO: 32305 - protein, 37 aa, Artificial Sequence
  Non-cyclic GFR-binding peptide
  MOD_RES (1), (33), (34): Xaa is C or S
XSEVTMNRHKRLVVNKNEDYYLISTASMKEPVXXPEP

SEQ ID NO: 32306 - protein, 40 aa, Artificial Sequence
  Non-cyclic GFR-binding peptide
  MOD_RES (2), (4), (38), (39): Xaa is C or S
  MOD_RES (16), (17), (18), (19), (20): Xaa is A or G
  MOD_RES (21), (22), (23), (24): Xaa is A or G or is absent
SXGXRDVVMGEYKFKXXXXXXXXXLYLMSIPEMKTPTXXP

SEQ ID NO: 32307 - protein, 36 aa, Artificial Sequence
  Non-cyclic GFR-binding peptide
  MOD_RES (1), (33), (34): Xaa is C or S
XSEVTMNRHKRLVVNKNEDYYLISTASMKEPVXXPE

SEQ ID NO: 32308 - protein, 37 aa, Artificial Sequence
  Non-cyclic GFR-binding peptide
  MOD_RES (2), (4), (36), (37): Xaa is C or S
SXGXRDVVMGYHYKLIIQQKDNKYLMSIPSMKTPTXX

SEQ ID NO: 32309 - protein, 39 aa, Artificial Sequence
  Non-cyclic GFR-binding peptide
  MOD_RES (33), (34): Xaa is C or S
  MOD_RES (11), (12), (13), (14), (15): Xaa is A or G
  MOD_RES (16), (17), (18), (19): Xaa is A or G or is absent
SKVVMPIKGYXXXXXXXXXFYLINIPSLDQPVXXPSASA

SEQ ID NO: 32310 - protein, 36 aa, Artificial Sequence
  Non-cyclic GFR-binding peptide
  MOD_RES (2), (4), (35), (36): Xaa is C or S
LXGXEEVIMYHYKLLLVRGNDKYLMSIPSTKVPAXX

SEQ ID NO: 32311 - protein, 39 aa, Artificial Sequence
  Non-cyclic GFR-binding peptide
  MOD_RES (1), (3), (34), (35): Xaa is C or S
XGXEEVIMEYKFKLLVRGNDLYLMSIPETKVPAXXTSPV

SEQ ID NO: 32312 - protein, 39 aa, Artificial Sequence
  Non-cyclic GFR-binding peptide
  MOD_RES (2), (4), (36), (37): Xaa is C or S
RXAXSEVTMNEYKFKVVNKNEDLYLISIPEMKEPVXXPE

SEQ ID NO: 32313 - protein, 36 aa, Artificial Sequence
  Non-cyclic GFR-binding peptide
  MOD_RES (2), (36): Xaa is C or S
  MOD_RES (14), (15), (16), (17), (18): Xaa is A or G
  MOD_RES (19), (20), (21), (22): Xaa is A or G or is absent
GXAEVVMDRHKRLXXXXXXXXXYYLISTASLRAPVX

SEQ ID NO: 32314 - protein, 35 aa, Artificial Sequence
  Non-cyclic GFR-binding peptide
  MOD_RES (32), (33): Xaa is C or S
SEVTMNRYKKLVVNKNEDFYLISIANMKEPVXXPE

SEQ ID NO: 32315 - protein, 34 aa, Artificial Sequence
  Non-cyclic GFR-binding peptide
  MOD_RES (32), (33): Xaa is C or S
SEVVMDRHKRLVVNNASDYYLISTASLRTPVXXT

SEQ ID NO: 32316 - protein, 37 aa, Artificial Sequence
  Non-cyclic GFR-binding peptide
  MOD_RES (2), (36), (37): Xaa is C or S
  MOD_RES (14), (15), (16), (17), (18): Xaa is A or G
  MOD_RES (19), (20), (21), (22): Xaa is A or G or is absent
GXESVAMGRHKRLXXXXXXXXXYYLISTASLKTPVXX

SEQ ID NO: 32317 - protein, 32 aa, Artificial Sequence
  Non-cyclic GFR-binding peptide
  MOD_RES (11), (12), (13), (14), (15): Xaa is A or G
  MOD_RES (16), (17), (18), (19): Xaa is A or G or is absent
EVTMNRHKRLXXXXXXXXXYYLISTASMKEPV

SEQ ID NO: 32318 - protein, 35 aa, Artificial Sequence
  Non-cyclic GFR-binding peptide
  MOD_RES (2), (34), (35): Xaa is C or S
GXAEVVMDRHKRLVVNNAADYYLISTASLRAPVXX

SEQ ID NO: 32319 - protein, 38 aa, Artificial Sequence
  Non-cyclic GFR-binding peptide
  MOD_RES (2), (35), (36): Xaa is C or S
  MOD_RES (13), (14), (15), (16), (17): Xaa is A or G
  MOD_RES (18), (19), (20), (21): Xaa is A or G or is absent
KXSKVIMPIKGYXXXXXXXXXFYLINIPSLDQSVXXPS

SEQ ID NO: 32320 - protein, 39 aa, Artificial Sequence
  Non-cyclic GFR-binding peptide
  MOD_RES (33), (34): Xaa is C or S
  MOD_RES (11), (12), (13), (14), (15): Xaa is A or G
  MOD_RES (16), (17), (18), (19): Xaa is A or G or is absent
EVTMNRYKKLXXXXXXXXXFYLISIANMKEPVXXPEPIG

SEQ ID NO: 32321 - protein, 40 aa, Artificial Sequence
  Non-cyclic GFR-binding peptide
  MOD_RES (2), (4), (35), (36): Xaa is C or S
LXGXEEVIMYHYKLLLVRGNDKYLMSIPSTKVPAXXTSPV

SEQ ID NO: 32322 - protein, 38 aa, Artificial Sequence
  Non-cyclic GFR-binding peptide
  MOD_RES (1), (35), (36): Xaa is C or S
  MOD_RES (13), (14), (15), (16), (17): Xaa is A or G
  MOD_RES (18), (19), (20), (21): Xaa is A or G or is absent
XSEVTMNEYKFKXXXXXXXXXLYLISIPEMKEPVXXPE

SEQ ID NO: 32323 - protein, 41 aa, Artificial Sequence
  Non-cyclic GFR-binding peptide
  MOD_RES (2), (35), (36): Xaa is C or S
  MOD_RES (13), (14), (15), (16), (17): Xaa is A or G
  MOD_RES (18), (19), (20), (21): Xaa is A or G or is absent
GXEEVIMRHKRLXXXXXXXXXYYLMSTASTKVPAXXTSPVR

SEQ ID NO: 32324 - protein, 36 aa, Artificial Sequence
  Non-cyclic GFR-binding peptide
  MOD_RES (2), (4), (36): Xaa is C or S
RXGXAEVVMDRHKRLVVNNAADYYLISTASLRAPVX

SEQ ID NO: 32325 - protein, 35 aa, Artificial Sequence
  Non-cyclic GFR-binding peptide
  MOD_RES (1), (33), (34): Xaa is C or S
XSEVTMNRYKKLVVNKNEDFYLISIANMKEPVXXP

SEQ ID NO: 32326 - protein, 38 aa, Artificial Sequence
  Non-cyclic GFR-binding peptide
  MOD_RES (2), (34), (35): Xaa is C or S
AXSEVTMNPIKGYVVNKNEDFYLINIPSMKEPVXXPEP

SEQ ID NO: 32327 - protein, 43 aa, Artificial Sequence
  Non-cyclic GFR-binding peptide
  MOD_RES (2), (4), (38), (39): Xaa is C or S
  MOD_RES (16), (17), (18), (19), (20): Xaa is A or G
  MOD_RES (21), (22), (23), (24): Xaa is A or G or is absent
RXAXSEVTMNRYKKLXXXXXXXXXFYLISIANMKEPVXXPEPI

SEQ ID NO: 32328 - protein, 36 aa, Artificial Sequence
  Non-cyclic GFR-binding peptide
  MOD_RES (33), (34): Xaa is C or S
  MOD_RES (11), (12), (13), (14), (15): Xaa is A or G
  MOD_RES (16), (17), (18), (19): Xaa is A or G or is absent
EEVIMYHYKLXXXXXXXXXKYLMSIPSTKVPAXXTS

SEQ ID NO: 32329 - protein, 43 aa, Artificial Sequence
  Non-cyclic GFR-binding peptide
  MOD_RES (1), (3), (37), (38): Xaa is C or S
  MOD_RES (15), (16), (17), (18), (19): Xaa is A or G
  MOD_RES (20), (21), (22), (23): Xaa is A or G or is absent
XAXSEVTMNYHYKLXXXXXXXXXKYLISIPSMKEPVXXPEPIG

SEQ ID NO: 32330 - protein, 39 aa, Artificial Sequence
  Non-cyclic GFR-binding peptide
  MOD_RES (1), (34), (35): Xaa is C or S
  MOD_RES (12), (13), (14), (15), (16): Xaa is A or G
  MOD_RES (17), (18), (19), (20): Xaa is A or G or is absent
XEEVIMRHKRLXXXXXXXXXYYLMSTASTKVPAXXTSPV

SEQ ID NO: 32331 - protein, 37 aa, Artificial Sequence
  Non-cyclic GFR-binding peptide
  MOD_RES (31), (32): Xaa is C or S
EVVMDEYKFKVVNNASDLYLISIPELRTPVXXTPPTS

SEQ ID NO: 32332 - protein, 37 aa, Artificial Sequence
  Non-cyclic GFR-binding peptide
  MOD_RES (1), (3), (37): Xaa is C or S
  MOD_RES (15), (16), (17), (18), (19): Xaa is A or G
  MOD_RES (20), (21), (22), (23): Xaa is A or G or is absent
XGXRDVVMGYHYKLXXXXXXXXXKYLMSIPSMKTPTX

SEQ ID NO: 32333 - protein, 38 aa, Artificial Sequence
  Non-cyclic GFR-binding peptide
  MOD_RES (32), (33): Xaa is C or S
SEVVMDRHKRLVVNNASDYYLISTASLRTPVXXTPPTS

SEQ ID NO: 32334 - protein, 36 aa, Artificial Sequence
  Non-cyclic GFR-binding peptide
  MOD_RES (34), (35): Xaa is C or S
  MOD_RES (12), (13), (14), (15), (16): Xaa is A or G
  MOD_RES (17), (18), (19), (20): Xaa is A or G or is absent
SEVVMDRHKRLXXXXXXXXXYYLISTASLRTPVXXT

SEQ ID NO: 32335 - protein, 32 aa, Artificial Sequence
  Non-cyclic GFR-binding peptide
  MOD_RES (1), (1): Xaa is C or S
XSEVVMDEYKFKVVNNASDLYLISIPELRTPV

SEQ ID NO: 32336 - protein, 40 aa, Artificial Sequence
  Non-cyclic GFR-binding peptide
  MOD_RES (1), (3), (35), (36): Xaa is C or S
XGXSEVVMDRHKRLVVNNASDYYLISTASLRTPVXXTPPT

SEQ ID NO: 32337 - protein, 35 aa, Artificial Sequence
  Non-cyclic GFR-binding peptide
  MOD_RES (2), (33), (34): Xaa is C or S
GXEEVIMRHKRLLLVRGNDYYLMSTASTKVPAXXT

SEQ ID NO: 32338 - protein, 39 aa, Artificial Sequence
  Non-cyclic GFR-binding peptide
  MOD_RES (1), (35), (36): Xaa is C or S
  MOD_RES (13), (14), (15), (16), (17): Xaa is A or G
  MOD_RES (18), (19), (20), (21): Xaa is A or G or is absent
XSEVTMNYHYKLXXXXXXXXXKYLISIPSMKEPVXXPEP

SEQ ID NO: 32339 - protein, 31 aa, Artificial Sequence
  Non-cyclic GFR-binding peptide
  MOD_RES (31), (31): Xaa is C or S
DVVMGEYKFKIIQQKDNLYLMSIPEMKTPTX

SEQ ID NO: 32340 - protein, 40 aa, Artificial Sequence
  Non-cyclic GFR-binding peptide
  MOD_RES (2), (36), (37): Xaa is C or S
  MOD_RES (14), (15), (16), (17), (18): Xaa is A or G
  MOD_RES (19), (20), (21), (22): Xaa is A or G or is absent
GXSEVVMDRHKRLXXXXXXXXXYYLISTASLRTPVXXTPP

SEQ ID NO: 32341 - protein, 44 aa, Artificial Sequence
  Non-cyclic GFR-binding peptide
  MOD_RES (2), (4), (38), (39): Xaa is C or S
  MOD_RES (16), (17), (18), (19), (20): Xaa is A or G
  MOD_RES (21), (22), (23), (24): Xaa is A or G or is absent
RXGXAEVVMDRHKRLXXXXXXXXXYYLISTASLRAPVXXSAPAA

SEQ ID NO: 32342 - protein, 36 aa, Artificial Sequence
  Non-cyclic GFR-binding peptide
  MOD_RES (1), (3): Xaa is C or S
  MOD_RES (15), (16), (17), (18), (19): Xaa is A or G
  MOD_RES (20), (21), (22), (23): Xaa is A or G or is absent
XGXAEVVMDRHKRLXXXXXXXXXYYLISTASLRAPV

SEQ ID NO: 32343 - protein, 32 aa, Artificial Sequence
  Non-cyclic GFR-binding peptide
  MOD_RES (2), (2): Xaa is C or S
KXSKVVMPIKGYVKPTRGVFYLINIPSLDQPV

SEQ ID NO: 32344 - protein, 30 aa, Artificial Sequence
  Non-cyclic GFR-binding peptide
EEVIMRHKRLLLVRGNDYYLMSTASTKVPA

SEQ ID NO: 32345 - protein, 33 aa, Artificial Sequence
  Non-cyclic GFR-binding peptide
  MOD_RES (12), (13), (14), (15), (16): Xaa is A or G
  MOD_RES (17), (18), (19), (20): Xaa is A or G or is absent
AEVVMDRHKRLXXXXXXXXXYYLISTASLRAPV

SEQ ID NO: 32346 - protein, 37 aa, Artificial Sequence
  Non-cyclic GFR-binding peptide
  MOD_RES (31), (32): Xaa is C or S
DVVMGRHKRLIIQQKDNYYLMSTASMKTPTXXPGASG

SEQ ID NO: 32347 - protein, 38 aa, Artificial Sequence
  Non-cyclic GFR-binding peptide
  MOD_RES (2), (4), (38): Xaa is C or S
  MOD_RES (16), (17), (18), (19), (20): Xaa is A or G
  MOD_RES (21), (22), (23), (24): Xaa is A or G or is absent
RXGXAEVVMDRHKRLXXXXXXXXXYYLISTASLRAPVX

SEQ ID NO: 32348 - protein, 34 aa, Artificial Sequence
  Non-cyclic GFR-binding peptide
  MOD_RES (1), (3): Xaa is C or S
XGXRDVVMGEYKFKIIQQKDNLYLMSIPEMKTPT

SEQ ID NO: 32349 - protein, 35 aa, Artificial Sequence
  Non-cyclic GFR-binding peptide
  MOD_RES (1), (35): Xaa is C or S
  MOD_RES (13), (14), (15), (16), (17): Xaa is A or G
  MOD_RES (18), (19), (20), (21): Xaa is A or G or is absent
XAEVVMDRHKRLXXXXXXXXXYYLISTASLRAPVX

SEQ ID NO: 32350 - protein, 41 aa, Artificial Sequence
  Non-cyclic GFR-binding peptide
  MOD_RES (2), (4), (38), (39): Xaa is C or S
  MOD_RES (16), (17), (18), (19), (20): Xaa is A or G
  MOD_RES (21), (22), (23), (24): Xaa is A or G or is absent
SXGXRDVVMGYHYKLXXXXXXXXXKYLMSIPSMKTPTXXPG

SEQ ID NO: 32351 - protein, 36 aa, Artificial Sequence
  Non-cyclic GFR-binding peptide
  MOD_RES (1), (35), (36): Xaa is C or S
  MOD_RES (13), (14), (15), (16), (17): Xaa is A or G
  MOD_RES (18), (19), (20), (21): Xaa is A or G or is absent
XSEVVMDRHKRLXXXXXXXXXYYLISTASLRTPVXX

SEQ ID NO: 32352 - protein, 34 aa, Artificial Sequence
  Non-cyclic GFR-binding peptide
  MOD_RES (2), (4): Xaa is C or S
LXGXEEVIMRHKRLLLVRGNDYYLMSTASTKVPA

SEQ ID NO: 32353 - protein, 37 aa, Artificial Sequence
  Non-cyclic GFR-binding peptide
  MOD_RES (2), (34), (35): Xaa is C or S
GXRDVVMGYHYKLIIQQKDNKYLMSIPSMKTPTXXPG

SEQ ID NO: 32354 - protein, 41 aa, Artificial Sequence
  Non-cyclic GFR-binding peptide
  MOD_RES (1), (35), (36): Xaa is C or S
  MOD_RES (13), (14), (15), (16), (17): Xaa is A or G
  MOD_RES (18), (19), (20), (21): Xaa is A or G or is absent
XSEVVMDEYKFKXXXXXXXXXLYLISIPELRTPVXXTPPTS

SEQ ID NO: 32355 - protein, 39 aa, Artificial Sequence
  Non-cyclic GFR-binding peptide
  MOD_RES (2), (4), (38), (39): Xaa is C or S
  MOD_RES (16), (17), (18), (19), (20): Xaa is A or G
  MOD_RES (21), (22), (23), (24): Xaa is A or G or is absent
RXAXSEVTMNPIKGYXXXXXXXXXFYLINIPSMKEPVXX

SEQ ID NO: 32356 - protein, 38 aa, Artificial Sequence
  Non-cyclic GFR-binding peptide
  MOD_RES (1), (3), (37), (38): Xaa is C or S
  MOD_RES (15), (16), (17), (18), (19): Xaa is A or G
  MOD_RES (20), (21), (22), (23): Xaa is A or G or is absent
XAXSEVTMNYHYKLXXXXXXXXXKYLISIPSMKEPVXX

SEQ ID NO: 32357 - protein, 38 aa, Artificial Sequence
  Non-cyclic GFR-binding peptide
  MOD_RES (33), (34): Xaa is C or S
  MOD_RES (11), (12), (13), (14), (15): Xaa is A or G
  MOD_RES (16), (17), (18), (19): Xaa is A or G or is absent
EVTMNRHKRLXXXXXXXXXYYLISTASMKEPVXXPEPI

SEQ ID NO: 32358 - protein, 35 aa, Artificial Sequence
  Non-cyclic GFR-binding peptide
  MOD_RES (32), (33): Xaa is C or S
ESVAMGRHKRLYTVVGKDYYLISTASLKTPVXXAK

SEQ ID NO: 32359 - protein, 39 aa, Artificial Sequence
  Non-cyclic GFR-binding peptide
  MOD_RES (2), (35), (36): Xaa is C or S
  MOD_RES (13), (14), (15), (16), (17): Xaa is A or G
  MOD_RES (18), (19), (20), (21): Xaa is A or G or is absent
KXSRVIMPIKGYXXXXXXXXXFYLINIPSLAQPVXXPAA

SEQ ID NO: 32360 - protein, 36 aa, Artificial Sequence
  Non-cyclic GFR-binding peptide
  MOD_RES (1), (32), (33): Xaa is C or S
XSKVIMPIKGYIKPTKGIFYLINIPSLDQSVXXPSA

SEQ ID NO: 32361 - protein, 32 aa, Artificial Sequence
  Non-cyclic GFR-binding peptide
  MOD_RES (32), (32): Xaa is C or S
SEVVMDYHYKLVVNNASDKYLISIPSLRTPVX

SEQ ID NO: 32362 - protein, 34 aa, Artificial Sequence
  Non-cyclic GFR-binding peptide
  MOD_RES (2), (2): Xaa is C or S
  MOD_RES (13), (14), (15), (16), (17): Xaa is A or G
  MOD_RES (18), (19), (20), (21): Xaa is A or G or is absent
GXEEVIMEYKFKXXXXXXXXXLYLMSIPETKVPA

SEQ ID NO: 32363 - protein, 33 aa, Artificial Sequence
  Non-cyclic GFR-binding peptide
  MOD_RES (31), (32): Xaa is C or S
EEVIMRHKRLLLVRGNDYYLMSTASTKVPAXXT

SEQ ID NO: 32364 - protein, 38 aa, Artificial Sequence
  Non-cyclic GFR-binding peptide
  MOD_RES (33), (34): Xaa is C or S
  MOD_RES (11), (12), (13), (14), (15): Xaa is A or G
  MOD_RES (16), (17), (18), (19): Xaa is A or G or is absent
DVVMGRHKRLXXXXXXXXXYYLMSTASMKTPTXXPGAS

SEQ ID NO: 32365 - protein, 35 aa, Artificial Sequence
  Non-cyclic GFR-binding peptide
  MOD_RES (1), (35): Xaa is C or S
  MOD_RES (13), (14), (15), (16), (17): Xaa is A or G
  MOD_RES (18), (19), (20), (21): Xaa is A or G or is absent
XRDVVMGRHKRLXXXXXXXXXYYLMSTASMKTPTX

SEQ ID NO: 32366 - protein, 37 aa, Artificial Sequence
  Non-cyclic GFR-binding peptide
  MOD_RES (34), (35): Xaa is C or S
  MOD_RES (12), (13), (14), (15), (16): Xaa is A or G
  MOD_RES (17), (18), (19), (20): Xaa is A or G or is absent
SEVTMNEYKFKXXXXXXXXXLYLISIPEMKEPVXXPE

SEQ ID NO: 32367 - protein, 39 aa, Artificial Sequence
  Non-cyclic GFR-binding peptide
  MOD_RES (2), (34), (35): Xaa is C or S
AXSEVTMNRYKKLVVNKNEDFYLISIANMKEPVXXPEPI

SEQ ID NO: 32368 - protein, 40 aa, Artificial Sequence
  Non-cyclic GFR-binding peptide
  MOD_RES (34), (35): Xaa is C or S
  MOD_RES (12), (13), (14), (15), (16): Xaa is A or G
  MOD_RES (17), (18), (19), (20): Xaa is A or G or is absent
SEVVMDYHYKLXXXXXXXXXKYLISIPSLRTPVXXTPPTS

SEQ ID NO: 32369 - protein, 40 aa, Artificial Sequence
  Non-cyclic GFR-binding peptide
  MOD_RES (34), (35): Xaa is C or S
  MOD_RES (12), (13), (14), (15), (16): Xaa is A or G
  MOD_RES (17), (18), (19), (20): Xaa is A or G or is absent
SEVTMNRHKRLXXXXXXXXXYYLISTASMKEPVXXPEPIG

SEQ ID NO: 32370 - protein, 36 aa, Artificial Sequence
  Non-cyclic GFR-binding peptide
  MOD_RES (2), (35), (36): Xaa is C or S
  MOD_RES (13), (14), (15), (16), (17): Xaa is A or G
  MOD_RES (18), (19), (20), (21): Xaa is A or G or is absent
GXEEVIMYHYKLXXXXXXXXXKYLMSIPSTKVPAXX

SEQ ID NO: 32371 - protein, 38 aa, Artificial Sequence
  Non-cyclic GFR-binding peptide
  MOD_RES (1), (33), (34): Xaa is C or S
XSEVVMDYHYKLVVNNASDKYLISIPSLRTPVXXTPPT

SEQ ID NO: 32372 - protein, 36 aa, Artificial Sequence
  Non-cyclic GFR-binding peptide
  MOD_RES (2), (36): Xaa is C or S
  MOD_RES (14), (15), (16), (17), (18): Xaa is A or G
  MOD_RES (19), (20), (21), (22): Xaa is A or G or is absent
AXSEVTMNRYKKLXXXXXXXXXFYLISIANMKEPVX

SEQ ID NO: 32373 - protein, 33 aa, Artificial Sequence
  Non-cyclic GFR-binding peptide
  MOD_RES (2), (33): Xaa is C or S
KXSKVVMPIKGYVKPTRGVFYLINIPSLDQPVX

SEQ ID NO: 32374 - protein, 35 aa, Artificial Sequence
  Non-cyclic GFR-binding peptide
  MOD_RES (2), (2): Xaa is C or S
  MOD_RES (14), (15), (16), (17), (18): Xaa is A or G
  MOD_RES (19), (20), (21), (22): Xaa is A or G or is absent
GXRDVVMGRHKRLXXXXXXXXXYYLMSTASMKTPT

SEQ ID NO: 32375 - protein, 36 aa, Artificial Sequence
  Non-cyclic GFR-binding peptide
  MOD_RES (1), (33), (34): Xaa is C or S
XSEVVMDYHYKLVVNNASDKYLISIPSLRTPVXXTP

SEQ ID NO: 32376 - protein, 41 aa, Artificial Sequence
  Non-cyclic GFR-binding peptide
  MOD_RES (2), (4), (35), (36): Xaa is C or S
SXKXSKVVMPIKGYVKPTRGVFYLINIPSLDQPVXXPSASA

SEQ ID NO: 32377 - protein, 34 aa, Artificial Sequence
  Non-cyclic GFR-binding peptide
  MOD_RES (31), (32): Xaa is C or S
EEVIMEYKFKLLVRGNDLYLMSIPETKVPAXXTS

SEQ ID NO: 32378 - protein, 39 aa, Artificial Sequence
  Non-cyclic GFR-binding peptide
  MOD_RES (34), (35): Xaa is C or S
  MOD_RES (12), (13), (14), (15), (16): Xaa is A or G
  MOD_RES (17), (18), (19), (20): Xaa is A or G or is absent
SEVTMNYHYKLXXXXXXXXXKYLISIPSMKEPVXXPEPI

SEQ ID NO: 32379 - protein, 39 aa, Artificial Sequence
  Non-cyclic GFR-binding peptide
  MOD_RES (1), (3), (37), (38): Xaa is C or S
  MOD_RES (15), (16), (17), (18), (19): Xaa is A or G
  MOD_RES (20), (21), (22), (23): Xaa is A or G or is absent
XGXSEVVMDEYKFKXXXXXXXXXLYLISIPELRTPVXXT

SEQ ID NO: 32380 - protein, 40 aa, Artificial Sequence
  Non-cyclic GFR-binding peptide
  MOD_RES (1), (3), (35), (36): Xaa is C or S
XGXESVAMGRHKRLYTVVGKDYYLISTASLKTPVXXAKSA

SEQ ID NO: 32381 - protein, 38 aa, Artificial Sequence
  Non-cyclic GFR-binding peptide
  MOD_RES (2), (33), (34): Xaa is C or S
KXSKVIMPIKGYIKPTKGIFYLINIPSLDQSVXXPSAS

SEQ ID NO: 32382 - protein, 32 aa, Artificial Sequence
  Non-cyclic GFR-binding peptide
  MOD_RES (31), (32): Xaa is C or S
DVVMGEYKFKIIQQKDNLYLMSIPEMKTPTXX

SEQ ID NO: 32383 - protein, 34 aa, Artificial Sequence
  Non-cyclic GFR-binding peptide
  MOD_RES (34), (34): Xaa is C or S
  MOD_RES (12), (13), (14), (15), (16): Xaa is A or G
  MOD_RES (17), (18), (19), (20): Xaa is A or G or is absent
AEVVMDRHKRLXXXXXXXXXYYLISTASLRAPVX

SEQ ID NO: 32384 - protein, 37 aa, Artificial Sequence
  Non-cyclic GFR-binding peptide
  MOD_RES (1), (33), (34): Xaa is C or S
XSEVVMDYHYKLVVNNASDKYLISIPSLRTPVXXTPP

SEQ ID NO: 32385 - protein, 33 aa, Artificial Sequence
  Non-cyclic GFR-binding peptide
  MOD_RES (1), (33): Xaa is C or S
XSEVVMDRHKRLVVNNASDYYLISTASLRTPVX

SEQ ID NO: 32386 - protein, 42 aa, Artificial Sequence
  Non-cyclic GFR-binding peptide
  MOD_RES (1), (3), (36), (37): Xaa is C or S
  MOD_RES (14), (15), (16), (17), (18): Xaa is A or G
  MOD_RES (19), (20), (21), (22): Xaa is A or G or is absent
XKXSKVIMPIKGYXXXXXXXXXFYLINIPSLDQSVXXPSASA

SEQ ID NO: 32387 - protein, 36 aa, Artificial Sequence
  Non-cyclic GFR-binding peptide
  MOD_RES (1), (3): Xaa is C or S
  MOD_RES (15), (16), (17), (18), (19): Xaa is A or G
  MOD_RES (20), (21), (22), (23): Xaa is A or G or is absent
XAXSEVTMNYHYKLXXXXXXXXXKYLISIPSMKEPV

SEQ ID NO: 32388 - protein, 34 aa, Artificial Sequence
  Non-cyclic GFR-binding peptide
  MOD_RES (1), (33), (34): Xaa is C or S
XSEVVMDRHKRLVVNNASDYYLISTASLRTPVXX

SEQ ID NO: 32389 - protein, 30 aa, Artificial Sequence
  Non-cyclic GFR-binding peptide
EEVIMYHYKLLLVRGNDKYLMSIPSTKVPA

SEQ ID NO: 32390 - protein, 40 aa, Artificial Sequence
  Non-cyclic GFR-binding peptide
  MOD_RES (2), (4), (38), (39): Xaa is C or S
  MOD_RES (16), (17), (18), (19), (20): Xaa is A or G
  MOD_RES (21), (22), (23), (24): Xaa is A or G or is absent
RXGXESVAMGRHKRLXXXXXXXXXYYLISTASLKTPVXXA

SEQ ID NO: 32391 - protein, 36 aa, Artificial Sequence
  Non-cyclic GFR-binding peptide
  MOD_RES (1), (33), (34): Xaa is C or S
XSEVTMNEYKFKVVNKNEDLYLISIPEMKEPVXXPE

SEQ ID NO: 32392 - protein, 37 aa, Artificial Sequence
  Non-cyclic GFR-binding peptide
  MOD_RES (1), (3), (34), (35): Xaa is C or S
XGXEEVIMYHYKLLLVRGNDKYLMSIPSTKVPAXXTS

SEQ ID NO: 32393 - protein, 40 aa, Artificial Sequence
  Non-cyclic GFR-binding peptide
  MOD_RES (1), (3), (36), (37): Xaa is C or S
  MOD_RES (14), (15), (16), (17), (18): Xaa is A or G
  MOD_RES (19), (20), (21), (22): Xaa is A or G or is absent
XKXSKVIMPIKGYXXXXXXXXXFYLINIPSLDQSVXXPSA

SEQ ID NO: 32394 - protein, 40 aa, Artificial Sequence
  Non-cyclic GFR-binding peptide
  MOD_RES (1), (3), (35), (36): Xaa is C or S
XAXSEVTMNRHKRLVVNKNEDYYLISTASMKEPVXXPEPI

SEQ ID NO: 32395 - protein, 38 aa, Artificial Sequence
  Non-cyclic GFR-binding peptide
  MOD_RES (34), (35): Xaa is C or S
  MOD_RES (12), (13), (14), (15), (16): Xaa is A or G
  MOD_RES (17), (18), (19), (20): Xaa is A or G or is absent
RDVVMGRHKRLXXXXXXXXXYYLMSTASMKTPTXXPGA

SEQ ID NO: 32396 - protein, 33 aa, Artificial Sequence
  Non-cyclic GFR-binding peptide
  MOD_RES (1), (33): Xaa is C or S
XSEVVMDEYKFKVVNNASDLYLISIPELRTPVX

SEQ ID NO: 32397 - protein, 42 aa, Artificial Sequence
  Non-cyclic GFR-binding peptide
  MOD_RES (2), (4), (37), (38): Xaa is C or S
  MOD_RES (15), (16), (17), (18), (19): Xaa is A or G
  MOD_RES (20), (21), (22), (23): Xaa is A or G or is absent
LXGXEEVIMRHKRLXXXXXXXXXYYLMSTASTKVPAXXTSPV

SEQ ID NO: 32398 - protein, 39 aa, Artificial Sequence
  Non-cyclic GFR-binding peptide
  MOD_RES (2), (36), (37): Xaa is C or S
  MOD_RES (14), (15), (16), (17), (18): Xaa is A or G
  MOD_RES (19), (20), (21), (22): Xaa is A or G or is absent
GXRDVVMGRHKRLXXXXXXXXXYYLMSTASMKTPTXXPG

SEQ ID NO: 32399 - protein, 35 aa, Artificial Sequence
  Non-cyclic GFR-binding peptide
  MOD_RES (34), (35): Xaa is C or S
  MOD_RES (12), (13), (14), (15), (16): Xaa is A or G
  MOD_RES (17), (18), (19), (20): Xaa is A or G or is absent
AEVVMDRHKRLXXXXXXXXXYYLISTASLRAPVXX

SEQ ID NO: 32400 - protein, 39 aa, Artificial Sequence
  Non-cyclic GFR-binding peptide
  MOD_RES (2), (34), (35): Xaa is C or S
AXSEVTMNPIKGYVVNKNEDFYLINIPSMKEPVXXPEPI

SEQ ID NO: 32401 - protein, 33 aa, Artificial Sequence
  Non-cyclic GFR-binding peptide
  MOD_RES (1), (3): Xaa is C or S
XGXEEVIMEYKFKLLVRGNDLYLMSIPETKVPA

SEQ ID NO: 32402 - protein, 33 aa, Artificial Sequence
  Non-cyclic GFR-binding peptide
  MOD_RES (1), (3): Xaa is C or S
XKXSRVIMPIKGYVKPKRGVFYLINIPSLAQPV

SEQ ID NO: 32403 - protein, 37 aa, Artificial Sequence
  Non-cyclic GFR-binding peptide
  MOD_RES (1), (3), (35), (36): Xaa is C or S
XAXSEVTMNRYKKLVVNKNEDFYLISIANMKEPVXXP

SEQ ID NO: 32404 - protein, 34 aa, Artificial Sequence
  Non-cyclic GFR-binding peptide
  MOD_RES (2), (33), (34): Xaa is C or S
KXSKVVMPIKGYVKPTRGVFYLINIPSLDQPVXX

SEQ ID NO: 32405 - protein, 36 aa, Artificial Sequence
  Non-cyclic GFR-binding peptide
  MOD_RES (2), (35), (36): Xaa is C or S
  MOD_RES (13), (14), (15), (16), (17): Xaa is A or G
  MOD_RES (18), (19), (20), (21): Xaa is A or G or is absent
KXSRVIMPIKGYXXXXXXXXXFYLINIPSLAQPVXX

SEQ ID NO: 32406 - protein, 42 aa, Artificial Sequence
  Non-cyclic GFR-binding peptide
  MOD_RES (1), (3), (36), (37): Xaa is C or S
  MOD_RES (14), (15), (16), (17), (18): Xaa is A or G
  MOD_RES (19), (20), (21), (22): Xaa is A or G or is absent
XGXEEVIMRHKRLXXXXXXXXXYYLMSTASTKVPAXXTSPVR

SEQ ID NO: 32407 - protein, 30 aa, Artificial Sequence
  Non-cyclic GFR-binding peptide
EVVMDRHKRLVVNNAADYYLISTASLRAPV

SEQ ID NO: 32408 - protein, 38 aa, Artificial Sequence
  Non-cyclic GFR-binding peptide
  MOD_RES (32), (33): Xaa is C or S
ESVAMGRHKRLYTVVGKDYYLISTASLKTPVXXAKSAK

SEQ ID NO: 32409 - protein, 39 aa, Artificial Sequence
  Non-cyclic GFR-binding peptide
  MOD_RES (2), (33), (34): Xaa is C or S
GXEEVIMYHYKLLLVRGNDKYLMSIPSTKVPAXXTSPVR

SEQ ID NO: 32410 - protein, 37 aa, Artificial Sequence
  Non-cyclic GFR-binding peptide
  MOD_RES (1), (3), (36), (37): Xaa is C or S
  MOD_RES (14), (15), (16), (17), (18): Xaa is A or G
  MOD_RES (19), (20), (21), (22): Xaa is A or G or is absent
XGXEEVIMRHKRLXXXXXXXXXYYLMSTASTKVPAXX

SEQ ID NO: 32411 - protein, 41 aa, Artificial Sequence
  Non-cyclic GFR-binding peptide
  MOD_RES (2), (36), (37): Xaa is C or S
  MOD_RES (14), (15), (16), (17), (18): Xaa is A or G
  MOD_RES (19), (20), (21), (22): Xaa is A or G or is absent
GXRDVVMGEYKFKXXXXXXXXXLYLMSIPEMKTPTXXPGAS

SEQ ID NO: 32412 - protein, 39 aa, Artificial Sequence
  Non-cyclic GFR-binding peptide
  MOD_RES (1), (3), (35), (36): Xaa is C or S
XGXESVAMGRHKRLYTVVGKDYYLISTASLKTPVXXAKS

SEQ ID NO: 32413 - protein, 39 aa, Artificial Sequence
  Non-cyclic GFR-binding peptide
  MOD_RES (1), (3), (37), (38): Xaa is C or S
  MOD_RES (15), (16), (17), (18), (19): Xaa is A or G
  MOD_RES (20), (21), (22), (23): Xaa is A or G or is absent
XAXSEVTMNYHYKLXXXXXXXXXKYLISIPSMKEPVXXP

SEQ ID NO: 32414 - protein, 44 aa, Artificial Sequence
  Non-cyclic GFR-binding peptide
  MOD_RES (2), (4), (38), (39): Xaa is C or S
  MOD_RES (16), (17), (18), (19), (20): Xaa is A or G
  MOD_RES (21), (22), (23), (24): Xaa is A or G or is absent
RXAXSEVTMNPIKGYXXXXXXXXXFYLINIPSMKEPVXXPEPIG

SEQ ID NO: 32415 - protein, 36 aa, Artificial Sequence
  Non-cyclic GFR-binding peptide
  MOD_RES (32), (33): Xaa is C or S
SEVVMDYHYKLVVNNASDKYLISIPSLRTPVXXTPP

SEQ ID NO: 32416 - protein, 34 aa, Artificial Sequence
  Non-cyclic GFR-binding peptide
  MOD_RES (1), (3), (34): Xaa is C or S
XGXEEVIMEYKFKLLVRGNDLYLMSIPETKVPAX

SEQ ID NO: 32417 - protein, 39 aa, Artificial Sequence
  Non-cyclic GFR-binding peptide
  MOD_RES (2), (4), (38), (39): Xaa is C or S
  MOD_RES (16), (17), (18), (19), (20): Xaa is A or G
  MOD_RES (21), (22), (23), (24): Xaa is A or G or is absent
RXGXESVAMGRHKRLXXXXXXXXXYYLISTASLKTPVXX

SEQ ID NO: 32418 - protein, 42 aa, Artificial Sequence
  Non-cyclic GFR-binding peptide
  MOD_RES (2), (4), (36), (37): Xaa is C or S
RXGXSEVVMDYHYKLVVNNASDKYLISIPSLRTPVXXTPPTS

SEQ ID NO: 32419 - protein, 36 aa, Artificial Sequence
  Non-cyclic GFR-binding peptide
  MOD_RES (2), (4), (36): Xaa is C or S
RXAXSEVTMNRHKRLVVNKNEDYYLISTASMKEPVX

SEQ ID NO: 32420 - protein, 35 aa, Artificial Sequence
  Non-cyclic GFR-binding peptide
  MOD_RES (2), (2): Xaa is C or S
  MOD_RES (14), (15), (16), (17), (18): Xaa is A or G
  MOD_RES (19), (20), (21), (22): Xaa is A or G or is absent
GXSEVVMDRHKRLXXXXXXXXXYYLISTASLRTPV

SEQ ID NO: 32421 - protein, 35 aa, Artificial Sequence
  Non-cyclic GFR-binding peptide
  MOD_RES (1), (3), (35): Xaa is C or S
XGXSEVVMDRHKRLVVNNASDYYLISTASLRTPVX

SEQ ID NO: 32422 - protein, 39 aa, Artificial Sequence
  Non-cyclic GFR-binding peptide
  MOD_RES (2), (34), (35): Xaa is C or S
GXRDVVMGYHYKLIIQQKDNKYLMSIPSMKTPTXXPGAS

SEQ ID NO: 32423 - protein, 40 aa, Artificial Sequence
  Non-cyclic GFR-binding peptide
  MOD_RES (1), (3), (35), (36): Xaa is C or S
XAXSEVTMNPIKGYVVNKNEDFYLINIPSMKEPVXXPEPI

SEQ ID NO: 32424 - protein, 41 aa, Artificial Sequence
  Non-cyclic GFR-binding peptide
  MOD_RES (1), (3), (37), (38): Xaa is C or S
  MOD_RES (15), (16), (17), (18), (19): Xaa is A or G
  MOD_RES (20), (21), (22), (23): Xaa is A or G or is absent
XAXSEVTMNEYKFKXXXXXXXXXLYLISIPEMKEPVXXPEP

SEQ ID NO: 32425 - protein, 35 aa, Artificial Sequence
  Non-cyclic GFR-binding peptide
  MOD_RES (32), (33): Xaa is C or S
RDVVMGYHYKLIIQQKDNKYLMSIPSMKTPTXXPG

SEQ ID NO: 32426 - protein, 41 aa, Artificial Sequence
  Non-cyclic GFR-binding peptide
  MOD_RES (1), (35), (36): Xaa is C or S
  MOD_RES (13), (14), (15), (16), (17): Xaa is A or G
  MOD_RES (18), (19), (20), (21): Xaa is A or G or is absent
XRDVVMGRHKRLXXXXXXXXXYYLMSTASMKTPTXXPGASG

SEQ ID NO: 32427 - protein, 34 aa, Artificial Sequence
  Non-cyclic GFR-binding peptide
  MOD_RES (1), (1): Xaa is C or S
  MOD_RES (13), (14), (15), (16), (17): Xaa is A or G
  MOD_RES (18), (19), (20), (21): Xaa is A or G or is absent
XSEVTMNRYKKLXXXXXXXXXFYLISIANMKEPV

SEQ ID NO: 32428 - protein, 37 aa, Artificial Sequence
  Non-cyclic GFR-binding peptide
  MOD_RES (2), (35), (36): Xaa is C or S
  MOD_RES (13), (14), (15), (16), (17): Xaa is A or G
  MOD_RES (18), (19), (20), (21): Xaa is A or G or is absent
KXSRVIMPIKGYXXXXXXXXXFYLINIPSLAQPVXXP

SEQ ID NO: 32429 - protein, 39 aa, Artificial Sequence
  Non-cyclic GFR-binding peptide
  MOD_RES (2), (36), (37): Xaa is C or S
  MOD_RES (14), (15), (16), (17), (18): Xaa is A or G
  MOD_RES (19), (20), (21), (22): Xaa is A or G or is absent
GXSEVVMDRHKRLXXXXXXXXXYYLISTASLRTPVXXTP

SEQ ID NO: 32430 - protein, 34 aa, Artificial Sequence
  Non-cyclic GFR-binding peptide
  MOD_RES (1), (34): Xaa is C or S
  MOD_RES (12), (13), (14), (15), (16): Xaa is A or G
  MOD_RES (17), (18), (19), (20): Xaa is A or G or is absent
XEEVIMEYKFKXXXXXXXXXLYLMSIPETKVPAX

SEQ ID NO: 32431 - protein, 36 aa, Artificial Sequence
  Non-cyclic GFR-binding peptide
  MOD_RES (33), (34): Xaa is C or S
  MOD_RES (11), (12), (13), (14), (15): Xaa is A or G
  MOD_RES (16), (17), (18), (19): Xaa is A or G or is absent
EVTMNEYKFKXXXXXXXXXLYLISIPEMKEPVXXPE

SEQ ID NO: 32432 - protein, 32 aa, Artificial Sequence
  Non-cyclic GFR-binding peptide
  MOD_RES (31), (32): Xaa is C or S
EVVMDYHYKLVVNNASDKYLISIPSLRTPVXX

SEQ ID NO: 32433 - protein, 37 aa, Artificial Sequence
  Non-cyclic GFR-binding peptide
  MOD_RES (1), (3), (36), (37): Xaa is C or S
  MOD_RES (14), (15), (16), (17), (18): Xaa is A or G
  MOD_RES (19), (20), (21), (22): Xaa is A or G or is absent
XKXSKVVMPIKGYXXXXXXXXXFYLINIPSLDQPVXX

SEQ ID NO: 32434 - protein, 32 aa, Artificial Sequence
  Non-cyclic GFR-binding peptide
  MOD_RES (31), (32): Xaa is C or S
EVTMNRYKKLVVNKNEDFYLISIANMKEPVXX

SEQ ID NO: 32435 - protein, 35 aa, Artificial Sequence
  Non-cyclic GFR-binding peptide
  MOD_RES (1), (35): Xaa is C or S
  MOD_RES (13), (14), (15), (16), (17): Xaa is A or G
  MOD_RES (18), (19), (20), (21): Xaa is A or G or is absent
XSEVTMNRYKKLXXXXXXXXXFYLISIANMKEPVX

SEQ ID NO: 32436 - protein, 31 aa, Artificial Sequence
  Non-cyclic GFR-binding peptide
  MOD_RES (31), (31): Xaa is C or S
EVVMDYHYKLVVNNASDKYLISIPSLRTPVX

SEQ ID NO: 32437 - protein, 32 aa, Artificial Sequence
  Non-cyclic GFR-binding peptide
  MOD_RES (1), (32): Xaa is C or S
XSKVVMPIKGYVKPTRGVFYLINIPSLDQPVX

SEQ ID NO: 32438 - protein, 31 aa, Artificial Sequence
  Non-cyclic GFR-binding peptide
  MOD_RES (1), (1): Xaa is C or S
XSKVVMPIKGYVKPTRGVFYLINIPSLDQPV

SEQ ID NO: 32439 - protein, 38 aa, Artificial Sequence
  Non-cyclic GFR-binding peptide
  MOD_RES (1), (35), (36): Xaa is C or S
  MOD_RES (13), (14), (15), (16), (17): Xaa is A or G
  MOD_RES (18), (19), (20), (21): Xaa is A or G or is absent
XSEVVMDRHKRLXXXXXXXXXYYLISTASLRTPVXXTP

SEQ ID NO: 32440 - protein, 36 aa, Artificial Sequence
  Non-cyclic GFR-binding peptide
  MOD_RES (1), (3), (35), (36): Xaa is C or S
XAXSEVTMNYHYKLVVNKNEDKYLISIPSMKEPVXX

SEQ ID NO: 32441 - protein, 36 aa, Artificial Sequence
  Non-cyclic GFR-binding peptide
  MOD_RES (1), (3): Xaa is C or S
  MOD_RES (15), (16), (17), (18), (19): Xaa is A or G
  MOD_RES (20), (21), (22), (23): Xaa is A or G or is absent
XAXSEVTMNRHKRLXXXXXXXXXYYLISTASMKEPV

SEQ ID NO: 32442 - protein, 31 aa, Artificial Sequence
  Non-cyclic GFR-binding peptide
  MOD_RES (31), (31): Xaa is C or S
EVTMNRYKKLVVNKNEDFYLISIANMKEPVX

SEQ ID NO: 32443 - protein, 38 aa, Artificial Sequence
  Non-cyclic GFR-binding peptide
  MOD_RES (1), (3), (34), (35): Xaa is C or S
XGXEEVIMRHKRLLLVRGNDYYLMSTASTKVPAXXTSP

SEQ ID NO: 32444 - protein, 42 aa, Artificial Sequence
  Non-cyclic GFR-binding peptide
  MOD_RES (2), (36), (37): Xaa is C or S
  MOD_RES (14), (15), (16), (17), (18): Xaa is A or G
  MOD_RES (19), (20), (21), (22): Xaa is A or G or is absent
GXRDVVMGEYKFKXXXXXXXXXLYLMSIPEMKTPTXXPGASG

SEQ ID NO: 32445 - protein, 34 aa, Artificial Sequence
  Non-cyclic GFR-binding peptide
  MOD_RES (1), (3): Xaa is C or S
XAXSEVTMNEYKFKVVNKNEDLYLISIPEMKEPV

SEQ ID NO: 32446 - protein, 40 aa, Artificial Sequence
  Non-cyclic GFR-binding peptide
  MOD_RES (1), (3), (34), (35): Xaa is C or S
XKXSKVIMPIKGYIKPTKGIFYLINIPSLDQSVXXPSASA

SEQ ID NO: 32447 - protein, 33 aa, Artificial Sequence
  Non-cyclic GFR-binding peptide
  MOD_RES (33), (33): Xaa is C or S
  MOD_RES (11), (12), (13), (14), (15): Xaa is A or G
  MOD_RES (16), (17), (18), (19): Xaa is A or G or is absent
EEVIMYHYKLXXXXXXXXXKYLMSIPSTKVPAX

SEQ ID NO: 32448 - protein, 37 aa, Artificial Sequence
  Non-cyclic GFR-binding peptide
  MOD_RES (2), (4), (36), (37): Xaa is C or S
RXAXSEVTMNYHYKLVVNKNEDKYLISIPSMKEPVXX

SEQ ID NO: 32449 - protein, 39 aa, Artificial Sequence
  Non-cyclic GFR-binding peptide
  MOD_RES (1), (3), (34), (35): Xaa is C or S
XKXSKVVMPIKGYVKPTRGVFYLINIPSLDQPVXXPSAS

SEQ ID NO: 32450 - protein, 33 aa, Artificial Sequence
  Non-cyclic GFR-binding peptide
  MOD_RES (33), (33): Xaa is C or S
  MOD_RES (11), (12), (13), (14), (15): Xaa is A or G
  MOD_RES (16), (17), (18), (19): Xaa is A or G or is absent
EEVIMEYKFKXXXXXXXXXLYLMSIPETKVPAX

SEQ ID NO: 32451 - protein, 40 aa, Artificial Sequence
  Non-cyclic GFR-binding peptide
  MOD_RES (2), (4), (37), (38): Xaa is C or S
  MOD_RES (15), (16), (17), (18), (19): Xaa is A or G
  MOD_RES (20), (21), (22), (23): Xaa is A or G or is absent
LXGXEEVIMYHYKLXXXXXXXXXKYLMSIPSTKVPAXXTS

SEQ ID NO: 32452 - protein, 34 aa, Artificial Sequence
  Non-cyclic GFR-binding peptide
  MOD_RES (32), (33): Xaa is C or S
AEVVMDRHKRLVVNNAADYYLISTASLRAPVXXS

SEQ ID NO: 32453 - protein, 40 aa, Artificial Sequence
  Non-cyclic GFR-binding peptide
  MOD_RES (1), (3), (35), (36): Xaa is C or S
XAXSEVTMNYHYKLVVNKNEDKYLISIPSMKEPVXXPEPI

SEQ ID NO: 32454 - protein, 37 aa, Artificial Sequence
  Non-cyclic GFR-binding peptide
  MOD_RES (2), (33), (34): Xaa is C or S
KXSKVIMPIKGYIKPTKGIFYLINIPSLDQSVXXPSA

SEQ ID NO: 32455 - protein, 33 aa, Artificial Sequence
  Non-cyclic GFR-binding peptide
  MOD_RES (33), (33): Xaa is C or S
  MOD_RES (11), (12), (13), (14), (15): Xaa is A or G
  MOD_RES (16), (17), (18), (19): Xaa is A or G or is absent
EVTMNYHYKLXXXXXXXXXKYLISIPSMKEPVX

SEQ ID NO: 32456 - protein, 32 aa, Artificial Sequence
  Non-cyclic GFR-binding peptide
  MOD_RES (31), (32): Xaa is C or S
EEVIMEYKFKLLVRGNDLYLMSIPETKVPAXX

SEQ ID NO: 32457 - protein, 33 aa, Artificial Sequence
  Non-cyclic GFR-binding peptide
  MOD_RES (33), (33): Xaa is C or S
  MOD_RES (11), (12), (13), (14), (15): Xaa is A or G
  MOD_RES (16), (17), (18), (19): Xaa is A or G or is absent
EVTMNEYKFKXXXXXXXXXLYLISIPEMKEPVX

SEQ ID NO: 32458 - protein, 35 aa, Artificial Sequence
  Non-cyclic GFR-binding peptide
  MOD_RES (2), (34), (35): Xaa is C or S
AXSEVTMNPIKGYVVNKNEDFYLINIPSMKEPVXX

SEQ ID NO: 32459 - protein, 44 aa, Artificial Sequence
  Non-cyclic GFR-binding peptide
  MOD_RES (2), (4), (38), (39): Xaa is C or S
  MOD_RES (16), (17), (18), (19), (20): Xaa is A or G
  MOD_RES (21), (22), (23), (24): Xaa is A or G or is absent
HXGXSRVVMNEYKFKXXXXXXXXXLYLVSIPELKTPAXXPKPVH

SEQ ID NO: 32460 - protein, 39 aa, Artificial Sequence
  Non-cyclic GFR-binding peptide
  MOD_RES (1), (3), (35), (36): Xaa is C or S
XGXAEVVMDRHKRLVVNNAADYYLISTASLRAPVXXSAP

SEQ ID NO: 32461 - protein, 39 aa, Artificial Sequence
  Non-cyclic GFR-binding peptide
  MOD_RES (2), (4), (38), (39): Xaa is C or S
  MOD_RES (16), (17), (18), (19), (20): Xaa is A or G
  MOD_RES (21), (22), (23), (24): Xaa is A or G or is absent
RXGXAEVVMDRHKRLXXXXXXXXXYYLISTASLRAPVXX

SEQ ID NO: 32462 - protein, 38 aa, Artificial Sequence
  Non-cyclic GFR-binding peptide
  MOD_RES (2), (4), (36), (37): Xaa is C or S
SXGXRDVVMGYHYKLIIQQKDNKYLMSIPSMKTPTXXP

SEQ ID NO: 32463 - protein, 39 aa, Artificial Sequence
  Non-cyclic GFR-binding peptide
  MOD_RES (2), (36), (37): Xaa is C or S
  MOD_RES (14), (15), (16), (17), (18): Xaa is A or G
  MOD_RES (19), (20), (21), (22): Xaa is A or G or is absent
AXSEVTMNRYKKLXXXXXXXXXFYLISIANMKEPVXXPE

SEQ ID NO: 32464 - protein, 35 aa, Artificial Sequence
  Non-cyclic GFR-binding peptide
  MOD_RES (2), (2): Xaa is C or S
  MOD_RES (14), (15), (16), (17), (18): Xaa is A or G
  MOD_RES (19), (20), (21), (22): Xaa is A or G or is absent
AXSEVTMNPIKGYXXXXXXXXXFYLINIPSMKEPV

SEQ ID NO: 32465 - protein, 40 aa, Artificial Sequence
  Non-cyclic GFR-binding peptide
  MOD_RES (2), (36), (37): Xaa is C or S
  MOD_RES (14), (15), (16), (17), (18): Xaa is A or G
  MOD_RES (19), (20), (21), (22): Xaa is A or G or is absent
GXSEVVMDYHYKLXXXXXXXXXKYLISIPSLRTPVXXTPP

SEQ ID NO: 32466 - protein, 31 aa, Artificial Sequence
  Non-cyclic GFR-binding peptide
  MOD_RES (31), (31): Xaa is C or S
EVVMDEYKFKVVNNASDLYLISIPELRTPVX

SEQ ID NO: 32467 - protein, 37 aa, Artificial Sequence
  Non-cyclic GFR-binding peptide
  MOD_RES (1), (34), (35): Xaa is C or S
  MOD_RES (12), (13), (14), (15), (16): Xaa is A or G
  MOD_RES (17), (18), (19), (20): Xaa is A or G or is absent
XEEVIMRHKRLXXXXXXXXXYYLMSTASTKVPAXXTS

SEQ ID NO: 32468 - protein, 34 aa, Artificial Sequence
  Non-cyclic GFR-binding peptide
  MOD_RES (33), (34): Xaa is C or S
  MOD_RES (11), (12), (13), (14), (15): Xaa is A or G
  MOD_RES (16), (17), (18), (19): Xaa is A or G or is absent
SRVIMPIKGYXXXXXXXXXFYLINIPSLAQPVXX

SEQ ID NO: 32469 - protein, 33 aa, Artificial Sequence
  Non-cyclic GFR-binding peptide
  MOD_RES (12), (13), (14), (15), (16): Xaa is A or G
  MOD_RES (17), (18), (19), (20): Xaa is A or G or is absent
SEVTMNRYKKLXXXXXXXXXFYLISIANMKEPV

SEQ ID NO: 32470 - protein, 39 aa, Artificial Sequence
  Non-cyclic GFR-binding peptide
  MOD_RES (1), (3), (35), (36): Xaa is C or S
XGXRDVVMGYHYKLIIQQKDNKYLMSIPSMKTPTXXPGA

SEQ ID NO: 32471 - protein, 41 aa, Artificial Sequence
  Non-cyclic GFR-binding peptide
  MOD_RES (2), (35), (36): Xaa is C or S
  MOD_RES (13), (14), (15), (16), (17): Xaa is A or G
  MOD_RES (18), (19), (20), (21): Xaa is A or G or is absent
GXEEVIMEYKFKXXXXXXXXXLYLMSIPETKVPAXXTSPVR

SEQ ID NO: 32472 - protein, 33 aa, Artificial Sequence
  Non-cyclic GFR-binding peptide
  MOD_RES (31), (32): Xaa is C or S
EVVMDYHYKLVVNNASDKYLISIPSLRTPVXXT

SEQ ID NO: 32473 - protein, 37 aa, Artificial Sequence
  Non-cyclic GFR-binding peptide
  MOD_RES (2), (4): Xaa is C or S
  MOD_RES (16), (17), (18), (19), (20): Xaa is A or G
  MOD_RES (21), (22), (23), (24): Xaa is A or G or is absent
RXAXSEVTMNRHKRLXXXXXXXXXYYLISTASMKEPV

SEQ ID NO: 32474 - protein, 39 aa, Artificial Sequence
  Non-cyclic GFR-binding peptide
  MOD_RES (2), (4), (36), (37): Xaa is C or S
RXGXSEVVMDRHKRLVVNNASDYYLISTASLRTPVXXTP

SEQ ID NO: 32475 - protein, 39 aa, Artificial Sequence
  Non-cyclic GFR-binding peptide
  MOD_RES (2), (4), (37), (38): Xaa is C or S
  MOD_RES (15), (16), (17), (18), (19): Xaa is A or G
  MOD_RES (20), (21), (22), (23): Xaa is A or G or is absent
LXGXEEVIMEYKFKXXXXXXXXXLYLMSIPETKVPAXXT

SEQ ID NO: 32476 - protein, 39 aa, Artificial Sequence
  Non-cyclic GFR-binding peptide
  MOD_RES (1), (3), (37), (38): Xaa is C or S
  MOD_RES (15), (16), (17), (18), (19): Xaa is A or G
  MOD_RES (20), (21), (22), (23): Xaa is A or G or is absent
XGXESVAMGRHKRLXXXXXXXXXYYLISTASLKTPVXXA

SEQ ID NO: 32477 - protein, 43 aa, Artificial Sequence
  Non-cyclic GFR-binding peptide
  MOD_RES (1), (3), (37), (38): Xaa is C or S
  MOD_RES (15), (16), (17), (18), (19): Xaa is A or G
  MOD_RES (20), (21), (22), (23): Xaa is A or G or is absent
XAXSEVTMNRYKKLXXXXXXXXXFYLISIANMKEPVXXPEPIG

SEQ ID NO: 32478 - protein, 39 aa, Artificial Sequence
  Non-cyclic GFR-binding peptide
  MOD_RES (2), (35), (36): Xaa is C or S
  MOD_RES (13), (14), (15), (16), (17): Xaa is A or G
  MOD_RES (18), (19), (20), (21): Xaa is A or G or is absent
GXEEVIMEYKFKXXXXXXXXXLYLMSIPETKVPAXXTSP

SEQ ID NO: 32479 - protein, 37 aa, Artificial Sequence
  Non-cyclic GFR-binding peptide
  MOD_RES (2), (34), (35): Xaa is C or S
AXSEVTMNYHYKLVVNKNEDKYLISIPSMKEPVXXPE

SEQ ID NO: 32480 - protein, 36 aa, Artificial Sequence
  Non-cyclic GFR-binding peptide
  MOD_RES (2), (36): Xaa is C or S
  MOD_RES (14), (15), (16), (17), (18): Xaa is A or G
  MOD_RES (19), (20), (21), (22): Xaa is A or G or is absent
GXSEVVMDRHKRLXXXXXXXXXYYLISTASLRTPVX

SEQ ID NO: 32481 - protein, 41 aa, Artificial Sequence
  Non-cyclic GFR-binding peptide
  MOD_RES (2), (35), (36): Xaa is C or S
  MOD_RES (13), (14), (15), (16), (17): Xaa is A or G
  MOD_RES (18), (19), (20), (21): Xaa is A or G or is absent
KXSKVIMPIKGYXXXXXXXXXFYLINIPSLDQSVXXPSASA

SEQ ID NO: 32482 - protein, 37 aa, Artificial Sequence
  Non-cyclic GFR-binding peptide
  MOD_RES (32), (33): Xaa is C or S
SEVVMDRHKRLVVNNASDYYLISTASLRTPVXXTPPT

SEQ ID NO: 32483 - protein, 39 aa, Artificial Sequence
  Non-cyclic GFR-binding peptide
  MOD_RES (34), (35): Xaa is C or S
  MOD_RES (12), (13), (14), (15), (16): Xaa is A or G
  MOD_RES (17), (18), (19), (20): Xaa is A or G or is absent
SEVTMNEYKFKXXXXXXXXXLYLISIPEMKEPVXXPEPI

SEQ ID NO: 32484 - protein, 41 aa, Artificial Sequence
  Non-cyclic GFR-binding peptide
  MOD_RES (1), (35), (36): Xaa is C or S
  MOD_RES (13), (14), (15), (16), (17): Xaa is A or G
  MOD_RES (18), (19), (20), (21): Xaa is A or G or is absent
XSEVVMDYHYKLXXXXXXXXXKYLISIPSLRTPVXXTPPTS

SEQ ID NO: 32485 - protein, 35 aa, Artificial Sequence
  Non-cyclic GFR-binding peptide
  MOD_RES (33), (34): Xaa is C or S
  MOD_RES (11), (12), (13), (14), (15): Xaa is A or G
  MOD_RES (16), (17), (18), (19): Xaa is A or G or is absent
SKVIMPIKGYXXXXXXXXXFYLINIPSLDQSVXXP

SEQ ID NO: 32486 - protein, 40 aa, Artificial Sequence
  Non-cyclic GFR-binding peptide
  MOD_RES (1), (35), (36): Xaa is C or S
  MOD_RES (13), (14), (15), (16), (17): Xaa is A or G
  MOD_RES (18), (19), (20), (21): Xaa is A or G or is absent
XSEVTMNRHKRLXXXXXXXXXYYLISTASMKEPVXXPEPI

SEQ ID NO: 32487 - protein, 35 aa, Artificial Sequence
  Non-cyclic GFR-binding peptide
  MOD_RES (2), (4): Xaa is C or S
RXAXSEVTMNEYKFKVVNKNEDLYLISIPEMKEPV

SEQ ID NO: 32488 - protein, 37 aa, Artificial Sequence
  Non-cyclic GFR-binding peptide
  MOD_RES (2), (4), (35), (36): Xaa is C or S
LXGXEEVIMEYKFKLLVRGNDLYLMSIPETKVPAXXT

SEQ ID NO: 32489 - protein, 35 aa, Artificial Sequence
  Non-cyclic GFR-binding peptide
  MOD_RES (2), (4): Xaa is C or S
SXGXRDVVMGRHKRLIIQQKDNYYLMSTASMKTPT

SEQ ID NO: 32490 - protein, 41 aa, Artificial Sequence
  Non-cyclic GFR-binding peptide
  MOD_RES (2), (4), (36), (37): Xaa is C or S
SXGXRDVVMGRHKRLIIQQKDNYYLMSTASMKTPTXXPGAS

SEQ ID NO: 32491 - protein, 34 aa, Artificial Sequence
  Non-cyclic GFR-binding peptide
  MOD_RES (34), (34): Xaa is C or S
  MOD_RES (12), (13), (14), (15), (16): Xaa is A or G
  MOD_RES (17), (18), (19), (20): Xaa is A or G or is absent
SEVTMNPIKGYXXXXXXXXXFYLINIPSMKEPVX

SEQ ID NO: 32492 - protein, 40 aa, Artificial Sequence
  Non-cyclic GFR-binding peptide
  MOD_RES (2), (35), (36): Xaa is C or S
  MOD_RES (13), (14), (15), (16), (17): Xaa is A or G
  MOD_RES (18), (19), (20), (21): Xaa is A or G or is absent
KXSRVIMPIKGYXXXXXXXXXFYLINIPSLAQPVXXPAAS

SEQ ID NO: 32493 - protein, 40 aa, Artificial Sequence
  Non-cyclic GFR-binding peptide
  MOD_RES (2), (4), (36), (37): Xaa is C or S
RXAXSEVTMNEYKFKVVNKNEDLYLISIPEMKEPVXXPEP

SEQ ID NO: 32494 - protein, 33 aa, Artificial Sequence
  Non-cyclic GFR-binding peptide
  MOD_RES (2), (33): Xaa is C or S
GXEEVIMEYKFKLLVRGNDLYLMSIPETKVPAX

SEQ ID NO: 32495 - protein, 43 aa, Artificial Sequence
  Non-cyclic GFR-binding peptide
  MOD_RES (1), (3), (37), (38): Xaa is C or S
  MOD_RES (15), (16), (17), (18), (19): Xaa is A or G
  MOD_RES (20), (21), (22), (23): Xaa is A or G or is absent
XGXSRVVMNEYKFKXXXXXXXXXLYLVSIPELKTPAXXPKPVH

SEQ ID NO: 32496 - protein, 35 aa, Artificial Sequence
  Non-cyclic GFR-binding peptide
  MOD_RES (1), (33), (34): Xaa is C or S
XSEVTMNRHKRLVVNKNEDYYLISTASMKEPVXXP

SEQ ID NO: 32497 - protein, 38 aa, Artificial Sequence
  Non-cyclic GFR-binding peptide
  MOD_RES (2), (4), (35), (36): Xaa is C or S
LXGXEEVIMYHYKLLLVRGNDKYLMSIPSTKVPAXXTS

SEQ ID NO: 32498 - protein, 41 aa, Artificial Sequence
  Non-cyclic GFR-binding peptide
  MOD_RES (2), (4), (35), (36): Xaa is C or S
SXKXSKVIMPIKGYIKPTKGIFYLINIPSLDQSVXXPSASA

SEQ ID NO: 32499 - protein, 36 aa, Artificial Sequence
  Non-cyclic GFR-binding peptide
  MOD_RES (32), (33): Xaa is C or S
AEVVMDRHKRLVVNNAADYYLISTASLRAPVXXSAP

SEQ ID NO: 32500 - protein, 38 aa, Artificial Sequence
  Non-cyclic GFR-binding peptide
  MOD_RES (1), (32), (33): Xaa is C or S
XEEVIMYHYKLLLVRGNDKYLMSIPSTKVPAXXTSPVR

SEQ ID NO: 32501 - protein, 42 aa, Artificial Sequence
  Non-cyclic GFR-binding peptide
  MOD_RES (2), (36), (37): Xaa is C or S
  MOD_RES (14), (15), (16), (17), (18): Xaa is A or G
  MOD_RES (19), (20), (21), (22): Xaa is A or G or is absent
AXSEVTMNRYKKLXXXXXXXXXFYLISIANMKEPVXXPEPIG

SEQ ID NO: 32502 - protein, 40 aa, Artificial Sequence
  Non-cyclic GFR-binding peptide
  MOD_RES (1), (3), (35), (36): Xaa is C or S
XGXSEVVMDEYKFKVVNNASDLYLISIPELRTPVXXTPPT

SEQ ID NO: 32503 - protein, 37 aa, Artificial Sequence
  Non-cyclic GFR-binding peptide
  MOD_RES (34), (35): Xaa is C or S
  MOD_RES (12), (13), (14), (15), (16): Xaa is A or G
  MOD_RES (17), (18), (19), (20): Xaa is A or G or is absent
RDVVMGYHYKLXXXXXXXXXKYLMSIPSMKTPTXXPG

SEQ ID NO: 32504 - protein, 38 aa, Artificial Sequence
  Non-cyclic GFR-binding peptide
  MOD_RES (33), (34): Xaa is C or S
  MOD_RES (11), (12), (13), (14), (15): Xaa is A or G
  MOD_RES (16), (17), (18), (19): Xaa is A or G or is absent
EVTMNPIKGYXXXXXXXXXFYLINIPSMKEPVXXPEPI

SEQ ID NO: 32505 - protein, 38 aa, Artificial Sequence
  Non-cyclic GFR-binding peptide
  MOD_RES (1), (32), (33): Xaa is C or S
XSKVIMPIKGYIKPTKGIFYLINIPSLDQSVXXPSASA

SEQ ID NO: 32506 - protein, 36 aa, Artificial Sequence
  Non-cyclic GFR-binding peptide
  MOD_RES (1), (35), (36): Xaa is C or S
  MOD_RES (13), (14), (15), (16), (17): Xaa is A or G
  MOD_RES (18), (19), (20), (21): Xaa is A or G or is absent
XSEVTMNRHKRLXXXXXXXXXYYLISTASMKEPVXX

SEQ ID NO: 32507 - protein, 32 aa, Artificial Sequence
  Non-cyclic GFR-binding peptide
  MOD_RES (1), (1): Xaa is C or S
XRDVVMGYHYKLIIQQKDNKYLMSIPSMKTPT

SEQ ID NO: 32508 - protein, 40 aa, Artificial Sequence
  Non-cyclic GFR-binding peptide
  MOD_RES (1), (3), (34), (35): Xaa is C or S
XGXEEVIMRHKRLLLVRGNDYYLMSTASTKVPAXXTSPVR

SEQ ID NO: 32509 - protein, 36 aa, Artificial Sequence
  Non-cyclic GFR-binding peptide
  MOD_RES (1), (33), (34): Xaa is C or S
XRDVVMGYHYKLIIQQKDNKYLMSIPSMKTPTXXPG

SEQ ID NO: 32510 - protein, 33 aa, Artificial Sequence
  Non-cyclic GFR-binding peptide
  MOD_RES (33), (33): Xaa is C or S
  MOD_RES (11), (12), (13), (14), (15): Xaa is A or G
  MOD_RES (16), (17), (18), (19): Xaa is A or G or is absent
EVTMNRHKRLXXXXXXXXXYYLISTASMKEPVX

SEQ ID NO: 32511 - protein, 41 aa, Artificial Sequence
  Non-cyclic GFR-binding peptide
  MOD_RES (1), (35), (36): Xaa is C or S
  MOD_RES (13), (14), (15), (16), (17): Xaa is A or G
  MOD_RES (18), (19), (20), (21): Xaa is A or G or is absent
XSEVTMNEYKFKXXXXXXXXXLYLISIPEMKEPVXXPEPIG

SEQ ID NO: 32512 - protein, 42 aa, Artificial Sequence
  Non-cyclic GFR-binding peptide
  MOD_RES (2), (4), (38), (39): Xaa is C or S
  MOD_RES (16), (17), (18), (19), (20): Xaa is A or G
  MOD_RES (21), (22), (23), (24): Xaa is A or G or is absent
RXAXSEVTMNPIKGYXXXXXXXXXFYLINIPSMKEPVXXPEP

SEQ ID NO: 32513 - protein, 32 aa, Artificial Sequence
  Non-cyclic GFR-binding peptide
  MOD_RES (32), (32): Xaa is C or S
SEVTMNRYKKLVVNKNEDFYLISIANMKEPVX

SEQ ID NO: 32514 - protein, 33 aa, Artificial Sequence
  Non-cyclic GFR-binding peptide
  MOD_RES (1), (32), (33): Xaa is C or S
XSKVIMPIKGYIKPTKGIFYLINIPSLDQSVXX

SEQ ID NO: 32515 - protein, 32 aa, Artificial Sequence
  Non-cyclic GFR-binding peptide
  MOD_RES (31), (32): Xaa is C or S
SKVVMPIKGYVKPTRGVFYLINIPSLDQPVXX

SEQ ID NO: 32516 - protein, 38 aa, Artificial Sequence
  Non-cyclic GFR-binding peptide
  MOD_RES (2), (4), (37), (38): Xaa is C or S
  MOD_RES (15), (16), (17), (18), (19): Xaa is A or G
  MOD_RES (20), (21), (22), (23): Xaa is A or G or is absent
SXKXSKVVMPIKGYXXXXXXXXXFYLINIPSLDQPVXX

SEQ ID NO: 32517 - protein, 36 aa, Artificial Sequence
  Non-cyclic GFR-binding peptide
  MOD_RES (2), (34), (35): Xaa is C or S
AXSEVTMNEYKFKVVNKNEDLYLISIPEMKEPVXXP

SEQ ID NO: 32518 - protein, 38 aa, Artificial Sequence
  Non-cyclic GFR-binding peptide
  MOD_RES (2), (4), (38): Xaa is C or S
  MOD_RES (16), (17), (18), (19), (20): Xaa is A or G
  MOD_RES (21), (22), (23), (24): Xaa is A or G or is absent
RXAXSEVTMNYHYKLXXXXXXXXXKYLISIPSMKEPVX

SEQ ID NO: 32519 - protein, 38 aa, Artificial Sequence
  Non-cyclic GFR-binding peptide
  MOD_RES (2), (4), (36), (37): Xaa is C or S
RXGXAEVVMDRHKRLVVNNAADYYLISTASLRAPVXXS

SEQ ID NO: 32520 - protein, 37 aa, Artificial Sequence
  Non-cyclic GFR-binding peptide
  MOD_RES (31), (32): Xaa is C or S
EVTMNPIKGYVVNKNEDFYLINIPSMKEPVXXPEPIG

SEQ ID NO: 32521 - protein, 42 aa, Artificial Sequence
  Non-cyclic GFR-binding peptide
  MOD_RES (2), (4), (37), (38): Xaa is C or S
  MOD_RES (15), (16), (17), (18), (19): Xaa is A or G
  MOD_RES (20), (21), (22), (23): Xaa is A or G or is absent
SXKXSKVIMPIKGYXXXXXXXXXFYLINIPSLDQSVXXPSAS

SEQ ID NO: 32522 - protein, 33 aa, Artificial Sequence
  Non-cyclic GFR-binding peptide
  MOD_RES (1), (32), (33): Xaa is C or S
XEEVIMEYKFKLLVRGNDLYLMSIPETKVPAXX

SEQ ID NO: 32523 - protein, 38 aa, Artificial Sequence
  Non-cyclic GFR-binding peptide
  MOD_RES (1), (3), (37), (38): Xaa is C or S
  MOD_RES (15), (16), (17), (18), (19): Xaa is A or G
  MOD_RES (20), (21), (22), (23): Xaa is A or G or is absent
XAXSEVTMNRHKRLXXXXXXXXXYYLISTASMKEPVXX

SEQ ID NO: 32524 - protein, 38 aa, Artificial Sequence
  Non-cyclic GFR-binding peptide
  MOD_RES (32), (33): Xaa is C or S
SEVTMNRHKRLVVNKNEDYYLISTASMKEPVXXPEPIG

SEQ ID NO: 32525 - protein, 39 aa, Artificial Sequence
  Non-cyclic GFR-binding peptide
  MOD_RES (2), (4), (35), (36): Xaa is C or S
LXGXEEVIMRHKRLLLVRGNDYYLMSTASTKVPAXXTSP

SEQ ID NO: 32526 - protein, 38 aa, Artificial Sequence
  Non-cyclic GFR-binding peptide
  MOD_RES (2), (34), (35): Xaa is C or S
AXSEVTMNYHYKLVVNKNEDKYLISIPSMKEPVXXPEP

SEQ ID NO: 32527 - protein, 38 aa, Artificial Sequence
  Non-cyclic GFR-binding peptide
  MOD_RES (1), (3), (36), (37): Xaa is C or S
  MOD_RES (14), (15), (16), (17), (18): Xaa is A or G
  MOD_RES (19), (20), (21), (22): Xaa is A or G or is absent
XKXSKVIMPIKGYXXXXXXXXXFYLINIPSLDQSVXXP

SEQ ID NO: 32528 - protein, 39 aa, Artificial Sequence
  Non-cyclic GFR-binding peptide
  MOD_RES (2), (4), (35), (36): Xaa is C or S
SXKXSRVIMPIKGYVKPKRGVFYLINIPSLAQPVXXPAA

SEQ ID NO: 32529 - protein, 37 aa, Artificial Sequence
  Non-cyclic GFR-binding peptide
  MOD_RES (1), (33), (34): Xaa is C or S
XESVAMGRHKRLYTVVGKDYYLISTASLKTPVXXAKS

SEQ ID NO: 32530 - protein, 36 aa, Artificial Sequence
  Non-cyclic GFR-binding peptide
  MOD_RES (2), (34), (35): Xaa is C or S
GXRDVVMGEYKFKIIQQKDNLYLMSIPEMKTPTXXP

SEQ ID NO: 32531 - protein, 36 aa, Artificial Sequence
  Non-cyclic GFR-binding peptide
  MOD_RES (34), (35): Xaa is C or S
  MOD_RES (12), (13), (14), (15), (16): Xaa is A or G
  MOD_RES (17), (18), (19), (20): Xaa is A or G or is absent
ESVAMGRHKRLXXXXXXXXXYYLISTASLKTPVXXA

SEQ ID NO: 32532 - protein, 34 aa, Artificial Sequence
  Non-cyclic GFR-binding peptide
  MOD_RES (2), (34): Xaa is C or S
AXSEVTMNYHYKLVVNKNEDKYLISIPSMKEPVX

SEQ ID NO: 32533 - protein, 31 aa, Artificial Sequence
  Non-cyclic GFR-binding peptide
  MOD_RES (31), (31): Xaa is C or S
EVVMDRHKRLVVNNASDYYLISTASLRTPVX

SEQ ID NO: 32534 - protein, 33 aa, Artificial Sequence
  Non-cyclic GFR-binding peptide
  MOD_RES (12), (13), (14), (15), (16): Xaa is A or G
  MOD_RES (17), (18), (19), (20): Xaa is A or G or is absent
RDVVMGYHYKLXXXXXXXXXKYLMSIPSMKTPT

SEQ ID NO: 32535 - protein, 38 aa, Artificial Sequence
  Non-cyclic GFR-binding peptide
  MOD_RES (33), (34): Xaa is C or S
  MOD_RES (11), (12), (13), (14), (15): Xaa is A or G
  MOD_RES (16), (17), (18), (19): Xaa is A or G or is absent
EVVMDRHKRLXXXXXXXXXYYLISTASLRTPVXXTPPT

SEQ ID NO: 32536 - protein, 34 aa, Artificial Sequence
  Non-cyclic GFR-binding peptide
  MOD_RES (1), (1): Xaa is C or S
  MOD_RES (13), (14), (15), (16), (17): Xaa is A or G
  MOD_RES (18), (19), (20), (21): Xaa is A or G or is absent
XSEVTMNYHYKLXXXXXXXXXKYLISIPSMKEPV

SEQ ID NO: 32537 - protein, 40 aa, Artificial Sequence
  Non-cyclic GFR-binding peptide
  MOD_RES (1), (3), (37), (38): Xaa is C or S
  MOD_RES (15), (16), (17), (18), (19): Xaa is A or G
  MOD_RES (20), (21), (22), (23): Xaa is A or G or is absent
XGXESVAMGRHKRLXXXXXXXXXYYLISTASLKTPVXXAK

SEQ ID NO: 32538 - protein, 41 aa, Artificial Sequence
  Non-cyclic GFR-binding peptide
  MOD_RES (1), (3), (37), (38): Xaa is C or S
  MOD_RES (15), (16), (17), (18), (19): Xaa is A or G
  MOD_RES (20), (21), (22), (23): Xaa is A or G or is absent
XGXSEVVMDYHYKLXXXXXXXXXKYLISIPSLRTPVXXTPP

SEQ ID NO: 32539 - protein, 38 aa, Artificial Sequence
  Non-cyclic GFR-binding peptide
  MOD_RES (32), (33): Xaa is C or S
RDVVMGRHKRLIIQQKDNYYLMSTASMKTPTXXPGASG

SEQ ID NO: 32540 - protein, 39 aa, Artificial Sequence
  Non-cyclic GFR-binding peptide
  MOD_RES (2), (4), (36), (37): Xaa is C or S
RXAXSEVTMNRHKRLVVNKNEDYYLISTASMKEPVXXPE

SEQ ID NO: 32541 - protein, 35 aa, Artificial Sequence
  Non-cyclic GFR-binding peptide
  MOD_RES (1), (35): Xaa is C or S
  MOD_RES (13), (14), (15), (16), (17): Xaa is A or G
  MOD_RES (18), (19), (20), (21): Xaa is A or G or is absent
XSEVTMNYHYKLXXXXXXXXXKYLISIPSMKEPVX

SEQ ID NO: 32542 - protein, 38 aa, Artificial Sequence
  Non-cyclic GFR-binding peptide
  MOD_RES (2), (4), (35), (36): Xaa is C or S
SXKXSKVIMPIKGYIKPTKGIFYLINIPSLDQSVXXPS

SEQ ID NO: 32543 - protein, 35 aa, Artificial Sequence
  Non-cyclic GFR-binding peptide
  MOD_RES (34), (35): Xaa is C or S
  MOD_RES (12), (13), (14), (15), (16): Xaa is A or G
  MOD_RES (17), (18), (19), (20): Xaa is A or G or is absent
SEVVMDEYKFKXXXXXXXXXLYLISIPELRTPVXX

SEQ ID NO: 32544 - protein, 38 aa, Artificial Sequence
  Non-cyclic GFR-binding peptide
  MOD_RES (1), (34), (35): Xaa is C or S
  MOD_RES (12), (13), (14), (15), (16): Xaa is A or G
  MOD_RES (17), (18), (19), (20): Xaa is A or G or is absent
XEEVIMRHKRLXXXXXXXXXYYLMSTASTKVPAXXTSP

SEQ ID NO: 32545 - protein, 40 aa, Artificial Sequence
  Non-cyclic GFR-binding peptide
  MOD_RES (2), (4), (37), (38): Xaa is C or S
  MOD_RES (15), (16), (17), (18), (19): Xaa is A or G
  MOD_RES (20), (21), (22), (23): Xaa is A or G or is absent
SXKXSRVIMPIKGYXXXXXXXXXFYLINIPSLAQPVXXPA

SEQ ID NO: 32546 - protein, 36 aa, Artificial Sequence
  Non-cyclic GFR-binding peptide
  MOD_RES (2), (4), (35), (36): Xaa is C or S
LXGXEEVIMRHKRLLLVRGNDYYLMSTASTKVPAXX

SEQ ID NO: 32547 - protein, 38 aa, Artificial Sequence
  Non-cyclic GFR-binding peptide
  MOD_RES (2), (4), (37), (38): Xaa is C or S
  MOD_RES (15), (16), (17), (18), (19): Xaa is A or G
  MOD_RES (20), (21), (22), (23): Xaa is A or G or is absent
SXKXSRVIMPIKGYXXXXXXXXXFYLINIPSLAQPVXX

SEQ ID NO: 32548 - protein, 39 aa, Artificial Sequence
  Non-cyclic GFR-binding peptide
  MOD_RES (2), (4), (38), (39): Xaa is C or S
  MOD_RES (16), (17), (18), (19), (20): Xaa is A or G
  MOD_RES (21), (22), (23), (24): Xaa is A or G or is absent
SXGXRDVVMGEYKFKXXXXXXXXXLYLMSIPEMKTPTXX

SEQ ID NO: 32549 - protein, 34 aa, Artificial Sequence
  Non-cyclic GFR-binding peptide
  MOD_RES (32), (33): Xaa is C or S
SEVTMNYHYKLVVNKNEDKYLISIPSMKEPVXXP

SEQ ID NO: 32550 - protein, 39 aa, Artificial Sequence
  Non-cyclic GFR-binding peptide
  MOD_RES (1), (33), (34): Xaa is C or S
XSEVTMNPIKGYVVNKNEDFYLINIPSMKEPVXXPEPIG

SEQ ID NO: 32551 - protein, 40 aa, Artificial Sequence
  Non-cyclic GFR-binding peptide
  MOD_RES (1), (3), (35), (36): Xaa is C or S
XGXAEVVMDRHKRLVVNNAADYYLISTASLRAPVXXSAPA

SEQ ID NO: 32552 - protein, 34 aa, Artificial Sequence
  Non-cyclic GFR-binding peptide
  MOD_RES (2), (34): Xaa is C or S
GXRDVVMGYHYKLIIQQKDNKYLMSIPSMKTPTX

SEQ ID NO: 32553 - protein, 32 aa, Artificial Sequence
  Non-cyclic GFR-binding peptide
  MOD_RES (31), (32): Xaa is C or S
SVAMGRHKRLYTVVGKDYYLISTASLKTPVXX

SEQ ID NO: 32554 - protein, 35 aa, Artificial Sequence
  Non-cyclic GFR-binding peptide
  MOD_RES (1), (33), (34): Xaa is C or S
XRDVVMGEYKFKIIQQKDNLYLMSIPEMKTPTXXP

SEQ ID NO: 32555 - protein, 39 aa, Artificial Sequence
  Non-cyclic GFR-binding peptide
  MOD_RES (2), (34), (35): Xaa is C or S
AXSEVTMNEYKFKVVNKNEDLYLISIPEMKEPVXXPEPI

SEQ ID NO: 32556 - protein, 34 aa, Artificial Sequence
  Non-cyclic GFR-binding peptide
  MOD_RES (31), (32): Xaa is C or S
EEVIMRHKRLLLVRGNDYYLMSTASTKVPAXXTS

SEQ ID NO: 32557 - protein, 32 aa, Artificial Sequence
  Non-cyclic GFR-binding peptide
  MOD_RES (2), (2): Xaa is C or S
KXSRVIMPIKGYVKPKRGVFYLINIPSLAQPV

SEQ ID NO: 32558 - protein, 32 aa, Artificial Sequence
  Non-cyclic GFR-binding peptide
  MOD_RES (31), (32): Xaa is C or S
EEVIMYHYKLLLVRGNDKYLMSIPSTKVPAXX

SEQ ID NO: 32559 - protein, 38 aa, Artificial Sequence
  Non-cyclic GFR-binding peptide
  MOD_RES (1), (35), (36): Xaa is C or S
  MOD_RES (13), (14), (15), (16), (17): Xaa is A or G
  MOD_RES (18), (19), (20), (21): Xaa is A or G or is absent
XSEVVMDEYKFKXXXXXXXXXLYLISIPELRTPVXXTP

SEQ ID NO: 32560 - protein, 35 aa, Artificial Sequence
  Non-cyclic GFR-binding peptide
  MOD_RES (34), (35): Xaa is C or S
  MOD_RES (12), (13), (14), (15), (16): Xaa is A or G
  MOD_RES (17), (18), (19), (20): Xaa is A or G or is absent
SEVVMDYHYKLXXXXXXXXXKYLISIPSLRTPVXX

SEQ ID NO: 32561 - protein, 32 aa, Artificial Sequence
  Non-cyclic GFR-binding peptide
  MOD_RES (11), (12), (13), (14), (15): Xaa is A or G
  MOD_RES (16), (17), (18), (19): Xaa is A or G or is absent
SRVIMPIKGYXXXXXXXXXFYLINIPSLAQPV

SEQ ID NO: 32562 - protein, 41 aa, Artificial Sequence
  Non-cyclic GFR-binding peptide
  MOD_RES (2), (4), (36), (37): Xaa is C or S
RXAXSEVTMNYHYKLVVNKNEDKYLISIPSMKEPVXXPEPI

SEQ ID NO: 32563 - protein, 35 aa, Artificial Sequence
  Non-cyclic GFR-binding peptide
  MOD_RES (2), (4), (35): Xaa is C or S
SXKXSRVIMPIKGYVKPKRGVFYLINIPSLAQPVX

SEQ ID NO: 32564 - protein, 34 aa, Artificial Sequence
  Non-cyclic GFR-binding peptide
  MOD_RES (1), (34): Xaa is C or S
  MOD_RES (12), (13), (14), (15), (16): Xaa is A or G
  MOD_RES (17), (18), (19), (20): Xaa is A or G or is absent
XEEVIMYHYKLXXXXXXXXXKYLMSIPSTKVPAX

SEQ ID NO: 32565 - protein, 39 aa, Artificial Sequence
  Non-cyclic GFR-binding peptide
  MOD_RES (2), (4), (36), (37): Xaa is C or S
SXGXRDVVMGEYKFKIIQQKDNLYLMSIPEMKTPTXXPG

SEQ ID NO: 32566 - protein, 35 aa, Artificial Sequence
  Non-cyclic GFR-binding peptide
  MOD_RES (1), (3), (35): Xaa is C or S
XGXRDVVMGRHKRLIIQQKDNYYLMSTASMKTPTX

SEQ ID NO: 32567 - protein, 36 aa, Artificial Sequence
  Non-cyclic GFR-binding peptide
  MOD_RES (1), (33), (34): Xaa is C or S
XSEVTMNRYKKLVVNKNEDFYLISIANMKEPVXXPE

SEQ ID NO: 32568 - protein, 33 aa, Artificial Sequence
  Non-cyclic GFR-binding peptide
  MOD_RES (2), (2): Xaa is C or S
AXSEVTMNEYKFKVVNKNEDLYLISIPEMKEPV

SEQ ID NO: 32569 - protein, 41 aa, Artificial Sequence
  Non-cyclic GFR-binding peptide
  MOD_RES (2), (4), (38), (39): Xaa is C or S
  MOD_RES (16), (17), (18), (19), (20): Xaa is A or G
  MOD_RES (21), (22), (23), (24): Xaa is A or G or is absent
RXGXSEVVMDRHKRLXXXXXXXXXYYLISTASLRTPVXXTP

SEQ ID NO: 32570 - protein, 38 aa, Artificial Sequence
  Non-cyclic GFR-binding peptide
  MOD_RES (1), (3), (37), (38): Xaa is C or S
  MOD_RES (15), (16), (17), (18), (19): Xaa is A or G
  MOD_RES (20), (21), (22), (23): Xaa is A or G or is absent
XGXSEVVMDRHKRLXXXXXXXXXYYLISTASLRTPVXX

SEQ ID NO: 32571 - protein, 40 aa, Artificial Sequence
  Non-cyclic GFR-binding peptide
  MOD_RES (2), (35), (36): Xaa is C or S
  MOD_RES (13), (14), (15), (16), (17): Xaa is A or G
  MOD_RES (18), (19), (20), (21): Xaa is A or G or is absent
KXSKVIMPIKGYXXXXXXXXXFYLINIPSLDQSVXXPSAS

SEQ ID NO: 32572 - protein, 37 aa, Artificial Sequence
  Non-cyclic GFR-binding peptide
  MOD_RES (2), (4): Xaa is C or S
  MOD_RES (16), (17), (18), (19), (20): Xaa is A or G
  MOD_RES (21), (22), (23), (24): Xaa is A or G or is absent
SXGXRDVVMGYHYKLXXXXXXXXXKYLMSIPSMKTPT

SEQ ID NO: 32573 - protein, 33 aa, Artificial Sequence
  Non-cyclic GFR-binding peptide
  MOD_RES (31), (32): Xaa is C or S
EVVMDRHKRLVVNNASDYYLISTASLRTPVXXT

SEQ ID NO: 32574 - protein, 33 aa, Artificial Sequence
  Non-cyclic GFR-binding peptide
  MOD_RES (32), (33): Xaa is C or S
ESVAMGRHKRLYTVVGKDYYLISTASLKTPVXX

SEQ ID NO: 32575 - protein, 34 aa, Artificial Sequence
  Non-cyclic GFR-binding peptide
  MOD_RES (31), (32): Xaa is C or S
EVTMNEYKFKVVNKNEDLYLISIPEMKEPVXXPE

SEQ ID NO: 32576 - protein, 43 aa, Artificial Sequence
  Non-cyclic GFR-binding peptide
  MOD_RES (1), (3), (37), (38): Xaa is C or S
  MOD_RES (15), (16), (17), (18), (19): Xaa is A or G
  MOD_RES (20), (21), (22), (23): Xaa is A or G or is absent
XGXRDVVMGEYKFKXXXXXXXXXLYLMSIPEMKTPTXXPGASG

SEQ ID NO: 32577 - protein, 38 aa, Artificial Sequence
  Non-cyclic GFR-binding peptide
  MOD_RES (1), (32), (33): Xaa is C or S
XEEVIMEYKFKLLVRGNDLYLMSIPETKVPAXXTSPVR

SEQ ID NO: 32578 - protein, 33 aa, Artificial Sequence
  Non-cyclic GFR-binding peptide
  MOD_RES (2), (2): Xaa is C or S
GXESVAMGRHKRLYTVVGKDYYLISTASLKTPV

SEQ ID NO: 32579 - protein, 33 aa, Artificial Sequence
  Non-cyclic GFR-binding peptide
  MOD_RES (12), (13), (14), (15), (16): Xaa is A or G
  MOD_RES (17), (18), (19), (20): Xaa is A or G or is absent
SEVVMDRHKRLXXXXXXXXXYYLISTASLRTPV

SEQ ID NO: 32580 - protein, 37 aa, Artificial Sequence
  Non-cyclic GFR-binding peptide
  MOD_RES (2), (33), (34): Xaa is C or S
GXEEVIMEYKFKLLVRGNDLYLMSIPETKVPAXXTSP

SEQ ID NO: 32581 - protein, 40 aa, Artificial Sequence
  Non-cyclic GFR-binding peptide
  MOD_RES (1), (3), (37), (38): Xaa is C or S
  MOD_RES (15), (16), (17), (18), (19): Xaa is A or G
  MOD_RES (20), (21), (22), (23): Xaa is A or G or is absent
XAXSEVTMNRYKKLXXXXXXXXXFYLISIANMKEPVXXPE

SEQ ID NO: 32582 - protein, 38 aa, Artificial Sequence
  Non-cyclic GFR-binding peptide
  MOD_RES (2), (4), (37), (38): Xaa is C or S
  MOD_RES (15), (16), (17), (18), (19): Xaa is A or G
  MOD_RES (20), (21), (22), (23): Xaa is A or G or is absent
LXGXEEVIMRHKRLXXXXXXXXXYYLMSTASTKVPAXX

SEQ ID NO: 32583 - protein, 31 aa, Artificial Sequence
  Non-cyclic GFR-binding peptide
  MOD_RES (1), (1): Xaa is C or S
XEEVIMEYKFKLLVRGNDLYLMSIPETKVPA

SEQ ID NO: 32584 - protein, 35 aa, Artificial Sequence
  Non-cyclic GFR-binding peptide
  MOD_RES (31), (32): Xaa is C or S
SKVIMPIKGYIKPTKGIFYLINIPSLDQSVXXPSA

SEQ ID NO: 32585 - protein, 32 aa, Artificial Sequence
  Non-cyclic GFR-binding peptide
  MOD_RES (32), (32): Xaa is C or S
SEVTMNPIKGYVVNKNEDFYLINIPSMKEPVX

SEQ ID NO: 32586 - protein, 40 aa, Artificial Sequence
  Non-cyclic GFR-binding peptide
  MOD_RES (34), (35): Xaa is C or S
  MOD_RES (12), (13), (14), (15), (16): Xaa is A or G
  MOD_RES (17), (18), (19), (20): Xaa is A or G or is absent
ESVAMGRHKRLXXXXXXXXXYYLISTASLKTPVXXAKSAK

SEQ ID NO: 32587 - protein, 40 aa, Artificial Sequence
  Non-cyclic GFR-binding peptide
  MOD_RES (34), (35): Xaa is C or S
  MOD_RES (12), (13), (14), (15), (16): Xaa is A or G
  MOD_RES (17), (18), (19), (20): Xaa is A or G or is absent
SEVVMDEYKFKXXXXXXXXXLYLISIPELRTPVXXTPPTS

SEQ ID NO: 32588 - protein, 36 aa, Artificial Sequence
  Non-cyclic GFR-binding peptide
  MOD_RES (34), (35): Xaa is C or S
  MOD_RES (12), (13), (14), (15), (16): Xaa is A or G
  MOD_RES (17), (18), (19), (20): Xaa is A or G or is absent
SEVTMNPIKGYXXXXXXXXXFYLINIPSMKEPVXXP

SEQ ID NO: 32589 - protein, 38 aa, Artificial Sequence
  Non-cyclic GFR-binding peptide
  MOD_RES (2), (36), (37): Xaa is C or S
  MOD_RES (14), (15), (16), (17), (18): Xaa is A or G
  MOD_RES (19), (20), (21), (22): Xaa is A or G or is absent
GXSEVVMDEYKFKXXXXXXXXXLYLISIPELRTPVXXT

SEQ ID NO: 32590 - protein, 36 aa, Artificial Sequence
  Non-cyclic GFR-binding peptide
  MOD_RES (2), (4), (36): Xaa is C or S
RXGXSEVVMDYHYKLVVNNASDKYLISIPSLRTPVX

SEQ ID NO: 32591 - protein, 38 aa, Artificial Sequence
  Non-cyclic GFR-binding peptide
  MOD_RES (33), (34): Xaa is C or S
  MOD_RES (11), (12), (13), (14), (15): Xaa is A or G
  MOD_RES (16), (17), (18), (19): Xaa is A or G or is absent
EVVMDEYKFKXXXXXXXXXLYLISIPELRTPVXXTPPT

SEQ ID NO: 32592 - protein, 33 aa, Artificial Sequence
  Non-cyclic GFR-binding peptide
  MOD_RES (2), (2): Xaa is C or S
AXSEVTMNRYKKLVVNKNEDFYLISIANMKEPV

SEQ ID NO: 32593 - protein, 41 aa, Artificial Sequence
  Non-cyclic GFR-binding peptide
  MOD_RES (2), (35), (36): Xaa is C or S
  MOD_RES (13), (14), (15), (16), (17): Xaa is A or G
  MOD_RES (18), (19), (20), (21): Xaa is A or G or is absent
KXSRVIMPIKGYXXXXXXXXXFYLINIPSLAQPVXXPAASA

SEQ ID NO: 32594 - protein, 42 aa, Artificial Sequence
  Non-cyclic GFR-binding peptide
  MOD_RES (1), (3), (36), (37): Xaa is C or S
  MOD_RES (14), (15), (16), (17), (18): Xaa is A or G
  MOD_RES (19), (20), (21), (22): Xaa is A or G or is absent
XGXEEVIMEYKFKXXXXXXXXXLYLMSIPETKVPAXXTSPVR

SEQ ID NO: 32595 - protein, 31 aa, Artificial Sequence
  Non-cyclic GFR-binding peptide
SEVTMNEYKFKVVNKNEDLYLISIPEMKEPV

SEQ ID NO: 32596 - protein, 36 aa, Artificial Sequence
  Non-cyclic GFR-binding peptide
  MOD_RES (2), (4): Xaa is C or S
  MOD_RES (15), (16), (17), (18), (19): Xaa is A or G
  MOD_RES (20), (21), (22), (23): Xaa is A or G or is absent
SXKXSKVVMPIKGYXXXXXXXXXFYLINIPSLDQPV

SEQ ID NO: 32597 - protein, 38 aa, Artificial Sequence
  Non-cyclic GFR-binding peptide
  MOD_RES (2), (4), (36), (37): Xaa is C or S
RXGXSEVVMDEYKFKVVNNASDLYLISIPELRTPVXXT

SEQ ID NO: 32598 - protein, 38 aa, Artificial Sequence
  Non-cyclic GFR-binding peptide
  MOD_RES (33), (34): Xaa is C or S
  MOD_RES (11), (12), (13), (14), (15): Xaa is A or G
  MOD_RES (16), (17), (18), (19): Xaa is A or G or is absent
EVVMDYHYKLXXXXXXXXXKYLISIPSLRTPVXXTPPT

SEQ ID NO: 32599 - protein, 43 aa, Artificial Sequence
  Non-cyclic GFR-binding peptide
  MOD_RES (2), (4), (38), (39): Xaa is C or S
  MOD_RES (16), (17), (18), (19), (20): Xaa is A or G
  MOD_RES (21), (22), (23), (24): Xaa is A or G or is absent
SXGXRDVVMGEYKFKXXXXXXXXXLYLMSIPEMKTPTXXPGAS

SEQ ID NO: 32600 - protein, 37 aa, Artificial Sequence
  Non-cyclic GFR-binding peptide
  MOD_RES (1), (34), (35): Xaa is C or S
  MOD_RES (12), (13), (14), (15), (16): Xaa is A or G
  MOD_RES (17), (18), (19), (20): Xaa is A or G or is absent
XSRVIMPIKGYXXXXXXXXXFYLINIPSLAQPVXXPA

SEQ ID NO: 32601 - protein, 37 aa, Artificial Sequence
  Non-cyclic GFR-binding peptide
  MOD_RES (2), (4), (36), (37): Xaa is C or S
RXGXSEVVMDEYKFKVVNNASDLYLISIPELRTPVXX

SEQ ID NO: 32602 - protein, 31 aa, Artificial Sequence
  Non-cyclic GFR-binding peptide
AEVVMDRHKRLVVNNAADYYLISTASLRAPV

SEQ ID NO: 32603 - protein, 37 aa, Artificial Sequence
  Non-cyclic GFR-binding peptide
  MOD_RES (2), (4): Xaa is C or S
  MOD_RES (16), (17), (18), (19), (20): Xaa is A or G
  MOD_RES (21), (22), (23), (24): Xaa is A or G or is absent
RXGXSEVVMDEYKFKXXXXXXXXXLYLISIPELRTPV

SEQ ID NO: 32604 - protein, 35 aa, Artificial Sequence
  Non-cyclic GFR-binding peptide
  MOD_RES (31), (32): Xaa is C or S
EVTMNYHYKLVVNKNEDKYLISIPSMKEPVXXPEP

SEQ ID NO: 32605 - protein, 34 aa, Artificial Sequence
  Non-cyclic GFR-binding peptide
  MOD_RES (31), (32): Xaa is C or S
EVTMNRHKRLVVNKNEDYYLISTASMKEPVXXPE

SEQ ID NO: 32606 - protein, 36 aa, Artificial Sequence
  Non-cyclic GFR-binding peptide
  MOD_RES (1), (34), (35): Xaa is C or S
  MOD_RES (12), (13), (14), (15), (16): Xaa is A or G
  MOD_RES (17), (18), (19), (20): Xaa is A or G or is absent
XEEVIMYHYKLXXXXXXXXXKYLMSIPSTKVPAXXT

SEQ ID NO: 32607 - protein, 36 aa, Artificial Sequence
  Non-cyclic GFR-binding peptide
  MOD_RES (1), (35), (36): Xaa is C or S
  MOD_RES (13), (14), (15), (16), (17): Xaa is A or G
  MOD_RES (18), (19), (20), (21): Xaa is A or G or is absent
XSEVTMNYHYKLXXXXXXXXXKYLISIPSMKEPVXX

SEQ ID NO: 32608 - protein, 41 aa, Artificial Sequence
  Non-cyclic GFR-binding peptide
  MOD_RES (2), (4), (38), (39): Xaa is C or S
  MOD_RES (16), (17), (18), (19), (20): Xaa is A or G
  MOD_RES (21), (22), (23), (24): Xaa is A or G or is absent
RXGXSEVVMDEYKFKXXXXXXXXXLYLISIPELRTPVXXTP

SEQ ID NO: 32609 - protein, 40 aa, Artificial Sequence
  Non-cyclic GFR-binding peptide
  MOD_RES (2), (4), (36), (37): Xaa is C or S
RXGXSEVVMDRHKRLVVNNASDYYLISTASLRTPVXXTPP

SEQ ID NO: 32610 - protein, 40 aa, Artificial Sequence
  Non-cyclic GFR-binding peptide
  MOD_RES (2), (4), (35), (36): Xaa is C or S
SXKXSKVVMPIKGYVKPTRGVFYLINIPSLDQPVXXPSAS

SEQ ID NO: 32611 - protein, 40 aa, Artificial Sequence
  Non-cyclic GFR-binding peptide
  MOD_RES (2), (4), (38), (39): Xaa is C or S
  MOD_RES (16), (17), (18), (19), (20): Xaa is A or G
  MOD_RES (21), (22), (23), (24): Xaa is A or G or is absent
RXAXSEVTMNYHYKLXXXXXXXXXKYLISIPSMKEPVXXP

SEQ ID NO: 32612 - protein, 34 aa, Artificial Sequence
  Non-cyclic GFR-binding peptide
  MOD_RES (1), (1): Xaa is C or S
  MOD_RES (13), (14), (15), (16), (17): Xaa is A or G
  MOD_RES (18), (19), (20), (21): Xaa is A or G or is absent
XSEVTMNRHKRLXXXXXXXXXYYLISTASMKEPV

SEQ ID NO: 32613 - protein, 32 aa, Artificial Sequence
  Non-cyclic GFR-binding peptide
  MOD_RES (32), (32): Xaa is C or S
SEVTMNEYKFKVVNKNEDLYLISIPEMKEPVX

SEQ ID NO: 32614 - protein, 40 aa, Artificial Sequence
  Non-cyclic GFR-binding peptide
  MOD_RES (2), (36), (37): Xaa is C or S
  MOD_RES (14), (15), (16), (17), (18): Xaa is A or G
  MOD_RES (19), (20), (21), (22): Xaa is A or G or is absent
GXRDVVMGYHYKLXXXXXXXXXKYLMSIPSMKTPTXXPGA

SEQ ID NO: 32615 - protein, 37 aa, Artificial Sequence
  Non-cyclic GFR-binding peptide
  MOD_RES (34), (35): Xaa is C or S
  MOD_RES (12), (13), (14), (15), (16): Xaa is A or G
  MOD_RES (17), (18), (19), (20): Xaa is A or G or is absent
SEVTMNPIKGYXXXXXXXXXFYLINIPSMKEPVXXPE

SEQ ID NO: 32616 - protein, 33 aa, Artificial Sequence
  Non-cyclic GFR-binding peptide
  MOD_RES (2), (2): Xaa is C or S
GXAEVVMDRHKRLVVNNAADYYLISTASLRAPV

SEQ ID NO: 32617 - protein, 38 aa, Artificial Sequence
  Non-cyclic GFR-binding peptide
  MOD_RES (34), (35): Xaa is C or S
  MOD_RES (12), (13), (14), (15), (16): Xaa is A or G
  MOD_RES (17), (18), (19), (20): Xaa is A or G or is absent
SEVTMNPIKGYXXXXXXXXXFYLINIPSMKEPVXXPEP

SEQ ID NO: 32618 - protein, 37 aa, Artificial Sequence
  Non-cyclic GFR-binding peptide
  MOD_RES (1), (3), (35), (36): Xaa is C or S
XAXSEVTMNYHYKLVVNKNEDKYLISIPSMKEPVXXP

SEQ ID NO: 32619 - protein, 33 aa, Artificial Sequence
  Non-cyclic GFR-binding peptide
  MOD_RES (1), (32), (33): Xaa is C or S
XEEVIMRHKRLLLVRGNDYYLMSTASTKVPAXX

SEQ ID NO: 32620 - protein, 36 aa, Artificial Sequence
  Non-cyclic GFR-binding peptide
  MOD_RES (2), (4), (36): Xaa is C or S
RXAXSEVTMNEYKFKVVNKNEDLYLISIPEMKEPVX

SEQ ID NO: 32621 - protein, 41 aa, Artificial Sequence
  Non-cyclic GFR-binding peptide
  MOD_RES (1), (35), (36): Xaa is C or S
  MOD_RES (13), (14), (15), (16), (17): Xaa is A or G
  MOD_RES (18), (19), (20), (21): Xaa is A or G or is absent
XSEVVMDRHKRLXXXXXXXXXYYLISTASLRTPVXXTPPTS

SEQ ID NO: 32622 - protein, 37 aa, Artificial Sequence
  Non-cyclic GFR-binding peptide
  MOD_RES (1), (35), (36): Xaa is C or S
  MOD_RES (13), (14), (15), (16), (17): Xaa is A or G
  MOD_RES (18), (19), (20), (21): Xaa is A or G or is absent
XSEVVMDEYKFKXXXXXXXXXLYLISIPELRTPVXXT

SEQ ID NO: 32623 - protein, 36 aa, Artificial Sequence
  Non-cyclic GFR-binding peptide
  MOD_RES (2), (4), (35), (36): Xaa is C or S
LXGXEEVIMEYKFKLLVRGNDLYLMSIPETKVPAXX

SEQ ID NO: 32624 - protein, 35 aa, Artificial Sequence
  Non-cyclic GFR-binding peptide
  MOD_RES (2), (34), (35): Xaa is C or S
GXSEVVMDYHYKLVVNNASDKYLISIPSLRTPVXX

SEQ ID NO: 32625 - protein, 35 aa, Artificial Sequence
  Non-cyclic GFR-binding peptide
  MOD_RES (31), (32): Xaa is C or S
EEVIMYHYKLLLVRGNDKYLMSIPSTKVPAXXTSP

SEQ ID NO: 32626 - protein, 37 aa, Artificial Sequence
  Non-cyclic GFR-binding peptide
  MOD_RES (2), (4), (37): Xaa is C or S
  MOD_RES (15), (16), (17), (18), (19): Xaa is A or G
  MOD_RES (20), (21), (22), (23): Xaa is A or G or is absent
SXKXSRVIMPIKGYXXXXXXXXXFYLINIPSLAQPVX

SEQ ID NO: 32627 - protein, 32 aa, Artificial Sequence
  Non-cyclic GFR-binding peptide
  MOD_RES (31), (32): Xaa is C or S
EEVIMRHKRLLLVRGNDYYLMSTASTKVPAXX

SEQ ID NO: 32628 - protein, 35 aa, Artificial Sequence
  Non-cyclic GFR-binding peptide
  MOD_RES (31), (32): Xaa is C or S
EVTMNPIKGYVVNKNEDFYLINIPSMKEPVXXPEP

SEQ ID NO: 32629 - protein, 36 aa, Artificial Sequence
  Non-cyclic GFR-binding peptide
  MOD_RES (2), (4), (36): Xaa is C or S
SXGXRDVVMGRHKRLIIQQKDNYYLMSTASMKTPTX

SEQ ID NO: 32630 - protein, 39 aa, Artificial Sequence
  Non-cyclic GFR-binding peptide
  MOD_RES (1), (34), (35): Xaa is C or S
  MOD_RES (12), (13), (14), (15), (16): Xaa is A or G
  MOD_RES (17), (18), (19), (20): Xaa is A or G or is absent
XSRVIMPIKGYXXXXXXXXXFYLINIPSLAQPVXXPAAS

SEQ ID NO: 32631 - protein, 40 aa, Artificial Sequence
  Non-cyclic GFR-binding peptide
  MOD_RES (2), (35), (36): Xaa is C or S
  MOD_RES (13), (14), (15), (16), (17): Xaa is A or G
  MOD_RES (18), (19), (20), (21): Xaa is A or G or is absent
KXSKVVMPIKGYXXXXXXXXXFYLINIPSLDQPVXXPSAS

SEQ ID NO: 32632 - protein, 37 aa, Artificial Sequence
  Non-cyclic GFR-binding peptide
  MOD_RES (33), (34): Xaa is C or S
  MOD_RES (11), (12), (13), (14), (15): Xaa is A or G
  MOD_RES (16), (17), (18), (19): Xaa is A or G or is absent
SRVIMPIKGYXXXXXXXXXFYLINIPSLAQPVXXPAA

SEQ ID NO: 32633 - protein, 33 aa, Artificial Sequence
  Non-cyclic GFR-binding peptide
  MOD_RES (33), (33): Xaa is C or S
  MOD_RES (11), (12), (13), (14), (15): Xaa is A or G
  MOD_RES (16), (17), (18), (19): Xaa is A or G or is absent
EEVIMRHKRLXXXXXXXXXYYLMSTASTKVPAX

SEQ ID NO: 32634 - protein, 37 aa, Artificial Sequence
  Non-cyclic GFR-binding peptide
  MOD_RES (1), (3), (35), (36): Xaa is C or S
XGXESVAMGRHKRLYTVVGKDYYLISTASLKTPVXXA

SEQ ID NO: 32635 - protein, 35 aa, Artificial Sequence
  Non-cyclic GFR-binding peptide
  MOD_RES (2), (34), (35): Xaa is C or S
AXSEVTMNRHKRLVVNKNEDYYLISTASMKEPVXX

SEQ ID NO: 32636 - protein, 42 aa, Artificial Sequence
  Non-cyclic GFR-binding peptide
  MOD_RES (1), (3), (36), (37): Xaa is C or S
  MOD_RES (14), (15), (16), (17), (18): Xaa is A or G
  MOD_RES (19), (20), (21), (22): Xaa is A or G or is absent
XGXEEVIMYHYKLXXXXXXXXXKYLMSIPSTKVPAXXTSPVR

SEQ ID NO: 32637 - protein, 35 aa, Artificial Sequence
  Non-cyclic GFR-binding peptide
  MOD_RES (2), (4): Xaa is C or S
RXGXSEVVMDYHYKLVVNNASDKYLISIPSLRTPV

SEQ ID NO: 32638 - protein, 36 aa, Artificial Sequence
  Non-cyclic GFR-binding peptide
  MOD_RES (33), (34): Xaa is C or S
  MOD_RES (11), (12), (13), (14), (15): Xaa is A or G
  MOD_RES (16), (17), (18), (19): Xaa is A or G or is absent
EVTMNRYKKLXXXXXXXXXFYLISIANMKEPVXXPE

SEQ ID NO: 32639 - protein, 35 aa, Artificial Sequence
  Non-cyclic GFR-binding peptide
  MOD_RES (31), (32): Xaa is C or S
EVVMDYHYKLVVNNASDKYLISIPSLRTPVXXTPP

SEQ ID NO: 32640 - protein, 36 aa, Artificial Sequence
  Non-cyclic GFR-binding peptide
  MOD_RES (32), (33): Xaa is C or S
ESVAMGRHKRLYTVVGKDYYLISTASLKTPVXXAKS

SEQ ID NO: 32641 - protein, 33 aa, Artificial Sequence
  Non-cyclic GFR-binding peptide
  MOD_RES (1), (32), (33): Xaa is C or S
XEEVIMYHYKLLLVRGNDKYLMSIPSTKVPAXX

SEQ ID NO: 32642 - protein, 37 aa, Artificial Sequence
  Non-cyclic GFR-binding peptide
  MOD_RES (2), (36), (37): Xaa is C or S
  MOD_RES (14), (15), (16), (17), (18): Xaa is A or G
  MOD_RES (19), (20), (21), (22): Xaa is A or G or is absent
GXSEVVMDYHYKLXXXXXXXXXKYLISIPSLRTPVXX

SEQ ID NO: 32643 - protein, 32 aa, Artificial Sequence
  Non-cyclic GFR-binding peptide
  MOD_RES (32), (32): Xaa is C or S
AEVVMDRHKRLVVNNAADYYLISTASLRAPVX

SEQ ID NO: 32644 - protein, 35 aa, Artificial Sequence
  Non-cyclic GFR-binding peptide
  MOD_RES (1), (35): Xaa is C or S
  MOD_RES (13), (14), (15), (16), (17): Xaa is A or G
  MOD_RES (18), (19), (20), (21): Xaa is A or G or is absent
XSEVTMNRHKRLXXXXXXXXXYYLISTASMKEPVX

SEQ ID NO: 32645 - protein, 34 aa, Artificial Sequence
  Non-cyclic GFR-binding peptide
  MOD_RES (31), (32): Xaa is C or S
EVVMDRHKRLVVNNASDYYLISTASLRTPVXXTP

SEQ ID NO: 32646 - protein, 38 aa, Artificial Sequence
  Non-cyclic GFR-binding peptide
  MOD_RES (34), (35): Xaa is C or S
  MOD_RES (12), (13), (14), (15), (16): Xaa is A or G
  MOD_RES (17), (18), (19), (20): Xaa is A or G or is absent
SEVTMNRHKRLXXXXXXXXXYYLISTASMKEPVXXPEP

SEQ ID NO: 32647 - protein, 36 aa, Artificial Sequence
  Non-cyclic GFR-binding peptide
  MOD_RES (2), (36): Xaa is C or S
  MOD_RES (14), (15), (16), (17), (18): Xaa is A or G
  MOD_RES (19), (20), (21), (22): Xaa is A or G or is absent
GXESVAMGRHKRLXXXXXXXXXYYLISTASLKTPVX

SEQ ID NO: 32648 - protein, 38 aa, Artificial Sequence
  Non-cyclic GFR-binding peptide
  MOD_RES (2), (36), (37): Xaa is C or S
  MOD_RES (14), (15), (16), (17), (18): Xaa is A or G
  MOD_RES (19), (20), (21), (22): Xaa is A or G or is absent
GXSEVVMDYHYKLXXXXXXXXXKYLISIPSLRTPVXXT

SEQ ID NO: 32649 - protein, 38 aa, Artificial Sequence
  Non-cyclic GFR-binding peptide
  MOD_RES (1), (35), (36): Xaa is C or S
  MOD_RES (13), (14), (15), (16), (17): Xaa is A or G
  MOD_RES (18), (19), (20), (21): Xaa is A or G or is absent
XRDVVMGYHYKLXXXXXXXXXKYLMSIPSMKTPTXXPG

SEQ ID NO: 32650 - protein, 37 aa, Artificial Sequence
  Non-cyclic GFR-binding peptide
  MOD_RES (32), (33): Xaa is C or S
ESVAMGRHKRLYTVVGKDYYLISTASLKTPVXXAKSA

SEQ ID NO: 32651 - protein, 31 aa, Artificial Sequence
  Non-cyclic GFR-binding peptide
SEVTMNPIKGYVVNKNEDFYLINIPSMKEPV

SEQ ID NO: 32652 - protein, 37 aa, Artificial Sequence
  Non-cyclic GFR-binding peptide
  MOD_RES (33), (34): Xaa is C or S
  MOD_RES (11), (12), (13), (14), (15): Xaa is A or G
  MOD_RES (16), (17), (18), (19): Xaa is A or G or is absent
SVAMGRHKRLXXXXXXXXXYYLISTASLKTPVXXAKS

SEQ ID NO: 32653 - protein, 36 aa, Artificial Sequence
  Non-cyclic GFR-binding peptide
  MOD_RES (1), (3), (35), (36): Xaa is C or S
XGXRDVVMGEYKFKIIQQKDNLYLMSIPEMKTPTXX

SEQ ID NO: 32654 - protein, 36 aa, Artificial Sequence
  Non-cyclic GFR-binding peptide
  MOD_RES (1), (3): Xaa is C or S
  MOD_RES (15), (16), (17), (18), (19): Xaa is A or G
  MOD_RES (20), (21), (22), (23): Xaa is A or G or is absent
XGXSEVVMDRHKRLXXXXXXXXXYYLISTASLRTPV

SEQ ID NO: 32655 - protein, 33 aa, Artificial Sequence
  Non-cyclic GFR-binding peptide
  MOD_RES (1), (33): Xaa is C or S
XSEVTMNRYKKLVVNKNEDFYLISIANMKEPVX

SEQ ID NO: 32656 - protein, 34 aa, Artificial Sequence
  Non-cyclic GFR-binding peptide
  MOD_RES (1), (33), (34): Xaa is C or S
XSEVTMNRYKKLVVNKNEDFYLISIANMKEPVXX

SEQ ID NO: 32657 - protein, 36 aa, Artificial Sequence
  Non-cyclic GFR-binding peptide
  MOD_RES (33), (34): Xaa is C or S
  MOD_RES (11), (12), (13), (14), (15): Xaa is A or G
  MOD_RES (16), (17), (18), (19): Xaa is A or G or is absent
SRVIMPIKGYXXXXXXXXXFYLINIPSLAQPVXXPA

SEQ ID NO: 32658 - protein, 36 aa, Artificial Sequence
  Non-cyclic GFR-binding peptide
  MOD_RES (1), (3), (35), (36): Xaa is C or S
XGXESVAMGRHKRLYTVVGKDYYLISTASLKTPVXX

SEQ ID NO: 32659 - protein, 42 aa, Artificial Sequence
  Non-cyclic GFR-binding peptide
  MOD_RES (2), (36), (37): Xaa is C or S
  MOD_RES (14), (15), (16), (17), (18): Xaa is A or G
  MOD_RES (19), (20), (21), (22): Xaa is A or G or is absent
GXRDVVMGYHYKLXXXXXXXXXKYLMSIPSMKTPTXXPGASG

SEQ ID NO: 32660 - protein, 39 aa, Artificial Sequence
  Non-cyclic GFR-binding peptide
  MOD_RES (34), (35): Xaa is C or S
  MOD_RES (12), (13), (14), (15), (16): Xaa is A or G
  MOD_RES (17), (18), (19), (20): Xaa is A or G or is absent
RDVVMGRHKRLXXXXXXXXXYYLMSTASMKTPTXXPGAS

SEQ ID NO: 32661 - protein, 41 aa, Artificial Sequence
  Non-cyclic GFR-binding peptide
  MOD_RES (2), (35), (36): Xaa is C or S
  MOD_RES (13), (14), (15), (16), (17): Xaa is A or G
  MOD_RES (18), (19), (20), (21): Xaa is A or G or is absent
KXSKVVMPIKGYXXXXXXXXXFYLINIPSLDQPVXXPSASA

SEQ ID NO: 32662 - protein, 33 aa, Artificial Sequence
  Non-cyclic GFR-binding peptide
  MOD_RES (32), (33): Xaa is C or S
SEVVMDRHKRLVVNNASDYYLISTASLRTPVXX

SEQ ID NO: 32663 - protein, 41 aa, Artificial Sequence
  Non-cyclic GFR-binding peptide
  MOD_RES (1), (3), (37), (38): Xaa is C or S
  MOD_RES (15), (16), (17), (18), (19): Xaa is A or G
  MOD_RES (20), (21), (22), (23): Xaa is A or G or is absent
XAXSEVTMNRHKRLXXXXXXXXXYYLISTASMKEPVXXPEP

SEQ ID NO: 32664 - protein, 40 aa, Artificial Sequence
  Non-cyclic GFR-binding peptide
  MOD_RES (1), (3), (37), (38): Xaa is C or S
  MOD_RES (15), (16), (17), (18), (19): Xaa is A or G
  MOD_RES (20), (21), (22), (23): Xaa is A or G or is absent
XGXSEVVMDEYKFKXXXXXXXXXLYLISIPELRTPVXXTP

SEQ ID NO: 32665 - protein, 38 aa, Artificial Sequence
  Non-cyclic GFR-binding peptide
  MOD_RES (1), (35), (36): Xaa is C or S
  MOD_RES (13), (14), (15), (16), (17): Xaa is A or G
  MOD_RES (18), (19), (20), (21): Xaa is A or G or is absent
XSEVTMNRHKRLXXXXXXXXXYYLISTASMKEPVXXPE

SEQ ID NO: 32666 - protein, 37 aa, Artificial Sequence
  Non-cyclic GFR-binding peptide
  MOD_RES (33), (34): Xaa is C or S
  MOD_RES (11), (12), (13), (14), (15): Xaa is A or G
  MOD_RES (16), (17), (18), (19): Xaa is A or G or is absent
EVVMDEYKFKXXXXXXXXXLYLISIPELRTPVXXTPP

SEQ ID NO: 32667 - protein, 41 aa, Artificial Sequence
  Non-cyclic GFR-binding peptide
  MOD_RES (1), (3), (37), (38): Xaa is C or S
  MOD_RES (15), (16), (17), (18), (19): Xaa is A or G
  MOD_RES (20), (21), (22), (23): Xaa is A or G or is absent
XGXSEVVMDEYKFKXXXXXXXXXLYLISIPELRTPVXXTPP

SEQ ID NO: 32668 - protein, 41 aa, Artificial Sequence
  Non-cyclic GFR-binding peptide
  MOD_RES (1), (3), (35), (36): Xaa is C or S
XGXSRVVMNYHYKLIVNSSDDKYLVSIPSLKTPAXXPKPVH

SEQ ID NO: 32669 - protein, 44 aa, Artificial Sequence
  Non-cyclic GFR-binding peptide
  MOD_RES (2), (4), (38), (39): Xaa is C or S
  MOD_RES (16), (17), (18), (19), (20): Xaa is A or G
  MOD_RES (21), (22), (23), (24): Xaa is A or G or is absent
RXGXSEVVMDEYKFKXXXXXXXXXLYLISIPELRTPVXXTPPTS

SEQ ID NO: 32670 - protein, 39 aa, Artificial Sequence
  Non-cyclic GFR-binding peptide
  MOD_RES (33), (34): Xaa is C or S
  MOD_RES (11), (12), (13), (14), (15): Xaa is A or G
  MOD_RES (16), (17), (18), (19): Xaa is A or G or is absent
SVAMGRHKRLXXXXXXXXXYYLISTASLKTPVXXAKSAK

SEQ ID NO: 32671 - protein, 36 aa, Artificial Sequence
  Non-cyclic GFR-binding peptide
  MOD_RES (1), (3): Xaa is C or S
  MOD_RES (15), (16), (17), (18), (19): Xaa is A or G
  MOD_RES (20), (21), (22), (23): Xaa is A or G or is absent
XGXRDVVMGYHYKLXXXXXXXXXKYLMSIPSMKTPT

SEQ ID NO: 32672 - protein, 36 aa, Artificial Sequence
  Non-cyclic GFR-binding peptide
  MOD_RES (31), (32): Xaa is C or S
EVVMDRHKRLVVNNAADYYLISTASLRAPVXXSAPA

SEQ ID NO: 32673 - protein, 37 aa, Artificial Sequence
  Non-cyclic GFR-binding peptide
  MOD_RES (2), (34), (35): Xaa is C or S
GXSEVVMDYHYKLVVNNASDKYLISIPSLRTPVXXTP

SEQ ID NO: 32674 - protein, 36 aa, Artificial Sequence
  Non-cyclic GFR-binding peptide
  MOD_RES (33), (34): Xaa is C or S
  MOD_RES (11), (12), (13), (14), (15): Xaa is A or G
  MOD_RES (16), (17), (18), (19): Xaa is A or G or is absent
SKVVMPIKGYXXXXXXXXXFYLINIPSLDQPVXXPS

SEQ ID NO: 32675 - protein, 37 aa, Artificial Sequence
  Non-cyclic GFR-binding peptide
  MOD_RES (31), (32): Xaa is C or S
EVTMNYHYKLVVNKNEDKYLISIPSMKEPVXXPEPIG

SEQ ID NO: 32676 - protein, 36 aa, Artificial Sequence
  Non-cyclic GFR-binding peptide
  MOD_RES (2), (4), (36): Xaa is C or S
SXGXRDVVMGEYKFKIIQQKDNLYLMSIPEMKTPTX

SEQ ID NO: 32677 - protein, 41 aa, Artificial Sequence
  Non-cyclic GFR-binding peptide
  MOD_RES (1), (3), (36), (37): Xaa is C or S
  MOD_RES (14), (15), (16), (17), (18): Xaa is A or G
  MOD_RES (19), (20), (21), (22): Xaa is A or G or is absent
XKXSKVIMPIKGYXXXXXXXXXFYLINIPSLDQSVXXPSAS

SEQ ID NO: 32678 - protein, 37 aa, Artificial Sequence
  Non-cyclic GFR-binding peptide
  MOD_RES (2), (4): Xaa is C or S
  MOD_RES (16), (17), (18), (19), (20): Xaa is A or G
  MOD_RES (21), (22), (23), (24): Xaa is A or G or is absent
RXAXSEVTMNRYKKLXXXXXXXXXFYLISIANMKEPV

SEQ ID NO: 32679 - protein, 40 aa, Artificial Sequence
  Non-cyclic GFR-binding peptide
  MOD_RES (1), (3), (35), (36): Xaa is C or S
XGXRDVVMGEYKFKIIQQKDNLYLMSIPEMKTPTXXPGAS

SEQ ID NO: 32680 - protein, 42 aa, Artificial Sequence
  Non-cyclic GFR-binding peptide
  MOD_RES (1), (3), (37), (38): Xaa is C or S
  MOD_RES (15), (16), (17), (18), (19): Xaa is A or G
  MOD_RES (20), (21), (22), (23): Xaa is A or G or is absent
XAXSEVTMNRYKKLXXXXXXXXXFYLISIANMKEPVXXPEPI

SEQ ID NO: 32681 - protein, 40 aa, Artificial Sequence
  Non-cyclic GFR-binding peptide
  MOD_RES (2), (34), (35): Xaa is C or S
GXRDVVMGRHKRLIIQQKDNYYLMSTASMKTPTXXPGASG

SEQ ID NO: 32682 - protein, 40 aa, Artificial Sequence
  Non-cyclic GFR-binding peptide
  MOD_RES (1), (3), (37), (38): Xaa is C or S
  MOD_RES (15), (16), (17), (18), (19): Xaa is A or G
  MOD_RES (20), (21), (22), (23): Xaa is A or G or is absent
XAXSEVTMNYHYKLXXXXXXXXXKYLISIPSMKEPVXXPE

SEQ ID NO: 32683 - protein, 37 aa, Artificial Sequence
  Non-cyclic GFR-binding peptide
  MOD_RES (1), (33), (34): Xaa is C or S
XSEVTMNRYKKLVVNKNEDFYLISIANMKEPVXXPEP

SEQ ID NO: 32684 - protein, 35 aa, Artificial Sequence
  Non-cyclic GFR-binding peptide
  MOD_RES (2), (4), (35): Xaa is C or S
LXGXEEVIMRHKRLLLVRGNDYYLMSTASTKVPAX

SEQ ID NO: 32685 - protein, 36 aa, Artificial Sequence
  Non-cyclic GFR-binding peptide
  MOD_RES (2), (4): Xaa is C or S
  MOD_RES (15), (16), (17), (18), (19): Xaa is A or G
  MOD_RES (20), (21), (22), (23): Xaa is A or G or is absent
LXGXEEVIMRHKRLXXXXXXXXXYYLMSTASTKVPA

SEQ ID NO: 32686 - protein, 34 aa, Artificial Sequence
  Non-cyclic GFR-binding peptide
  MOD_RES (34), (34): Xaa is C or S
  MOD_RES (12), (13), (14), (15), (16): Xaa is A or G
  MOD_RES (17), (18), (19), (20): Xaa is A or G or is absent
SEVVMDYHYKLXXXXXXXXXKYLISIPSLRTPVX

SEQ ID NO: 32687 - protein, 41 aa, Artificial Sequence
  Non-cyclic GFR-binding peptide
  MOD_RES (1), (3), (35), (36): Xaa is C or S
XGXRDVVMGYHYKLIIQQKDNKYLMSIPSMKTPTXXPGASG

SEQ ID NO: 32688 - protein, 34 aa, Artificial Sequence
  Non-cyclic GFR-binding peptide
  MOD_RES (31), (32): Xaa is C or S
SVAMGRHKRLYTVVGKDYYLISTASLKTPVXXAK

SEQ ID NO: 32689 - protein, 35 aa, Artificial Sequence
  Non-cyclic GFR-binding peptide
  MOD_RES (1), (33), (34): Xaa is C or S
XRDVVMGRHKRLIIQQKDNYYLMSTASMKTPTXXP

SEQ ID NO: 32690 - protein, 40 aa, Artificial Sequence
  Non-cyclic GFR-binding peptide
  MOD_RES (1), (3), (35), (36): Xaa is C or S
XGXRDVVMGYHYKLIIQQKDNKYLMSIPSMKTPTXXPGAS

SEQ ID NO: 32691 - protein, 36 aa, Artificial Sequence
  Non-cyclic GFR-binding peptide
  MOD_RES (2), (34), (35): Xaa is C or S
GXRDVVMGRHKRLIIQQKDNYYLMSTASMKTPTXXP

SEQ ID NO: 32692 - protein, 40 aa, Artificial Sequence
  Non-cyclic GFR-binding peptide
  MOD_RES (1), (3), (35), (36): Xaa is C or S
XAXSEVTMNRYKKLVVNKNEDFYLISIANMKEPVXXPEPI

SEQ ID NO: 32693 - protein, 33 aa, Artificial Sequence
  Non-cyclic GFR-binding peptide
  MOD_RES (2), (2): Xaa is C or S
AXSEVTMNRHKRLVVNKNEDYYLISTASMKEPV

SEQ ID NO: 32694 - protein, 39 aa, Artificial Sequence
  Non-cyclic GFR-binding peptide
  MOD_RES (33), (34): Xaa is C or S
  MOD_RES (11), (12), (13), (14), (15): Xaa is A or G
  MOD_RES (16), (17), (18), (19): Xaa is A or G or is absent
SKVIMPIKGYXXXXXXXXXFYLINIPSLDQSVXXPSASA

SEQ ID NO: 32695 - protein, 37 aa, Artificial Sequence
  Non-cyclic GFR-binding peptide
  MOD_RES (1), (33), (34): Xaa is C or S
XSEVTMNYHYKLVVNKNEDKYLISIPSMKEPVXXPEP

SEQ ID NO: 32696 - protein, 39 aa, Artificial Sequence
  Non-cyclic GFR-binding peptide
  MOD_RES (2), (34), (35): Xaa is C or S
GXSEVVMDYHYKLVVNNASDKYLISIPSLRTPVXXTPPT

SEQ ID NO: 32697 - protein, 36 aa, Artificial Sequence
  Non-cyclic GFR-binding peptide
  MOD_RES (2), (4), (35), (36): Xaa is C or S
SXKXSRVIMPIKGYVKPKRGVFYLINIPSLAQPVXX

SEQ ID NO: 32698 - protein, 36 aa, Artificial Sequence
  Non-cyclic GFR-binding peptide
  MOD_RES (2), (34), (35): Xaa is C or S
AXSEVTMNRHKRLVVNKNEDYYLISTASMKEPVXXP

SEQ ID NO: 32699 - protein, 40 aa, Artificial Sequence
  Non-cyclic GFR-binding peptide
  MOD_RES (2), (4), (36), (37): Xaa is C or S
SXGXRDVVMGEYKFKIIQQKDNLYLMSIPEMKTPTXXPGA

SEQ ID NO: 32700 - protein, 35 aa, Artificial Sequence
  Non-cyclic GFR-binding peptide
  MOD_RES (31), (32): Xaa is C or S
EVTMNRHKRLVVNKNEDYYLISTASMKEPVXXPEP

SEQ ID NO: 32701 - protein, 39 aa, Artificial Sequence
  Non-cyclic GFR-binding peptide
  MOD_RES (2), (36), (37): Xaa is C or S
  MOD_RES (14), (15), (16), (17), (18): Xaa is A or G
  MOD_RES (19), (20), (21), (22): Xaa is A or G or is absent
GXSEVVMDYHYKLXXXXXXXXXKYLISIPSLRTPVXXTP

SEQ ID NO: 32702 - protein, 41 aa, Artificial Sequence
  Non-cyclic GFR-binding peptide
  MOD_RES (2), (4), (37), (38): Xaa is C or S
  MOD_RES (15), (16), (17), (18), (19): Xaa is A or G
  MOD_RES (20), (21), (22), (23): Xaa is A or G or is absent
SXKXSKVIMPIKGYXXXXXXXXXFYLINIPSLDQSVXXPSA

SEQ ID NO: 32703 - protein, 31 aa, Artificial Sequence
  Non-cyclic GFR-binding peptide
  MOD_RES (1), (1): Xaa is C or S
XEEVIMRHKRLLLVRGNDYYLMSTASTKVPA

SEQ ID NO: 32704 - protein, 41 aa, Artificial Sequence
  Non-cyclic GFR-binding peptide
  MOD_RES (2), (4), (36), (37): Xaa is C or S
RXGXESVAMGRHKRLYTVVGKDYYLISTASLKTPVXXAKSA

SEQ ID NO: 32705 - protein, 39 aa, Artificial Sequence
  Non-cyclic GFR-binding peptide
  MOD_RES (2), (36), (37): Xaa is C or S
  MOD_RES (14), (15), (16), (17), (18): Xaa is A or G
  MOD_RES (19), (20), (21), (22): Xaa is A or G or is absent
GXSEVVMDEYKFKXXXXXXXXXLYLISIPELRTPVXXTP

SEQ ID NO: 32706 - protein, 40 aa, Artificial Sequence
  Non-cyclic GFR-binding peptide
  MOD_RES (1), (35), (36): Xaa is C or S
  MOD_RES (13), (14), (15), (16), (17): Xaa is A or G
  MOD_RES (18), (19), (20), (21): Xaa is A or G or is absent
XSEVTMNYHYKLXXXXXXXXXKYLISIPSMKEPVXXPEPI

SEQ ID NO: 32707 - protein, 35 aa, Artificial Sequence
  Non-cyclic GFR-binding peptide
  MOD_RES (34), (35): Xaa is C or S
  MOD_RES (12), (13), (14), (15), (16): Xaa is A or G
  MOD_RES (17), (18), (19), (20): Xaa is A or G or is absent
RDVVMGRHKRLXXXXXXXXXYYLMSTASMKTPTXX

SEQ ID NO: 32708 - protein, 39 aa, Artificial Sequence
  Non-cyclic GFR-binding peptide
  MOD_RES (1), (3), (35), (36): Xaa is C or S
XGXRDVVMGRHKRLIIQQKDNYYLMSTASMKTPTXXPGA

SEQ ID NO: 32709 - protein, 39 aa, Artificial Sequence
  Non-cyclic GFR-binding peptide
  MOD_RES (2), (34), (35): Xaa is C or S
AXSEVTMNYHYKLVVNKNEDKYLISIPSMKEPVXXPEPI

SEQ ID NO: 32710 - protein, 43 aa, Artificial Sequence
  Non-cyclic GFR-binding peptide
  MOD_RES (2), (4), (38), (39): Xaa is C or S
  MOD_RES (16), (17), (18), (19), (20): Xaa is A or G
  MOD_RES (21), (22), (23), (24): Xaa is A or G or is absent
RXGXSEVVMDEYKFKXXXXXXXXXLYLISIPELRTPVXXTPPT

SEQ ID NO: 32711 - protein, 33 aa, Artificial Sequence
  Non-cyclic GFR-binding peptide
  MOD_RES (31), (32): Xaa is C or S
DVVMGYHYKLIIQQKDNKYLMSIPSMKTPTXXP

SEQ ID NO: 32712 - protein, 37 aa, Artificial Sequence
  Non-cyclic GFR-binding peptide
  MOD_RES (2), (4), (37): Xaa is C or S
  MOD_RES (15), (16), (17), (18), (19): Xaa is A or G
  MOD_RES (20), (21), (22), (23): Xaa is A or G or is absent
SXKXSKVVMPIKGYXXXXXXXXXFYLINIPSLDQPVX

SEQ ID NO: 32713 - protein, 40 aa, Artificial Sequence
  Non-cyclic GFR-binding peptide
  MOD_RES (1), (35), (36): Xaa is C or S
  MOD_RES (13), (14), (15), (16), (17): Xaa is A or G
  MOD_RES (18), (19), (20), (21): Xaa is A or G or is absent
XSEVVMDYHYKLXXXXXXXXXKYLISIPSLRTPVXXTPPT

SEQ ID NO: 32714 - protein, 36 aa, Artificial Sequence
  Non-cyclic GFR-binding peptide
  MOD_RES (34), (35): Xaa is C or S
  MOD_RES (12), (13), (14), (15), (16): Xaa is A or G
  MOD_RES (17), (18), (19), (20): Xaa is A or G or is absent
SEVVMDYHYKLXXXXXXXXXKYLISIPSLRTPVXXT

SEQ ID NO: 32715 - protein, 38 aa, Artificial Sequence
  Non-cyclic GFR-binding peptide
  MOD_RES (1), (3), (34), (35): Xaa is C or S
XGXEEVIMYHYKLLLVRGNDKYLMSIPSTKVPAXXTSP

SEQ ID NO: 32716 - protein, 33 aa, Artificial Sequence
  Non-cyclic GFR-binding peptide
  MOD_RES (1), (1): Xaa is C or S
  MOD_RES (12), (13), (14), (15), (16): Xaa is A or G
  MOD_RES (17), (18), (19), (20): Xaa is A or G or is absent
XSKVVMPIKGYXXXXXXXXXFYLINIPSLDQPV

SEQ ID NO: 32717 - protein, 36 aa, Artificial Sequence
  Non-cyclic GFR-binding peptide
  MOD_RES (2), (33), (34): Xaa is C or S
KXSKVIMPIKGYIKPTKGIFYLINIPSLDQSVXXPS

SEQ ID NO: 32718 - protein, 37 aa, Artificial Sequence
  Non-cyclic GFR-binding peptide
  MOD_RES (1), (33), (34): Xaa is C or S
XRDVVMGYHYKLIIQQKDNKYLMSIPSMKTPTXXPGA

SEQ ID NO: 32719 - protein, 32 aa, Artificial Sequence
  Non-cyclic GFR-binding peptide
  MOD_RES (1), (1): Xaa is C or S
XSEVVMDYHYKLVVNNASDKYLISIPSLRTPV

SEQ ID NO: 32720 - protein, 42 aa, Artificial Sequence
  Non-cyclic GFR-binding peptide
  MOD_RES (2), (4), (36), (37): Xaa is C or S
HXGXSRVVMNYHYKLIVNSSDDKYLVSIPSLKTPAXXPKPVH

SEQ ID NO: 32721 - protein, 35 aa, Artificial Sequence
  Non-cyclic GFR-binding peptide
  MOD_RES (32), (33): Xaa is C or S
AEVVMDRHKRLVVNNAADYYLISTASLRAPVXXSA

SEQ ID NO: 32722 - protein, 36 aa, Artificial Sequence
  Non-cyclic GFR-binding peptide
  MOD_RES (31), (32): Xaa is C or S
DVVMGEYKFKIIQQKDNLYLMSIPEMKTPTXXPGAS

SEQ ID NO: 32723 - protein, 35 aa, Artificial Sequence
  Non-cyclic GFR-binding peptide
  MOD_RES (31), (32): Xaa is C or S
EEVIMRHKRLLLVRGNDYYLMSTASTKVPAXXTSP

SEQ ID NO: 32724 - protein, 39 aa, Artificial Sequence
  Non-cyclic GFR-binding peptide
  MOD_RES (1), (3), (37), (38): Xaa is C or S
  MOD_RES (15), (16), (17), (18), (19): Xaa is A or G
  MOD_RES (20), (21), (22), (23): Xaa is A or G or is absent
XGXSEVVMDYHYKLXXXXXXXXXKYLISIPSLRTPVXXT

SEQ ID NO: 32725 - protein, 33 aa, Artificial Sequence
  Non-cyclic GFR-binding peptide
  MOD_RES (33), (33): Xaa is C or S
  MOD_RES (11), (12), (13), (14), (15): Xaa is A or G
  MOD_RES (16), (17), (18), (19): Xaa is A or G or is absent
DVVMGRHKRLXXXXXXXXXYYLMSTASMKTPTX

SEQ ID NO: 32726 - protein, 34 aa, Artificial Sequence
  Non-cyclic GFR-binding peptide
  MOD_RES (1), (1): Xaa is C or S
  MOD_RES (13), (14), (15), (16), (17): Xaa is A or G
  MOD_RES (18), (19), (20), (21): Xaa is A or G or is absent
XESVAMGRHKRLXXXXXXXXXYYLISTASLKTPV

SEQ ID NO: 32727 - protein, 37 aa, Artificial Sequence
  Non-cyclic GFR-binding peptide
  MOD_RES (32), (33): Xaa is C or S
SEVVMDEYKFKVVNNASDLYLISIPELRTPVXXTPPT

SEQ ID NO: 32728 - protein, 34 aa, Artificial Sequence
  Non-cyclic GFR-binding peptide
  MOD_RES (34), (34): Xaa is C or S
  MOD_RES (12), (13), (14), (15), (16): Xaa is A or G
  MOD_RES (17), (18), (19), (20): Xaa is A or G or is absent
SEVVMDEYKFKXXXXXXXXXLYLISIPELRTPVX

SEQ ID NO: 32729 - protein, 35 aa, Artificial Sequence
  Non-cyclic GFR-binding peptide
  MOD_RES (1), (3), (35): Xaa is C or S
XGXRDVVMGEYKFKIIQQKDNLYLMSIPEMKTPTX

SEQ ID NO: 32730 - protein, 34 aa, Artificial Sequence
  Non-cyclic GFR-binding peptide
  MOD_RES (31), (32): Xaa is C or S
EVVMDRHKRLVVNNAADYYLISTASLRAPVXXSA

SEQ ID NO: 32731 - protein, 42 aa, Artificial Sequence
  Non-cyclic GFR-binding peptide
  MOD_RES (2), (36), (37): Xaa is C or S
  MOD_RES (14), (15), (16), (17), (18): Xaa is A or G
  MOD_RES (19), (20), (21), (22): Xaa is A or G or is absent
GXSEVVMDEYKFKXXXXXXXXXLYLISIPELRTPVXXTPPTS

SEQ ID NO: 32732 - protein, 41 aa, Artificial Sequence
  Non-cyclic GFR-binding peptide
  MOD_RES (2), (4), (38), (39): Xaa is C or S
  MOD_RES (16), (17), (18), (19), (20): Xaa is A or G
  MOD_RES (21), (22), (23), (24): Xaa is A or G or is absent
RXAXSEVTMNPIKGYXXXXXXXXXFYLINIPSMKEPVXXPE

SEQ ID NO: 32733 - protein, 37 aa, Artificial Sequence
  Non-cyclic GFR-binding peptide
  MOD_RES (33), (34): Xaa is C or S
  MOD_RES (11), (12), (13), (14), (15): Xaa is A or G
  MOD_RES (16), (17), (18), (19): Xaa is A or G or is absent
DVVMGRHKRLXXXXXXXXXYYLMSTASMKTPTXXPGA

SEQ ID NO: 32734 - protein, 33 aa, Artificial Sequence
  Non-cyclic GFR-binding peptide
  MOD_RES (31), (32): Xaa is C or S
SKVVMPIKGYVKPTRGVFYLINIPSLDQPVXXP

SEQ ID NO: 32735 - protein, 40 aa, Artificial Sequence
  Non-cyclic GFR-binding peptide
  MOD_RES (2), (4), (38), (39): Xaa is C or S
  MOD_RES (16), (17), (18), (19), (20): Xaa is A or G
  MOD_RES (21), (22), (23), (24): Xaa is A or G or is absent
RXGXSEVVMDEYKFKXXXXXXXXXLYLISIPELRTPVXXT

SEQ ID NO: 32736 - protein, 35 aa, Artificial Sequence
  Non-cyclic GFR-binding peptide
  MOD_RES (1), (35): Xaa is C or S
  MOD_RES (13), (14), (15), (16), (17): Xaa is A or G
  MOD_RES (18), (19), (20), (21): Xaa is A or G or is absent
XESVAMGRHKRLXXXXXXXXXYYLISTASLKTPVX

SEQ ID NO: 32737 - protein, 37 aa, Artificial Sequence
  Non-cyclic GFR-binding peptide
  MOD_RES (1), (32), (33): Xaa is C or S
XSRVIMPIKGYVKPKRGVFYLINIPSLAQPVXXPAAS

SEQ ID NO: 32738 - protein, 36 aa, Artificial Sequence
  Non-cyclic GFR-binding peptide
  MOD_RES (33), (34): Xaa is C or S
  MOD_RES (11), (12), (13), (14), (15): Xaa is A or G
  MOD_RES (16), (17), (18), (19): Xaa is A or G or is absent
DVVMGEYKFKXXXXXXXXXLYLMSIPEMKTPTXXPG

SEQ ID NO: 32739 - protein, 39 aa, Artificial Sequence
  Non-cyclic GFR-binding peptide
  MOD_RES (2), (34), (35): Xaa is C or S
GXESVAMGRHKRLYTVVGKDYYLISTASLKTPVXXAKSA

SEQ ID NO: 32740 - protein, 38 aa, Artificial Sequence
  Non-cyclic GFR-binding peptide
  MOD_RES (2), (34), (35): Xaa is C or S
GXSEVVMDYHYKLVVNNASDKYLISIPSLRTPVXXTPP

SEQ ID NO: 32741 - protein, 34 aa, Artificial Sequence
  Non-cyclic GFR-binding peptide
  MOD_RES (2), (33), (34): Xaa is C or S
GXEEVIMRHKRLLLVRGNDYYLMSTASTKVPAXX

SEQ ID NO: 32742 - protein, 36 aa, Artificial Sequence
  Non-cyclic GFR-binding peptide
  MOD_RES (1), (3), (35), (36): Xaa is C or S
XAXSEVTMNRHKRLVVNKNEDYYLISTASMKEPVXX

SEQ ID NO: 32743 - protein, 35 aa, Artificial Sequence
  Non-cyclic GFR-binding peptide
  MOD_RES (31), (32): Xaa is C or S
EVVMDRHKRLVVNNASDYYLISTASLRTPVXXTPP

SEQ ID NO: 32744 - protein, 35 aa, Artificial Sequence
  Non-cyclic GFR-binding peptide
  MOD_RES (1), (35): Xaa is C or S
  MOD_RES (13), (14), (15), (16), (17): Xaa is A or G
  MOD_RES (18), (19), (20), (21): Xaa is A or G or is absent
XSEVVMDRHKRLXXXXXXXXXYYLISTASLRTPVX

SEQ ID NO: 32745 - protein, 42 aa, Artificial Sequence
  Non-cyclic GFR-binding peptide
  MOD_RES (2), (36), (37): Xaa is C or S
  MOD_RES (14), (15), (16), (17), (18): Xaa is A or G
  MOD_RES (19), (20), (21), (22): Xaa is A or G or is absent
GXSEVVMDYHYKLXXXXXXXXXKYLISIPSLRTPVXXTPPTS

SEQ ID NO: 32746 - protein, 37 aa, Artificial Sequence
  Non-cyclic GFR-binding peptide
  MOD_RES (1), (3), (36), (37): Xaa is C or S
  MOD_RES (14), (15), (16), (17), (18): Xaa is A or G
  MOD_RES (19), (20), (21), (22): Xaa is A or G or is absent
XGXEEVIMEYKFKXXXXXXXXXLYLMSIPETKVPAXX

SEQ ID NO: 32747 - protein, 33 aa, Artificial Sequence
  Non-cyclic GFR-binding peptide
  MOD_RES (2), (33): Xaa is C or S
GXEEVIMRHKRLLLVRGNDYYLMSTASTKVPAX

SEQ ID NO: 32748 - protein, 37 aa, Artificial Sequence
  Non-cyclic GFR-binding peptide
  MOD_RES (2), (33), (34): Xaa is C or S
GXEEVIMRHKRLLLVRGNDYYLMSTASTKVPAXXTSP

SEQ ID NO: 32749 - protein, 35 aa, Artificial Sequence
  Non-cyclic GFR-binding peptide
  MOD_RES (1), (33), (34): Xaa is C or S
XSEVTMNEYKFKVVNKNEDLYLISIPEMKEPVXXP

SEQ ID NO: 32750 - protein, 39 aa, Artificial Sequence
  Non-cyclic GFR-binding peptide
  MOD_RES (1), (35), (36): Xaa is C or S
  MOD_RES (13), (14), (15), (16), (17): Xaa is A or G
  MOD_RES (18), (19), (20), (21): Xaa is A or G or is absent
XSEVVMDEYKFKXXXXXXXXXLYLISIPELRTPVXXTPP

SEQ ID NO: 32751 - protein, 40 aa, Artificial Sequence
  Non-cyclic GFR-binding peptide
  MOD_RES (2), (4), (37), (38): Xaa is C or S
  MOD_RES (15), (16), (17), (18), (19): Xaa is A or G
  MOD_RES (20), (21), (22), (23): Xaa is A or G or is absent
LXGXEEVIMEYKFKXXXXXXXXXLYLMSIPETKVPAXXTS

SEQ ID NO: 32752 - protein, 37 aa, Artificial Sequence
  Non-cyclic GFR-binding peptide
  MOD_RES (1), (35), (36): Xaa is C or S
  MOD_RES (13), (14), (15), (16), (17): Xaa is A or G
  MOD_RES (18), (19), (20), (21): Xaa is A or G or is absent
XSEVTMNYHYKLXXXXXXXXXKYLISIPSMKEPVXXP

SEQ ID NO: 32753 - protein, 37 aa, Artificial Sequence
  Non-cyclic GFR-binding peptide
  MOD_RES (1), (32), (33): Xaa is C or S
XSKVIMPIKGYIKPTKGIFYLINIPSLDQSVXXPSAS

SEQ ID NO: 32754 - protein, 33 aa, Artificial Sequence
  Non-cyclic GFR-binding peptide
  MOD_RES (31), (32): Xaa is C or S
EVVMDEYKFKVVNNASDLYLISIPELRTPVXXT

SEQ ID NO: 32755 - protein, 40 aa, Artificial Sequence
  Non-cyclic GFR-binding peptide
  MOD_RES (1), (3), (34), (35): Xaa is C or S
XGXEEVIMYHYKLLLVRGNDKYLMSIPSTKVPAXXTSPVR

SEQ ID NO: 32756 - protein, 38 aa, Artificial Sequence
  Non-cyclic GFR-binding peptide
  MOD_RES (1), (3), (37), (38): Xaa is C or S
  MOD_RES (15), (16), (17), (18), (19): Xaa is A or G
  MOD_RES (20), (21), (22), (23): Xaa is A or G or is absent
XGXRDVVMGYHYKLXXXXXXXXXKYLMSIPSMKTPTXX

SEQ ID NO: 32757 - protein, 33 aa, Artificial Sequence
  Non-cyclic GFR-binding peptide
  MOD_RES (33), (33): Xaa is C or S
  MOD_RES (11), (12), (13), (14), (15): Xaa is A or G
  MOD_RES (16), (17), (18), (19): Xaa is A or G or is absent
DVVMGYHYKLXXXXXXXXXKYLMSIPSMKTPTX

SEQ ID NO: 32758 - protein, 37 aa, Artificial Sequence
  Non-cyclic GFR-binding peptide
  MOD_RES (33), (34): Xaa is C or S
  MOD_RES (11), (12), (13), (14), (15): Xaa is A or G
  MOD_RES (16), (17), (18), (19): Xaa is A or G or is absent
EVTMNRYKKLXXXXXXXXXFYLISIANMKEPVXXPEP

SEQ ID NO: 32759 - protein, 38 aa, Artificial Sequence
  Non-cyclic GFR-binding peptide
  MOD_RES (1), (35), (36): Xaa is C or S
  MOD_RES (13), (14), (15), (16), (17): Xaa is A or G
  MOD_RES (18), (19), (20), (21): Xaa is A or G or is absent
XSEVTMNYHYKLXXXXXXXXXKYLISIPSMKEPVXXPE

SEQ ID NO: 32760 - protein, 36 aa, Artificial Sequence
  Non-cyclic GFR-binding peptide
  MOD_RES (1), (35), (36): Xaa is C or S
  MOD_RES (13), (14), (15), (16), (17): Xaa is A or G
  MOD_RES (18), (19), (20), (21): Xaa is A or G or is absent
XRDVVMGYHYKLXXXXXXXXXKYLMSIPSMKTPTXX

SEQ ID NO: 32761 - protein, 34 aa, Artificial Sequence
  Non-cyclic GFR-binding peptide
  MOD_RES (1), (1): Xaa is C or S
  MOD_RES (13), (14), (15), (16), (17): Xaa is A or G
  MOD_RES (18), (19), (20), (21): Xaa is A or G or is absent
XSEVVMDRHKRLXXXXXXXXXYYLISTASLRTPV

SEQ ID NO: 32762 - protein, 34 aa, Artificial Sequence
  Non-cyclic GFR-binding peptide
  MOD_RES (1), (32), (33): Xaa is C or S
XEEVIMEYKFKLLVRGNDLYLMSIPETKVPAXXT

SEQ ID NO: 32763 - protein, 38 aa, Artificial Sequence
  Non-cyclic GFR-binding peptide
  MOD_RES (1), (32), (33): Xaa is C or S
XEEVIMRHKRLLLVRGNDYYLMSTASTKVPAXXTSPVR

SEQ ID NO: 32764 - protein, 40 aa, Artificial Sequence
  Non-cyclic GFR-binding peptide
  MOD_RES (2), (4), (36), (37): Xaa is C or S
RXAXSEVTMNRHKRLVVNKNEDYYLISTASMKEPVXXPEP

SEQ ID NO: 32765 - protein, 40 aa, Artificial Sequence
  Non-cyclic GFR-binding peptide
  MOD_RES (2), (4), (38), (39): Xaa is C or S
  MOD_RES (16), (17), (18), (19), (20): Xaa is A or G
  MOD_RES (21), (22), (23), (24): Xaa is A or G or is absent
RXGXAEVVMDRHKRLXXXXXXXXXYYLISTASLRAPVXXS

SEQ ID NO: 32766 - protein, 39 aa, Artificial Sequence
  Non-cyclic GFR-binding peptide
  MOD_RES (1), (34), (35): Xaa is C or S
  MOD_RES (12), (13), (14), (15), (16): Xaa is A or G
  MOD_RES (17), (18), (19), (20): Xaa is A or G or is absent
XEEVIMYHYKLXXXXXXXXXKYLMSIPSTKVPAXXTSPV

SEQ ID NO: 32767 - protein, 38 aa, Artificial Sequence
  Non-cyclic GFR-binding peptide
  MOD_RES (1), (3), (35), (36): Xaa is C or S
XGXAEVVMDRHKRLVVNNAADYYLISTASLRAPVXXSA

SEQ ID NO: 32768 - protein, 42 aa, Artificial Sequence
  Non-cyclic GFR-binding peptide
  MOD_RES (2), (4), (36), (37): Xaa is C or S
SXGXRDVVMGEYKFKIIQQKDNLYLMSIPEMKTPTXXPGASG

SEQ ID NO: 32769 - protein, 34 aa, Artificial Sequence
  Non-cyclic GFR-binding peptide
  MOD_RES (2), (34): Xaa is C or S
AXSEVTMNRYKKLVVNKNEDFYLISIANMKEPVX

SEQ ID NO: 32770 - protein, 37 aa, Artificial Sequence
  Non-cyclic GFR-binding peptide
  MOD_RES (33), (34): Xaa is C or S
  MOD_RES (11), (12), (13), (14), (15): Xaa is A or G
  MOD_RES (16), (17), (18), (19): Xaa is A or G or is absent
SKVIMPIKGYXXXXXXXXXFYLINIPSLDQSVXXPSA

SEQ ID NO: 32771 - protein, 44 aa, Artificial Sequence
  Non-cyclic GFR-binding peptide
  MOD_RES (2), (4), (38), (39): Xaa is C or S
  MOD_RES (16), (17), (18), (19), (20): Xaa is A or G
  MOD_RES (21), (22), (23), (24): Xaa is A or G or is absent
SXGXRDVVMGYHYKLXXXXXXXXXKYLMSIPSMKTPTXXPGASG

SEQ ID NO: 32772 - protein, 38 aa, Artificial Sequence
  Non-cyclic GFR-binding peptide
  MOD_RES (2), (4), (35), (36): Xaa is C or S
LXGXEEVIMRHKRLLLVRGNDYYLMSTASTKVPAXXTS

SEQ ID NO: 32773 - protein, 36 aa, Artificial Sequence
  Non-cyclic GFR-binding peptide
  MOD_RES (31), (32): Xaa is C or S
DVVMGYHYKLIIQQKDNKYLMSIPSMKTPTXXPGAS

SEQ ID NO: 32774 - protein, 37 aa, Artificial Sequence
  Non-cyclic GFR-binding peptide
  MOD_RES (1), (3), (37): Xaa is C or S
  MOD_RES (15), (16), (17), (18), (19): Xaa is A or G
  MOD_RES (20), (21), (22), (23): Xaa is A or G or is absent
XGXSEVVMDRHKRLXXXXXXXXXYYLISTASLRTPVX

SEQ ID NO: 32775 - protein, 43 aa, Artificial Sequence
  Non-cyclic GFR-binding peptide
  MOD_RES (1), (3), (37), (38): Xaa is C or S
  MOD_RES (15), (16), (17), (18), (19): Xaa is A or G
  MOD_RES (20), (21), (22), (23): Xaa is A or G or is absent
XGXSRVVMNYHYKLXXXXXXXXXKYLVSIPSLKTPAXXPKPVH

SEQ ID NO: 32776 - protein, 41 aa, Artificial Sequence
  Non-cyclic GFR-binding peptide
  MOD_RES (1), (35), (36): Xaa is C or S
  MOD_RES (13), (14), (15), (16), (17): Xaa is A or G
  MOD_RES (18), (19), (20), (21): Xaa is A or G or is absent
XRDVVMGEYKFKXXXXXXXXXLYLMSIPEMKTPTXXPGASG

SEQ ID NO: 32777 - protein, 39 aa, Artificial Sequence
  Non-cyclic GFR-binding peptide
  MOD_RES (1), (34), (35): Xaa is C or S
  MOD_RES (12), (13), (14), (15), (16): Xaa is A or G
  MOD_RES (17), (18), (19), (20): Xaa is A or G or is absent
XEEVIMEYKFKXXXXXXXXXLYLMSIPETKVPAXXTSPV

SEQ ID NO: 32778 - protein, 33 aa, Artificial Sequence
  Non-cyclic GFR-binding peptide
  MOD_RES (33), (33): Xaa is C or S
  MOD_RES (11), (12), (13), (14), (15): Xaa is A or G
  MOD_RES (16), (17), (18), (19): Xaa is A or G or is absent
SVAMGRHKRLXXXXXXXXXYYLISTASLKTPVX

SEQ ID NO: 32779 - protein, 34 aa, Artificial Sequence
  Non-cyclic GFR-binding peptide
  MOD_RES (2), (34): Xaa is C or S
AXSEVTMNEYKFKVVNKNEDLYLISIPEMKEPVX

SEQ ID NO: 32780 - protein, 34 aa, Artificial Sequence
  Non-cyclic GFR-binding peptide
  MOD_RES (33), (34): Xaa is C or S
  MOD_RES (11), (12), (13), (14), (15): Xaa is A or G
  MOD_RES (16), (17), (18), (19): Xaa is A or G or is absent
SKVIMPIKGYXXXXXXXXXFYLINIPSLDQSVXX

SEQ ID NO: 32781 - protein, 39 aa, Artificial Sequence
  Non-cyclic GFR-binding peptide
  MOD_RES (1), (34), (35): Xaa is C or S
  MOD_RES (12), (13), (14), (15), (16): Xaa is A or G
  MOD_RES (17), (18), (19), (20): Xaa is A or G or is absent
XSKVIMPIKGYXXXXXXXXXFYLINIPSLDQSVXXPSAS

SEQ ID NO: 32782 - protein, 38 aa, Artificial Sequence
  Non-cyclic GFR-binding peptide
  MOD_RES (2), (4), (36), (37): Xaa is C or S
RXAXSEVTMNRHKRLVVNKNEDYYLISTASMKEPVXXP

SEQ ID NO: 32783 - protein, 38 aa, Artificial Sequence
  Non-cyclic GFR-binding peptide
  MOD_RES (1), (35), (36): Xaa is C or S
  MOD_RES (13), (14), (15), (16), (17): Xaa is A or G
  MOD_RES (18), (19), (20), (21): Xaa is A or G or is absent
XSEVTMNRYKKLXXXXXXXXXFYLISIANMKEPVXXPE

SEQ ID NO: 32784 - protein, 40 aa, Artificial Sequence
  Non-cyclic GFR-binding peptide
  MOD_RES (1), (35), (36): Xaa is C or S
  MOD_RES (13), (14), (15), (16), (17): Xaa is A or G
  MOD_RES (18), (19), (20), (21): Xaa is A or G or is absent
XSEVTMNRYKKLXXXXXXXXXFYLISIANMKEPVXXPEPI

SEQ ID NO: 32785 - protein, 35 aa, Artificial Sequence
  Non-cyclic GFR-binding peptide
  MOD_RES (2), (4), (35): Xaa is C or S
SXKXSKVIMPIKGYIKPTKGIFYLINIPSLDQSVX

SEQ ID NO: 32786 - protein, 42 aa, Artificial Sequence
  Non-cyclic GFR-binding peptide
  MOD_RES (2), (4), (37), (38): Xaa is C or S
  MOD_RES (15), (16), (17), (18), (19): Xaa is A or G
  MOD_RES (20), (21), (22), (23): Xaa is A or G or is absent
LXGXEEVIMYHYKLXXXXXXXXXKYLMSIPSTKVPAXXTSPV

SEQ ID NO: 32787 - protein, 37 aa, Artificial Sequence
  Non-cyclic GFR-binding peptide
  MOD_RES (1), (3), (35), (36): Xaa is C or S
XAXSEVTMNRHKRLVVNKNEDYYLISTASMKEPVXXP

SEQ ID NO: 32788 - protein, 33 aa, Artificial Sequence
  Non-cyclic GFR-binding peptide
  MOD_RES (2), (2): Xaa is C or S
GXSEVVMDYHYKLVVNNASDKYLISIPSLRTPV

SEQ ID NO: 32789 - protein, 37 aa, Artificial Sequence
  Non-cyclic GFR-binding peptide
  MOD_RES (2), (4), (36), (37): Xaa is C or S
RXGXESVAMGRHKRLYTVVGKDYYLISTASLKTPVXX

SEQ ID NO: 32790 - protein, 35 aa, Artificial Sequence
  Non-cyclic GFR-binding peptide
  MOD_RES (1), (3), (35): Xaa is C or S
XAXSEVTMNRYKKLVVNKNEDFYLISIANMKEPVX

SEQ ID NO: 32791 - protein, 38 aa, Artificial Sequence
  Non-cyclic GFR-binding peptide
  MOD_RES (2), (4), (38): Xaa is C or S
  MOD_RES (16), (17), (18), (19), (20): Xaa is A or G
  MOD_RES (21), (22), (23), (24): Xaa is A or G or is absent
SXGXRDVVMGRHKRLXXXXXXXXXYYLMSTASMKTPTX

SEQ ID NO: 32792 - protein, 39 aa, Artificial Sequence
  Non-cyclic GFR-binding peptide
  MOD_RES (1), (33), (34): Xaa is C or S
XSRVVMNYHYKLIVNSSDDKYLVSIPSLKTPAXXPKPVH

SEQ ID NO: 32793 - protein, 39 aa, Artificial Sequence
  Non-cyclic GFR-binding peptide
  MOD_RES (1), (3), (34), (35): Xaa is C or S
XKXSKVIMPIKGYIKPTKGIFYLINIPSLDQSVXXPSAS

SEQ ID NO: 32794 - protein, 34 aa, Artificial Sequence
  Non-cyclic GFR-binding peptide
  MOD_RES (1), (3): Xaa is C or S
XGXESVAMGRHKRLYTVVGKDYYLISTASLKTPV

SEQ ID NO: 32795 - protein, 38 aa, Artificial Sequence
  Non-cyclic GFR-binding peptide
  MOD_RES (32), (33): Xaa is C or S
SEVTMNEYKFKVVNKNEDLYLISIPEMKEPVXXPEPIG

SEQ ID NO: 32796 - protein, 36 aa, Artificial Sequence
  Non-cyclic GFR-binding peptide
  MOD_RES (2), (34), (35): Xaa is C or S
GXESVAMGRHKRLYTVVGKDYYLISTASLKTPVXXA

SEQ ID NO: 32797 - protein, 36 aa, Artificial Sequence
  Non-cyclic GFR-binding peptide
  MOD_RES (1), (3), (34), (35): Xaa is C or S
XKXSKVIMPIKGYIKPTKGIFYLINIPSLDQSVXXP

SEQ ID NO: 32798 - protein, 35 aa, Artificial Sequence
  Non-cyclic GFR-binding peptide
  MOD_RES (33), (34): Xaa is C or S
  MOD_RES (11), (12), (13), (14), (15): Xaa is A or G
  MOD_RES (16), (17), (18), (19): Xaa is A or G or is absent
SRVIMPIKGYXXXXXXXXXFYLINIPSLAQPVXXP

SEQ ID NO: 32799 - protein, 39 aa, Artificial Sequence
  Non-cyclic GFR-binding peptide
  MOD_RES (1), (3), (37), (38): Xaa is C or S
  MOD_RES (15), (16), (17), (18), (19): Xaa is A or G
  MOD_RES (20), (21), (22), (23): Xaa is A or G or is absent
XAXSEVTMNRHKRLXXXXXXXXXYYLISTASMKEPVXXP

SEQ ID NO: 32800 - protein, 31 aa, Artificial Sequence
  Non-cyclic GFR-binding peptide
SEVTMNRYKKLVVNKNEDFYLISIANMKEPV

SEQ ID NO: 32801 - protein, 36 aa, Artificial Sequence
  Non-cyclic GFR-binding peptide
  MOD_RES (2), (34), (35): Xaa is C or S
GXAEVVMDRHKRLVVNNAADYYLISTASLRAPVXXS

SEQ ID NO: 32802 - protein, 36 aa, Artificial Sequence
  Non-cyclic GFR-binding peptide
  MOD_RES (2), (34), (35): Xaa is C or S
AXSEVTMNRYKKLVVNKNEDFYLISIANMKEPVXXP

SEQ ID NO: 32803 - protein, 33 aa, Artificial Sequence
  Non-cyclic GFR-binding peptide
  MOD_RES (32), (33): Xaa is C or S
SEVTMNYHYKLVVNKNEDKYLISIPSMKEPVXX

SEQ ID NO: 32804 - protein, 34 aa, Artificial Sequence
  Non-cyclic GFR-binding peptide
  MOD_RES (2), (33), (34): Xaa is C or S
GXEEVIMEYKFKLLVRGNDLYLMSIPETKVPAXX

SEQ ID NO: 32805 - protein, 35 aa, Artificial Sequence
  Non-cyclic GFR-binding peptide
  MOD_RES (33), (34): Xaa is C or S
  MOD_RES (11), (12), (13), (14), (15): Xaa is A or G
  MOD_RES (16), (17), (18), (19): Xaa is A or G or is absent
EVVMDRHKRLXXXXXXXXXYYLISTASLRTPVXXT

SEQ ID NO: 32806 - protein, 36 aa, Artificial Sequence
  Non-cyclic GFR-binding peptide
  MOD_RES (32), (33): Xaa is C or S
SEVTMNPIKGYVVNKNEDFYLINIPSMKEPVXXPEP

SEQ ID NO: 32807 - protein, 35 aa, Artificial Sequence
  Non-cyclic GFR-binding peptide
  MOD_RES (2), (4): Xaa is C or S
RXAXSEVTMNRHKRLVVNKNEDYYLISTASMKEPV

SEQ ID NO: 32808 - protein, 40 aa, Artificial Sequence
  Non-cyclic GFR-binding peptide
  MOD_RES (1), (3), (34), (35): Xaa is C or S
XKXSKVVMPIKGYVKPTRGVFYLINIPSLDQPVXXPSASA

SEQ ID NO: 32809 - protein, 36 aa, Artificial Sequence
  Non-cyclic GFR-binding peptide
  MOD_RES (32), (33): Xaa is C or S
SEVTMNYHYKLVVNKNEDKYLISIPSMKEPVXXPEP

SEQ ID NO: 32810 - protein, 34 aa, Artificial Sequence
  Non-cyclic GFR-binding peptide
  MOD_RES (2), (4): Xaa is C or S
SXKXSKVVMPIKGYVKPTRGVFYLINIPSLDQPV

SEQ ID NO: 32811 - protein, 42 aa, Artificial Sequence
  Non-cyclic GFR-binding peptide
  MOD_RES (2), (4), (36), (37): Xaa is C or S
RXAXSEVTMNRHKRLVVNKNEDYYLISTASMKEPVXXPEPIG

SEQ ID NO: 32812 - protein, 30 aa, Artificial Sequence
  Non-cyclic GFR-binding peptide
SVAMGRHKRLYTVVGKDYYLISTASLKTPV

SEQ ID NO: 32813 - protein, 38 aa, Artificial Sequence
  Non-cyclic GFR-binding peptide
  MOD_RES (2), (4), (38): Xaa is C or S
  MOD_RES (16), (17), (18), (19), (20): Xaa is A or G
  MOD_RES (21), (22), (23), (24): Xaa is A or G or is absent
SXGXRDVVMGEYKFKXXXXXXXXXLYLMSIPEMKTPTX

SEQ ID NO: 32814 - protein, 35 aa, Artificial Sequence
  Non-cyclic GFR-binding peptide
  MOD_RES (2), (2): Xaa is C or S
  MOD_RES (14), (15), (16), (17), (18): Xaa is A or G
  MOD_RES (19), (20), (21), (22): Xaa is A or G or is absent
GXSEVVMDYHYKLXXXXXXXXXKYLISIPSLRTPV

SEQ ID NO: 32815 - protein, 34 aa, Artificial Sequence
  Non-cyclic GFR-binding peptide
  MOD_RES (31), (32): Xaa is C or S
SRVIMPIKGYVKPKRGVFYLINIPSLAQPVXXPA

SEQ ID NO: 32816 - protein, 35 aa, Artificial Sequence
  Non-cyclic GFR-binding peptide
  MOD_RES (32), (33): Xaa is C or S
SEVTMNYHYKLVVNKNEDKYLISIPSMKEPVXXPE

SEQ ID NO: 32817 - protein, 34 aa, Artificial Sequence
  Non-cyclic GFR-binding peptide
  MOD_RES (32), (33): Xaa is C or S
SEVTMNRYKKLVVNKNEDFYLISIANMKEPVXXP

SEQ ID NO: 32818 - protein, 36 aa, Artificial Sequence
  Non-cyclic GFR-binding peptide
  MOD_RES (1), (3), (34), (35): Xaa is C or S
XKXSKVVMPIKGYVKPTRGVFYLINIPSLDQPVXXP

SEQ ID NO: 32819 - protein, 36 aa, Artificial Sequence
  Non-cyclic GFR-binding peptide
  MOD_RES (1), (3), (34), (35): Xaa is C or S
XGXEEVIMEYKFKLLVRGNDLYLMSIPETKVPAXXT

SEQ ID NO: 32820 - protein, 41 aa, Artificial Sequence
  Non-cyclic GFR-binding peptide
  MOD_RES (2), (4), (37), (38): Xaa is C or S
  MOD_RES (15), (16), (17), (18), (19): Xaa is A or G
  MOD_RES (20), (21), (22), (23): Xaa is A or G or is absent
LXGXEEVIMYHYKLXXXXXXXXXKYLMSIPSTKVPAXXTSP

SEQ ID NO: 32821 - protein, 35 aa, Artificial Sequence
  Non-cyclic GFR-binding peptide
  MOD_RES (2), (4), (35): Xaa is C or S
LXGXEEVIMYHYKLLLVRGNDKYLMSIPSTKVPAX

SEQ ID NO: 32822 - protein, 32 aa, Artificial Sequence
  Non-cyclic GFR-binding peptide
  MOD_RES (11), (12), (13), (14), (15): Xaa is A or G
  MOD_RES (16), (17), (18), (19): Xaa is A or G or is absent
SVAMGRHKRLXXXXXXXXXYYLISTASLKTPV

SEQ ID NO: 32823 - protein, 34 aa, Artificial Sequence
  Non-cyclic GFR-binding peptide
  MOD_RES (1), (33), (34): Xaa is C or S
XSEVTMNRHKRLVVNKNEDYYLISTASMKEPVXX

SEQ ID NO: 32824 - protein, 31 aa, Artificial Sequence
  Non-cyclic GFR-binding peptide
  MOD_RES (1), (1): Xaa is C or S
XEEVIMYHYKLLLVRGNDKYLMSIPSTKVPA

SEQ ID NO: 32825 - protein, 43 aa, Artificial Sequence
  Non-cyclic GFR-binding peptide
  MOD_RES (1), (3), (37), (38): Xaa is C or S
  MOD_RES (15), (16), (17), (18), (19): Xaa is A or G
  MOD_RES (20), (21), (22), (23): Xaa is A or G or is absent
XAXSEVTMNRHKRLXXXXXXXXXYYLISTASMKEPVXXPEPIG

SEQ ID NO: 32826 - protein, 38 aa, Artificial Sequence
  Non-cyclic GFR-binding peptide
  MOD_RES (2), (35), (36): Xaa is C or S
  MOD_RES (13), (14), (15), (16), (17): Xaa is A or G
  MOD_RES (18), (19), (20), (21): Xaa is A or G or is absent
KXSKVVMPIKGYXXXXXXXXXFYLINIPSLDQPVXXPS

SEQ ID NO: 32827 - protein, 40 aa, Artificial Sequence
  Non-cyclic GFR-binding peptide
  MOD_RES (34), (35): Xaa is C or S
  MOD_RES (12), (13), (14), (15), (16): Xaa is A or G
  MOD_RES (17), (18), (19), (20): Xaa is A or G or is absent
RDVVMGRHKRLXXXXXXXXXYYLMSTASMKTPTXXPGASG

SEQ ID NO: 32828 - protein, 39 aa, Artificial Sequence
  Non-cyclic GFR-binding peptide
  MOD_RES (33), (34): Xaa is C or S
  MOD_RES (11), (12), (13), (14), (15): Xaa is A or G
  MOD_RES (16), (17), (18), (19): Xaa is A or G or is absent
EEVIMEYKFKXXXXXXXXXLYLMSIPETKVPAXXTSPVR

SEQ ID NO: 32829 - protein, 38 aa, Artificial Sequence
  Non-cyclic GFR-binding peptide
  MOD_RES (1), (3), (35), (36): Xaa is C or S
XAXSEVTMNRYKKLVVNKNEDFYLISIANMKEPVXXPE

SEQ ID NO: 32830 - protein, 35 aa, Artificial Sequence
  Non-cyclic GFR-binding peptide
  MOD_RES (1), (34), (35): Xaa is C or S
  MOD_RES (12), (13), (14), (15), (16): Xaa is A or G
  MOD_RES (17), (18), (19), (20): Xaa is A or G or is absent
XSRVIMPIKGYXXXXXXXXXFYLINIPSLAQPVXX

SEQ ID NO: 32831 - protein, 40 aa, Artificial Sequence
  Non-cyclic GFR-binding peptide
  MOD_RES (34), (35): Xaa is C or S
  MOD_RES (12), (13), (14), (15), (16): Xaa is A or G
  MOD_RES (17), (18), (19), (20): Xaa is A or G or is absent
SEVTMNRYKKLXXXXXXXXXFYLISIANMKEPVXXPEPIG

SEQ ID NO: 32832 - protein, 37 aa, Artificial Sequence
  Non-cyclic GFR-binding peptide
  MOD_RES (1), (34), (35): Xaa is C or S
  MOD_RES (12), (13), (14), (15), (16): Xaa is A or G
  MOD_RES (17), (18), (19), (20): Xaa is A or G or is absent
XSKVIMPIKGYXXXXXXXXXFYLINIPSLDQSVXXPS

SEQ ID NO: 32833 - protein, 36 aa, Artificial Sequence
  Non-cyclic GFR-binding peptide
  MOD_RES (2), (4), (36): Xaa is C or S
RXAXSEVTMNRYKKLVVNKNEDFYLISIANMKEPVX

SEQ ID NO: 32834 - protein, 32 aa, Artificial Sequence
  Non-cyclic GFR-binding peptide
  MOD_RES (32), (32): Xaa is C or S
RDVVMGYHYKLIIQQKDNKYLMSIPSMKTPTX

SEQ ID NO: 32835 - protein, 32 aa, Artificial Sequence
  Non-cyclic GFR-binding peptide
  MOD_RES (32), (32): Xaa is C or S
SEVTMNYHYKLVVNKNEDKYLISIPSMKEPVX

SEQ ID NO: 32836 - protein, 37 aa, Artificial Sequence
  Non-cyclic GFR-binding peptide
  MOD_RES (31), (32): Xaa is C or S
EVTMNRHKRLVVNKNEDYYLISTASMKEPVXXPEPIG

SEQ ID NO: 32837 - protein, 35 aa, Artificial Sequence
  Non-cyclic GFR-binding peptide
  MOD_RES (1), (3), (35): Xaa is C or S
XGXRDVVMGYHYKLIIQQKDNKYLMSIPSMKTPTX

SEQ ID NO: 32838 - protein, 39 aa, Artificial Sequence
  Non-cyclic GFR-binding peptide
  MOD_RES (1), (3), (35), (36): Xaa is C or S
XAXSEVTMNRYKKLVVNKNEDFYLISIANMKEPVXXPEP

SEQ ID NO: 32839 - protein, 34 aa, Artificial Sequence
  Non-cyclic GFR-binding peptide
  MOD_RES (1), (33), (34): Xaa is C or S
XSEVTMNEYKFKVVNKNEDLYLISIPEMKEPVXX

SEQ ID NO: 32840 - protein, 33 aa, Artificial Sequence
  Non-cyclic GFR-binding peptide
  MOD_RES (31), (32): Xaa is C or S
DVVMGEYKFKIIQQKDNLYLMSIPEMKTPTXXP

SEQ ID NO: 32841 - protein, 36 aa, Artificial Sequence
  Non-cyclic GFR-binding peptide
  MOD_RES (33), (34): Xaa is C or S
  MOD_RES (11), (12), (13), (14), (15): Xaa is A or G
  MOD_RES (16), (17), (18), (19): Xaa is A or G or is absent
EVTMNPIKGYXXXXXXXXXFYLINIPSMKEPVXXPE

SEQ ID NO: 32842 - protein, 39 aa, Artificial Sequence
  Non-cyclic GFR-binding peptide
  MOD_RES (2), (4), (38), (39): Xaa is C or S
  MOD_RES (16), (17), (18), (19), (20): Xaa is A or G
  MOD_RES (21), (22), (23), (24): Xaa is A or G or is absent
RXAXSEVTMNYHYKLXXXXXXXXXKYLISIPSMKEPVXX

SEQ ID NO: 32843 - protein, 35 aa, Artificial Sequence
  Non-cyclic GFR-binding peptide
  MOD_RES (2), (35): Xaa is C or S
  MOD_RES (13), (14), (15), (16), (17): Xaa is A or G
  MOD_RES (18), (19), (20), (21): Xaa is A or G or is absent
KXSRVIMPIKGYXXXXXXXXXFYLINIPSLAQPVX

SEQ ID NO: 32844 - protein, 37 aa, Artificial Sequence
  Non-cyclic GFR-binding peptide
  MOD_RES (1), (3), (37): Xaa is C or S
  MOD_RES (15), (16), (17), (18), (19): Xaa is A or G
  MOD_RES (20), (21), (22), (23): Xaa is A or G or is absent
XGXRDVVMGRHKRLXXXXXXXXXYYLMSTASMKTPTX

SEQ ID NO: 32845 - protein, 40 aa, Artificial Sequence
  Non-cyclic GFR-binding peptide
  MOD_RES (1), (3), (35), (36): Xaa is C or S
XGXRDVVMGRHKRLIIQQKDNYYLMSTASMKTPTXXPGAS

SEQ ID NO: 32846 - protein, 35 aa, Artificial Sequence
  Non-cyclic GFR-binding peptide
  MOD_RES (2), (2): Xaa is C or S
  MOD_RES (14), (15), (16), (17), (18): Xaa is A or G
  MOD_RES (19), (20), (21), (22): Xaa is A or G or is absent
GXSEVVMDEYKFKXXXXXXXXXLYLISIPELRTPV

SEQ ID NO: 32847 - protein, 33 aa, Artificial Sequence
  Non-cyclic GFR-binding peptide
  MOD_RES (1), (33): Xaa is C or S
XSEVTMNRHKRLVVNKNEDYYLISTASMKEPVX

SEQ ID NO: 32848 - protein, 33 aa, Artificial Sequence
  Non-cyclic GFR-binding peptide
  MOD_RES (1), (33): Xaa is C or S
XSEVTMNEYKFKVVNKNEDLYLISIPEMKEPVX

SEQ ID NO: 32849 - protein, 36 aa, Artificial Sequence
  Non-cyclic GFR-binding peptide
  MOD_RES (1), (35), (36): Xaa is C or S
  MOD_RES (13), (14), (15), (16), (17): Xaa is A or G
  MOD_RES (18), (19), (20), (21): Xaa is A or G or is absent
XRDVVMGRHKRLXXXXXXXXXYYLMSTASMKTPTXX

SEQ ID NO: 32850 - protein, 35 aa, Artificial Sequence
  Non-cyclic GFR-binding peptide
  MOD_RES (1), (3): Xaa is C or S
  MOD_RES (14), (15), (16), (17), (18): Xaa is A or G
  MOD_RES (19), (20), (21), (22): Xaa is A or G or is absent
XGXEEVIMYHYKLXXXXXXXXXKYLMSIPSTKVPA

SEQ ID NO: 32851 - protein, 36 aa, Artificial Sequence
  Non-cyclic GFR-binding peptide
  MOD_RES (31), (32): Xaa is C or S
DVVMGRHKRLIIQQKDNYYLMSTASMKTPTXXPGAS

SEQ ID NO: 32852 - protein, 37 aa, Artificial Sequence
  Non-cyclic GFR-binding peptide
  MOD_RES (2), (36), (37): Xaa is C or S
  MOD_RES (14), (15), (16), (17), (18): Xaa is A or G
  MOD_RES (19), (20), (21), (22): Xaa is A or G or is absent
GXAEVVMDRHKRLXXXXXXXXXYYLISTASLRAPVXX

SEQ ID NO: 32853 - protein, 41 aa, Artificial Sequence
  Non-cyclic GFR-binding peptide
  MOD_RES (1), (35), (36): Xaa is C or S
  MOD_RES (13), (14), (15), (16), (17): Xaa is A or G
  MOD_RES (18), (19), (20), (21): Xaa is A or G or is absent
XSEVTMNPIKGYXXXXXXXXXFYLINIPSMKEPVXXPEPIG

SEQ ID NO: 32854 - protein, 33 aa, Artificial Sequence
  Non-cyclic GFR-binding peptide
  MOD_RES (33), (33): Xaa is C or S
  MOD_RES (11), (12), (13), (14), (15): Xaa is A or G
  MOD_RES (16), (17), (18), (19): Xaa is A or G or is absent
EVVMDRHKRLXXXXXXXXXYYLISTASLRAPVX

SEQ ID NO: 32855 - protein, 39 aa, Artificial Sequence
  Non-cyclic GFR-binding peptide
  MOD_RES (2), (4), (38), (39): Xaa is C or S
  MOD_RES (16), (17), (18), (19), (20): Xaa is A or G
  MOD_RES (21), (22), (23), (24): Xaa is A or G or is absent
RXGXSEVVMDYHYKLXXXXXXXXXKYLISIPSLRTPVXX

SEQ ID NO: 32856 - protein, 40 aa, Artificial Sequence
  Non-cyclic GFR-binding peptide
  MOD_RES (2), (36), (37): Xaa is C or S
  MOD_RES (14), (15), (16), (17), (18): Xaa is A or G
  MOD_RES (19), (20), (21), (22): Xaa is A or G or is absent
GXSEVVMDEYKFKXXXXXXXXXLYLISIPELRTPVXXTPP

SEQ ID NO: 32857 - protein, 37 aa, Artificial Sequence
  Non-cyclic GFR-binding peptide
  MOD_RES (32), (33): Xaa is C or S
RDVVMGYHYKLIIQQKDNKYLMSIPSMKTPTXXPGAS

SEQ ID NO: 32858 - protein, 40 aa, Artificial Sequence
  Non-cyclic GFR-binding peptide
  MOD_RES (2), (34), (35): Xaa is C or S
GXSEVVMDEYKFKVVNNASDLYLISIPELRTPVXXTPPTS

SEQ ID NO: 32859 - protein, 34 aa, Artificial Sequence
  Non-cyclic GFR-binding peptide
  MOD_RES (1), (3): Xaa is C or S
XGXAEVVMDRHKRLVVNNAADYYLISTASLRAPV

SEQ ID NO: 32860 - protein, 40 aa, Artificial Sequence
  Non-cyclic GFR-binding peptide
  MOD_RES (1), (3), (37), (38): Xaa is C or S
  MOD_RES (15), (16), (17), (18), (19): Xaa is A or G
  MOD_RES (20), (21), (22), (23): Xaa is A or G or is absent
XAXSEVTMNPIKGYXXXXXXXXXFYLINIPSMKEPVXXPE

SEQ ID NO: 32861 - protein, 41 aa, Artificial Sequence
  Non-cyclic GFR-binding peptide
  MOD_RES (2), (4), (35), (36): Xaa is C or S
LXGXEEVIMEYKFKLLVRGNDLYLMSIPETKVPAXXTSPVR

SEQ ID NO: 32862 - protein, 40 aa, Artificial Sequence
  Non-cyclic GFR-binding peptide
  MOD_RES (2), (34), (35): Xaa is C or S
GXSRVVMNRHKRLIVNSSDDYYLVSTASLKTPAXXPKPVH

SEQ ID NO: 32863 - protein, 42 aa, Artificial Sequence
  Non-cyclic GFR-binding peptide
  MOD_RES (1), (3), (37), (38): Xaa is C or S
  MOD_RES (15), (16), (17), (18), (19): Xaa is A or G
  MOD_RES (20), (21), (22), (23): Xaa is A or G or is absent
XGXRDVVMGYHYKLXXXXXXXXXKYLMSIPSMKTPTXXPGAS

SEQ ID NO: 32864 - protein, 35 aa, Artificial Sequence
  Non-cyclic GFR-binding peptide
  MOD_RES (31), (32): Xaa is C or S
EVVMDRHKRLVVNNAADYYLISTASLRAPVXXSAP

SEQ ID NO: 32865 - protein, 33 aa, Artificial Sequence
  Non-cyclic GFR-binding peptide
  MOD_RES (12), (13), (14), (15), (16): Xaa is A or G
  MOD_RES (17), (18), (19), (20): Xaa is A or G or is absent
RDVVMGEYKFKXXXXXXXXXLYLMSIPEMKTPT

SEQ ID NO: 32866 - protein, 38 aa, Artificial Sequence
  Non-cyclic GFR-binding peptide
  MOD_RES (1), (3), (34), (35): Xaa is C or S
XKXSRVIMPIKGYVKPKRGVFYLINIPSLAQPVXXPAA

SEQ ID NO: 32867 - protein, 41 aa, Artificial Sequence
  Non-cyclic GFR-binding peptide
  MOD_RES (1), (3), (37), (38): Xaa is C or S
  MOD_RES (15), (16), (17), (18), (19): Xaa is A or G
  MOD_RES (20), (21), (22), (23): Xaa is A or G or is absent
XAXSEVTMNRYKKLXXXXXXXXXFYLISIANMKEPVXXPEP

SEQ ID NO: 32868 - protein, 35 aa, Artificial Sequence
  Non-cyclic GFR-binding peptide
  MOD_RES (2), (2): Xaa is C or S
  MOD_RES (14), (15), (16), (17), (18): Xaa is A or G
  MOD_RES (19), (20), (21), (22): Xaa is A or G or is absent
AXSEVTMNEYKFKXXXXXXXXXLYLISIPEMKEPV

SEQ ID NO: 32869 - protein, 40 aa, Artificial Sequence
  Non-cyclic GFR-binding peptide
  MOD_RES (2), (34), (35): Xaa is C or S
GXSEVVMDRHKRLVVNNASDYYLISTASLRTPVXXTPPTS

SEQ ID NO: 32870 - protein, 33 aa, Artificial Sequence
  Non-cyclic GFR-binding peptide
  MOD_RES (33), (33): Xaa is C or S
  MOD_RES (11), (12), (13), (14), (15): Xaa is A or G
  MOD_RES (16), (17), (18), (19): Xaa is A or G or is absent
DVVMGEYKFKXXXXXXXXXLYLMSIPEMKTPTX

SEQ ID NO: 32871 - protein, 41 aa, Artificial Sequence
  Non-cyclic GFR-binding peptide
  MOD_RES (2), (4), (37), (38): Xaa is C or S
  MOD_RES (15), (16), (17), (18), (19): Xaa is A or G
  MOD_RES (20), (21), (22), (23): Xaa is A or G or is absent
LXGXEEVIMRHKRLXXXXXXXXXYYLMSTASTKVPAXXTSP

SEQ ID NO: 32872 - protein, 34 aa, Artificial Sequence
  Non-cyclic GFR-binding peptide
  MOD_RES (1), (3): Xaa is C or S
XAXSEVTMNPIKGYVVNKNEDFYLINIPSMKEPV

SEQ ID NO: 32873 - protein, 34 aa, Artificial Sequence
  Non-cyclic GFR-binding peptide
  MOD_RES (33), (34): Xaa is C or S
  MOD_RES (11), (12), (13), (14), (15): Xaa is A or G
  MOD_RES (16), (17), (18), (19): Xaa is A or G or is absent
EVTMNYHYKLXXXXXXXXXKYLISIPSMKEPVXX

SEQ ID NO: 32874 - protein, 42 aa, Artificial Sequence
  Non-cyclic GFR-binding peptide
  MOD_RES (2), (4), (38), (39): Xaa is C or S
  MOD_RES (16), (17), (18), (19), (20): Xaa is A or G
  MOD_RES (21), (22), (23), (24): Xaa is A or G or is absent
RXGXSEVVMDRHKRLXXXXXXXXXYYLISTASLRTPVXXTPP

SEQ ID NO: 32875 - protein, 38 aa, Artificial Sequence
  Non-cyclic GFR-binding peptide
  MOD_RES (32), (33): Xaa is C or S
SEVVMDYHYKLVVNNASDKYLISIPSLRTPVXXTPPTS

SEQ ID NO: 32876 - protein, 34 aa, Artificial Sequence
  Non-cyclic GFR-binding peptide
  MOD_RES (33), (34): Xaa is C or S
  MOD_RES (11), (12), (13), (14), (15): Xaa is A or G
  MOD_RES (16), (17), (18), (19): Xaa is A or G or is absent
EVTMNEYKFKXXXXXXXXXLYLISIPEMKEPVXX

SEQ ID NO: 32877 - protein, 39 aa, Artificial Sequence
  Non-cyclic GFR-binding peptide
  MOD_RES (34), (35): Xaa is C or S
  MOD_RES (12), (13), (14), (15), (16): Xaa is A or G
  MOD_RES (17), (18), (19), (20): Xaa is A or G or is absent
SEVTMNPIKGYXXXXXXXXXFYLINIPSMKEPVXXPEPI

SEQ ID NO: 32878 - protein, 33 aa, Artificial Sequence
  Non-cyclic GFR-binding peptide
  MOD_RES (1), (1): Xaa is C or S
  MOD_RES (12), (13), (14), (15), (16): Xaa is A or G
  MOD_RES (17), (18), (19), (20): Xaa is A or G or is absent
XEEVIMRHKRLXXXXXXXXXYYLMSTASTKVPA

SEQ ID NO: 32879 - protein, 37 aa, Artificial Sequence
  Non-cyclic GFR-binding peptide
  MOD_RES (2), (35), (36): Xaa is C or S
  MOD_RES (13), (14), (15), (16), (17): Xaa is A or G
  MOD_RES (18), (19), (20), (21): Xaa is A or G or is absent
KXSKVVMPIKGYXXXXXXXXXFYLINIPSLDQPVXXP

SEQ ID NO: 32880 - protein, 41 aa, Artificial Sequence
  Non-cyclic GFR-binding peptide
  MOD_RES (1), (3), (37), (38): Xaa is C or S
  MOD_RES (15), (16), (17), (18), (19): Xaa is A or G
  MOD_RES (20), (21), (22), (23): Xaa is A or G or is absent
XGXRDVVMGRHKRLXXXXXXXXXYYLMSTASMKTPTXXPGA

SEQ ID NO: 32881 - protein, 42 aa, Artificial Sequence
  Non-cyclic GFR-binding peptide
  MOD_RES (2), (36), (37): Xaa is C or S
  MOD_RES (14), (15), (16), (17), (18): Xaa is A or G
  MOD_RES (19), (20), (21), (22): Xaa is A or G or is absent
GXAEVVMDRHKRLXXXXXXXXXYYLISTASLRAPVXXSAPAA

SEQ ID NO: 32882 - protein, 44 aa, Artificial Sequence
  Non-cyclic GFR-binding peptide
  MOD_RES (2), (4), (38), (39): Xaa is C or S
  MOD_RES (16), (17), (18), (19), (20): Xaa is A or G
  MOD_RES (21), (22), (23), (24): Xaa is A or G or is absent
RXGXSEVVMDRHKRLXXXXXXXXXYYLISTASLRTPVXXTPPTS

SEQ ID NO: 32883 - protein, 41 aa, Artificial Sequence
  Non-cyclic GFR-binding peptide
  MOD_RES (1), (3), (37), (38): Xaa is C or S
  MOD_RES (15), (16), (17), (18), (19): Xaa is A or G
  MOD_RES (20), (21), (22), (23): Xaa is A or G or is absent
XGXESVAMGRHKRLXXXXXXXXXYYLISTASLKTPVXXAKS

SEQ ID NO: 32884 - protein, 36 aa, Artificial Sequence
  Non-cyclic GFR-binding peptide
  MOD_RES (2), (36): Xaa is C or S
  MOD_RES (14), (15), (16), (17), (18): Xaa is A or G
  MOD_RES (19), (20), (21), (22): Xaa is A or G or is absent
GXSEVVMDEYKFKXXXXXXXXXLYLISIPELRTPVX

SEQ ID NO: 32885 - protein, 38 aa, Artificial Sequence
  Non-cyclic GFR-binding peptide
  MOD_RES (1), (34), (35): Xaa is C or S
  MOD_RES (12), (13), (14), (15), (16): Xaa is A or G
  MOD_RES (17), (18), (19), (20): Xaa is A or G or is absent
XEEVIMEYKFKXXXXXXXXXLYLMSIPETKVPAXXTSP

SEQ ID NO: 32886 - protein, 36 aa, Artificial Sequence
  Non-cyclic GFR-binding peptide
  MOD_RES (31), (32): Xaa is C or S
EVVMDRHKRLVVNNASDYYLISTASLRTPVXXTPPT

SEQ ID NO: 32887 - protein, 37 aa, Artificial Sequence
  Non-cyclic GFR-binding peptide
  MOD_RES (31), (32): Xaa is C or S
SRVIMPIKGYVKPKRGVFYLINIPSLAQPVXXPAASA

SEQ ID NO: 32888 - protein, 37 aa, Artificial Sequence
  Non-cyclic GFR-binding peptide
  MOD_RES (34), (35): Xaa is C or S
  MOD_RES (12), (13), (14), (15), (16): Xaa is A or G
  MOD_RES (17), (18), (19), (20): Xaa is A or G or is absent
SEVVMDRHKRLXXXXXXXXXYYLISTASLRTPVXXTP

SEQ ID NO: 32889 - protein, 41 aa, Artificial Sequence
  Non-cyclic GFR-binding peptide
  MOD_RES (1), (3), (37), (38): Xaa is C or S
  MOD_RES (15), (16), (17), (18), (19): Xaa is A or G
  MOD_RES (20), (21), (22), (23): Xaa is A or G or is absent
XAXSEVTMNPIKGYXXXXXXXXXFYLINIPSMKEPVXXPEP

SEQ ID NO: 32890 - protein, 41 aa, Artificial Sequence
  Non-cyclic GFR-binding peptide
  MOD_RES (2), (4), (35), (36): Xaa is C or S
LXGXEEVIMRHKRLLLVRGNDYYLMSTASTKVPAXXTSPVR

SEQ ID NO: 32891 - protein, 40 aa, Artificial Sequence
  Non-cyclic GFR-binding peptide
  MOD_RES (2), (4), (36), (37): Xaa is C or S
SXGXRDVVMGRHKRLIIQQKDNYYLMSTASMKTPTXXPGA

SEQ ID NO: 32892 - protein, 36 aa, Artificial Sequence
  Non-cyclic GFR-binding peptide
  MOD_RES (1), (3), (36): Xaa is C or S
  MOD_RES (14), (15), (16), (17), (18): Xaa is A or G
  MOD_RES (19), (20), (21), (22): Xaa is A or G or is absent
XGXEEVIMYHYKLXXXXXXXXXKYLMSIPSTKVPAX

SEQ ID NO: 32893 - protein, 36 aa, Artificial Sequence
  Non-cyclic GFR-binding peptide
  MOD_RES (34), (35): Xaa is C or S
  MOD_RES (12), (13), (14), (15), (16): Xaa is A or G
  MOD_RES (17), (18), (19), (20): Xaa is A or G or is absent
RDVVMGRHKRLXXXXXXXXXYYLMSTASMKTPTXXP

SEQ ID NO: 32894 - protein, 35 aa, Artificial Sequence
  Non-cyclic GFR-binding peptide
  MOD_RES (31), (32): Xaa is C or S
DVVMGRHKRLIIQQKDNYYLMSTASMKTPTXXPGA

SEQ ID NO: 32895 - protein, 38 aa, Artificial Sequence
  Non-cyclic GFR-binding peptide
  MOD_RES (1), (3), (36), (37): Xaa is C or S
  MOD_RES (14), (15), (16), (17), (18): Xaa is A or G
  MOD_RES (19), (20), (21), (22): Xaa is A or G or is absent
XGXEEVIMYHYKLXXXXXXXXXKYLMSIPSTKVPAXXT

SEQ ID NO: 32896 - protein, 35 aa, Artificial Sequence
  Non-cyclic GFR-binding peptide
  MOD_RES (2), (2): Xaa is C or S
  MOD_RES (14), (15), (16), (17), (18): Xaa is A or G
  MOD_RES (19), (20), (21), (22): Xaa is A or G or is absent
AXSEVTMNYHYKLXXXXXXXXXKYLISIPSMKEPV

SEQ ID NO: 32897 - protein, 35 aa, Artificial Sequence
  Non-cyclic GFR-binding peptide
  MOD_RES (1), (3), (35): Xaa is C or S
XAXSEVTMNRHKRLVVNKNEDYYLISTASMKEPVX

SEQ ID NO: 32898 - protein, 37 aa, Artificial Sequence
  Non-cyclic GFR-binding peptide
  MOD_RES (33), (34): Xaa is C or S
  MOD_RES (11), (12), (13), (14), (15): Xaa is A or G
  MOD_RES (16), (17), (18), (19): Xaa is A or G or is absent
EEVIMYHYKLXXXXXXXXXKYLMSIPSTKVPAXXTSP

SEQ ID NO: 32899 - protein, 35 aa, Artificial Sequence
  Non-cyclic GFR-binding peptide
  MOD_RES (2), (34), (35): Xaa is C or S
AXSEVTMNRYKKLVVNKNEDFYLISIANMKEPVXX

SEQ ID NO: 32900 - protein, 38 aa, Artificial Sequence
  Non-cyclic GFR-binding peptide
  MOD_RES (1), (3), (35), (36): Xaa is C or S
XAXSEVTMNPIKGYVVNKNEDFYLINIPSMKEPVXXPE

SEQ ID NO: 32901 - protein, 40 aa, Artificial Sequence
  Non-cyclic GFR-binding peptide
  MOD_RES (1), (3), (35), (36): Xaa is C or S
XGXSEVVMDYHYKLVVNNASDKYLISIPSLRTPVXXTPPT

SEQ ID NO: 32902 - protein, 39 aa, Artificial Sequence
  Non-cyclic GFR-binding peptide
  MOD_RES (1), (35), (36): Xaa is C or S
  MOD_RES (13), (14), (15), (16), (17): Xaa is A or G
  MOD_RES (18), (19), (20), (21): Xaa is A or G or is absent
XSEVVMDRHKRLXXXXXXXXXYYLISTASLRTPVXXTPP

SEQ ID NO: 32903 - protein, 39 aa, Artificial Sequence
  Non-cyclic GFR-binding peptide
  MOD_RES (1), (33), (34): Xaa is C or S
XSRVVMNEYKFKIVNSSDDLYLVSIPELKTPAXXPKPVH

SEQ ID NO: 32904 - protein, 40 aa, Artificial Sequence
  Non-cyclic GFR-binding peptide
  MOD_RES (34), (35): Xaa is C or S
  MOD_RES (12), (13), (14), (15), (16): Xaa is A or G
  MOD_RES (17), (18), (19), (20): Xaa is A or G or is absent
SEVTMNEYKFKXXXXXXXXXLYLISIPEMKEPVXXPEPIG

SEQ ID NO: 32905 - protein, 35 aa, Artificial Sequence
  Non-cyclic GFR-binding peptide
  MOD_RES (1), (32), (33): Xaa is C or S
XEEVIMEYKFKLLVRGNDLYLMSIPETKVPAXXTS

SEQ ID NO: 32906 - protein, 38 aa, Artificial Sequence
  Non-cyclic GFR-binding peptide
  MOD_RES (2), (4), (35), (36): Xaa is C or S
LXGXEEVIMEYKFKLLVRGNDLYLMSIPETKVPAXXTS

SEQ ID NO: 32907 - protein, 33 aa, Artificial Sequence
  Non-cyclic GFR-binding peptide
  MOD_RES (31), (32): Xaa is C or S
EVTMNPIKGYVVNKNEDFYLINIPSMKEPVXXP

SEQ ID NO: 32908 - protein, 37 aa, Artificial Sequence
  Non-cyclic GFR-binding peptide
  MOD_RES (1), (35), (36): Xaa is C or S
  MOD_RES (13), (14), (15), (16), (17): Xaa is A or G
  MOD_RES (18), (19), (20), (21): Xaa is A or G or is absent
XSEVTMNRHKRLXXXXXXXXXYYLISTASMKEPVXXP

SEQ ID NO: 32909 - protein, 37 aa, Artificial Sequence
  Non-cyclic GFR-binding peptide
  MOD_RES (2), (4): Xaa is C or S
  MOD_RES (16), (17), (18), (19), (20): Xaa is A or G
  MOD_RES (21), (22), (23), (24): Xaa is A or G or is absent
RXAXSEVTMNPIKGYXXXXXXXXXFYLINIPSMKEPV

SEQ ID NO: 32910 - protein, 36 aa, Artificial Sequence
  Non-cyclic GFR-binding peptide
  MOD_RES (1), (3): Xaa is C or S
  MOD_RES (15), (16), (17), (18), (19): Xaa is A or G
  MOD_RES (20), (21), (22), (23): Xaa is A or G or is absent
XAXSEVTMNRYKKLXXXXXXXXXFYLISIANMKEPV

SEQ ID NO: 32911 - protein, 37 aa, Artificial Sequence
  Non-cyclic GFR-binding peptide
  MOD_RES (1), (3), (35), (36): Xaa is C or S
XGXRDVVMGRHKRLIIQQKDNYYLMSTASMKTPTXXP

SEQ ID NO: 32912 - protein, 39 aa, Artificial Sequence
  Non-cyclic GFR-binding peptide
  MOD_RES (2), (36), (37): Xaa is C or S
  MOD_RES (14), (15), (16), (17), (18): Xaa is A or G
  MOD_RES (19), (20), (21), (22): Xaa is A or G or is absent
AXSEVTMNYHYKLXXXXXXXXXKYLISIPSMKEPVXXPE

SEQ ID NO: 32913 - protein, 35 aa, Artificial Sequence
  Non-cyclic GFR-binding peptide
  MOD_RES (2), (33), (34): Xaa is C or S
KXSRVIMPIKGYVKPKRGVFYLINIPSLAQPVXXP

SEQ ID NO: 32914 - protein, 39 aa, Artificial Sequence
  Non-cyclic GFR-binding peptide
  MOD_RES (2), (34), (35): Xaa is C or S
GXAEVVMDRHKRLVVNNAADYYLISTASLRAPVXXSAPA

SEQ ID NO: 32915 - protein, 39 aa, Artificial Sequence
  Non-cyclic GFR-binding peptide
  MOD_RES (2), (33), (34): Xaa is C or S
GXEEVIMRHKRLLLVRGNDYYLMSTASTKVPAXXTSPVR

SEQ ID NO: 32916 - protein, 40 aa, Artificial Sequence
  Non-cyclic GFR-binding peptide
  MOD_RES (2), (4), (37), (38): Xaa is C or S
  MOD_RES (15), (16), (17), (18), (19): Xaa is A or G
  MOD_RES (20), (21), (22), (23): Xaa is A or G or is absent
SXKXSKVVMPIKGYXXXXXXXXXFYLINIPSLDQPVXXPS

SEQ ID NO: 32917 - protein, 36 aa, Artificial Sequence
  Non-cyclic GFR-binding peptide
  MOD_RES (34), (35): Xaa is C or S
  MOD_RES (12), (13), (14), (15), (16): Xaa is A or G
  MOD_RES (17), (18), (19), (20): Xaa is A or G or is absent
AEVVMDRHKRLXXXXXXXXXYYLISTASLRAPVXXS

SEQ ID NO: 32918 - protein, 40 aa, Artificial Sequence
  Non-cyclic GFR-binding peptide
  MOD_RES (1), (3), (35), (36): Xaa is C or S
XAXSEVTMNEYKFKVVNKNEDLYLISIPEMKEPVXXPEPI

SEQ ID NO: 32919 - protein, 39 aa, Artificial Sequence
  Non-cyclic GFR-binding peptide
  MOD_RES (33), (34): Xaa is C or S
  MOD_RES (11), (12), (13), (14), (15): Xaa is A or G
  MOD_RES (16), (17), (18), (19): Xaa is A or G or is absent
EVTMNPIKGYXXXXXXXXXFYLINIPSMKEPVXXPEPIG

SEQ ID NO: 32920 - protein, 38 aa, Artificial Sequence
  Non-cyclic GFR-binding peptide
  MOD_RES (1), (33), (34): Xaa is C or S
XRDVVMGRHKRLIIQQKDNYYLMSTASMKTPTXXPGAS

SEQ ID NO: 32921 - protein, 40 aa, Artificial Sequence
  Non-cyclic GFR-binding peptide
  MOD_RES (1), (3), (37), (38): Xaa is C or S
  MOD_RES (15), (16), (17), (18), (19): Xaa is A or G
  MOD_RES (20), (21), (22), (23): Xaa is A or G or is absent
XAXSEVTMNEYKFKXXXXXXXXXLYLISIPEMKEPVXXPE

SEQ ID NO: 32922 - protein, 37 aa, Artificial Sequence
  Non-cyclic GFR-binding peptide
  MOD_RES (2), (36), (37): Xaa is C or S
  MOD_RES (14), (15), (16), (17), (18): Xaa is A or G
  MOD_RES (19), (20), (21), (22): Xaa is A or G or is absent
GXRDVVMGRHKRLXXXXXXXXXYYLMSTASMKTPTXX

SEQ ID NO: 32923 - protein, 36 aa, Artificial Sequence
  Non-cyclic GFR-binding peptide
  MOD_RES (2), (33), (34): Xaa is C or S
GXEEVIMEYKFKLLVRGNDLYLMSIPETKVPAXXTS

SEQ ID NO: 32924 - protein, 37 aa, Artificial Sequence
  Non-cyclic GFR-binding peptide
  MOD_RES (31), (32): Xaa is C or S
SKVVMPIKGYVKPTRGVFYLINIPSLDQPVXXPSASA

SEQ ID NO: 32925 - protein, 38 aa, Artificial Sequence
  Non-cyclic GFR-binding peptide
  MOD_RES (1), (3), (37), (38): Xaa is C or S
  MOD_RES (15), (16), (17), (18), (19): Xaa is A or G
  MOD_RES (20), (21), (22), (23): Xaa is A or G or is absent
XGXRDVVMGRHKRLXXXXXXXXXYYLMSTASMKTPTXX

SEQ ID NO: 32926 - protein, 39 aa, Artificial Sequence
  Non-cyclic GFR-binding peptide
  MOD_RES (1), (3), (35), (36): Xaa is C or S
XGXSEVVMDYHYKLVVNNASDKYLISIPSLRTPVXXTPP

SEQ ID NO: 32927 - protein, 35 aa, Artificial Sequence
  Non-cyclic GFR-binding peptide
  MOD_RES (2), (4), (35): Xaa is C or S
LXGXEEVIMEYKFKLLVRGNDLYLMSIPETKVPAX

SEQ ID NO: 32928 - protein, 42 aa, Artificial Sequence
  Non-cyclic GFR-binding peptide
  MOD_RES (2), (36), (37): Xaa is C or S
  MOD_RES (14), (15), (16), (17), (18): Xaa is A or G
  MOD_RES (19), (20), (21), (22): Xaa is A or G or is absent
AXSEVTMNEYKFKXXXXXXXXXLYLISIPEMKEPVXXPEPIG

SEQ ID NO: 32929 - protein, 36 aa, Artificial Sequence
  Non-cyclic GFR-binding peptide
  MOD_RES (1), (3), (35), (36): Xaa is C or S
XAXSEVTMNEYKFKVVNKNEDLYLISIPEMKEPVXX

SEQ ID NO: 32930 - protein, 31 aa, Artificial Sequence
  Non-cyclic GFR-binding peptide
  MOD_RES (31), (31): Xaa is C or S
EEVIMEYKFKLLVRGNDLYLMSIPETKVPAX

SEQ ID NO: 32931 - protein, 34 aa, Artificial Sequence
  Non-cyclic GFR-binding peptide
  MOD_RES (32), (33): Xaa is C or S
RDVVMGYHYKLIIQQKDNKYLMSIPSMKTPTXXP

SEQ ID NO: 32932 - protein, 40 aa, Artificial Sequence
  Non-cyclic GFR-binding peptide
  MOD_RES (34), (35): Xaa is C or S
  MOD_RES (12), (13), (14), (15), (16): Xaa is A or G
  MOD_RES (17), (18), (19), (20): Xaa is A or G or is absent
AEVVMDRHKRLXXXXXXXXXYYLISTASLRAPVXXSAPAA

SEQ ID NO: 32933 - protein, 35 aa, Artificial Sequence
  Non-cyclic GFR-binding peptide
  MOD_RES (1), (33), (34): Xaa is C or S
XSEVVMDYHYKLVVNNASDKYLISIPSLRTPVXXT

SEQ ID NO: 32934 - protein, 42 aa, Artificial Sequence
  Non-cyclic GFR-binding peptide
  MOD_RES (1), (3), (37), (38): Xaa is C or S
  MOD_RES (15), (16), (17), (18), (19): Xaa is A or G
  MOD_RES (20), (21), (22), (23): Xaa is A or G or is absent
XGXESVAMGRHKRLXXXXXXXXXYYLISTASLKTPVXXAKSA

SEQ ID NO: 32935 - protein, 40 aa, Artificial Sequence
  Non-cyclic GFR-binding peptide
  MOD_RES (1), (3), (37), (38): Xaa is C or S
  MOD_RES (15), (16), (17), (18), (19): Xaa is A or G
  MOD_RES (20), (21), (22), (23): Xaa is A or G or is absent
XAXSEVTMNRHKRLXXXXXXXXXYYLISTASMKEPVXXPE

SEQ ID NO: 32936 - protein, 32 aa, Artificial Sequence
  Non-cyclic GFR-binding peptide
  MOD_RES (11), (12), (13), (14), (15): Xaa is A or G
  MOD_RES (16), (17), (18), (19): Xaa is A or G or is absent
EEVIMEYKFKXXXXXXXXXLYLMSIPETKVPA

SEQ ID NO: 32937 - protein, 39 aa, Artificial Sequence
  Non-cyclic GFR-binding peptide
  MOD_RES (1), (3), (34), (35): Xaa is C or S
XKXSRVIMPIKGYVKPKRGVFYLINIPSLAQPVXXPAAS

SEQ ID NO: 32938 - protein, 39 aa, Artificial Sequence
  Non-cyclic GFR-binding peptide
  MOD_RES (33), (34): Xaa is C or S
  MOD_RES (11), (12), (13), (14), (15): Xaa is A or G
  MOD_RES (16), (17), (18), (19): Xaa is A or G or is absent
EEVIMYHYKLXXXXXXXXXKYLMSIPSTKVPAXXTSPVR

SEQ ID NO: 32939 - protein, 42 aa, Artificial Sequence
  Non-cyclic GFR-binding peptide
  MOD_RES (2), (4), (38), (39): Xaa is C or S
  MOD_RES (16), (17), (18), (19), (20): Xaa is A or G
  MOD_RES (21), (22), (23), (24): Xaa is A or G or is absent
SXGXRDVVMGEYKFKXXXXXXXXXLYLMSIPEMKTPTXXPGA

SEQ ID NO: 32940 - protein, 41 aa, Artificial Sequence
  Non-cyclic GFR-binding peptide
  MOD_RES (2), (4), (36), (37): Xaa is C or S
RXAXSEVTMNRYKKLVVNKNEDFYLISIANMKEPVXXPEPI

SEQ ID NO: 32941 - protein, 36 aa, Artificial Sequence
  Non-cyclic GFR-binding peptide
  MOD_RES (1), (3): Xaa is C or S
  MOD_RES (15), (16), (17), (18), (19): Xaa is A or G
  MOD_RES (20), (21), (22), (23): Xaa is A or G or is absent
XGXRDVVMGEYKFKXXXXXXXXXLYLMSIPEMKTPT

SEQ ID NO: 32942 - protein, 38 aa, Artificial Sequence
  Non-cyclic GFR-binding peptide
  MOD_RES (1), (3), (37), (38): Xaa is C or S
  MOD_RES (15), (16), (17), (18), (19): Xaa is A or G
  MOD_RES (20), (21), (22), (23): Xaa is A or G or is absent
XAXSEVTMNRYKKLXXXXXXXXXFYLISIANMKEPVXX

SEQ ID NO: 32943 - protein, 39 aa, Artificial Sequence
  Non-cyclic GFR-binding peptide
  MOD_RES (2), (34), (35): Xaa is C or S
GXRDVVMGEYKFKIIQQKDNLYLMSIPEMKTPTXXPGAS

SEQ ID NO: 32944 - protein, 37 aa, Artificial Sequence
  Non-cyclic GFR-binding peptide
  MOD_RES (1), (35), (36): Xaa is C or S
  MOD_RES (13), (14), (15), (16), (17): Xaa is A or G
  MOD_RES (18), (19), (20), (21): Xaa is A or G or is absent
XRDVVMGEYKFKXXXXXXXXXLYLMSIPEMKTPTXXP

SEQ ID NO: 32945 - protein, 35 aa, Artificial Sequence
  Non-cyclic GFR-binding peptide
  MOD_RES (1), (3), (35): Xaa is C or S
XGXSEVVMDEYKFKVVNNASDLYLISIPELRTPVX

SEQ ID NO: 32946 - protein, 38 aa, Artificial Sequence
  Non-cyclic GFR-binding peptide
  MOD_RES (2), (36), (37): Xaa is C or S
  MOD_RES (14), (15), (16), (17), (18): Xaa is A or G
  MOD_RES (19), (20), (21), (22): Xaa is A or G or is absent
AXSEVTMNPIKGYXXXXXXXXXFYLINIPSMKEPVXXP

SEQ ID NO: 32947 - protein, 33 aa, Artificial Sequence
  Non-cyclic GFR-binding peptide
  MOD_RES (2), (2): Xaa is C or S
AXSEVTMNYHYKLVVNKNEDKYLISIPSMKEPV

SEQ ID NO: 32948 - protein, 37 aa, Artificial Sequence
  Non-cyclic GFR-binding peptide
  MOD_RES (2), (4), (35), (36): Xaa is C or S
SXKXSKVIMPIKGYIKPTKGIFYLINIPSLDQSVXXP

SEQ ID NO: 32949 - protein, 36 aa, Artificial Sequence
  Non-cyclic GFR-binding peptide
  MOD_RES (1), (3): Xaa is C or S
  MOD_RES (15), (16), (17), (18), (19): Xaa is A or G
  MOD_RES (20), (21), (22), (23): Xaa is A or G or is absent
XGXRDVVMGRHKRLXXXXXXXXXYYLMSTASMKTPT

SEQ ID NO: 32950 - protein, 34 aa, Artificial Sequence
  Non-cyclic GFR-binding peptide
  MOD_RES (32), (33): Xaa is C or S
SEVTMNEYKFKVVNKNEDLYLISIPEMKEPVXXP

SEQ ID NO: 32951 - protein, 36 aa, Artificial Sequence
  Non-cyclic GFR-binding peptide
  MOD_RES (1), (34), (35): Xaa is C or S
  MOD_RES (12), (13), (14), (15), (16): Xaa is A or G
  MOD_RES (17), (18), (19), (20): Xaa is A or G or is absent
XSRVIMPIKGYXXXXXXXXXFYLINIPSLAQPVXXP

SEQ ID NO: 32952 - protein, 41 aa, Artificial Sequence
  Non-cyclic GFR-binding peptide
  MOD_RES (2), (4), (36), (37): Xaa is C or S
RXGXSEVVMDEYKFKVVNNASDLYLISIPELRTPVXXTPPT

SEQ ID NO: 32953 - protein, 36 aa, Artificial Sequence
  Non-cyclic GFR-binding peptide
  MOD_RES (2), (4): Xaa is C or S
  MOD_RES (15), (16), (17), (18), (19): Xaa is A or G
  MOD_RES (20), (21), (22), (23): Xaa is A or G or is absent
SXKXSKVIMPIKGYXXXXXXXXXFYLINIPSLDQSV

SEQ ID NO: 32954 - protein, 33 aa, Artificial Sequence
  Non-cyclic GFR-binding peptide
  MOD_RES (31), (32): Xaa is C or S
SKVIMPIKGYIKPTKGIFYLINIPSLDQSVXXP

SEQ ID NO: 32955 - protein, 40 aa, Artificial Sequence
  Non-cyclic GFR-binding peptide
  MOD_RES (2), (4), (36), (37): Xaa is C or S
RXAXSEVTMNRYKKLVVNKNEDFYLISIANMKEPVXXPEP

SEQ ID NO: 32956 - protein, 39 aa, Artificial Sequence
  Non-cyclic GFR-binding peptide
  MOD_RES (33), (34): Xaa is C or S
  MOD_RES (11), (12), (13), (14), (15): Xaa is A or G
  MOD_RES (16), (17), (18), (19): Xaa is A or G or is absent
RVVMNYHYKLXXXXXXXXXKYLVSIPSLKTPAXXPKPVH

SEQ ID NO: 32957 - protein, 44 aa, Artificial Sequence
  Non-cyclic GFR-binding peptide
  MOD_RES (2), (4), (38), (39): Xaa is C or S
  MOD_RES (16), (17), (18), (19), (20): Xaa is A or G
  MOD_RES (21), (22), (23), (24): Xaa is A or G or is absent
RXGXSEVVMDYHYKLXXXXXXXXXKYLISIPSLRTPVXXTPPTS

SEQ ID NO: 32958 - protein, 35 aa, Artificial Sequence
  Non-cyclic GFR-binding peptide
  MOD_RES (1), (32), (33): Xaa is C or S
XSKVIMPIKGYIKPTKGIFYLINIPSLDQSVXXPS

SEQ ID NO: 32959 - protein, 38 aa, Artificial Sequence
  Non-cyclic GFR-binding peptide
  MOD_RES (1), (33), (34): Xaa is C or S
XRDVVMGEYKFKIIQQKDNLYLMSIPEMKTPTXXPGAS

SEQ ID NO: 32960 - protein, 41 aa, Artificial Sequence
  Non-cyclic GFR-binding peptide
  MOD_RES (2), (36), (37): Xaa is C or S
  MOD_RES (14), (15), (16), (17), (18): Xaa is A or G
  MOD_RES (19), (20), (21), (22): Xaa is A or G or is absent
GXRDVVMGYHYKLXXXXXXXXXKYLMSIPSMKTPTXXPGAS

SEQ ID NO: 32961 - protein, 35 aa, Artificial Sequence
  Non-cyclic GFR-binding peptide
  MOD_RES (32), (33): Xaa is C or S
RDVVMGRHKRLIIQQKDNYYLMSTASMKTPTXXPG

SEQ ID NO: 32962 - protein, 37 aa, Artificial Sequence
  Non-cyclic GFR-binding peptide
  MOD_RES (33), (34): Xaa is C or S
  MOD_RES (11), (12), (13), (14), (15): Xaa is A or G
  MOD_RES (16), (17), (18), (19): Xaa is A or G or is absent
EVTMNEYKFKXXXXXXXXXLYLISIPEMKEPVXXPEP

SEQ ID NO: 32963 - protein, 41 aa, Artificial Sequence
  Non-cyclic GFR-binding peptide
  MOD_RES (1), (3), (35), (36): Xaa is C or S
XAXSEVTMNPIKGYVVNKNEDFYLINIPSMKEPVXXPEPIG

SEQ ID NO: 32964 - protein, 34 aa, Artificial Sequence
  Non-cyclic GFR-binding peptide
  MOD_RES (34), (34): Xaa is C or S
  MOD_RES (12), (13), (14), (15), (16): Xaa is A or G
  MOD_RES (17), (18), (19), (20): Xaa is A or G or is absent
SEVTMNEYKFKXXXXXXXXXLYLISIPEMKEPVX

SEQ ID NO: 32965 - protein, 33 aa, Artificial Sequence
  Non-cyclic GFR-binding peptide
  MOD_RES (1), (33): Xaa is C or S
XRDVVMGRHKRLIIQQKDNYYLMSTASMKTPTX

SEQ ID NO: 32966 - protein, 37 aa, Artificial Sequence
  Non-cyclic GFR-binding peptide
  MOD_RES (2), (34), (35): Xaa is C or S
GXESVAMGRHKRLYTVVGKDYYLISTASLKTPVXXAK

SEQ ID NO: 32967 - protein, 38 aa, Artificial Sequence
  Non-cyclic GFR-binding peptide
  MOD_RES (1), (32), (33): Xaa is C or S
XSRVIMPIKGYVKPKRGVFYLINIPSLAQPVXXPAASA

SEQ ID NO: 32968 - protein, 41 aa, Artificial Sequence
  Non-cyclic GFR-binding peptide
  MOD_RES (1), (3), (35), (36): Xaa is C or S
XGXRDVVMGRHKRLIIQQKDNYYLMSTASMKTPTXXPGASG

SEQ ID NO: 32969 - protein, 39 aa, Artificial Sequence
  Non-cyclic GFR-binding peptide
  MOD_RES (2), (4), (36), (37): Xaa is C or S
SXGXRDVVMGRHKRLIIQQKDNYYLMSTASMKTPTXXPG

SEQ ID NO: 32970 - protein, 41 aa, Artificial Sequence
  Non-cyclic GFR-binding peptide
  MOD_RES (1), (3), (35), (36): Xaa is C or S
XGXSRVVMNRHKRLIVNSSDDYYLVSTASLKTPAXXPKPVH

SEQ ID NO: 32971 - protein, 34 aa, Artificial Sequence
  Non-cyclic GFR-binding peptide
  MOD_RES (34), (34): Xaa is C or S
  MOD_RES (12), (13), (14), (15), (16): Xaa is A or G
  MOD_RES (17), (18), (19), (20): Xaa is A or G or is absent
SEVTMNRHKRLXXXXXXXXXYYLISTASMKEPVX

SEQ ID NO: 32972 - protein, 34 aa, Artificial Sequence
  Non-cyclic GFR-binding peptide
  MOD_RES (1), (33), (34): Xaa is C or S
XRDVVMGRHKRLIIQQKDNYYLMSTASMKTPTXX

SEQ ID NO: 32973 - protein, 31 aa, Artificial Sequence
  Non-cyclic GFR-binding peptide
  MOD_RES (31), (31): Xaa is C or S
EVTMNEYKFKVVNKNEDLYLISIPEMKEPVX

SEQ ID NO: 32974 - protein, 40 aa, Artificial Sequence
  Non-cyclic GFR-binding peptide
  MOD_RES (1), (3), (37), (38): Xaa is C or S
  MOD_RES (15), (16), (17), (18), (19): Xaa is A or G
  MOD_RES (20), (21), (22), (23): Xaa is A or G or is absent
XGXRDVVMGRHKRLXXXXXXXXXYYLMSTASMKTPTXXPG

SEQ ID NO: 32975 - protein, 43 aa, Artificial Sequence
  Non-cyclic GFR-binding peptide
  MOD_RES (2), (4), (38), (39): Xaa is C or S
  MOD_RES (16), (17), (18), (19), (20): Xaa is A or G
  MOD_RES (21), (22), (23), (24): Xaa is A or G or is absent
RXGXSEVVMDYHYKLXXXXXXXXXKYLISIPSLRTPVXXTPPT

SEQ ID NO: 32976 - protein, 32 aa, Artificial Sequence
  Non-cyclic GFR-binding peptide
  MOD_RES (1), (1): Xaa is C or S
XRDVVMGEYKFKIIQQKDNLYLMSIPEMKTPT

SEQ ID NO: 32977 - protein, 34 aa, Artificial Sequence
  Non-cyclic GFR-binding peptide
  MOD_RES (31), (32): Xaa is C or S
EVTMNPIKGYVVNKNEDFYLINIPSMKEPVXXPE

SEQ ID NO: 32978 - protein, 36 aa, Artificial Sequence
  Non-cyclic GFR-binding peptide
  MOD_RES (31), (32): Xaa is C or S
EVVMDYHYKLVVNNASDKYLISIPSLRTPVXXTPPT

SEQ ID NO: 32979 - protein, 35 aa, Artificial Sequence
  Non-cyclic GFR-binding peptide
  MOD_RES (1), (3), (35): Xaa is C or S
XGXESVAMGRHKRLYTVVGKDYYLISTASLKTPVX

SEQ ID NO: 32980 - protein, 38 aa, Artificial Sequence
  Non-cyclic GFR-binding peptide
  MOD_RES (2), (36), (37): Xaa is C or S
  MOD_RES (14), (15), (16), (17), (18): Xaa is A or G
  MOD_RES (19), (20), (21), (22): Xaa is A or G or is absent
GXESVAMGRHKRLXXXXXXXXXYYLISTASLKTPVXXA

SEQ ID NO: 32981 - protein, 38 aa, Artificial Sequence
  Non-cyclic GFR-binding peptide
  MOD_RES (33), (34): Xaa is C or S
  MOD_RES (11), (12), (13), (14), (15): Xaa is A or G
  MOD_RES (16), (17), (18), (19): Xaa is A or G or is absent
EVTMNRYKKLXXXXXXXXXFYLISIANMKEPVXXPEPI

SEQ ID NO: 32982 - protein, 35 aa, Artificial Sequence
  Non-cyclic GFR-binding peptide
  MOD_RES (34), (35): Xaa is C or S
  MOD_RES (12), (13), (14), (15), (16): Xaa is A or G
  MOD_RES (17), (18), (19), (20): Xaa is A or G or is absent
SEVTMNRHKRLXXXXXXXXXYYLISTASMKEPVXX

SEQ ID NO: 32983 - protein, 42 aa, Artificial Sequence
  Non-cyclic GFR-binding peptide
  MOD_RES (2), (4), (36), (37): Xaa is C or S
RXAXSEVTMNEYKFKVVNKNEDLYLISIPEMKEPVXXPEPIG

SEQ ID NO: 32984 - protein, 36 aa, Artificial Sequence
  Non-cyclic GFR-binding peptide
  MOD_RES (2), (4), (35), (36): Xaa is C or S
SXKXSKVVMPIKGYVKPTRGVFYLINIPSLDQPVXX

SEQ ID NO: 32985 - protein, 36 aa, Artificial Sequence
  Non-cyclic GFR-binding peptide
  MOD_RES (2), (4), (36): Xaa is C or S
RXGXESVAMGRHKRLYTVVGKDYYLISTASLKTPVX

SEQ ID NO: 32986 - protein, 37 aa, Artificial Sequence
  Non-cyclic GFR-binding peptide
  MOD_RES (31), (32): Xaa is C or S
EEVIMRHKRLLLVRGNDYYLMSTASTKVPAXXTSPVR

SEQ ID NO: 32987 - protein, 36 aa, Artificial Sequence
  Non-cyclic GFR-binding peptide
  MOD_RES (33), (34): Xaa is C or S
  MOD_RES (11), (12), (13), (14), (15): Xaa is A or G
  MOD_RES (16), (17), (18), (19): Xaa is A or G or is absent
EVVMDYHYKLXXXXXXXXXKYLISIPSLRTPVXXTP

SEQ ID NO: 32988 - protein, 38 aa, Artificial Sequence
  Non-cyclic GFR-binding peptide
  MOD_RES (1), (33), (34): Xaa is C or S
XSEVTMNPIKGYVVNKNEDFYLINIPSMKEPVXXPEPI

SEQ ID NO: 32989 - protein, 40 aa, Artificial Sequence
  Non-cyclic GFR-binding peptide
  MOD_RES (2), (4), (38), (39): Xaa is C or S
  MOD_RES (16), (17), (18), (19), (20): Xaa is A or G
  MOD_RES (21), (22), (23), (24): Xaa is A or G or is absent
SXGXRDVVMGYHYKLXXXXXXXXXKYLMSIPSMKTPTXXP

SEQ ID NO: 32990 - protein, 32 aa, Artificial Sequence
  Non-cyclic GFR-binding peptide
  MOD_RES (1), (1): Xaa is C or S
XRDVVMGRHKRLIIQQKDNYYLMSTASMKTPT

SEQ ID NO: 32991 - protein, 34 aa, Artificial Sequence
  Non-cyclic GFR-binding peptide
  MOD_RES (1), (33), (34): Xaa is C or S
XSEVTMNYHYKLVVNKNEDKYLISIPSMKEPVXX

SEQ ID NO: 32992 - protein, 41 aa, Artificial Sequence
  Non-cyclic GFR-binding peptide
  MOD_RES (2), (4), (36), (37): Xaa is C or S
RXGXAEVVMDRHKRLVVNNAADYYLISTASLRAPVXXSAPA

SEQ ID NO: 32993 - protein, 31 aa, Artificial Sequence
  Non-cyclic GFR-binding peptide
  MOD_RES (31), (31): Xaa is C or S
EEVIMRHKRLLLVRGNDYYLMSTASTKVPAX

SEQ ID NO: 32994 - protein, 33 aa, Artificial Sequence
  Non-cyclic GFR-binding peptide
  MOD_RES (32), (33): Xaa is C or S
SEVTMNPIKGYVVNKNEDFYLINIPSMKEPVXX

SEQ ID NO: 32995 - protein, 37 aa, Artificial Sequence
  Non-cyclic GFR-binding peptide
  MOD_RES (1), (35), (36): Xaa is C or S
  MOD_RES (13), (14), (15), (16), (17): Xaa is A or G
  MOD_RES (18), (19), (20), (21): Xaa is A or G or is absent
XRDVVMGYHYKLXXXXXXXXXKYLMSIPSMKTPTXXP

SEQ ID NO: 32996 - protein, 37 aa, Artificial Sequence
  Non-cyclic GFR-binding peptide
  MOD_RES (34), (35): Xaa is C or S
  MOD_RES (12), (13), (14), (15), (16): Xaa is A or G
  MOD_RES (17), (18), (19), (20): Xaa is A or G or is absent
SEVTMNYHYKLXXXXXXXXXKYLISIPSMKEPVXXPE

SEQ ID NO: 32997 - protein, 37 aa, Artificial Sequence
  Non-cyclic GFR-binding peptide
  MOD_RES (2), (34), (35): Xaa is C or S
AXSEVTMNEYKFKVVNKNEDLYLISIPEMKEPVXXPE

SEQ ID NO: 32998 - protein, 34 aa, Artificial Sequence
  Non-cyclic GFR-binding peptide
  MOD_RES (1), (32), (33): Xaa is C or S
XSRVIMPIKGYVKPKRGVFYLINIPSLAQPVXXP

SEQ ID NO: 32999 - protein, 41 aa, Artificial Sequence
  Non-cyclic GFR-binding peptide
  MOD_RES (1), (3), (35), (36): Xaa is C or S
XGXSEVVMDEYKFKVVNNASDLYLISIPELRTPVXXTPPTS

SEQ ID NO: 33000 - protein, 38 aa, Artificial Sequence
  Non-cyclic GFR-binding peptide
  MOD_RES (1), (33), (34): Xaa is C or S
XSEVTMNEYKFKVVNKNEDLYLISIPEMKEPVXXPEPI

SEQ ID NO: 33001 - protein, 36 aa, Artificial Sequence
  Non-cyclic GFR-binding peptide
  MOD_RES (33), (34): Xaa is C or S
  MOD_RES (11), (12), (13), (14), (15): Xaa is A or G
  MOD_RES (16), (17), (18), (19): Xaa is A or G or is absent
DVVMGRHKRLXXXXXXXXXYYLMSTASMKTPTXXPG

SEQ ID NO: 33002 - protein, 36 aa, Artificial Sequence
  Non-cyclic GFR-binding peptide
  MOD_RES (1), (33), (34): Xaa is C or S
XSEVVMDRHKRLVVNNASDYYLISTASLRTPVXXTP

SEQ ID NO: 33003 - protein, 35 aa, Artificial Sequence
  Non-cyclic GFR-binding peptide
  MOD_RES (34), (35): Xaa is C or S
  MOD_RES (12), (13), (14), (15), (16): Xaa is A or G
  MOD_RES (17), (18), (19), (20): Xaa is A or G or is absent
SEVTMNEYKFKXXXXXXXXXLYLISIPEMKEPVXX

SEQ ID NO: 33004 - protein, 41 aa, Artificial Sequence
  Non-cyclic GFR-binding peptide
  MOD_RES (1), (3), (35), (36): Xaa is C or S
XAXSEVTMNRHKRLVVNKNEDYYLISTASMKEPVXXPEPIG

SEQ ID NO: 33005 - protein, 39 aa, Artificial Sequence
  Non-cyclic GFR-binding peptide
  MOD_RES (1), (35), (36): Xaa is C or S
  MOD_RES (13), (14), (15), (16), (17): Xaa is A or G
  MOD_RES (18), (19), (20), (21): Xaa is A or G or is absent
XSEVVMDYHYKLXXXXXXXXXKYLISIPSLRTPVXXTPP

SEQ ID NO: 33006 - protein, 35 aa, Artificial Sequence
  Non-cyclic GFR-binding peptide
  MOD_RES (32), (33): Xaa is C or S
SEVTMNPIKGYVVNKNEDFYLINIPSMKEPVXXPE

SEQ ID NO: 33007 - protein, 40 aa, Artificial Sequence
  Non-cyclic GFR-binding peptide
  MOD_RES (2), (34), (35): Xaa is C or S
AXSEVTMNYHYKLVVNKNEDKYLISIPSMKEPVXXPEPIG

SEQ ID NO: 33008 - protein, 34 aa, Artificial Sequence
  Non-cyclic GFR-binding peptide
  MOD_RES (33), (34): Xaa is C or S
  MOD_RES (11), (12), (13), (14), (15): Xaa is A or G
  MOD_RES (16), (17), (18), (19): Xaa is A or G or is absent
SVAMGRHKRLXXXXXXXXXYYLISTASLKTPVXX

SEQ ID NO: 33009 - protein, 37 aa, Artificial Sequence
  Non-cyclic GFR-binding peptide
  MOD_RES (2), (4): Xaa is C or S
  MOD_RES (16), (17), (18), (19), (20): Xaa is A or G
  MOD_RES (21), (22), (23), (24): Xaa is A or G or is absent
RXGXSEVVMDRHKRLXXXXXXXXXYYLISTASLRTPV

SEQ ID NO: 33010 - protein, 39 aa, Artificial Sequence
  Non-cyclic GFR-binding peptide
  MOD_RES (1), (3), (36), (37): Xaa is C or S
  MOD_RES (14), (15), (16), (17), (18): Xaa is A or G
  MOD_RES (19), (20), (21), (22): Xaa is A or G or is absent
XGXEEVIMRHKRLXXXXXXXXXYYLMSTASTKVPAXXTS

SEQ ID NO: 33011 - protein, 36 aa, Artificial Sequence
  Non-cyclic GFR-binding peptide
  MOD_RES (31), (32): Xaa is C or S
SKVIMPIKGYIKPTKGIFYLINIPSLDQSVXXPSAS

SEQ ID NO: 33012 - protein, 34 aa, Artificial Sequence
  Non-cyclic GFR-binding peptide
  MOD_RES (2), (34): Xaa is C or S
GXSEVVMDRHKRLVVNNASDYYLISTASLRTPVX

SEQ ID NO: 33013 - protein, 33 aa, Artificial Sequence
  Non-cyclic GFR-binding peptide
  MOD_RES (31), (32): Xaa is C or S
SVAMGRHKRLYTVVGKDYYLISTASLKTPVXXA

SEQ ID NO: 33014 - protein, 38 aa, Artificial Sequence
  Non-cyclic GFR-binding peptide
  MOD_RES (2), (36), (37): Xaa is C or S
  MOD_RES (14), (15), (16), (17), (18): Xaa is A or G
  MOD_RES (19), (20), (21), (22): Xaa is A or G or is absent
AXSEVTMNRHKRLXXXXXXXXXYYLISTASMKEPVXXP

SEQ ID NO: 33015 - protein, 37 aa, Artificial Sequence
  Non-cyclic GFR-binding peptide
  MOD_RES (2), (4), (35), (36): Xaa is C or S
LXGXEEVIMRHKRLLLVRGNDYYLMSTASTKVPAXXT

SEQ ID NO: 33016 - protein, 39 aa, Artificial Sequence
  Non-cyclic GFR-binding peptide
  MOD_RES (2), (33), (34): Xaa is C or S
KXSRVIMPIKGYVKPKRGVFYLINIPSLAQPVXXPAASA

SEQ ID NO: 33017 - protein, 36 aa, Artificial Sequence
  Non-cyclic GFR-binding peptide
  MOD_RES (1), (3), (35), (36): Xaa is C or S
XGXRDVVMGYHYKLIIQQKDNKYLMSIPSMKTPTXX

SEQ ID NO: 33018 - protein, 41 aa, Artificial Sequence
  Non-cyclic GFR-binding peptide
  MOD_RES (1), (3), (37), (38): Xaa is C or S
  MOD_RES (15), (16), (17), (18), (19): Xaa is A or G
  MOD_RES (20), (21), (22), (23): Xaa is A or G or is absent
XGXRDVVMGEYKFKXXXXXXXXXLYLMSIPEMKTPTXXPGA

SEQ ID NO: 33019 - protein, 32 aa, Artificial Sequence
  Non-cyclic GFR-binding peptide
  MOD_RES (2), (2): Xaa is C or S
GXEEVIMRHKRLLLVRGNDYYLMSTASTKVPA

SEQ ID NO: 33020 - protein, 38 aa, Artificial Sequence
  Non-cyclic GFR-binding peptide
  MOD_RES (2), (4), (36), (37): Xaa is C or S
SXGXRDVVMGRHKRLIIQQKDNYYLMSTASMKTPTXXP

SEQ ID NO: 33021 - protein, 37 aa, Artificial Sequence
  Non-cyclic GFR-binding peptide
  MOD_RES (2), (36), (37): Xaa is C or S
  MOD_RES (14), (15), (16), (17), (18): Xaa is A or G
  MOD_RES (19), (20), (21), (22): Xaa is A or G or is absent
GXSEVVMDRHKRLXXXXXXXXXYYLISTASLRTPVXX

SEQ ID NO: 33022 - protein, 34 aa, Artificial Sequence
  Non-cyclic GFR-binding peptide
  MOD_RES (31), (32): Xaa is C or S
EVTMNRYKKLVVNKNEDFYLISIANMKEPVXXPE

SEQ ID NO: 33023 - protein, 38 aa, Artificial Sequence
  Non-cyclic GFR-binding peptide
  MOD_RES (2), (36), (37): Xaa is C or S
  MOD_RES (14), (15), (16), (17), (18): Xaa is A or G
  MOD_RES (19), (20), (21), (22): Xaa is A or G or is absent
GXSEVVMDRHKRLXXXXXXXXXYYLISTASLRTPVXXT

SEQ ID NO: 33024 - protein, 37 aa, Artificial Sequence
  Non-cyclic GFR-binding peptide
  MOD_RES (1), (3), (37): Xaa is C or S
  MOD_RES (15), (16), (17), (18), (19): Xaa is A or G
  MOD_RES (20), (21), (22), (23): Xaa is A or G or is absent
XGXESVAMGRHKRLXXXXXXXXXYYLISTASLKTPVX

SEQ ID NO: 33025 - protein, 37 aa, Artificial Sequence
  Non-cyclic GFR-binding peptide
  MOD_RES (2), (34), (35): Xaa is C or S
GXAEVVMDRHKRLVVNNAADYYLISTASLRAPVXXSA

SEQ ID NO: 33026 - protein, 38 aa, Artificial Sequence
  Non-cyclic GFR-binding peptide
  MOD_RES (1), (3), (37), (38): Xaa is C or S
  MOD_RES (15), (16), (17), (18), (19): Xaa is A or G
  MOD_RES (20), (21), (22), (23): Xaa is A or G or is absent
XGXRDVVMGEYKFKXXXXXXXXXLYLMSIPEMKTPTXX

SEQ ID NO: 33027 - protein, 41 aa, Artificial Sequence
  Non-cyclic GFR-binding peptide
  MOD_RES (2), (4), (37), (38): Xaa is C or S
  MOD_RES (15), (16), (17), (18), (19): Xaa is A or G
  MOD_RES (20), (21), (22), (23): Xaa is A or G or is absent
LXGXEEVIMEYKFKXXXXXXXXXLYLMSIPETKVPAXXTSP

SEQ ID NO: 33028 - protein, 32 aa, Artificial Sequence
  Non-cyclic GFR-binding peptide
  MOD_RES (11), (12), (13), (14), (15): Xaa is A or G
  MOD_RES (16), (17), (18), (19): Xaa is A or G or is absent
EVTMNYHYKLXXXXXXXXXKYLISIPSMKEPV

SEQ ID NO: 33029 - protein, 36 aa, Artificial Sequence
  Non-cyclic GFR-binding peptide
  MOD_RES (1), (35), (36): Xaa is C or S
  MOD_RES (13), (14), (15), (16), (17): Xaa is A or G
  MOD_RES (18), (19), (20), (21): Xaa is A or G or is absent
XSEVVMDEYKFKXXXXXXXXXLYLISIPELRTPVXX

SEQ ID NO: 33030 - protein, 41 aa, Artificial Sequence
  Non-cyclic GFR-binding peptide
  MOD_RES (1), (35), (36): Xaa is C or S
  MOD_RES (13), (14), (15), (16), (17): Xaa is A or G
  MOD_RES (18), (19), (20), (21): Xaa is A or G or is absent
XSEVTMNRYKKLXXXXXXXXXFYLISIANMKEPVXXPEPIG

SEQ ID NO: 33031 - protein, 34 aa, Artificial Sequence
  Non-cyclic GFR-binding peptide
  MOD_RES (2), (34): Xaa is C or S
GXRDVVMGEYKFKIIQQKDNLYLMSIPEMKTPTX

SEQ ID NO: 33032 - protein, 33 aa, Artificial Sequence
  Non-cyclic GFR-binding peptide
  MOD_RES (33), (33): Xaa is C or S
  MOD_RES (11), (12), (13), (14), (15): Xaa is A or G
  MOD_RES (16), (17), (18), (19): Xaa is A or G or is absent
EVVMDRHKRLXXXXXXXXXYYLISTASLRTPVX

SEQ ID NO: 33033 - protein, 30 aa, Artificial Sequence
  Non-cyclic GFR-binding peptide
EVVMDYHYKLVVNNASDKYLISIPSLRTPV

SEQ ID NO: 33034 - protein, 39 aa, Artificial Sequence
  Non-cyclic GFR-binding peptide
  MOD_RES (2), (35), (36): Xaa is C or S
  MOD_RES (13), (14), (15), (16), (17): Xaa is A or G
  MOD_RES (18), (19), (20), (21): Xaa is A or G or is absent
GXEEVIMRHKRLXXXXXXXXXYYLMSTASTKVPAXXTSP

SEQ ID NO: 33035 - protein, 32 aa, Artificial Sequence
  Non-cyclic GFR-binding peptide
  MOD_RES (11), (12), (13), (14), (15): Xaa is A or G
  MOD_RES (16), (17), (18), (19): Xaa is A or G or is absent
EEVIMYHYKLXXXXXXXXXKYLMSIPSTKVPA

SEQ ID NO: 33036 - protein, 33 aa, Artificial Sequence
  Non-cyclic GFR-binding peptide
  MOD_RES (12), (13), (14), (15), (16): Xaa is A or G
  MOD_RES (17), (18), (19), (20): Xaa is A or G or is absent
SEVTMNRHKRLXXXXXXXXXYYLISTASMKEPV

SEQ ID NO: 33037 - protein, 42 aa, Artificial Sequence
  Non-cyclic GFR-binding peptide
  MOD_RES (2), (4), (36), (37): Xaa is C or S
SXGXRDVVMGYHYKLIIQQKDNKYLMSIPSMKTPTXXPGASG

SEQ ID NO: 33038 - protein, 34 aa, Artificial Sequence
  Non-cyclic GFR-binding peptide
  MOD_RES (1), (1): Xaa is C or S
  MOD_RES (13), (14), (15), (16), (17): Xaa is A or G
  MOD_RES (18), (19), (20), (21): Xaa is A or G or is absent
XSEVTMNPIKGYXXXXXXXXXFYLINIPSMKEPV

SEQ ID NO: 33039 - protein, 37 aa, Artificial Sequence
  Non-cyclic GFR-binding peptide
  MOD_RES (2), (34), (35): Xaa is C or S
AXSEVTMNRYKKLVVNKNEDFYLISIANMKEPVXXPE

SEQ ID NO: 33040 - protein, 36 aa, Artificial Sequence
  Non-cyclic GFR-binding peptide
  MOD_RES (1), (33), (34): Xaa is C or S
XSEVTMNYHYKLVVNKNEDKYLISIPSMKEPVXXPE

SEQ ID NO: 33041 - protein, 42 aa, Artificial Sequence
  Non-cyclic GFR-binding peptide
  MOD_RES (1), (3), (37), (38): Xaa is C or S
  MOD_RES (15), (16), (17), (18), (19): Xaa is A or G
  MOD_RES (20), (21), (22), (23): Xaa is A or G or is absent
XGXRDVVMGEYKFKXXXXXXXXXLYLMSIPEMKTPTXXPGAS

SEQ ID NO: 33042 - protein, 34 aa, Artificial Sequence
  Non-cyclic GFR-binding peptide
  MOD_RES (1), (3): Xaa is C or S
XAXSEVTMNRHKRLVVNKNEDYYLISTASMKEPV

SEQ ID NO: 33043 - protein, 37 aa, Artificial Sequence
  Non-cyclic GFR-binding peptide
  MOD_RES (2), (4), (36), (37): Xaa is C or S
RXAXSEVTMNRHKRLVVNKNEDYYLISTASMKEPVXX

SEQ ID NO: 33044 - protein, 38 aa, Artificial Sequence
  Non-cyclic GFR-binding peptide
  MOD_RES (1), (35), (36): Xaa is C or S
  MOD_RES (13), (14), (15), (16), (17): Xaa is A or G
  MOD_RES (18), (19), (20), (21): Xaa is A or G or is absent
XESVAMGRHKRLXXXXXXXXXYYLISTASLKTPVXXAK

SEQ ID NO: 33045 - protein, 36 aa, Artificial Sequence
  Non-cyclic GFR-binding peptide
  MOD_RES (31), (32): Xaa is C or S
SRVIMPIKGYVKPKRGVFYLINIPSLAQPVXXPAAS

SEQ ID NO: 33046 - protein, 38 aa, Artificial Sequence
  Non-cyclic GFR-binding peptide
  MOD_RES (1), (3), (36), (37): Xaa is C or S
  MOD_RES (14), (15), (16), (17), (18): Xaa is A or G
  MOD_RES (19), (20), (21), (22): Xaa is A or G or is absent
XGXEEVIMEYKFKXXXXXXXXXLYLMSIPETKVPAXXT

SEQ ID NO: 33047 - protein, 37 aa, Artificial Sequence
  Non-cyclic GFR-binding peptide
  MOD_RES (34), (35): Xaa is C or S
  MOD_RES (12), (13), (14), (15), (16): Xaa is A or G
  MOD_RES (17), (18), (19), (20): Xaa is A or G or is absent
SEVTMNRHKRLXXXXXXXXXYYLISTASMKEPVXXPE

SEQ ID NO: 33048 - protein, 38 aa, Artificial Sequence
  Non-cyclic GFR-binding peptide
  MOD_RES (1), (3), (36), (37): Xaa is C or S
  MOD_RES (14), (15), (16), (17), (18): Xaa is A or G
  MOD_RES (19), (20), (21), (22): Xaa is A or G or is absent
XKXSKVVMPIKGYXXXXXXXXXFYLINIPSLDQPVXXP

SEQ ID NO: 33049 - protein, 43 aa, Artificial Sequence
  Non-cyclic GFR-binding peptide
  MOD_RES (2), (4), (38), (39): Xaa is C or S
  MOD_RES (16), (17), (18), (19), (20): Xaa is A or G
  MOD_RES (21), (22), (23), (24): Xaa is A or G or is absent
SXGXRDVVMGRHKRLXXXXXXXXXYYLMSTASMKTPTXXPGAS

SEQ ID NO: 33050 - protein, 36 aa, Artificial Sequence
  Non-cyclic GFR-binding peptide
  MOD_RES (2), (4): Xaa is C or S
  MOD_RES (15), (16), (17), (18), (19): Xaa is A or G
  MOD_RES (20), (21), (22), (23): Xaa is A or G or is absent
LXGXEEVIMYHYKLXXXXXXXXXKYLMSIPSTKVPA

SEQ ID NO: 33051 - protein, 44 aa, Artificial Sequence
  Non-cyclic GFR-binding peptide
  MOD_RES (2), (4), (38), (39): Xaa is C or S
  MOD_RES (16), (17), (18), (19), (20): Xaa is A or G
  MOD_RES (21), (22), (23), (24): Xaa is A or G or is absent
RXAXSEVTMNRYKKLXXXXXXXXXFYLISIANMKEPVXXPEPIG

SEQ ID NO: 33052 - protein, 40 aa, Artificial Sequence
  Non-cyclic GFR-binding peptide
  MOD_RES (34), (35): Xaa is C or S
  MOD_RES (12), (13), (14), (15), (16): Xaa is A or G
  MOD_RES (17), (18), (19), (20): Xaa is A or G or is absent
SRVVMNEYKFKXXXXXXXXXLYLVSIPELKTPAXXPKPVH

SEQ ID NO: 33053 - protein, 34 aa, Artificial Sequence
  Non-cyclic GFR-binding peptide
  MOD_RES (32), (33): Xaa is C or S
SEVVMDYHYKLVVNNASDKYLISIPSLRTPVXXT

SEQ ID NO: 33054 - protein, 35 aa, Artificial Sequence
  Non-cyclic GFR-binding peptide
  MOD_RES (1), (3): Xaa is C or S
  MOD_RES (14), (15), (16), (17), (18): Xaa is A or G
  MOD_RES (19), (20), (21), (22): Xaa is A or G or is absent
XKXSKVVMPIKGYXXXXXXXXXFYLINIPSLDQPV

SEQ ID NO: 33055 - protein, 40 aa, Artificial Sequence
  Non-cyclic GFR-binding peptide
  MOD_RES (2), (36), (37): Xaa is C or S
  MOD_RES (14), (15), (16), (17), (18): Xaa is A or G
  MOD_RES (19), (20), (21), (22): Xaa is A or G or is absent
AXSEVTMNRHKRLXXXXXXXXXYYLISTASMKEPVXXPEP

SEQ ID NO: 33056 - protein, 33 aa, Artificial Sequence
  Non-cyclic GFR-binding peptide
  MOD_RES (33), (33): Xaa is C or S
  MOD_RES (11), (12), (13), (14), (15): Xaa is A or G
  MOD_RES (16), (17), (18), (19): Xaa is A or G or is absent
SRVIMPIKGYXXXXXXXXXFYLINIPSLAQPVX

SEQ ID NO: 33057 - protein, 31 aa, Artificial Sequence
  Non-cyclic GFR-binding peptide
SEVVMDRHKRLVVNNASDYYLISTASLRTPV

SEQ ID NO: 33058 - protein, 39 aa, Artificial Sequence
  Non-cyclic GFR-binding peptide
  MOD_RES (1), (35), (36): Xaa is C or S
  MOD_RES (13), (14), (15), (16), (17): Xaa is A or G
  MOD_RES (18), (19), (20), (21): Xaa is A or G or is absent
XSEVTMNRYKKLXXXXXXXXXFYLISIANMKEPVXXPEP

SEQ ID NO: 33059 - protein, 36 aa, Artificial Sequence
  Non-cyclic GFR-binding peptide
  MOD_RES (2), (36): Xaa is C or S
  MOD_RES (14), (15), (16), (17), (18): Xaa is A or G
  MOD_RES (19), (20), (21), (22): Xaa is A or G or is absent
GXRDVVMGEYKFKXXXXXXXXXLYLMSIPEMKTPTX

SEQ ID NO: 33060 - protein, 43 aa, Artificial Sequence
  Non-cyclic GFR-binding peptide
  MOD_RES (2), (4), (37), (38): Xaa is C or S
  MOD_RES (15), (16), (17), (18), (19): Xaa is A or G
  MOD_RES (20), (21), (22), (23): Xaa is A or G or is absent
LXGXEEVIMEYKFKXXXXXXXXXLYLMSIPETKVPAXXTSPVR

SEQ ID NO: 33061 - protein, 32 aa, Artificial Sequence
  Non-cyclic GFR-binding peptide
  MOD_RES (11), (12), (13), (14), (15): Xaa is A or G
  MOD_RES (16), (17), (18), (19): Xaa is A or G or is absent
EVTMNPIKGYXXXXXXXXXFYLINIPSMKEPV

SEQ ID NO: 33062 - protein, 39 aa, Artificial Sequence
  Non-cyclic GFR-binding peptide
  MOD_RES (2), (33), (34): Xaa is C or S
GXEEVIMEYKFKLLVRGNDLYLMSIPETKVPAXXTSPVR

SEQ ID NO: 33063 - protein, 38 aa, Artificial Sequence
  Non-cyclic GFR-binding peptide
  MOD_RES (1), (33), (34): Xaa is C or S
XSEVTMNRHKRLVVNKNEDYYLISTASMKEPVXXPEPI

SEQ ID NO: 33064 - protein, 38 aa, Artificial Sequence
  Non-cyclic GFR-binding peptide
  MOD_RES (2), (4), (36), (37): Xaa is C or S
RXAXSEVTMNEYKFKVVNKNEDLYLISIPEMKEPVXXP

SEQ ID NO: 33065 - protein, 38 aa, Artificial Sequence
  Non-cyclic GFR-binding peptide
  MOD_RES (2), (4), (37), (38): Xaa is C or S
  MOD_RES (15), (16), (17), (18), (19): Xaa is A or G
  MOD_RES (20), (21), (22), (23): Xaa is A or G or is absent
LXGXEEVIMYHYKLXXXXXXXXXKYLMSIPSTKVPAXX

SEQ ID NO: 33066 - protein, 32 aa, Artificial Sequence
  Non-cyclic GFR-binding peptide
  MOD_RES (11), (12), (13), (14), (15): Xaa is A or G
  MOD_RES (16), (17), (18), (19): Xaa is A or G or is absent
EVTMNEYKFKXXXXXXXXXLYLISIPEMKEPV

SEQ ID NO: 33067 - protein, 37 aa, Artificial Sequence
  Non-cyclic GFR-binding peptide
  MOD_RES (34), (35): Xaa is C or S
  MOD_RES (12), (13), (14), (15), (16): Xaa is A or G
  MOD_RES (17), (18), (19), (20): Xaa is A or G or is absent
AEVVMDRHKRLXXXXXXXXXYYLISTASLRAPVXXSA

SEQ ID NO: 33068 - protein, 33 aa, Artificial Sequence
  Non-cyclic GFR-binding peptide
  MOD_RES (33), (33): Xaa is C or S
  MOD_RES (11), (12), (13), (14), (15): Xaa is A or G
  MOD_RES (16), (17), (18), (19): Xaa is A or G or is absent
SKVVMPIKGYXXXXXXXXXFYLINIPSLDQPVX

SEQ ID NO: 33069 - protein, 38 aa, Artificial Sequence
  Non-cyclic GFR-binding peptide
  MOD_RES (2), (34), (35): Xaa is C or S
GXSEVVMDEYKFKVVNNASDLYLISIPELRTPVXXTPP

SEQ ID NO: 33070 - protein, 35 aa, Artificial Sequence
  Non-cyclic GFR-binding peptide
  MOD_RES (2), (34), (35): Xaa is C or S
AXSEVTMNEYKFKVVNKNEDLYLISIPEMKEPVXX

SEQ ID NO: 33071 - protein, 32 aa, Artificial Sequence
  Non-cyclic GFR-binding peptide
  MOD_RES (32), (32): Xaa is C or S
RDVVMGEYKFKIIQQKDNLYLMSIPEMKTPTX

SEQ ID NO: 33072 - protein, 32 aa, Artificial Sequence
  Non-cyclic GFR-binding peptide
  MOD_RES (11), (12), (13), (14), (15): Xaa is A or G
  MOD_RES (16), (17), (18), (19): Xaa is A or G or is absent
SKVIMPIKGYXXXXXXXXXFYLINIPSLDQSV

SEQ ID NO: 33073 - protein, 38 aa, Artificial Sequence
  Non-cyclic GFR-binding peptide
  MOD_RES (34), (35): Xaa is C or S
  MOD_RES (12), (13), (14), (15), (16): Xaa is A or G
  MOD_RES (17), (18), (19), (20): Xaa is A or G or is absent
RDVVMGEYKFKXXXXXXXXXLYLMSIPEMKTPTXXPGA

SEQ ID NO: 33074 - protein, 34 aa, Artificial Sequence
  Non-cyclic GFR-binding peptide
  MOD_RES (1), (32), (33): Xaa is C or S
XSKVIMPIKGYIKPTKGIFYLINIPSLDQSVXXP

SEQ ID NO: 33075 - protein, 38 aa, Artificial Sequence
  Non-cyclic GFR-binding peptide
  MOD_RES (32), (33): Xaa is C or S
SEVTMNYHYKLVVNKNEDKYLISIPSMKEPVXXPEPIG

SEQ ID NO: 33076 - protein, 33 aa, Artificial Sequence
  Non-cyclic GFR-binding peptide
  MOD_RES (1), (33): Xaa is C or S
XSEVTMNYHYKLVVNKNEDKYLISIPSMKEPVX

SEQ ID NO: 33077 - protein, 38 aa, Artificial Sequence
  Non-cyclic GFR-binding peptide
  MOD_RES (2), (35), (36): Xaa is C or S
  MOD_RES (13), (14), (15), (16), (17): Xaa is A or G
  MOD_RES (18), (19), (20), (21): Xaa is A or G or is absent
GXEEVIMEYKFKXXXXXXXXXLYLMSIPETKVPAXXTS

SEQ ID NO: 33078 - protein, 40 aa, Artificial Sequence
  Non-cyclic GFR-binding peptide
  MOD_RES (2), (34), (35): Xaa is C or S
GXESVAMGRHKRLYTVVGKDYYLISTASLKTPVXXAKSAK

SEQ ID NO: 33079 - protein, 36 aa, Artificial Sequence
  Non-cyclic GFR-binding peptide
  MOD_RES (32), (33): Xaa is C or S
SEVTMNRYKKLVVNKNEDFYLISIANMKEPVXXPEP

SEQ ID NO: 33080 - protein, 31 aa, Artificial Sequence
  Non-cyclic GFR-binding peptide
SEVTMNRHKRLVVNKNEDYYLISTASMKEPV

SEQ ID NO: 33081 - protein, 39 aa, Artificial Sequence
  Non-cyclic GFR-binding peptide
  MOD_RES (1), (33), (34): Xaa is C or S
XSRVVMNRHKRLIVNSSDDYYLVSTASLKTPAXXPKPVH

SEQ ID NO: 33082 - protein, 36 aa, Artificial Sequence
  Non-cyclic GFR-binding peptide
  MOD_RES (2), (4), (36): Xaa is C or S
RXAXSEVTMNPIKGYVVNKNEDFYLINIPSMKEPVX

SEQ ID NO: 33083 - protein, 39 aa, Artificial Sequence
  Non-cyclic GFR-binding peptide
  MOD_RES (1), (3), (35), (36): Xaa is C or S
XGXRDVVMGEYKFKIIQQKDNLYLMSIPEMKTPTXXPGA

SEQ ID NO: 33084 - protein, 37 aa, Artificial Sequence
  Non-cyclic GFR-binding peptide
  MOD_RES (33), (34): Xaa is C or S
  MOD_RES (11), (12), (13), (14), (15): Xaa is A or G
  MOD_RES (16), (17), (18), (19): Xaa is A or G or is absent
EVTMNYHYKLXXXXXXXXXKYLISIPSMKEPVXXPEP

SEQ ID NO: 33085 - protein, 33 aa, Artificial Sequence
  Non-cyclic GFR-binding peptide
  MOD_RES (33), (33): Xaa is C or S
  MOD_RES (11), (12), (13), (14), (15): Xaa is A or G
  MOD_RES (16), (17), (18), (19): Xaa is A or G or is absent
EVTMNPIKGYXXXXXXXXXFYLINIPSMKEPVX

SEQ ID NO: 33086 - protein, 40 aa, Artificial Sequence
  Non-cyclic GFR-binding peptide
  MOD_RES (2), (4), (35), (36): Xaa is C or S
SXKXSRVIMPIKGYVKPKRGVFYLINIPSLAQPVXXPAAS

SEQ ID NO: 33087 - protein, 39 aa, Artificial Sequence
  Non-cyclic GFR-binding peptide
  MOD_RES (33), (34): Xaa is C or S
  MOD_RES (11), (12), (13), (14), (15): Xaa is A or G
  MOD_RES (16), (17), (18), (19): Xaa is A or G or is absent
RVVMNEYKFKXXXXXXXXXLYLVSIPELKTPAXXPKPVH

SEQ ID NO: 33088 - protein, 37 aa, Artificial Sequence
  Non-cyclic GFR-binding peptide
  MOD_RES (1), (3), (34), (35): Xaa is C or S
XKXSKVVMPIKGYVKPTRGVFYLINIPSLDQPVXXPS

SEQ ID NO: 33089 - protein, 36 aa, Artificial Sequence
  Non-cyclic GFR-binding peptide
  MOD_RES (31), (32): Xaa is C or S
SVAMGRHKRLYTVVGKDYYLISTASLKTPVXXAKSA

SEQ ID NO: 33090 - protein, 35 aa, Artificial Sequence
  Non-cyclic GFR-binding peptide
  MOD_RES (1), (3): Xaa is C or S
  MOD_RES (14), (15), (16), (17), (18): Xaa is A or G
  MOD_RES (19), (20), (21), (22): Xaa is A or G or is absent
XGXEEVIMRHKRLXXXXXXXXXYYLMSTASTKVPA

SEQ ID NO: 33091 - protein, 38 aa, Artificial Sequence
  Non-cyclic GFR-binding peptide
  MOD_RES (1), (34), (35): Xaa is C or S
  MOD_RES (12), (13), (14), (15), (16): Xaa is A or G
  MOD_RES (17), (18), (19), (20): Xaa is A or G or is absent
XSKVVMPIKGYXXXXXXXXXFYLINIPSLDQPVXXPSA

SEQ ID NO: 33092 - protein, 36 aa, Artificial Sequence
  Non-cyclic GFR-binding peptide
  MOD_RES (32), (33): Xaa is C or S
SEVTMNRHKRLVVNKNEDYYLISTASMKEPVXXPEP

SEQ ID NO: 33093 - protein, 36 aa, Artificial Sequence
  Non-cyclic GFR-binding peptide
  MOD_RES (34), (35): Xaa is C or S
  MOD_RES (12), (13), (14), (15), (16): Xaa is A or G
  MOD_RES (17), (18), (19), (20): Xaa is A or G or is absent
SEVVMDEYKFKXXXXXXXXXLYLISIPELRTPVXXT

SEQ ID NO: 33094 - protein, 34 aa, Artificial Sequence
  Non-cyclic GFR-binding peptide
  MOD_RES (1), (3): Xaa is C or S
XGXSEVVMDYHYKLVVNNASDKYLISIPSLRTPV

SEQ ID NO: 33095 - protein, 35 aa, Artificial Sequence
  Non-cyclic GFR-binding peptide
  MOD_RES (1), (35): Xaa is C or S
  MOD_RES (13), (14), (15), (16), (17): Xaa is A or G
  MOD_RES (18), (19), (20), (21): Xaa is A or G or is absent
XSEVTMNPIKGYXXXXXXXXXFYLINIPSMKEPVX

SEQ ID NO: 33096 - protein, 36 aa, Artificial Sequence
  Non-cyclic GFR-binding peptide
  MOD_RES (1), (32), (33): Xaa is C or S
XSKVVMPIKGYVKPTRGVFYLINIPSLDQPVXXPSA

SEQ ID NO: 33097 - protein, 38 aa, Artificial Sequence
  Non-cyclic GFR-binding peptide
  MOD_RES (33), (34): Xaa is C or S
  MOD_RES (11), (12), (13), (14), (15): Xaa is A or G
  MOD_RES (16), (17), (18), (19): Xaa is A or G or is absent
EEVIMRHKRLXXXXXXXXXYYLMSTASTKVPAXXTSPV

SEQ ID NO: 33098 - protein, 36 aa, Artificial Sequence
  Non-cyclic GFR-binding peptide
  MOD_RES (1), (3), (35), (36): Xaa is C or S
XAXSEVTMNRYKKLVVNKNEDFYLISIANMKEPVXX

SEQ ID NO: 33099 - protein, 37 aa, Artificial Sequence
  Non-cyclic GFR-binding peptide
  MOD_RES (31), (32): Xaa is C or S
RVVMNYHYKLIVNSSDDKYLVSIPSLKTPAXXPKPVH

SEQ ID NO: 33100 - protein, 34 aa, Artificial Sequence
  Non-cyclic GFR-binding peptide
  MOD_RES (1), (3): Xaa is C or S
XGXSEVVMDEYKFKVVNNASDLYLISIPELRTPV

SEQ ID NO: 33101 - protein, 37 aa, Artificial Sequence
  Non-cyclic GFR-binding peptide
  MOD_RES (2), (4): Xaa is C or S
  MOD_RES (16), (17), (18), (19), (20): Xaa is A or G
  MOD_RES (21), (22), (23), (24): Xaa is A or G or is absent
RXGXESVAMGRHKRLXXXXXXXXXYYLISTASLKTPV

SEQ ID NO: 33102 - protein, 30 aa, Artificial Sequence
  Non-cyclic GFR-binding peptide
EVTMNRYKKLVVNKNEDFYLISIANMKEPV

SEQ ID NO: 33103 - protein, 36 aa, Artificial Sequence
  Non-cyclic GFR-binding peptide
  MOD_RES (1), (34), (35): Xaa is C or S
  MOD_RES (12), (13), (14), (15), (16): Xaa is A or G
  MOD_RES (17), (18), (19), (20): Xaa is A or G or is absent
XEEVIMEYKFKXXXXXXXXXLYLMSIPETKVPAXXT

SEQ ID NO: 33104 - protein, 35 aa, Artificial Sequence
  Non-cyclic GFR-binding peptide
  MOD_RES (2), (33), (34): Xaa is C or S
KXSKVIMPIKGYIKPTKGIFYLINIPSLDQSVXXP

SEQ ID NO: 33105 - protein, 42 aa, Artificial Sequence
  Non-cyclic GFR-binding peptide
  MOD_RES (2), (36), (37): Xaa is C or S
  MOD_RES (14), (15), (16), (17), (18): Xaa is A or G
  MOD_RES (19), (20), (21), (22): Xaa is A or G or is absent
GXESVAMGRHKRLXXXXXXXXXYYLISTASLKTPVXXAKSAK

SEQ ID NO: 33106 - protein, 31 aa, Artificial Sequence
  Non-cyclic GFR-binding peptide
  MOD_RES (31), (31): Xaa is C or S
SKVIMPIKGYIKPTKGIFYLINIPSLDQSVX

SEQ ID NO: 33107 - protein, 33 aa, Artificial Sequence
  Non-cyclic GFR-binding peptide
  MOD_RES (2), (2): Xaa is C or S
GXSEVVMDEYKFKVVNNASDLYLISIPELRTPV

SEQ ID NO: 33108 - protein, 34 aa, Artificial Sequence
  Non-cyclic GFR-binding peptide
  MOD_RES (1), (33), (34): Xaa is C or S
XESVAMGRHKRLYTVVGKDYYLISTASLKTPVXX

SEQ ID NO: 33109 - protein, 33 aa, Artificial Sequence
  Non-cyclic GFR-binding peptide
  MOD_RES (12), (13), (14), (15), (16): Xaa is A or G
  MOD_RES (17), (18), (19), (20): Xaa is A or G or is absent
SEVTMNPIKGYXXXXXXXXXFYLINIPSMKEPV

SEQ ID NO: 33110 - protein, 38 aa, Artificial Sequence
  Non-cyclic GFR-binding peptide
  MOD_RES (1), (33), (34): Xaa is C or S
XSEVVMDRHKRLVVNNASDYYLISTASLRTPVXXTPPT

SEQ ID NO: 33111 - protein, 35 aa, Artificial Sequence
  Non-cyclic GFR-binding peptide
  MOD_RES (2), (4): Xaa is C or S
SXGXRDVVMGEYKFKIIQQKDNLYLMSIPEMKTPT

SEQ ID NO: 33112 - protein, 40 aa, Artificial Sequence
  Non-cyclic GFR-binding peptide
  MOD_RES (1), (35), (36): Xaa is C or S
  MOD_RES (13), (14), (15), (16), (17): Xaa is A or G
  MOD_RES (18), (19), (20), (21): Xaa is A or G or is absent
XAEVVMDRHKRLXXXXXXXXXYYLISTASLRAPVXXSAPA

SEQ ID NO: 33113 - protein, 40 aa, Artificial Sequence
  Non-cyclic GFR-binding peptide
  MOD_RES (2), (36), (37): Xaa is C or S
  MOD_RES (14), (15), (16), (17), (18): Xaa is A or G
  MOD_RES (19), (20), (21), (22): Xaa is A or G or is absent
AXSEVTMNYHYKLXXXXXXXXXKYLISIPSMKEPVXXPEP

SEQ ID NO: 33114 - protein, 41 aa, Artificial Sequence
  Non-cyclic GFR-binding peptide
  MOD_RES (2), (4), (36), (37): Xaa is C or S
RXGXSEVVMDRHKRLVVNNASDYYLISTASLRTPVXXTPPT

SEQ ID NO: 33115 - protein, 35 aa, Artificial Sequence
  Non-cyclic GFR-binding peptide
  MOD_RES (2), (4): Xaa is C or S
SXGXRDVVMGYHYKLIIQQKDNKYLMSIPSMKTPT

SEQ ID NO: 33116 - protein, 39 aa, Artificial Sequence
  Non-cyclic GFR-binding peptide
  MOD_RES (1), (3), (36), (37): Xaa is C or S
  MOD_RES (14), (15), (16), (17), (18): Xaa is A or G
  MOD_RES (19), (20), (21), (22): Xaa is A or G or is absent
XKXSRVIMPIKGYXXXXXXXXXFYLINIPSLAQPVXXPA

SEQ ID NO: 33117 - protein, 39 aa, Artificial Sequence
  Non-cyclic GFR-binding peptide
  MOD_RES (1), (3), (34), (35): Xaa is C or S
XGXEEVIMYHYKLLLVRGNDKYLMSIPSTKVPAXXTSPV

SEQ ID NO: 33118 - protein, 31 aa, Artificial Sequence
  Non-cyclic GFR-binding peptide
  MOD_RES (31), (31): Xaa is C or S
EVVMDRHKRLVVNNAADYYLISTASLRAPVX

SEQ ID NO: 33119 - protein, 42 aa, Artificial Sequence
  Non-cyclic GFR-binding peptide
  MOD_RES (2), (4), (38), (39): Xaa is C or S
  MOD_RES (16), (17), (18), (19), (20): Xaa is A or G
  MOD_RES (21), (22), (23), (24): Xaa is A or G or is absent
RXGXSEVVMDEYKFKXXXXXXXXXLYLISIPELRTPVXXTPP

SEQ ID NO: 33120 - protein, 38 aa, Artificial Sequence
  Non-cyclic GFR-binding peptide
  MOD_RES (1), (3), (35), (36): Xaa is C or S
XGXSEVVMDEYKFKVVNNASDLYLISIPELRTPVXXTP

SEQ ID NO: 33121 - protein, 36 aa, Artificial Sequence
  Non-cyclic GFR-binding peptide
  MOD_RES (1), (3), (36): Xaa is C or S
  MOD_RES (14), (15), (16), (17), (18): Xaa is A or G
  MOD_RES (19), (20), (21), (22): Xaa is A or G or is absent
XKXSKVVMPIKGYXXXXXXXXXFYLINIPSLDQPVX

SEQ ID NO: 33122 - protein, 35 aa, Artificial Sequence
  Non-cyclic GFR-binding peptide
  MOD_RES (1), (33), (34): Xaa is C or S
XESVAMGRHKRLYTVVGKDYYLISTASLKTPVXXA

SEQ ID NO: 33123 - protein, 42 aa, Artificial Sequence
  Non-cyclic GFR-binding peptide
  MOD_RES (1), (3), (37), (38): Xaa is C or S
  MOD_RES (15), (16), (17), (18), (19): Xaa is A or G
  MOD_RES (20), (21), (22), (23): Xaa is A or G or is absent
XGXRDVVMGRHKRLXXXXXXXXXYYLMSTASMKTPTXXPGAS

SEQ ID NO: 33124 - protein, 38 aa, Artificial Sequence
  Non-cyclic GFR-binding peptide
  MOD_RES (34), (35): Xaa is C or S
  MOD_RES (12), (13), (14), (15), (16): Xaa is A or G
  MOD_RES (17), (18), (19), (20): Xaa is A or G or is absent
ESVAMGRHKRLXXXXXXXXXYYLISTASLKTPVXXAKS

SEQ ID NO: 33125 - protein, 37 aa, Artificial Sequence
  Non-cyclic GFR-binding peptide
  MOD_RES (2), (4), (35), (36): Xaa is C or S
SXKXSRVIMPIKGYVKPKRGVFYLINIPSLAQPVXXP

SEQ ID NO: 33126 - protein, 34 aa, Artificial Sequence
  Non-cyclic GFR-binding peptide
  MOD_RES (2), (4): Xaa is C or S
LXGXEEVIMYHYKLLLVRGNDKYLMSIPSTKVPA

SEQ ID NO: 33127 - protein, 39 aa, Artificial Sequence
  Non-cyclic GFR-binding peptide
  MOD_RES (1), (3), (35), (36): Xaa is C or S
XAXSEVTMNPIKGYVVNKNEDFYLINIPSMKEPVXXPEP

SEQ ID NO: 33128 - protein, 38 aa, Artificial Sequence
  Non-cyclic GFR-binding peptide
  MOD_RES (1), (3), (35), (36): Xaa is C or S
XAXSEVTMNRHKRLVVNKNEDYYLISTASMKEPVXXPE

SEQ ID NO: 33129 - protein, 41 aa, Artificial Sequence
  Non-cyclic GFR-binding peptide
  MOD_RES (2), (36), (37): Xaa is C or S
  MOD_RES (14), (15), (16), (17), (18): Xaa is A or G
  MOD_RES (19), (20), (21), (22): Xaa is A or G or is absent
GXESVAMGRHKRLXXXXXXXXXYYLISTASLKTPVXXAKSA

SEQ ID NO: 33130 - protein, 37 aa, Artificial Sequence
  Non-cyclic GFR-binding peptide
  MOD_RES (31), (32): Xaa is C or S
EEVIMYHYKLLLVRGNDKYLMSIPSTKVPAXXTSPVR

SEQ ID NO: 33131 - protein, 33 aa, Artificial Sequence
  Non-cyclic GFR-binding peptide
  MOD_RES (1), (33): Xaa is C or S
XRDVVMGEYKFKIIQQKDNLYLMSIPEMKTPTX

SEQ ID NO: 33132 - protein, 32 aa, Artificial Sequence
  Non-cyclic GFR-binding peptide
  MOD_RES (1), (1): Xaa is C or S
XSEVTMNYHYKLVVNKNEDKYLISIPSMKEPV

SEQ ID NO: 33133 - protein, 35 aa, Artificial Sequence
  Non-cyclic GFR-binding peptide
  MOD_RES (31), (32): Xaa is C or S
EVVMDEYKFKVVNNASDLYLISIPELRTPVXXTPP

SEQ ID NO: 33134 - protein, 37 aa, Artificial Sequence
  Non-cyclic GFR-binding peptide
  MOD_RES (33), (34): Xaa is C or S
  MOD_RES (11), (12), (13), (14), (15): Xaa is A or G
  MOD_RES (16), (17), (18), (19): Xaa is A or G or is absent
EVVMDRHKRLXXXXXXXXXYYLISTASLRTPVXXTPP

SEQ ID NO: 33135 - protein, 43 aa, Artificial Sequence
  Non-cyclic GFR-binding peptide
  MOD_RES (2), (4), (38), (39): Xaa is C or S
  MOD_RES (16), (17), (18), (19), (20): Xaa is A or G
  MOD_RES (21), (22), (23), (24): Xaa is A or G or is absent
RXGXESVAMGRHKRLXXXXXXXXXYYLISTASLKTPVXXAKSA

SEQ ID NO: 33136 - protein, 36 aa, Artificial Sequence
  Non-cyclic GFR-binding peptide
  MOD_RES (1), (3): Xaa is C or S
  MOD_RES (15), (16), (17), (18), (19): Xaa is A or G
  MOD_RES (20), (21), (22), (23): Xaa is A or G or is absent
XGXESVAMGRHKRLXXXXXXXXXYYLISTASLKTPV

SEQ ID NO: 33137 - protein, 41 aa, Artificial Sequence
  Non-cyclic GFR-binding peptide
  MOD_RES (2), (4), (36), (37): Xaa is C or S
RXAXSEVTMNRHKRLVVNKNEDYYLISTASMKEPVXXPEPI

SEQ ID NO: 33138 - protein, 39 aa, Artificial Sequence
  Non-cyclic GFR-binding peptide
  MOD_RES (1), (35), (36): Xaa is C or S
  MOD_RES (13), (14), (15), (16), (17): Xaa is A or G
  MOD_RES (18), (19), (20), (21): Xaa is A or G or is absent
XRDVVMGEYKFKXXXXXXXXXLYLMSIPEMKTPTXXPGA

SEQ ID NO: 33139 - protein, 38 aa, Artificial Sequence
  Non-cyclic GFR-binding peptide
  MOD_RES (32), (33): Xaa is C or S
AEVVMDRHKRLVVNNAADYYLISTASLRAPVXXSAPAA

SEQ ID NO: 33140 - protein, 37 aa, Artificial Sequence
  Non-cyclic GFR-binding peptide
  MOD_RES (1), (35), (36): Xaa is C or S
  MOD_RES (13), (14), (15), (16), (17): Xaa is A or G
  MOD_RES (18), (19), (20), (21): Xaa is A or G or is absent
XSEVVMDRHKRLXXXXXXXXXYYLISTASLRTPVXXT

SEQ ID NO: 33141 - protein, 36 aa, Artificial Sequence
  Non-cyclic GFR-binding peptide
  MOD_RES (1), (3), (36): Xaa is C or S
  MOD_RES (14), (15), (16), (17), (18): Xaa is A or G
  MOD_RES (19), (20), (21), (22): Xaa is A or G or is absent
XGXEEVIMRHKRLXXXXXXXXXYYLMSTASTKVPAX

SEQ ID NO: 33142 - protein, 38 aa, Artificial Sequence
  Non-cyclic GFR-binding peptide
  MOD_RES (34), (35): Xaa is C or S
  MOD_RES (12), (13), (14), (15), (16): Xaa is A or G
  MOD_RES (17), (18), (19), (20): Xaa is A or G or is absent
SEVVMDYHYKLXXXXXXXXXKYLISIPSLRTPVXXTPP

SEQ ID NO: 33143 - protein, 39 aa, Artificial Sequence
  Non-cyclic GFR-binding peptide
  MOD_RES (1), (3), (36), (37): Xaa is C or S
  MOD_RES (14), (15), (16), (17), (18): Xaa is A or G
  MOD_RES (19), (20), (21), (22): Xaa is A or G or is absent
XKXSKVVMPIKGYXXXXXXXXXFYLINIPSLDQPVXXPS

SEQ ID NO: 33144 - protein, 39 aa, Artificial Sequence
  Non-cyclic GFR-binding peptide
  MOD_RES (2), (35), (36): Xaa is C or S
  MOD_RES (13), (14), (15), (16), (17): Xaa is A or G
  MOD_RES (18), (19), (20), (21): Xaa is A or G or is absent
KXSKVIMPIKGYXXXXXXXXXFYLINIPSLDQSVXXPSA

SEQ ID NO: 33145 - protein, 36 aa, Artificial Sequence
  Non-cyclic GFR-binding peptide
  MOD_RES (1), (34), (35): Xaa is C or S
  MOD_RES (12), (13), (14), (15), (16): Xaa is A or G
  MOD_RES (17), (18), (19), (20): Xaa is A or G or is absent
XSKVVMPIKGYXXXXXXXXXFYLINIPSLDQPVXXP

SEQ ID NO: 33146 - protein, 39 aa, Artificial Sequence
  Non-cyclic GFR-binding peptide
  MOD_RES (1), (33), (34): Xaa is C or S
XESVAMGRHKRLYTVVGKDYYLISTASLKTPVXXAKSAK

SEQ ID NO: 33147 - protein, 40 aa, Artificial Sequence
  Non-cyclic GFR-binding peptide
  MOD_RES (2), (4), (38), (39): Xaa is C or S
  MOD_RES (16), (17), (18), (19), (20): Xaa is A or G
  MOD_RES (21), (22), (23), (24): Xaa is A or G or is absent
RXAXSEVTMNPIKGYXXXXXXXXXFYLINIPSMKEPVXXP

SEQ ID NO: 33148 - protein, 39 aa, Artificial Sequence
  Non-cyclic GFR-binding peptide
  MOD_RES (2), (4), (35), (36): Xaa is C or S
LXGXEEVIMEYKFKLLVRGNDLYLMSIPETKVPAXXTSP

SEQ ID NO: 33149 - protein, 40 aa, Artificial Sequence
  Non-cyclic GFR-binding peptide
  MOD_RES (2), (4), (36), (37): Xaa is C or S
RXGXSEVVMDEYKFKVVNNASDLYLISIPELRTPVXXTPP

SEQ ID NO: 33150 - protein, 32 aa, Artificial Sequence
  Non-cyclic GFR-binding peptide
  MOD_RES (1), (1): Xaa is C or S
XSEVTMNRYKKLVVNKNEDFYLISIANMKEPV

SEQ ID NO: 33151 - protein, 34 aa, Artificial Sequence
  Non-cyclic GFR-binding peptide
  MOD_RES (1), (3), (34): Xaa is C or S
XKXSKVVMPIKGYVKPTRGVFYLINIPSLDQPVX

SEQ ID NO: 33152 - protein, 39 aa, Artificial Sequence
  Non-cyclic GFR-binding peptide
  MOD_RES (2), (33), (34): Xaa is C or S
KXSKVIMPIKGYIKPTKGIFYLINIPSLDQSVXXPSASA

SEQ ID NO: 33153 - protein, 37 aa, Artificial Sequence
  Non-cyclic GFR-binding peptide
  MOD_RES (2), (4), (36), (37): Xaa is C or S
RXGXSEVVMDRHKRLVVNNASDYYLISTASLRTPVXX

SEQ ID NO: 33154 - protein, 42 aa, Artificial Sequence
  Non-cyclic GFR-binding peptide
  MOD_RES (2), (4), (38), (39): Xaa is C or S
  MOD_RES (16), (17), (18), (19), (20): Xaa is A or G
  MOD_RES (21), (22), (23), (24): Xaa is A or G or is absent
SXGXRDVVMGRHKRLXXXXXXXXXYYLMSTASMKTPTXXPGA

SEQ ID NO: 33155 - protein, 38 aa, Artificial Sequence
  Non-cyclic GFR-binding peptide
  MOD_RES (2), (4), (36), (37): Xaa is C or S
RXAXSEVTMNYHYKLVVNKNEDKYLISIPSMKEPVXXP

SEQ ID NO: 33156 - protein, 39 aa, Artificial Sequence
  Non-cyclic GFR-binding peptide
  MOD_RES (1), (3), (37), (38): Xaa is C or S
  MOD_RES (15), (16), (17), (18), (19): Xaa is A or G
  MOD_RES (20), (21), (22), (23): Xaa is A or G or is absent
XAXSEVTMNRYKKLXXXXXXXXXFYLISIANMKEPVXXP

SEQ ID NO: 33157 - protein, 33 aa, Artificial Sequence
  Non-cyclic GFR-binding peptide
  MOD_RES (2), (2): Xaa is C or S
AXSEVTMNPIKGYVVNKNEDFYLINIPSMKEPV

SEQ ID NO: 33158 - protein, 37 aa, Artificial Sequence
  Non-cyclic GFR-binding peptide
  MOD_RES (1), (32), (33): Xaa is C or S
XEEVIMEYKFKLLVRGNDLYLMSIPETKVPAXXTSPV

SEQ ID NO: 33159 - protein, 40 aa, Artificial Sequence
  Non-cyclic GFR-binding peptide
  MOD_RES (1), (3), (36), (37): Xaa is C or S
  MOD_RES (14), (15), (16), (17), (18): Xaa is A or G
  MOD_RES (19), (20), (21), (22): Xaa is A or G or is absent
XKXSKVVMPIKGYXXXXXXXXXFYLINIPSLDQPVXXPSA

SEQ ID NO: 33160 - protein, 36 aa, Artificial Sequence
  Non-cyclic GFR-binding peptide
  MOD_RES (1), (3), (36): Xaa is C or S
  MOD_RES (14), (15), (16), (17), (18): Xaa is A or G
  MOD_RES (19), (20), (21), (22): Xaa is A or G or is absent
XGXEEVIMEYKFKXXXXXXXXXLYLMSIPETKVPAX

SEQ ID NO: 33161 - protein, 40 aa, Artificial Sequence
  Non-cyclic GFR-binding peptide
  MOD_RES (2), (36), (37): Xaa is C or S
  MOD_RES (14), (15), (16), (17), (18): Xaa is A or G
  MOD_RES (19), (20), (21), (22): Xaa is A or G or is absent
GXESVAMGRHKRLXXXXXXXXXYYLISTASLKTPVXXAKS

SEQ ID NO: 33162 - protein, 34 aa, Artificial Sequence
  Non-cyclic GFR-binding peptide
  MOD_RES (1), (34): Xaa is C or S
  MOD_RES (12), (13), (14), (15), (16): Xaa is A or G
  MOD_RES (17), (18), (19), (20): Xaa is A or G or is absent
XSKVIMPIKGYXXXXXXXXXFYLINIPSLDQSVX

SEQ ID NO: 33163 - protein, 32 aa, Artificial Sequence
  Non-cyclic GFR-binding peptide
  MOD_RES (31), (32): Xaa is C or S
EVVMDRHKRLVVNNAADYYLISTASLRAPVXX

SEQ ID NO: 33164 - protein, 31 aa, Artificial Sequence
  Non-cyclic GFR-binding peptide
  MOD_RES (31), (31): Xaa is C or S
EEVIMYHYKLLLVRGNDKYLMSIPSTKVPAX

SEQ ID NO: 33165 - protein, 37 aa, Artificial Sequence
  Non-cyclic GFR-binding peptide
  MOD_RES (2), (34), (35): Xaa is C or S
AXSEVTMNPIKGYVVNKNEDFYLINIPSMKEPVXXPE

SEQ ID NO: 33166 - protein, 41 aa, Artificial Sequence
  Non-cyclic GFR-binding peptide
  MOD_RES (1), (3), (37), (38): Xaa is C or S
  MOD_RES (15), (16), (17), (18), (19): Xaa is A or G
  MOD_RES (20), (21), (22), (23): Xaa is A or G or is absent
XGXRDVVMGYHYKLXXXXXXXXXKYLMSIPSMKTPTXXPGA

SEQ ID NO: 33167 - protein, 36 aa, Artificial Sequence
  Non-cyclic GFR-binding peptide
  MOD_RES (33), (34): Xaa is C or S
  MOD_RES (11), (12), (13), (14), (15): Xaa is A or G
  MOD_RES (16), (17), (18), (19): Xaa is A or G or is absent
SKVIMPIKGYXXXXXXXXXFYLINIPSLDQSVXXPS

SEQ ID NO: 33168 - protein, 37 aa, Artificial Sequence
  Non-cyclic GFR-binding peptide
  MOD_RES (33), (34): Xaa is C or S
  MOD_RES (11), (12), (13), (14), (15): Xaa is A or G
  MOD_RES (16), (17), (18), (19): Xaa is A or G or is absent
EVTMNPIKGYXXXXXXXXXFYLINIPSMKEPVXXPEP

SEQ ID NO: 33169 - protein, 38 aa, Artificial Sequence
  Non-cyclic GFR-binding peptide
  MOD_RES (1), (3), (37), (38): Xaa is C or S
  MOD_RES (15), (16), (17), (18), (19): Xaa is A or G
  MOD_RES (20), (21), (22), (23): Xaa is A or G or is absent
XGXESVAMGRHKRLXXXXXXXXXYYLISTASLKTPVXX

SEQ ID NO: 33170 - protein, 38 aa, Artificial Sequence
  Non-cyclic GFR-binding peptide
  MOD_RES (1), (3), (35), (36): Xaa is C or S
XGXSEVVMDYHYKLVVNNASDKYLISIPSLRTPVXXTP

SEQ ID NO: 33171 - protein, 35 aa, Artificial Sequence
  Non-cyclic GFR-binding peptide
  MOD_RES (34), (35): Xaa is C or S
  MOD_RES (12), (13), (14), (15), (16): Xaa is A or G
  MOD_RES (17), (18), (19), (20): Xaa is A or G or is absent
SEVTMNPIKGYXXXXXXXXXFYLINIPSMKEPVXX

SEQ ID NO: 33172 - protein, 38 aa, Artificial Sequence
  Non-cyclic GFR-binding peptide
  MOD_RES (1), (35), (36): Xaa is C or S
  MOD_RES (13), (14), (15), (16), (17): Xaa is A or G
  MOD_RES (18), (19), (20), (21): Xaa is A or G or is absent
XRDVVMGRHKRLXXXXXXXXXYYLMSTASMKTPTXXPG

SEQ ID NO: 33173 - protein, 39 aa, Artificial Sequence
  Non-cyclic GFR-binding peptide
  MOD_RES (1), (3), (37), (38): Xaa is C or S
  MOD_RES (15), (16), (17), (18), (19): Xaa is A or G
  MOD_RES (20), (21), (22), (23): Xaa is A or G or is absent
XGXRDVVMGRHKRLXXXXXXXXXYYLMSTASMKTPTXXP

SEQ ID NO: 33174 - protein, 35 aa, Artificial Sequence
  Non-cyclic GFR-binding peptide
  MOD_RES (1), (34), (35): Xaa is C or S
  MOD_RES (12), (13), (14), (15), (16): Xaa is A or G
  MOD_RES (17), (18), (19), (20): Xaa is A or G or is absent
XEEVIMRHKRLXXXXXXXXXYYLMSTASTKVPAXX

SEQ ID NO: 33175 - protein, 32 aa, Artificial Sequence
  Non-cyclic GFR-binding peptide
  MOD_RES (31), (32): Xaa is C or S
SKVIMPIKGYIKPTKGIFYLINIPSLDQSVXX

SEQ ID NO: 33176 - protein, 34 aa, Artificial Sequence
  Non-cyclic GFR-binding peptide
  MOD_RES (31), (32): Xaa is C or S
SKVIMPIKGYIKPTKGIFYLINIPSLDQSVXXPS

SEQ ID NO: 33177 - protein, 32 aa, Artificial Sequence
  Non-cyclic GFR-binding peptide
  MOD_RES (1), (1): Xaa is C or S
XESVAMGRHKRLYTVVGKDYYLISTASLKTPV

SEQ ID NO: 33178 - protein, 30 aa, Artificial Sequence
  Non-cyclic GFR-binding peptide
DVVMGYHYKLIIQQKDNKYLMSIPSMKTPT

SEQ ID NO: 33179 - protein, 39 aa, Artificial Sequence
  Non-cyclic GFR-binding peptide
  MOD_RES (2), (4), (38), (39): Xaa is C or S
  MOD_RES (16), (17), (18), (19), (20): Xaa is A or G
  MOD_RES (21), (22), (23), (24): Xaa is A or G or is absent
SXGXRDVVMGRHKRLXXXXXXXXXYYLMSTASMKTPTXX

SEQ ID NO: 33180 - protein, 35 aa, Artificial Sequence
  Non-cyclic GFR-binding peptide
  MOD_RES (32), (33): Xaa is C or S
SEVVMDEYKFKVVNNASDLYLISIPELRTPVXXTP

SEQ ID NO: 33181 - protein, 36 aa, Artificial Sequence
  Non-cyclic GFR-binding peptide
  MOD_RES (2), (36): Xaa is C or S
  MOD_RES (14), (15), (16), (17), (18): Xaa is A or G
  MOD_RES (19), (20), (21), (22): Xaa is A or G or is absent
AXSEVTMNYHYKLXXXXXXXXXKYLISIPSMKEPVX

SEQ ID NO: 33182 - protein, 33 aa, Artificial Sequence
  Non-cyclic GFR-binding peptide
  MOD_RES (2), (2): Xaa is C or S
GXRDVVMGEYKFKIIQQKDNLYLMSIPEMKTPT

SEQ ID NO: 33183 - protein, 37 aa, Artificial Sequence
  Non-cyclic GFR-binding peptide
  MOD_RES (2), (35), (36): Xaa is C or S
  MOD_RES (13), (14), (15), (16), (17): Xaa is A or G
  MOD_RES (18), (19), (20), (21): Xaa is A or G or is absent
GXEEVIMRHKRLXXXXXXXXXYYLMSTASTKVPAXXT

SEQ ID NO: 33184 - protein, 35 aa, Artificial Sequence
  Non-cyclic GFR-binding peptide
  MOD_RES (33), (34): Xaa is C or S
  MOD_RES (11), (12), (13), (14), (15): Xaa is A or G
  MOD_RES (16), (17), (18), (19): Xaa is A or G or is absent
SVAMGRHKRLXXXXXXXXXYYLISTASLKTPVXXA

SEQ ID NO: 33185 - protein, 41 aa, Artificial Sequence
  Non-cyclic GFR-binding peptide
  MOD_RES (2), (4), (36), (37): Xaa is C or S
SXGXRDVVMGEYKFKIIQQKDNLYLMSIPEMKTPTXXPGAS

SEQ ID NO: 33186 - protein, 35 aa, Artificial Sequence
  Non-cyclic GFR-binding peptide
  MOD_RES (2), (33), (34): Xaa is C or S
KXSKVVMPIKGYVKPTRGVFYLINIPSLDQPVXXP

SEQ ID NO: 33187 - protein, 33 aa, Artificial Sequence
  Non-cyclic GFR-binding peptide
  MOD_RES (2), (2): Xaa is C or S
GXRDVVMGRHKRLIIQQKDNYYLMSTASMKTPT

SEQ ID NO: 33188 - protein, 37 aa, Artificial Sequence
  Non-cyclic GFR-binding peptide
  MOD_RES (2), (36), (37): Xaa is C or S
  MOD_RES (14), (15), (16), (17), (18): Xaa is A or G
  MOD_RES (19), (20), (21), (22): Xaa is A or G or is absent
GXSEVVMDEYKFKXXXXXXXXXLYLISIPELRTPVXX

SEQ ID NO: 33189 - protein, 37 aa, Artificial Sequence
  Non-cyclic GFR-binding peptide
  MOD_RES (1), (3), (36), (37): Xaa is C or S
  MOD_RES (14), (15), (16), (17), (18): Xaa is A or G
  MOD_RES (19), (20), (21), (22): Xaa is A or G or is absent
XKXSKVIMPIKGYXXXXXXXXXFYLINIPSLDQSVXX

SEQ ID NO: 33190 - protein, 38 aa, Artificial Sequence
  Non-cyclic GFR-binding peptide
  MOD_RES (34), (35): Xaa is C or S
  MOD_RES (12), (13), (14), (15), (16): Xaa is A or G
  MOD_RES (17), (18), (19), (20): Xaa is A or G or is absent
SEVTMNYHYKLXXXXXXXXXKYLISIPSMKEPVXXPEP

SEQ ID NO: 33191 - protein, 40 aa, Artificial Sequence
  Non-cyclic GFR-binding peptide
  MOD_RES (2), (4), (36), (37): Xaa is C or S
RXGXSEVVMDYHYKLVVNNASDKYLISIPSLRTPVXXTPP

SEQ ID NO: 33192 - protein, 42 aa, Artificial Sequence
  Non-cyclic GFR-binding peptide
  MOD_RES (1), (3), (36), (37): Xaa is C or S
  MOD_RES (14), (15), (16), (17), (18): Xaa is A or G
  MOD_RES (19), (20), (21), (22): Xaa is A or G or is absent
XKXSKVVMPIKGYXXXXXXXXXFYLINIPSLDQPVXXPSASA

SEQ ID NO: 33193 - protein, 37 aa, Artificial Sequence
  Non-cyclic GFR-binding peptide
  MOD_RES (31), (32): Xaa is C or S
RVVMNRHKRLIVNSSDDYYLVSTASLKTPAXXPKPVH

SEQ ID NO: 33194 - protein, 38 aa, Artificial Sequence
  Non-cyclic GFR-binding peptide
  MOD_RES (33), (34): Xaa is C or S
  MOD_RES (11), (12), (13), (14), (15): Xaa is A or G
  MOD_RES (16), (17), (18), (19): Xaa is A or G or is absent
EVTMNEYKFKXXXXXXXXXLYLISIPEMKEPVXXPEPI

SEQ ID NO: 33195 - protein, 39 aa, Artificial Sequence
  Non-cyclic GFR-binding peptide
  MOD_RES (2), (4), (35), (36): Xaa is C or S
LXGXEEVIMYHYKLLLVRGNDKYLMSIPSTKVPAXXTSP

SEQ ID NO: 33196 - protein, 40 aa, Artificial Sequence
  Non-cyclic GFR-binding peptide
  MOD_RES (2), (36), (37): Xaa is C or S
  MOD_RES (14), (15), (16), (17), (18): Xaa is A or G
  MOD_RES (19), (20), (21), (22): Xaa is A or G or is absent
GXRDVVMGEYKFKXXXXXXXXXLYLMSIPEMKTPTXXPGA

SEQ ID NO: 33197 - protein, 34 aa, Artificial Sequence
  Non-cyclic GFR-binding peptide
  MOD_RES (2), (4): Xaa is C or S
LXGXEEVIMEYKFKLLVRGNDLYLMSIPETKVPA

SEQ ID NO: 33198 - protein, 35 aa, Artificial Sequence
  Non-cyclic GFR-binding peptide
  MOD_RES (2), (4), (35): Xaa is C or S
SXKXSKVVMPIKGYVKPTRGVFYLINIPSLDQPVX

SEQ ID NO: 33199 - protein, 40 aa, Artificial Sequence
  Non-cyclic GFR-binding peptide
  MOD_RES (1), (34), (35): Xaa is C or S
  MOD_RES (12), (13), (14), (15), (16): Xaa is A or G
  MOD_RES (17), (18), (19), (20): Xaa is A or G or is absent
XSKVIMPIKGYXXXXXXXXXFYLINIPSLDQSVXXPSASA

SEQ ID NO: 33200 - protein, 37 aa, Artificial Sequence
  Non-cyclic GFR-binding peptide
  MOD_RES (2), (4), (36), (37): Xaa is C or S
RXGXAEVVMDRHKRLVVNNAADYYLISTASLRAPVXX

SEQ ID NO: 33201 - protein, 38 aa, Artificial Sequence
  Non-cyclic GFR-binding peptide
  MOD_RES (1), (3), (36), (37): Xaa is C or S
  MOD_RES (14), (15), (16), (17), (18): Xaa is A or G
  MOD_RES (19), (20), (21), (22): Xaa is A or G or is absent
XGXEEVIMRHKRLXXXXXXXXXYYLMSTASTKVPAXXT

SEQ ID NO: 33202 - protein, 41 aa, Artificial Sequence
  Non-cyclic GFR-binding peptide
  MOD_RES (1), (35), (36): Xaa is C or S
  MOD_RES (13), (14), (15), (16), (17): Xaa is A or G
  MOD_RES (18), (19), (20), (21): Xaa is A or G or is absent
XAEVVMDRHKRLXXXXXXXXXYYLISTASLRAPVXXSAPAA

SEQ ID NO: 33203 - protein, 34 aa, Artificial Sequence
  Non-cyclic GFR-binding peptide
  MOD_RES (31), (32): Xaa is C or S
EVVMDYHYKLVVNNASDKYLISIPSLRTPVXXTP

SEQ ID NO: 33204 - protein, 36 aa, Artificial Sequence
  Non-cyclic GFR-binding peptide
  MOD_RES (33), (34): Xaa is C or S
  MOD_RES (11), (12), (13), (14), (15): Xaa is A or G
  MOD_RES (16), (17), (18), (19): Xaa is A or G or is absent
EVVMDEYKFKXXXXXXXXXLYLISIPELRTPVXXTP

SEQ ID NO: 33205 - protein, 40 aa, Artificial Sequence
  Non-cyclic GFR-binding peptide
  MOD_RES (1), (35), (36): Xaa is C or S
  MOD_RES (13), (14), (15), (16), (17): Xaa is A or G
  MOD_RES (18), (19), (20), (21): Xaa is A or G or is absent
XRDVVMGEYKFKXXXXXXXXXLYLMSIPEMKTPTXXPGAS

SEQ ID NO: 33206 - protein, 38 aa, Artificial Sequence
  Non-cyclic GFR-binding peptide
  MOD_RES (2), (4), (36), (37): Xaa is C or S
RXAXSEVTMNRYKKLVVNKNEDFYLISIANMKEPVXXP

SEQ ID NO: 33207 - protein, 33 aa, Artificial Sequence
  Non-cyclic GFR-binding peptide
  MOD_RES (1), (33): Xaa is C or S
XESVAMGRHKRLYTVVGKDYYLISTASLKTPVX

SEQ ID NO: 33208 - protein, 41 aa, Artificial Sequence
  Non-cyclic GFR-binding peptide
  MOD_RES (2), (4), (36), (37): Xaa is C or S
SXGXRDVVMGYHYKLIIQQKDNKYLMSIPSMKTPTXXPGAS

SEQ ID NO: 33209 - protein, 43 aa, Artificial Sequence
  Non-cyclic GFR-binding peptide
  MOD_RES (2), (4), (37), (38): Xaa is C or S
  MOD_RES (15), (16), (17), (18), (19): Xaa is A or G
  MOD_RES (20), (21), (22), (23): Xaa is A or G or is absent
SXKXSKVVMPIKGYXXXXXXXXXFYLINIPSLDQPVXXPSASA

SEQ ID NO: 33210 - protein, 35 aa, Artificial Sequence
  Non-cyclic GFR-binding peptide
  MOD_RES (31), (32): Xaa is C or S
SVAMGRHKRLYTVVGKDYYLISTASLKTPVXXAKS

SEQ ID NO: 33211 - protein, 40 aa, Artificial Sequence
  Non-cyclic GFR-binding peptide
  MOD_RES (34), (35): Xaa is C or S
  MOD_RES (12), (13), (14), (15), (16): Xaa is A or G
  MOD_RES (17), (18), (19), (20): Xaa is A or G or is absent
RDVVMGYHYKLXXXXXXXXXKYLMSIPSMKTPTXXPGASG

SEQ ID NO: 33212 - protein, 38 aa, Artificial Sequence
  Non-cyclic GFR-binding peptide
  MOD_RES (32), (33): Xaa is C or S
SEVTMNRYKKLVVNKNEDFYLISIANMKEPVXXPEPIG

SEQ ID NO: 33213 - protein, 38 aa, Artificial Sequence
  Non-cyclic GFR-binding peptide
  MOD_RES (1), (33), (34): Xaa is C or S
XESVAMGRHKRLYTVVGKDYYLISTASLKTPVXXAKSA

SEQ ID NO: 33214 - protein, 38 aa, Artificial Sequence
  Non-cyclic GFR-binding peptide
  MOD_RES (1), (34), (35): Xaa is C or S
  MOD_RES (12), (13), (14), (15), (16): Xaa is A or G
  MOD_RES (17), (18), (19), (20): Xaa is A or G or is absent
XEEVIMYHYKLXXXXXXXXXKYLMSIPSTKVPAXXTSP

SEQ ID NO: 33215 - protein, 36 aa, Artificial Sequence
  Non-cyclic GFR-binding peptide
  MOD_RES (2), (4): Xaa is C or S
  MOD_RES (15), (16), (17), (18), (19): Xaa is A or G
  MOD_RES (20), (21), (22), (23): Xaa is A or G or is absent
LXGXEEVIMEYKFKXXXXXXXXXLYLMSIPETKVPA

SEQ ID NO: 33216 - protein, 38 aa, Artificial Sequence
  Non-cyclic GFR-binding peptide
  MOD_RES (32), (33): Xaa is C or S
SEVVMDEYKFKVVNNASDLYLISIPELRTPVXXTPPTS

SEQ ID NO: 33217 - protein, 31 aa, Artificial Sequence
  Non-cyclic GFR-binding peptide
  MOD_RES (1), (1): Xaa is C or S
XSKVIMPIKGYIKPTKGIFYLINIPSLDQSV

SEQ ID NO: 33218 - protein, 39 aa, Artificial Sequence
  Non-cyclic GFR-binding peptide
  MOD_RES (2), (4), (38), (39): Xaa is C or S
  MOD_RES (16), (17), (18), (19), (20): Xaa is A or G
  MOD_RES (21), (22), (23), (24): Xaa is A or G or is absent
RXAXSEVTMNEYKFKXXXXXXXXXLYLISIPEMKEPVXX

SEQ ID NO: 33219 - protein, 40 aa, Artificial Sequence
  Non-cyclic GFR-binding peptide
  MOD_RES (1), (34), (35): Xaa is C or S
  MOD_RES (12), (13), (14), (15), (16): Xaa is A or G
  MOD_RES (17), (18), (19), (20): Xaa is A or G or is absent
XEEVIMYHYKLXXXXXXXXXKYLMSIPSTKVPAXXTSPVR

SEQ ID NO: 33220 - protein, 42 aa, Artificial Sequence
  Non-cyclic GFR-binding peptide
  MOD_RES (2), (36), (37): Xaa is C or S
  MOD_RES (14), (15), (16), (17), (18): Xaa is A or G
  MOD_RES (19), (20), (21), (22): Xaa is A or G or is absent
AXSEVTMNRHKRLXXXXXXXXXYYLISTASMKEPVXXPEPIG

SEQ ID NO: 33221 - protein, 38 aa, Artificial Sequence
  Non-cyclic GFR-binding peptide
  MOD_RES (1), (3), (37), (38): Xaa is C or S
  MOD_RES (15), (16), (17), (18), (19): Xaa is A or G
  MOD_RES (20), (21), (22), (23): Xaa is A or G or is absent
XAXSEVTMNPIKGYXXXXXXXXXFYLINIPSMKEPVXX

SEQ ID NO: 33222 - protein, 37 aa, Artificial Sequence
  Non-cyclic GFR-binding peptide
  MOD_RES (1), (3), (36), (37): Xaa is C or S
  MOD_RES (14), (15), (16), (17), (18): Xaa is A or G
  MOD_RES (19), (20), (21), (22): Xaa is A or G or is absent
XKXSRVIMPIKGYXXXXXXXXXFYLINIPSLAQPVXX

SEQ ID NO: 33223 - protein, 42 aa, Artificial Sequence
  Non-cyclic GFR-binding peptide
  MOD_RES (1), (3), (37), (38): Xaa is C or S
  MOD_RES (15), (16), (17), (18), (19): Xaa is A or G
  MOD_RES (20), (21), (22), (23): Xaa is A or G or is absent
XGXAEVVMDRHKRLXXXXXXXXXYYLISTASLRAPVXXSAPA

SEQ ID NO: 33224 - protein, 33 aa, Artificial Sequence
  Non-cyclic GFR-binding peptide
  MOD_RES (2), (2): Xaa is C or S
GXSEVVMDRHKRLVVNNASDYYLISTASLRTPV

SEQ ID NO: 33225 - protein, 30 aa, Artificial Sequence
  Non-cyclic GFR-binding peptide
SKVVMPIKGYVKPTRGVFYLINIPSLDQPV

SEQ ID NO: 33226 - protein, 39 aa, Artificial Sequence
  Non-cyclic GFR-binding peptide
  MOD_RES (33), (34): Xaa is C or S
  MOD_RES (11), (12), (13), (14), (15): Xaa is A or G
  MOD_RES (16), (17), (18), (19): Xaa is A or G or is absent
EVVMDYHYKLXXXXXXXXXKYLISIPSLRTPVXXTPPTS

SEQ ID NO: 33227 - protein, 39 aa, Artificial Sequence
  Non-cyclic GFR-binding peptide
  MOD_RES (2), (4), (36), (37): Xaa is C or S
RXAXSEVTMNPIKGYVVNKNEDFYLINIPSMKEPVXXPE

SEQ ID NO: 33228 - protein, 38 aa, Artificial Sequence
  Non-cyclic GFR-binding peptide
  MOD_RES (33), (34): Xaa is C or S
  MOD_RES (11), (12), (13), (14), (15): Xaa is A or G
  MOD_RES (16), (17), (18), (19): Xaa is A or G or is absent
EVTMNYHYKLXXXXXXXXXKYLISIPSMKEPVXXPEPI

SEQ ID NO: 33229 - protein, 39 aa, Artificial Sequence
  Non-cyclic GFR-binding peptide
  MOD_RES (1), (33), (34): Xaa is C or S
XAEVVMDRHKRLVVNNAADYYLISTASLRAPVXXSAPAA

SEQ ID NO: 33230 - protein, 39 aa, Artificial Sequence
  Non-cyclic GFR-binding peptide
  MOD_RES (2), (4), (38), (39): Xaa is C or S
  MOD_RES (16), (17), (18), (19), (20): Xaa is A or G
  MOD_RES (21), (22), (23), (24): Xaa is A or G or is absent
RXAXSEVTMNRHKRLXXXXXXXXXYYLISTASMKEPVXX

SEQ ID NO: 33231 - protein, 30 aa, Artificial Sequence
  Non-cyclic GFR-binding peptide
EVVMDRHKRLVVNNASDYYLISTASLRTPV

SEQ ID NO: 33232 - protein, 39 aa, Artificial Sequence
  Non-cyclic GFR-binding peptide
  MOD_RES (1), (3), (36), (37): Xaa is C or S
  MOD_RES (14), (15), (16), (17), (18): Xaa is A or G
  MOD_RES (19), (20), (21), (22): Xaa is A or G or is absent
XGXEEVIMYHYKLXXXXXXXXXKYLMSIPSTKVPAXXTS

SEQ ID NO: 33233 - protein, 39 aa, Artificial Sequence
  Non-cyclic GFR-binding peptide
  MOD_RES (1), (33), (34): Xaa is C or S
XRDVVMGRHKRLIIQQKDNYYLMSTASMKTPTXXPGASG

SEQ ID NO: 33234 - protein, 42 aa, Artificial Sequence
  Non-cyclic GFR-binding peptide
  MOD_RES (2), (4), (36), (37): Xaa is C or S
RXAXSEVTMNRYKKLVVNKNEDFYLISIANMKEPVXXPEPIG

SEQ ID NO: 33235 - protein, 34 aa, Artificial Sequence
  Non-cyclic GFR-binding peptide
  MOD_RES (31), (32): Xaa is C or S
EVVMDEYKFKVVNNASDLYLISIPELRTPVXXTP

SEQ ID NO: 33236 - protein, 32 aa, Artificial Sequence
  Non-cyclic GFR-binding peptide
  MOD_RES (31), (32): Xaa is C or S
EVTMNYHYKLVVNKNEDKYLISIPSMKEPVXX

SEQ ID NO: 33237 - protein, 38 aa, Artificial Sequence
  Non-cyclic GFR-binding peptide
  MOD_RES (2), (34), (35): Xaa is C or S
GXRDVVMGYHYKLIIQQKDNKYLMSIPSMKTPTXXPGA

SEQ ID NO: 33238 - protein, 42 aa, Artificial Sequence
  Non-cyclic GFR-binding peptide
  MOD_RES (2), (36), (37): Xaa is C or S
  MOD_RES (14), (15), (16), (17), (18): Xaa is A or G
  MOD_RES (19), (20), (21), (22): Xaa is A or G or is absent
GXSRVVMNRHKRLXXXXXXXXXYYLVSTASLKTPAXXPKPVH

SEQ ID NO: 33239 - protein, 31 aa, Artificial Sequence
  Non-cyclic GFR-binding peptide
  MOD_RES (31), (31): Xaa is C or S
EVTMNYHYKLVVNKNEDKYLISIPSMKEPVX

SEQ ID NO: 33240 - protein, 34 aa, Artificial Sequence
  Non-cyclic GFR-binding peptide
  MOD_RES (33), (34): Xaa is C or S
  MOD_RES (11), (12), (13), (14), (15): Xaa is A or G
  MOD_RES (16), (17), (18), (19): Xaa is A or G or is absent
SKVVMPIKGYXXXXXXXXXFYLINIPSLDQPVXX

SEQ ID NO: 33241 - protein, 35 aa, Artificial Sequence
  Non-cyclic GFR-binding peptide
  MOD_RES (2), (4): Xaa is C or S
RXAXSEVTMNRYKKLVVNKNEDFYLISIANMKEPV

SEQ ID NO: 33242 - protein, 41 aa, Artificial Sequence
  Non-cyclic GFR-binding peptide
  MOD_RES (2), (4), (36), (37): Xaa is C or S
RXAXSEVTMNEYKFKVVNKNEDLYLISIPEMKEPVXXPEPI

SEQ ID NO: 33243 - protein, 33 aa, Artificial Sequence
  Non-cyclic GFR-binding peptide
  MOD_RES (1), (3): Xaa is C or S
XKXSKVVMPIKGYVKPTRGVFYLINIPSLDQPV

SEQ ID NO: 33244 - protein, 34 aa, Artificial Sequence
  Non-cyclic GFR-binding peptide
  MOD_RES (1), (32), (33): Xaa is C or S
XEEVIMYHYKLLLVRGNDKYLMSIPSTKVPAXXT

SEQ ID NO: 33245 - protein, 37 aa, Artificial Sequence
  Non-cyclic GFR-binding peptide
  MOD_RES (2), (4), (37): Xaa is C or S
  MOD_RES (15), (16), (17), (18), (19): Xaa is A or G
  MOD_RES (20), (21), (22), (23): Xaa is A or G or is absent
LXGXEEVIMRHKRLXXXXXXXXXYYLMSTASTKVPAX

SEQ ID NO: 33246 - protein, 43 aa, Artificial Sequence
  Non-cyclic GFR-binding peptide
  MOD_RES (2), (4), (38), (39): Xaa is C or S
  MOD_RES (16), (17), (18), (19), (20): Xaa is A or G
  MOD_RES (21), (22), (23), (24): Xaa is A or G or is absent
RXAXSEVTMNYHYKLXXXXXXXXXKYLISIPSMKEPVXXPEPI

SEQ ID NO: 33247 - protein, 37 aa, Artificial Sequence
  Non-cyclic GFR-binding peptide
  MOD_RES (32), (33): Xaa is C or S
AEVVMDRHKRLVVNNAADYYLISTASLRAPVXXSAPA

SEQ ID NO: 33248 - protein, 40 aa, Artificial Sequence
  Non-cyclic GFR-binding peptide
  MOD_RES (1), (3), (37), (38): Xaa is C or S
  MOD_RES (15), (16), (17), (18), (19): Xaa is A or G
  MOD_RES (20), (21), (22), (23): Xaa is A or G or is absent
XGXSEVVMDYHYKLXXXXXXXXXKYLISIPSLRTPVXXTP

SEQ ID NO: 33249 - protein, 40 aa, Artificial Sequence
  Non-cyclic GFR-binding peptide
  MOD_RES (1), (35), (36): Xaa is C or S
  MOD_RES (13), (14), (15), (16), (17): Xaa is A or G
  MOD_RES (18), (19), (20), (21): Xaa is A or G or is absent
XSEVTMNEYKFKXXXXXXXXXLYLISIPEMKEPVXXPEPI

SEQ ID NO: 33250 - protein, 33 aa, Artificial Sequence
  Non-cyclic GFR-binding peptide
  MOD_RES (1), (33): Xaa is C or S
XSEVTMNPIKGYVVNKNEDFYLINIPSMKEPVX

SEQ ID NO: 33251 - protein, 36 aa, Artificial Sequence
  Non-cyclic GFR-binding peptide
  MOD_RES (1), (33), (34): Xaa is C or S
XAEVVMDRHKRLVVNNAADYYLISTASLRAPVXXSA

SEQ ID NO: 33252 - protein, 38 aa, Artificial Sequence
  Non-cyclic GFR-binding peptide
  MOD_RES (32), (33): Xaa is C or S
SRVVMNRHKRLIVNSSDDYYLVSTASLKTPAXXPKPVH

SEQ ID NO: 33253 - protein, 34 aa, Artificial Sequence
  Non-cyclic GFR-binding peptide
  MOD_RES (1), (33), (34): Xaa is C or S
XRDVVMGEYKFKIIQQKDNLYLMSIPEMKTPTXX

SEQ ID NO: 33254 - protein, 38 aa, Artificial Sequence
  Non-cyclic GFR-binding peptide
  MOD_RES (1), (3), (35), (36): Xaa is C or S
XGXRDVVMGRHKRLIIQQKDNYYLMSTASMKTPTXXPG

SEQ ID NO: 33255 - protein, 34 aa, Artificial Sequence
  Non-cyclic GFR-binding peptide
  MOD_RES (33), (34): Xaa is C or S
  MOD_RES (11), (12), (13), (14), (15): Xaa is A or G
  MOD_RES (16), (17), (18), (19): Xaa is A or G or is absent
EVTMNPIKGYXXXXXXXXXFYLINIPSMKEPVXX

SEQ ID NO: 33256 - protein, 35 aa, Artificial Sequence
  Non-cyclic GFR-binding peptide
  MOD_RES (2), (34), (35): Xaa is C or S
GXSEVVMDRHKRLVVNNASDYYLISTASLRTPVXX

SEQ ID NO: 33257 - protein, 37 aa, Artificial Sequence
  Non-cyclic GFR-binding peptide
  MOD_RES (1), (3), (34), (35): Xaa is C or S
XGXEEVIMRHKRLLLVRGNDYYLMSTASTKVPAXXTS

SEQ ID NO: 33258 - protein, 33 aa, Artificial Sequence
  Non-cyclic GFR-binding peptide
  MOD_RES (1), (1): Xaa is C or S
  MOD_RES (12), (13), (14), (15), (16): Xaa is A or G
  MOD_RES (17), (18), (19), (20): Xaa is A or G or is absent
XSKVIMPIKGYXXXXXXXXXFYLINIPSLDQSV

SEQ ID NO: 33259 - protein, 35 aa, Artificial Sequence
  Non-cyclic GFR-binding peptide
  MOD_RES (33), (34): Xaa is C or S
  MOD_RES (11), (12), (13), (14), (15): Xaa is A or G
  MOD_RES (16), (17), (18), (19): Xaa is A or G or is absent
EVTMNPIKGYXXXXXXXXXFYLINIPSMKEPVXXP

SEQ ID NO: 33260 - protein, 35 aa, Artificial Sequence
  Non-cyclic GFR-binding peptide
  MOD_RES (31), (32): Xaa is C or S
DVVMGYHYKLIIQQKDNKYLMSIPSMKTPTXXPGA

SEQ ID NO: 33261 - protein, 30 aa, Artificial Sequence
  Non-cyclic GFR-binding peptide
DVVMGRHKRLIIQQKDNYYLMSTASMKTPT

SEQ ID NO: 33262 - protein, 35 aa, Artificial Sequence
  Non-cyclic GFR-binding peptide
  MOD_RES (34), (35): Xaa is C or S
  MOD_RES (12), (13), (14), (15), (16): Xaa is A or G
  MOD_RES (17), (18), (19), (20): Xaa is A or G or is absent
SEVTMNRYKKLXXXXXXXXXFYLISIANMKEPVXX

SEQ ID NO: 33263 - protein, 38 aa, Artificial Sequence
  Non-cyclic GFR-binding peptide
  MOD_RES (33), (34): Xaa is C or S
  MOD_RES (11), (12), (13), (14), (15): Xaa is A or G
  MOD_RES (16), (17), (18), (19): Xaa is A or G or is absent
DVVMGYHYKLXXXXXXXXXKYLMSIPSMKTPTXXPGAS

SEQ ID NO: 33264 - protein, 39 aa, Artificial Sequence
  Non-cyclic GFR-binding peptide
  MOD_RES (2), (36), (37): Xaa is C or S
  MOD_RES (14), (15), (16), (17), (18): Xaa is A or G
  MOD_RES (19), (20), (21), (22): Xaa is A or G or is absent
GXESVAMGRHKRLXXXXXXXXXYYLISTASLKTPVXXAK

SEQ ID NO: 33265 - protein, 42 aa, Artificial Sequence
  Non-cyclic GFR-binding peptide
  MOD_RES (2), (4), (36), (37): Xaa is C or S
RXGXAEVVMDRHKRLVVNNAADYYLISTASLRAPVXXSAPAA

SEQ ID NO: 33266 - protein, 35 aa, Artificial Sequence
  Non-cyclic GFR-binding peptide
  MOD_RES (2), (34), (35): Xaa is C or S
GXSEVVMDEYKFKVVNNASDLYLISIPELRTPVXX

SEQ ID NO: 33267 - protein, 37 aa, Artificial Sequence
  Non-cyclic GFR-binding peptide
  MOD_RES (2), (4), (37): Xaa is C or S
  MOD_RES (15), (16), (17), (18), (19): Xaa is A or G
  MOD_RES (20), (21), (22), (23): Xaa is A or G or is absent
SXKXSKVIMPIKGYXXXXXXXXXFYLINIPSLDQSVX

SEQ ID NO: 33268 - protein, 41 aa, Artificial Sequence
  Non-cyclic GFR-binding peptide
  MOD_RES (2), (4), (37), (38): Xaa is C or S
  MOD_RES (15), (16), (17), (18), (19): Xaa is A or G
  MOD_RES (20), (21), (22), (23): Xaa is A or G or is absent
SXKXSRVIMPIKGYXXXXXXXXXFYLINIPSLAQPVXXPAA

SEQ ID NO: 33269 - protein, 37 aa, Artificial Sequence
  Non-cyclic GFR-binding peptide
  MOD_RES (31), (32): Xaa is C or S
EEVIMEYKFKLLVRGNDLYLMSIPETKVPAXXTSPVR

SEQ ID NO: 33270 - protein, 35 aa, Artificial Sequence
  Non-cyclic GFR-binding peptide
  MOD_RES (31), (32): Xaa is C or S
DVVMGEYKFKIIQQKDNLYLMSIPEMKTPTXXPGA

SEQ ID NO: 33271 - protein, 39 aa, Artificial Sequence
  Non-cyclic GFR-binding peptide
  MOD_RES (1), (33), (34): Xaa is C or S
XSEVTMNRHKRLVVNKNEDYYLISTASMKEPVXXPEPIG

SEQ ID NO: 33272 - protein, 34 aa, Artificial Sequence
  Non-cyclic GFR-binding peptide
  MOD_RES (34), (34): Xaa is C or S
  MOD_RES (12), (13), (14), (15), (16): Xaa is A or G
  MOD_RES (17), (18), (19), (20): Xaa is A or G or is absent
SEVTMNRYKKLXXXXXXXXXFYLISIANMKEPVX

SEQ ID NO: 33273 - protein, 42 aa, Artificial Sequence
  Non-cyclic GFR-binding peptide
  MOD_RES (2), (4), (36), (37): Xaa is C or S
RXGXESVAMGRHKRLYTVVGKDYYLISTASLKTPVXXAKSAK

SEQ ID NO: 33274 - protein, 34 aa, Artificial Sequence
  Non-cyclic GFR-binding peptide
  MOD_RES (2), (4): Xaa is C or S
SXKXSRVIMPIKGYVKPKRGVFYLINIPSLAQPV

SEQ ID NO: 33275 - protein, 38 aa, Artificial Sequence
  Non-cyclic GFR-binding peptide
  MOD_RES (33), (34): Xaa is C or S
  MOD_RES (11), (12), (13), (14), (15): Xaa is A or G
  MOD_RES (16), (17), (18), (19): Xaa is A or G or is absent
SVAMGRHKRLXXXXXXXXXYYLISTASLKTPVXXAKSA

SEQ ID NO: 33276 - protein, 42 aa, Artificial Sequence
  Non-cyclic GFR-binding peptide
  MOD_RES (1), (3), (36), (37): Xaa is C or S
  MOD_RES (14), (15), (16), (17), (18): Xaa is A or G
  MOD_RES (19), (20), (21), (22): Xaa is A or G or is absent
XKXSRVIMPIKGYXXXXXXXXXFYLINIPSLAQPVXXPAASA

SEQ ID NO: 33277 - protein, 38 aa, Artificial Sequence
  Non-cyclic GFR-binding peptide
  MOD_RES (2), (4), (36), (37): Xaa is C or S
SXGXRDVVMGEYKFKIIQQKDNLYLMSIPEMKTPTXXP

SEQ ID NO: 33278 - protein, 35 aa, Artificial Sequence
  Non-cyclic GFR-binding peptide
  MOD_RES (33), (34): Xaa is C or S
  MOD_RES (11), (12), (13), (14), (15): Xaa is A or G
  MOD_RES (16), (17), (18), (19): Xaa is A or G or is absent
SKVVMPIKGYXXXXXXXXXFYLINIPSLDQPVXXP

SEQ ID NO: 33279 - protein, 36 aa, Artificial Sequence
  Non-cyclic GFR-binding peptide
  MOD_RES (33), (34): Xaa is C or S
  MOD_RES (11), (12), (13), (14), (15): Xaa is A or G
  MOD_RES (16), (17), (18), (19): Xaa is A or G or is absent
EEVIMRHKRLXXXXXXXXXYYLMSTASTKVPAXXTS

SEQ ID NO: 33280 - protein, 43 aa, Artificial Sequence
  Non-cyclic GFR-binding peptide
  MOD_RES (1), (3), (37), (38): Xaa is C or S
  MOD_RES (15), (16), (17), (18), (19): Xaa is A or G
  MOD_RES (20), (21), (22), (23): Xaa is A or G or is absent
XGXRDVVMGYHYKLXXXXXXXXXKYLMSIPSMKTPTXXPGASG

SEQ ID NO: 33281 - protein, 31 aa, Artificial Sequence
  Non-cyclic GFR-binding peptide
  MOD_RES (31), (31): Xaa is C or S
EVTMNRHKRLVVNKNEDYYLISTASMKEPVX

SEQ ID NO: 33282 - protein, 37 aa, Artificial Sequence
  Non-cyclic GFR-binding peptide
  MOD_RES (2), (35), (36): Xaa is C or S
  MOD_RES (13), (14), (15), (16), (17): Xaa is A or G
  MOD_RES (18), (19), (20), (21): Xaa is A or G or is absent
GXEEVIMYHYKLXXXXXXXXXKYLMSIPSTKVPAXXT

SEQ ID NO: 33283 - protein, 41 aa, Artificial Sequence
  Non-cyclic GFR-binding peptide
  MOD_RES (2), (36), (37): Xaa is C or S
  MOD_RES (14), (15), (16), (17), (18): Xaa is A or G
  MOD_RES (19), (20), (21), (22): Xaa is A or G or is absent
AXSEVTMNRYKKLXXXXXXXXXFYLISIANMKEPVXXPEPI

SEQ ID NO: 33284 - protein, 39 aa, Artificial Sequence
  Non-cyclic GFR-binding peptide
  MOD_RES (1), (33), (34): Xaa is C or S
XSEVVMDYHYKLVVNNASDKYLISIPSLRTPVXXTPPTS

SEQ ID NO: 33285 - protein, 37 aa, Artificial Sequence
  Non-cyclic GFR-binding peptide
  MOD_RES (34), (35): Xaa is C or S
  MOD_RES (12), (13), (14), (15), (16): Xaa is A or G
  MOD_RES (17), (18), (19), (20): Xaa is A or G or is absent
SEVVMDYHYKLXXXXXXXXXKYLISIPSLRTPVXXTP

SEQ ID NO: 33286 - protein, 37 aa, Artificial Sequence
  Non-cyclic GFR-binding peptide
  MOD_RES (1), (33), (34): Xaa is C or S
XAEVVMDRHKRLVVNNAADYYLISTASLRAPVXXSAP

SEQ ID NO: 33287 - protein, 35 aa, Artificial Sequence
  Non-cyclic GFR-binding peptide
  MOD_RES (2), (2): Xaa is C or S
  MOD_RES (14), (15), (16), (17), (18): Xaa is A or G
  MOD_RES (19), (20), (21), (22): Xaa is A or G or is absent
AXSEVTMNRHKRLXXXXXXXXXYYLISTASMKEPV

SEQ ID NO: 33288 - protein, 34 aa, Artificial Sequence
  Non-cyclic GFR-binding peptide
  MOD_RES (1), (32), (33): Xaa is C or S
XEEVIMRHKRLLLVRGNDYYLMSTASTKVPAXXT

SEQ ID NO: 33289 - protein, 32 aa, Artificial Sequence
  Non-cyclic GFR-binding peptide
  MOD_RES (1), (32): Xaa is C or S
XSKVIMPIKGYIKPTKGIFYLINIPSLDQSVX

SEQ ID NO: 33290 - protein, 39 aa, Artificial Sequence
  Non-cyclic GFR-binding peptide
  MOD_RES (34), (35): Xaa is C or S
  MOD_RES (12), (13), (14), (15), (16): Xaa is A or G
  MOD_RES (17), (18), (19), (20): Xaa is A or G or is absent
SEVVMDYHYKLXXXXXXXXXKYLISIPSLRTPVXXTPPT

SEQ ID NO: 33291 - protein, 33 aa, Artificial Sequence
  Non-cyclic GFR-binding peptide
  MOD_RES (31), (32): Xaa is C or S
EVVMDRHKRLVVNNAADYYLISTASLRAPVXXS

SEQ ID NO: 33292 - protein, 43 aa, Artificial Sequence
  Non-cyclic GFR-binding peptide
  MOD_RES (1), (3), (37), (38): Xaa is C or S
  MOD_RES (15), (16), (17), (18), (19): Xaa is A or G
  MOD_RES (20), (21), (22), (23): Xaa is A or G or is absent
XAXSEVTMNPIKGYXXXXXXXXXFYLINIPSMKEPVXXPEPIG

SEQ ID NO: 33293 - protein, 44 aa, Artificial Sequence
  Non-cyclic GFR-binding peptide
  MOD_RES (2), (4), (38), (39): Xaa is C or S
  MOD_RES (16), (17), (18), (19), (20): Xaa is A or G
  MOD_RES (21), (22), (23), (24): Xaa is A or G or is absent
RXAXSEVTMNRHKRLXXXXXXXXXYYLISTASMKEPVXXPEPIG

SEQ ID NO: 33294 - protein, 42 aa, Artificial Sequence
  Non-cyclic GFR-binding peptide
  MOD_RES (2), (4), (36), (37): Xaa is C or S
RXAXSEVTMNYHYKLVVNKNEDKYLISIPSMKEPVXXPEPIG

SEQ ID NO: 33295 - protein, 35 aa, Artificial Sequence
  Non-cyclic GFR-binding peptide
  MOD_RES (1), (3), (35): Xaa is C or S
XAXSEVTMNPIKGYVVNKNEDFYLINIPSMKEPVX

SEQ ID NO: 33296 - protein, 43 aa, Artificial Sequence
  Non-cyclic GFR-binding peptide
  MOD_RES (2), (4), (37), (38): Xaa is C or S
  MOD_RES (15), (16), (17), (18), (19): Xaa is A or G
  MOD_RES (20), (21), (22), (23): Xaa is A or G or is absent
LXGXEEVIMRHKRLXXXXXXXXXYYLMSTASTKVPAXXTSPVR

SEQ ID NO: 33297 - protein, 44 aa, Artificial Sequence
  Non-cyclic GFR-binding peptide
  MOD_RES (2), (4), (38), (39): Xaa is C or S
  MOD_RES (16), (17), (18), (19), (20): Xaa is A or G
  MOD_RES (21), (22), (23), (24): Xaa is A or G or is absent
RXAXSEVTMNEYKFKXXXXXXXXXLYLISIPEMKEPVXXPEPIG

SEQ ID NO: 33298 - protein, 37 aa, Artificial Sequence
  Non-cyclic GFR-binding peptide
  MOD_RES (32), (33): Xaa is C or S
SEVTMNYHYKLVVNKNEDKYLISIPSMKEPVXXPEPI

SEQ ID NO: 33299 - protein, 39 aa, Artificial Sequence
  Non-cyclic GFR-binding peptide
  MOD_RES (1), (3), (35), (36): Xaa is C or S
XAXSEVTMNRHKRLVVNKNEDYYLISTASMKEPVXXPEP

SEQ ID NO: 33300 - protein, 32 aa, Artificial Sequence
  Non-cyclic GFR-binding peptide
  MOD_RES (1), (1): Xaa is C or S
XSEVTMNPIKGYVVNKNEDFYLINIPSMKEPV

SEQ ID NO: 33301 - protein, 35 aa, Artificial Sequence
  Non-cyclic GFR-binding peptide
  MOD_RES (2), (34), (35): Xaa is C or S
GXRDVVMGRHKRLIIQQKDNYYLMSTASMKTPTXX

SEQ ID NO: 33302 - protein, 39 aa, Artificial Sequence
  Non-cyclic GFR-binding peptide
  MOD_RES (1), (3), (37), (38): Xaa is C or S
  MOD_RES (15), (16), (17), (18), (19): Xaa is A or G
  MOD_RES (20), (21), (22), (23): Xaa is A or G or is absent
XAXSEVTMNPIKGYXXXXXXXXXFYLINIPSMKEPVXXP

SEQ ID NO: 33303 - protein, 37 aa, Artificial Sequence
  Non-cyclic GFR-binding peptide
  MOD_RES (34), (35): Xaa is C or S
  MOD_RES (12), (13), (14), (15), (16): Xaa is A or G
  MOD_RES (17), (18), (19), (20): Xaa is A or G or is absent
RDVVMGEYKFKXXXXXXXXXLYLMSIPEMKTPTXXPG

SEQ ID NO: 33304 - protein, 40 aa, Artificial Sequence
  Non-cyclic GFR-binding peptide
  MOD_RES (1), (3), (36), (37): Xaa is C or S
  MOD_RES (14), (15), (16), (17), (18): Xaa is A or G
  MOD_RES (19), (20), (21), (22): Xaa is A or G or is absent
XKXSRVIMPIKGYXXXXXXXXXFYLINIPSLAQPVXXPAA

SEQ ID NO: 33305 - protein, 36 aa, Artificial Sequence
  Non-cyclic GFR-binding peptide
  MOD_RES (1), (3): Xaa is C or S
  MOD_RES (15), (16), (17), (18), (19): Xaa is A or G
  MOD_RES (20), (21), (22), (23): Xaa is A or G or is absent
XAXSEVTMNPIKGYXXXXXXXXXFYLINIPSMKEPV

SEQ ID NO: 33306 - protein, 39 aa, Artificial Sequence
  Non-cyclic GFR-binding peptide
  MOD_RES (33), (34): Xaa is C or S
  MOD_RES (11), (12), (13), (14), (15): Xaa is A or G
  MOD_RES (16), (17), (18), (19): Xaa is A or G or is absent
EVVMDEYKFKXXXXXXXXXLYLISIPELRTPVXXTPPTS

SEQ ID NO: 33307 - protein, 39 aa, Artificial Sequence
  Non-cyclic GFR-binding peptide
  MOD_RES (2), (33), (34): Xaa is C or S
KXSKVVMPIKGYVKPTRGVFYLINIPSLDQPVXXPSASA

SEQ ID NO: 33308 - protein, 35 aa, Artificial Sequence
  Non-cyclic GFR-binding peptide
  MOD_RES (2), (34), (35): Xaa is C or S
GXRDVVMGEYKFKIIQQKDNLYLMSIPEMKTPTXX

SEQ ID NO: 33309 - protein, 36 aa, Artificial Sequence
  Non-cyclic GFR-binding peptide
  MOD_RES (31), (32): Xaa is C or S
EVTMNYHYKLVVNKNEDKYLISIPSMKEPVXXPEPI

SEQ ID NO: 33310 - protein, 38 aa, Artificial Sequence
  Non-cyclic GFR-binding peptide
  MOD_RES (2), (35), (36): Xaa is C or S
  MOD_RES (13), (14), (15), (16), (17): Xaa is A or G
  MOD_RES (18), (19), (20), (21): Xaa is A or G or is absent
KXSRVIMPIKGYXXXXXXXXXFYLINIPSLAQPVXXPA

SEQ ID NO: 33311 - protein, 31 aa, Artificial Sequence
  Non-cyclic GFR-binding peptide
  MOD_RES (1), (1): Xaa is C or S
XVPQALSPINILYFVGRKPKVYGKIPMIVRS

SEQ ID NO: 33312 - protein, 36 aa, Artificial Sequence
  Non-cyclic GFR-binding peptide
  MOD_RES (5), (6): Xaa is C or S
IPEPXXVPEKMEPISILYLDENKNVVKFKYENMTVE

SEQ ID NO: 33313 - protein, 32 aa, Artificial Sequence
  Non-cyclic GFR-binding peptide
  MOD_RES (1), (2): Xaa is C or S
XXVPEKMSATSILYYDENKNVVLRKHRNMTVE

SEQ ID NO: 33314 - protein, 38 aa, Artificial Sequence
  Non-cyclic GFR-binding peptide
  MOD_RES (5), (6): Xaa is C or S
  MOD_RES (20), (21), (22), (23), (24): Xaa is A or G
  MOD_RES (25), (26), (27), (28): Xaa is A or G or is absent
SASPXXVPQDLSPINILYFXXXXXXXXXYGKIPMVVKS

SEQ ID NO: 33315 - protein, 39 aa, Artificial Sequence
  Non-cyclic GFR-binding peptide
  MOD_RES (6), (7), (39): Xaa is C or S
GIPEPXXVPEKMNAISILYFDENKNVVLKKYRNMTVESX

SEQ ID NO: 33316 - protein, 33 aa, Artificial Sequence
  Non-cyclic GFR-binding peptide
  MOD_RES (1), (33): Xaa is C or S
XVPTRLSPISILYKDSANNVVLKYHYDMVVESX

SEQ ID NO: 33317 - protein, 32 aa, Artificial Sequence
  Non-cyclic GFR-binding peptide
  MOD_RES (1), (1): Xaa is C or S
XVPTRLEPISILYLDSANNVVKFKYEDMVVES

SEQ ID NO: 33318 - protein, 33 aa, Artificial Sequence
  Non-cyclic GFR-binding peptide
  MOD_RES (1), (2), (33): Xaa is C or S
XXVPQALSPINILYFVGRKPKVYGKIPMIVRSX

SEQ ID NO: 33319 - protein, 43 aa, Artificial Sequence
  Non-cyclic GFR-binding peptide
  MOD_RES (6), (7), (41), (43): Xaa is C or S
  MOD_RES (21), (22), (23), (24), (25): Xaa is A or G
  MOD_RES (26), (27), (28), (29): Xaa is A or G or is absent
GSAGPXXTPTKMSATSMLYYXXXXXXXXXLRKHRGMVVDRXGX

SEQ ID NO: 33320 - protein, 39 aa, Artificial Sequence
  Non-cyclic GFR-binding peptide
  MOD_RES (5), (6): Xaa is C or S
  MOD_RES (20), (21), (22), (23), (24): Xaa is A or G
  MOD_RES (25), (26), (27), (28): Xaa is A or G or is absent
ASKAXXVPTKLSATSILYYXXXXXXXXXLRKHRGMAVSE

SEQ ID NO: 33321 - protein, 44 aa, Artificial Sequence
  Non-cyclic GFR-binding peptide
  MOD_RES (6), (7), (41), (43): Xaa is C or S
  MOD_RES (21), (22), (23), (24), (25): Xaa is A or G
  MOD_RES (26), (27), (28), (29): Xaa is A or G or is absent
GSAGPXXTPTKMEPISMLYLXXXXXXXXXKFKYEGMVVDRXGXS

SEQ ID NO: 33322 - protein, 38 aa, Artificial Sequence
  Non-cyclic GFR-binding peptide
  MOD_RES (1), (2), (36), (38): Xaa is C or S
  MOD_RES (16), (17), (18), (19), (20): Xaa is A or G
  MOD_RES (21), (22), (23), (24): Xaa is A or G or is absent
XXVPTRLEPISILYLXXXXXXXXXKFKYEDMVVESXGX

SEQ ID NO: 33323 - protein, 34 aa, Artificial Sequence
  Non-cyclic GFR-binding peptide
  MOD_RES (2), (3), (34): Xaa is C or S
PXXVPQDLSPINILYFVGRTPKVYGKIPMVVKSX

SEQ ID NO: 33324 - protein, 37 aa, Artificial Sequence
  Non-cyclic GFR-binding peptide
  MOD_RES (5), (6): Xaa is C or S
IPEPXXVPEKMNAISILYFDENKNVVLKKYRNMTVES

SEQ ID NO: 33325 - protein, 35 aa, Artificial Sequence
  Non-cyclic GFR-binding peptide
  MOD_RES (3), (4): Xaa is C or S
EPXXVPEKMSATSILYYDENKNVVLRKHRNMTVES

SEQ ID NO: 33326 - protein, 37 aa, Artificial Sequence
  Non-cyclic GFR-binding peptide
  MOD_RES (6), (7): Xaa is C or S
GSAGPXXTPTKMSPISMLYKNDKQQIILKYHYGMVVD

SEQ ID NO: 33327 - protein, 37 aa, Artificial Sequence
  Non-cyclic GFR-binding peptide
  MOD_RES (4), (5): Xaa is C or S
  MOD_RES (19), (20), (21), (22), (23): Xaa is A or G
  MOD_RES (24), (25), (26), (27): Xaa is A or G or is absent
PASXXVPARLSATSILYYXXXXXXXXXLRKHRDMVVE

SEQ ID NO: 33328 - protein, 38 aa, Artificial Sequence
  Non-cyclic GFR-binding peptide
  MOD_RES (3), (4), (37): Xaa is C or S
  MOD_RES (18), (19), (20), (21), (22): Xaa is A or G
  MOD_RES (23), (24), (25), (26): Xaa is A or G or is absent
STXXAPVKTSATSMLYYXXXXXXXXXLRKHRMIVEEXG

SEQ ID NO: 33329 - protein, 30 aa, Artificial Sequence
  Non-cyclic GFR-binding peptide
VSQDLSPINILYFIGKTPKIYGKIPMIVKS

SEQ ID NO: 33330 - protein, 34 aa, Artificial Sequence
  Non-cyclic GFR-binding peptide
  MOD_RES (3), (4): Xaa is C or S
SPXXVPQDLSPINILYFVGRTPKVYGKIPMVVKS

SEQ ID NO: 33331 - protein, 37 aa, Artificial Sequence
  Non-cyclic GFR-binding peptide
  MOD_RES (5), (6): Xaa is C or S
IPEPXXVPEKMEPISILYLDENKNVVKFKYENMTVES

SEQ ID NO: 33332 - protein, 34 aa, Artificial Sequence
  Non-cyclic GFR-binding peptide
  MOD_RES (1), (34): Xaa is C or S
  MOD_RES (15), (16), (17), (18), (19): Xaa is A or G
  MOD_RES (20), (21), (22), (23): Xaa is A or G or is absent
XAPVKTSATSMLYYXXXXXXXXXLRKHRMIVEEX

SEQ ID NO: 33333 - protein, 41 aa, Artificial Sequence
  Non-cyclic GFR-binding peptide
  MOD_RES (5), (6), (40): Xaa is C or S
  MOD_RES (20), (21), (22), (23), (24): Xaa is A or G
  MOD_RES (25), (26), (27), (28): Xaa is A or G or is absent
IPEPXXVPEKMSPISILYKXXXXXXXXXLKYHYNMTVESXA

SEQ ID NO: 33334 - protein, 39 aa, Artificial Sequence
  Non-cyclic GFR-binding peptide
  MOD_RES (6), (7): Xaa is C or S
  MOD_RES (21), (22), (23), (24), (25): Xaa is A or G
  MOD_RES (26), (27), (28), (29): Xaa is A or G or is absent
AAPASXXVPARLSATSILYYXXXXXXXXXLRKHRDMVVE

SEQ ID NO: 33335 - protein, 36 aa, Artificial Sequence
  Non-cyclic GFR-binding peptide
  MOD_RES (3), (4): Xaa is C or S
  MOD_RES (18), (19), (20), (21), (22): Xaa is A or G
  MOD_RES (23), (24), (25), (26): Xaa is A or G or is absent
EPXXVPEKMSPISILYKXXXXXXXXXLKYHYNMTVE

SEQ ID NO: 33336 - protein, 33 aa, Artificial Sequence
  Non-cyclic GFR-binding peptide
  MOD_RES (1), (2): Xaa is C or S
XXVPEKMSATSILYYDENKNVVLRKHRNMTVES

SEQ ID NO: 33337 - protein, 41 aa, Artificial Sequence
  Non-cyclic GFR-binding peptide
  MOD_RES (3), (4), (38), (40): Xaa is C or S
  MOD_RES (18), (19), (20), (21), (22): Xaa is A or G
  MOD_RES (23), (24), (25), (26): Xaa is A or G or is absent
EPXXVPEKMNAISILYFXXXXXXXXXLKKYRNMTVESXAXR

SEQ ID NO: 33338 - protein, 42 aa, Artificial Sequence
  Non-cyclic GFR-binding peptide
  MOD_RES (6), (7), (41): Xaa is C or S
  MOD_RES (21), (22), (23), (24), (25): Xaa is A or G
  MOD_RES (26), (27), (28), (29): Xaa is A or G or is absent
GIPEPXXVPEKMSPINILYFXXXXXXXXXYGKIPNMTVESXA

SEQ ID NO: 33339 - protein, 40 aa, Artificial Sequence
  Non-cyclic GFR-binding peptide
  MOD_RES (2), (3), (37), (39): Xaa is C or S
  MOD_RES (17), (18), (19), (20), (21): Xaa is A or G
  MOD_RES (22), (23), (24), (25): Xaa is A or G or is absent
PXXVPEKMNAISILYFXXXXXXXXXLKKYRNMTVESXAXR

SEQ ID NO: 33340 - protein, 33 aa, Artificial Sequence
  Non-cyclic GFR-binding peptide
  MOD_RES (14), (15), (16), (17), (18): Xaa is A or G
  MOD_RES (19), (20), (21), (22): Xaa is A or G or is absent
VPTRLSPISILYKXXXXXXXXXLKYHYDMVVES

SEQ ID NO: 33341 - protein, 37 aa, Artificial Sequence
  Non-cyclic GFR-binding peptide
  MOD_RES (4), (5), (36): Xaa is C or S
ASPXXVPQDLSPINILYFVGRTPKVYGKIPMVVKSXK

SEQ ID NO: 33342 - protein, 34 aa, Artificial Sequence
  Non-cyclic GFR-binding peptide
  MOD_RES (1), (2), (34): Xaa is C or S
XXVPEKMSPINILYFDENKNVVYGKIPNMTVESX

SEQ ID NO: 33343 - protein, 31 aa, Artificial Sequence
  Non-cyclic GFR-binding peptide
  MOD_RES (1), (1): Xaa is C or S
XTPTKMSPISMLYKNDKQQIILKYHYGMVVD

SEQ ID NO: 33344 - protein, 42 aa, Artificial Sequence
  Non-cyclic GFR-binding peptide
  MOD_RES (6), (7), (39), (41): Xaa is C or S
STPPTXXVPTRLSATSILYYDSANNVVLRKHRDMVVESXGXR

SEQ ID NO: 33345 - protein, 34 aa, Artificial Sequence
  Non-cyclic GFR-binding peptide
  MOD_RES (1), (32), (34): Xaa is C or S
XVPQALSPINILYFVGRKPKVYGKIPMIVRSXKX

SEQ ID NO: 33346 - protein, 38 aa, Artificial Sequence
  Non-cyclic GFR-binding peptide
  MOD_RES (3), (4), (36), (38): Xaa is C or S
PTXXVPTRLSATSILYYDSANNVVLRKHRDMVVESXGX

SEQ ID NO: 33347 - protein, 40 aa, Artificial Sequence
  Non-cyclic GFR-binding peptide
  MOD_RES (6), (7), (39): Xaa is C or S
GSAGPXXTPTKMSPISMLYKNDKQQIILKYHYGMVVDRXG

SEQ ID NO: 33348 - protein, 40 aa, Artificial Sequence
  Non-cyclic GFR-binding peptide
  MOD_RES (2), (3), (37), (39): Xaa is C or S
  MOD_RES (17), (18), (19), (20), (21): Xaa is A or G
  MOD_RES (22), (23), (24), (25): Xaa is A or G or is absent
PXXVPEKMEPISILYLXXXXXXXXXKFKYENMTVESXAXR

SEQ ID NO: 33349 - protein, 37 aa, Artificial Sequence
  Non-cyclic GFR-binding peptide
  MOD_RES (1), (2), (34), (36): Xaa is C or S
XXVPEKMEPISILYLDENKNVVKFKYENMTVESXAXR

SEQ ID NO: 33350 - protein, 37 aa, Artificial Sequence
  Non-cyclic GFR-binding peptide
  MOD_RES (2), (3), (35), (37): Xaa is C or S
TXXVPTRLEPISILYLDSANNVVKFKYEDMVVESXGX

SEQ ID NO: 33351 - protein, 34 aa, Artificial Sequence
  Non-cyclic GFR-binding peptide
  MOD_RES (1), (32), (34): Xaa is C or S
XAPVKTSPISMLYKDNGRVLLLKYHYMIVEEXGX

SEQ ID NO: 33352 - protein, 36 aa, Artificial Sequence
  Non-cyclic GFR-binding peptide
  MOD_RES (4), (5), (36): Xaa is C or S
AAPXXVPQALSPINILYFVGRKPKVYGKIPMIVRSX

SEQ ID NO: 33353 - protein, 38 aa, Artificial Sequence
  Non-cyclic GFR-binding peptide
  MOD_RES (6), (7): Xaa is C or S
HVPKPXXAPTKLSPISVLYKDDSSNVILKYHYNMVVRS

SEQ ID NO: 33354 - protein, 40 aa, Artificial Sequence
  Non-cyclic GFR-binding peptide
  MOD_RES (6), (7), (39): Xaa is C or S
GIPEPXXVPEKMNAISILYFDENKNVVLKKYRNMTVESXA

SEQ ID NO: 33355 - protein, 34 aa, Artificial Sequence
  Non-cyclic GFR-binding peptide
  MOD_RES (2), (3): Xaa is C or S
TXXVPTRLEPISILYLDSANNVVKFKYEDMVVES

SEQ ID NO: 33356 - protein, 36 aa, Artificial Sequence
  Non-cyclic GFR-binding peptide
  MOD_RES (1), (33), (35): Xaa is C or S
XVPEKMSPISILYKDENKNVVLKYHYNMTVESXAXR

SEQ ID NO: 33357 - protein, 41 aa, Artificial Sequence
  Non-cyclic GFR-binding peptide
  MOD_RES (5), (6), (40): Xaa is C or S
  MOD_RES (20), (21), (22), (23), (24): Xaa is A or G
  MOD_RES (25), (26), (27), (28): Xaa is A or G or is absent
IPEPXXVPEKMEPISILYLXXXXXXXXXKFKYENMTVESXA

SEQ ID NO: 33358 - protein, 34 aa, Artificial Sequence
  Non-cyclic GFR-binding peptide
  MOD_RES (31), (33): Xaa is C or S
VSQDLSPINILYFIGKTPKIYGKIPMIVKSXKXS

SEQ ID NO: 33359 - protein, 37 aa, Artificial Sequence
  Non-cyclic GFR-binding peptide
  MOD_RES (1), (2), (36): Xaa is C or S
  MOD_RES (16), (17), (18), (19), (20): Xaa is A or G
  MOD_RES (21), (22), (23), (24): Xaa is A or G or is absent
XXVPEKMEPISILYLXXXXXXXXXKFKYENMTVESXA

SEQ ID NO: 33360 - protein, 34 aa, Artificial Sequence
  Non-cyclic GFR-binding peptide
  MOD_RES (32), (34): Xaa is C or S
TPTKMSATSMLYYNDKQQIILRKHRGMVVDRXGX

SEQ ID NO: 33361 - protein, 37 aa, Artificial Sequence
  Non-cyclic GFR-binding peptide
  MOD_RES (3), (4), (36): Xaa is C or S
PTXXVPTRLSATSILYYDSANNVVLRKHRDMVVESXG

SEQ ID NO: 33362 - protein, 37 aa, Artificial Sequence
  Non-cyclic GFR-binding peptide
  MOD_RES (1), (2), (34), (36): Xaa is C or S
XXTPTKMSATSMLYYNDKQQIILRKHRGMVVDRXGXS

SEQ ID NO: 33363 - protein, 37 aa, Artificial Sequence
  Non-cyclic GFR-binding peptide
  MOD_RES (3), (4), (35), (37): Xaa is C or S
STXXAPVKTEPISMLYLDNGRVLLKFKYEMIVEEXGX

SEQ ID NO: 33364 - protein, 38 aa, Artificial Sequence
  Non-cyclic GFR-binding peptide
  MOD_RES (3), (4), (36), (38): Xaa is C or S
KAXXVPTKLSATSILYYDKGVVTYLRKHRGMAVSEXGX

SEQ ID NO: 33365 - protein, 38 aa, Artificial Sequence
  Non-cyclic GFR-binding peptide
  MOD_RES (1), (2), (35), (37): Xaa is C or S
  MOD_RES (16), (17), (18), (19), (20): Xaa is A or G
  MOD_RES (21), (22), (23), (24): Xaa is A or G or is absent
XXAPVKTEPISMLYLXXXXXXXXXKFKYEMIVEEXGXL

SEQ ID NO: 33366 - protein, 33 aa, Artificial Sequence
  Non-cyclic GFR-binding peptide
  MOD_RES (33), (33): Xaa is C or S
  MOD_RES (14), (15), (16), (17), (18): Xaa is A or G
  MOD_RES (19), (20), (21), (22): Xaa is A or G or is absent
APVKTEPISMLYLXXXXXXXXXKFKYEMIVEEX

SEQ ID NO: 33367 - protein, 33 aa, Artificial Sequence
  Non-cyclic GFR-binding peptide
  MOD_RES (14), (15), (16), (17), (18): Xaa is A or G
  MOD_RES (19), (20), (21), (22): Xaa is A or G or is absent
VPTRLEPISILYLXXXXXXXXXKFKYEDMVVES

SEQ ID NO: 33368 - protein, 37 aa, Artificial Sequence
  Non-cyclic GFR-binding peptide
  MOD_RES (3), (4), (35), (37): Xaa is C or S
APXXVPQALSPINILYFVGRKPKVYGKIPMIVRSXKX

SEQ ID NO: 33369 - protein, 36 aa, Artificial Sequence
  Non-cyclic GFR-binding peptide
  MOD_RES (5), (6): Xaa is C or S
VPSTXXAPVKTEPISMLYLDNGRVLLKFKYEMIVEE

SEQ ID NO: 33370 - protein, 35 aa, Artificial Sequence
  Non-cyclic GFR-binding peptide
  MOD_RES (2), (3), (35): Xaa is C or S
TXXVPTRLSATSILYYDSANNVVLRKHRDMVVESX

SEQ ID NO: 33371 - protein, 36 aa, Artificial Sequence
  Non-cyclic GFR-binding peptide
  MOD_RES (2), (3), (35): Xaa is C or S
TXXVPTRLEPISILYLDSANNVVKFKYEDMVVESXG

SEQ ID NO: 33372 - protein, 31 aa, Artificial Sequence
  Non-cyclic GFR-binding peptide
  MOD_RES (1), (1): Xaa is C or S
XTPTKMSATSMLYYNDKQQIILRKHRGMVVD

SEQ ID NO: 33373 - protein, 41 aa, Artificial Sequence
  Non-cyclic GFR-binding peptide
  MOD_RES (5), (6), (40): Xaa is C or S
  MOD_RES (20), (21), (22), (23), (24): Xaa is A or G
  MOD_RES (25), (26), (27), (28): Xaa is A or G or is absent
SAGPXXTPTKMSATSMLYYXXXXXXXXXLRKHRGMVVDRXG

SEQ ID NO: 33374 - protein, 37 aa, Artificial Sequence
  Non-cyclic GFR-binding peptide
  MOD_RES (4), (5), (37): Xaa is C or S
PPTXXVPTRLSATSILYYDSANNVVLRKHRDMVVESX

SEQ ID NO: 33375 - protein, 38 aa, Artificial Sequence
  Non-cyclic GFR-binding peptide
  MOD_RES (5), (6), (38): Xaa is C or S
IPEPXXVPEKMSPISILYKDENKNVVLKYHYNMTVESX

SEQ ID NO: 33376 - protein, 36 aa, Artificial Sequence
  Non-cyclic GFR-binding peptide
  MOD_RES (3), (4): Xaa is C or S
  MOD_RES (18), (19), (20), (21), (22): Xaa is A or G
  MOD_RES (23), (24), (25), (26): Xaa is A or G or is absent
EPXXVPEKMSATSILYYXXXXXXXXXLRKHRNMTVE

SEQ ID NO: 33377 - protein, 37 aa, Artificial Sequence
  Non-cyclic GFR-binding peptide
  MOD_RES (1), (35), (37): Xaa is C or S
  MOD_RES (15), (16), (17), (18), (19): Xaa is A or G
  MOD_RES (20), (21), (22), (23): Xaa is A or G or is absent
XVPTRLSPISILYKXXXXXXXXXLKYHYDMVVESXGX

SEQ ID NO: 33378 - protein, 38 aa, Artificial Sequence
  Non-cyclic GFR-binding peptide
  MOD_RES (2), (3), (37): Xaa is C or S
  MOD_RES (17), (18), (19), (20), (21): Xaa is A or G
  MOD_RES (22), (23), (24), (25): Xaa is A or G or is absent
PXXTPTKMSPISMLYKXXXXXXXXXLKYHYGMVVDRXG

SEQ ID NO: 33379 - protein, 39 aa, Artificial Sequence
  Non-cyclic GFR-binding peptide
  MOD_RES (2), (3), (36), (38): Xaa is C or S
  MOD_RES (17), (18), (19), (20), (21): Xaa is A or G
  MOD_RES (22), (23), (24), (25): Xaa is A or G or is absent
PXXVSQDLSPINILYFXXXXXXXXXYGKIPMIVKSXKXS

SEQ ID NO: 33380 - protein, 34 aa, Artificial Sequence
  Non-cyclic GFR-binding peptide
  MOD_RES (1), (2), (34): Xaa is C or S
XXTPTKMSPISMLYKNDKQQIILKYHYGMVVDRX

SEQ ID NO: 33381 - protein, 38 aa, Artificial Sequence
  Non-cyclic GFR-binding peptide
  MOD_RES (2), (3), (37): Xaa is C or S
  MOD_RES (17), (18), (19), (20), (21): Xaa is A or G
  MOD_RES (22), (23), (24), (25): Xaa is A or G or is absent
PXXVPEKMSPISILYKXXXXXXXXXLKYHYNMTVESXA

SEQ ID NO: 33382 - protein, 39 aa, Artificial Sequence
  Non-cyclic GFR-binding peptide
  MOD_RES (6), (7), (39): Xaa is C or S
GIPEPXXVPEKMEPISILYLDENKNVVKFKYENMTVESX

SEQ ID NO: 33383 - protein, 32 aa, Artificial Sequence
  Non-cyclic GFR-binding peptide
  MOD_RES (1), (2): Xaa is C or S
XXVPEKMEPISILYLDENKNVVKFKYENMTVE

SEQ ID NO: 33384 - protein, 38 aa, Artificial Sequence
  Non-cyclic GFR-binding peptide
  MOD_RES (5), (6): Xaa is C or S
  MOD_RES (20), (21), (22), (23), (24): Xaa is A or G
  MOD_RES (25), (26), (27), (28): Xaa is A or G or is absent
SAGPXXTPTKMEPISMLYLXXXXXXXXXKFKYEGMVVD

SEQ ID NO: 33385 - protein, 36 aa, Artificial Sequence
  Non-cyclic GFR-binding peptide
  MOD_RES (5), (6): Xaa is C or S
IPEPXXVPEKMSATSILYYDENKNVVLRKHRNMTVE

SEQ ID NO: 33386 - protein, 39 aa, Artificial Sequence
  Non-cyclic GFR-binding peptide
  MOD_RES (4), (5), (39): Xaa is C or S
  MOD_RES (19), (20), (21), (22), (23): Xaa is A or G
  MOD_RES (24), (25), (26), (27): Xaa is A or G or is absent
AGPXXTPTKMSATSMLYYXXXXXXXXXLRKHRGMVVDRX

SEQ ID NO: 33387 - protein, 41 aa, Artificial Sequence
  Non-cyclic GFR-binding peptide
  MOD_RES (3), (4), (38), (40): Xaa is C or S
  MOD_RES (18), (19), (20), (21), (22): Xaa is A or G
  MOD_RES (23), (24), (25), (26): Xaa is A or G or is absent
EPXXVPEKMEPISILYLXXXXXXXXXKFKYENMTVESXAXR

SEQ ID NO: 33388 - protein, 35 aa, Artificial Sequence
  Non-cyclic GFR-binding peptide
  MOD_RES (2), (3): Xaa is C or S
  MOD_RES (17), (18), (19), (20), (21): Xaa is A or G
  MOD_RES (22), (23), (24), (25): Xaa is A or G or is absent
SXXVPARLSATSILYYXXXXXXXXXLRKHRDMVVE

SEQ ID NO: 33389 - protein, 40 aa, Artificial Sequence
  Non-cyclic GFR-binding peptide
  MOD_RES (6), (7), (39): Xaa is C or S
GIPEPXXVPEKMEPISILYLDENKNVVKFKYENMTVESXA

SEQ ID NO: 33390 - protein, 41 aa, Artificial Sequence
  Non-cyclic GFR-binding peptide
  MOD_RES (6), (7), (39), (41): Xaa is C or S
GIPEPXXVPEKMEPISILYLDENKNVVKFKYENMTVESXAX

SEQ ID NO: 33391 - protein, 35 aa, Artificial Sequence
  Non-cyclic GFR-binding peptide
  MOD_RES (3), (4), (35): Xaa is C or S
APXXVPQALSPINILYFVGRKPKVYGKIPMIVRSX

SEQ ID NO: 33392 - protein, 37 aa, Artificial Sequence
  Non-cyclic GFR-binding peptide
  MOD_RES (3), (4): Xaa is C or S
  MOD_RES (18), (19), (20), (21), (22): Xaa is A or G
  MOD_RES (23), (24), (25), (26): Xaa is A or G or is absent
EPXXVPEKMNAISILYFXXXXXXXXXLKKYRNMTVES

SEQ ID NO: 33393 - protein, 39 aa, Artificial Sequence
  Non-cyclic GFR-binding peptide
  MOD_RES (5), (6), (38): Xaa is C or S
TPPTXXVPTRLSATSILYYDSANNVVLRKHRDMVVESXG

SEQ ID NO: 33394 - protein, 37 aa, Artificial Sequence
  Non-cyclic GFR-binding peptide
  MOD_RES (3), (4), (37): Xaa is C or S
  MOD_RES (18), (19), (20), (21), (22): Xaa is A or G
  MOD_RES (23), (24), (25), (26): Xaa is A or G or is absent
STXXAPVKTSPISMLYKXXXXXXXXXLKYHYMIVEEX

SEQ ID NO: 33395 - protein, 34 aa, Artificial Sequence
  Non-cyclic GFR-binding peptide
  MOD_RES (2), (3): Xaa is C or S
PXXTPTKMEPISMLYLNDKQQIIKFKYEGMVVDR

SEQ ID NO: 33396 - protein, 39 aa, Artificial Sequence
  Non-cyclic GFR-binding peptide
  MOD_RES (4), (5), (39): Xaa is C or S
  MOD_RES (19), (20), (21), (22), (23): Xaa is A or G
  MOD_RES (24), (25), (26), (27): Xaa is A or G or is absent
PEPXXVPEKMEPISILYLXXXXXXXXXKFKYENMTVESX

SEQ ID NO: 33397 - protein, 40 aa, Artificial Sequence
  Non-cyclic GFR-binding peptide
  MOD_RES (5), (6), (37), (39): Xaa is C or S
SASPXXVSQDLSPINILYFIGKTPKIYGKIPMIVKSXKXS

SEQ ID NO: 33398 - protein, 38 aa, Artificial Sequence
  Non-cyclic GFR-binding peptide
  MOD_RES (5), (6), (37): Xaa is C or S
VPSTXXAPVKTSPISMLYKDNGRVLLLKYHYMIVEEXG

SEQ ID NO: 33399 - protein, 39 aa, Artificial Sequence
  Non-cyclic GFR-binding peptide
  MOD_RES (6), (7), (39): Xaa is C or S
GSAGPXXTPTKMEPISMLYLNDKQQIIKFKYEGMVVDRX

SEQ ID NO: 33400 - protein, 40 aa, Artificial Sequence
  Non-cyclic GFR-binding peptide
  MOD_RES (6), (7): Xaa is C or S
  MOD_RES (21), (22), (23), (24), (25): Xaa is A or G
  MOD_RES (26), (27), (28), (29): Xaa is A or G or is absent
GIPEPXXVPEKMSPINILYFXXXXXXXXXYGKIPNMTVES

SEQ ID NO: 33401 - protein, 32 aa, Artificial Sequence
  Non-cyclic GFR-binding peptide
  MOD_RES (1), (1): Xaa is C or S
XVPTKLSATSILYYDKGVVTYLRKHRGMAVSE

SEQ ID NO: 33402 - protein, 40 aa, Artificial Sequence
  Non-cyclic GFR-binding peptide
  MOD_RES (4), (5), (38), (40): Xaa is C or S
  MOD_RES (19), (20), (21), (22), (23): Xaa is A or G
  MOD_RES (24), (25), (26), (27): Xaa is A or G or is absent
PSTXXAPVKTEPISMLYLXXXXXXXXXKFKYEMIVEEXGX

SEQ ID NO: 33403 - protein, 30 aa, Artificial Sequence
  Non-cyclic GFR-binding peptide
VPEKMSPINILYFDENKNVVYGKIPNMTVE

SEQ ID NO: 33404 - protein, 38 aa, Artificial Sequence
  Non-cyclic GFR-binding peptide
  MOD_RES (5), (6), (38): Xaa is C or S
SAGPXXTPTKMSPISMLYKNDKQQIILKYHYGMVVDRX

SEQ ID NO: 33405 - protein, 39 aa, Artificial Sequence
  Non-cyclic GFR-binding peptide
  MOD_RES (4), (5), (37), (39): Xaa is C or S
PPTXXVPTRLEPISILYLDSANNVVKFKYEDMVVESXGX

SEQ ID NO: 33406 - protein, 38 aa, Artificial Sequence
  Non-cyclic GFR-binding peptide
  MOD_RES (2), (3), (35), (37): Xaa is C or S
TXXVPTRLSPISILYKDSANNVVLKYHYDMVVESXGXR

SEQ ID NO: 33407 - protein, 38 aa, Artificial Sequence
  Non-cyclic GFR-binding peptide
  MOD_RES (3), (4), (38): Xaa is C or S
  MOD_RES (18), (19), (20), (21), (22): Xaa is A or G
  MOD_RES (23), (24), (25), (26): Xaa is A or G or is absent
PTXXVPTRLSPISILYKXXXXXXXXXLKYHYDMVVESX

SEQ ID NO: 33408 - protein, 35 aa, Artificial Sequence
  Non-cyclic GFR-binding peptide
  MOD_RES (1), (2), (33), (35): Xaa is C or S
XXVPQALSPINILYFVGRKPKVYGKIPMIVRSXKX

SEQ ID NO: 33409 - protein, 35 aa, Artificial Sequence
  Non-cyclic GFR-binding peptide
  MOD_RES (32), (34): Xaa is C or S
VPEKMSPISILYKDENKNVVLKYHYNMTVESXAXR

SEQ ID NO: 33410 - protein, 39 aa, Artificial Sequence
  Non-cyclic GFR-binding peptide
  MOD_RES (3), (4), (37), (39): Xaa is C or S
  MOD_RES (18), (19), (20), (21), (22): Xaa is A or G
  MOD_RES (23), (24), (25), (26): Xaa is A or G or is absent
STXXAPVKTEPISMLYLXXXXXXXXXKFKYEMIVEEXGX

SEQ ID NO: 33411 - protein, 36 aa, Artificial Sequence
  Non-cyclic GFR-binding peptide
  MOD_RES (1), (2), (34), (36): Xaa is C or S
XXVPTRLSATSILYYDSANNVVLRKHRDMVVESXGX

SEQ ID NO: 33412 - protein, 36 aa, Artificial Sequence
  Non-cyclic GFR-binding peptide
  MOD_RES (1), (33), (35): Xaa is C or S
XVPTRLEPISILYLDSANNVVKFKYEDMVVESXGXR

SEQ ID NO: 33413 - protein, 39 aa, Artificial Sequence
  Non-cyclic GFR-binding peptide
  MOD_RES (3), (4), (38): Xaa is C or S
  MOD_RES (18), (19), (20), (21), (22): Xaa is A or G
  MOD_RES (23), (24), (25), (26): Xaa is A or G or is absent
EPXXVPEKMSPINILYFXXXXXXXXXYGKIPNMTVESXA

SEQ ID NO: 33414 - protein, 36 aa, Artificial Sequence
  Non-cyclic GFR-binding peptide
  MOD_RES (1), (2), (34), (36): Xaa is C or S
XXVPEKMSPINILYFDENKNVVYGKIPNMTVESXAX

SEQ ID NO: 33415 - protein, 38 aa, Artificial Sequence
  Non-cyclic GFR-binding peptide
  MOD_RES (4), (5), (37): Xaa is C or S
AGPXXTPTKMEPISMLYLNDKQQIIKFKYEGMVVDRXG

SEQ ID NO: 33416 - protein, 35 aa, Artificial Sequence
  Non-cyclic GFR-binding peptide
  MOD_RES (3), (4): Xaa is C or S
PTXXVPTRLSPISILYKDSANNVVLKYHYDMVVES

SEQ ID NO: 33417 - protein, 38 aa, Artificial Sequence
  Non-cyclic GFR-binding peptide
  MOD_RES (1), (35), (37): Xaa is C or S
  MOD_RES (15), (16), (17), (18), (19): Xaa is A or G
  MOD_RES (20), (21), (22), (23): Xaa is A or G or is absent
XVPEKMSATSILYYXXXXXXXXXLRKHRNMTVESXAXR

SEQ ID NO: 33418 - protein, 36 aa, Artificial Sequence
  Non-cyclic GFR-binding peptide
  MOD_RES (4), (5), (36): Xaa is C or S
PSTXXAPVKTSPISMLYKDNGRVLLLKYHYMIVEEX

SEQ ID NO: 33419 - protein, 35 aa, Artificial Sequence
  Non-cyclic GFR-binding peptide
  MOD_RES (2), (3): Xaa is C or S
  MOD_RES (17), (18), (19), (20), (21): Xaa is A or G
  MOD_RES (22), (23), (24), (25): Xaa is A or G or is absent
TXXAPVKTSATSMLYYXXXXXXXXXLRKHRMIVEE

SEQ ID NO: 33420 - protein, 37 aa, Artificial Sequence
  Non-cyclic GFR-binding peptide
  MOD_RES (1), (35), (37): Xaa is C or S
  MOD_RES (15), (16), (17), (18), (19): Xaa is A or G
  MOD_RES (20), (21), (22), (23): Xaa is A or G or is absent
XVPEKMSPINILYFXXXXXXXXXYGKIPNMTVESXAX

SEQ ID NO: 33421 - protein, 41 aa, Artificial Sequence
  Non-cyclic GFR-binding peptide
  MOD_RES (3), (4), (38), (40): Xaa is C or S
  MOD_RES (18), (19), (20), (21), (22): Xaa is A or G
  MOD_RES (23), (24), (25), (26): Xaa is A or G or is absent
PTXXVPTRLSPISILYKXXXXXXXXXLKYHYDMVVESXGXR

SEQ ID NO: 33422 - protein, 37 aa, Artificial Sequence
  Non-cyclic GFR-binding peptide
  MOD_RES (1), (34), (36): Xaa is C or S
  MOD_RES (15), (16), (17), (18), (19): Xaa is A or G
  MOD_RES (20), (21), (22), (23): Xaa is A or G or is absent
XAPVKTSPISMLYKXXXXXXXXXLKYHYMIVEEXGXL

SEQ ID NO: 33423 - protein, 31 aa, Artificial Sequence
  Non-cyclic GFR-binding peptide
  MOD_RES (31), (31): Xaa is C or S
VPQALSPINILYFVGRKPKVYGKIPMIVRSX

SEQ ID NO: 33424 - protein, 37 aa, Artificial Sequence
  Non-cyclic GFR-binding peptide
  MOD_RES (34), (36): Xaa is C or S
  MOD_RES (14), (15), (16), (17), (18): Xaa is A or G
  MOD_RES (19), (20), (21), (22): Xaa is A or G or is absent
VPEKMSPISILYKXXXXXXXXXLKYHYNMTVESXAXR

SEQ ID NO: 33425 - protein, 37 aa, Artificial Sequence
  Non-cyclic GFR-binding peptide
  MOD_RES (3), (4), (36): Xaa is C or S
GPXXTPTKMSATSMLYYNDKQQIILRKHRGMVVDRXG

SEQ ID NO: 33426 - protein, 36 aa, Artificial Sequence
  Non-cyclic GFR-binding peptide
  MOD_RES (1), (2), (36): Xaa is C or S
  MOD_RES (16), (17), (18), (19), (20): Xaa is A or G
  MOD_RES (21), (22), (23), (24): Xaa is A or G or is absent
XXTPTKMEPISMLYLXXXXXXXXXKFKYEGMVVDRX

SEQ ID NO: 33427 - protein, 38 aa, Artificial Sequence
  Non-cyclic GFR-binding peptide
  MOD_RES (3), (4), (36), (38): Xaa is C or S
EPXXVPEKMEPISILYLDENKNVVKFKYENMTVESXAX

SEQ ID NO: 33428 - protein, 39 aa, Artificial Sequence
  Non-cyclic GFR-binding peptide
  MOD_RES (1), (2), (36), (38): Xaa is C or S
  MOD_RES (16), (17), (18), (19), (20): Xaa is A or G
  MOD_RES (21), (22), (23), (24): Xaa is A or G or is absent
XXVPEKMNAISILYFXXXXXXXXXLKKYRNMTVESXAXR

SEQ ID NO: 33429 - protein, 40 aa, Artificial Sequence
  Non-cyclic GFR-binding peptide
  MOD_RES (5), (6), (40): Xaa is C or S
  MOD_RES (20), (21), (22), (23), (24): Xaa is A or G
  MOD_RES (25), (26), (27), (28): Xaa is A or G or is absent
TPPTXXVPTRLEPISILYLXXXXXXXXXKFKYEDMVVESX

SEQ ID NO: 33430 - protein, 37 aa, Artificial Sequence
  Non-cyclic GFR-binding peptide
  MOD_RES (2), (3), (37): Xaa is C or S
  MOD_RES (17), (18), (19), (20), (21): Xaa is A or G
  MOD_RES (22), (23), (24), (25): Xaa is A or G or is absent
PXXVPEKMEPISILYLXXXXXXXXXKFKYENMTVESX

SEQ ID NO: 33431 - protein, 32 aa, Artificial Sequence
  Non-cyclic GFR-binding peptide
  MOD_RES (14), (15), (16), (17), (18): Xaa is A or G
  MOD_RES (19), (20), (21), (22): Xaa is A or G or is absent
VPTRLSPISILYKXXXXXXXXXLKYHYDMVVE

SEQ ID NO: 33432 - protein, 32 aa, Artificial Sequence
  Non-cyclic GFR-binding peptide
  MOD_RES (14), (15), (16), (17), (18): Xaa is A or G
  MOD_RES (19), (20), (21), (22): Xaa is A or G or is absent
VPTRLEPISILYLXXXXXXXXXKFKYEDMVVE

SEQ ID NO: 33433 - protein, 38 aa, Artificial Sequence
  Non-cyclic GFR-binding peptide
  MOD_RES (3), (4), (38): Xaa is C or S
  MOD_RES (18), (19), (20), (21), (22): Xaa is A or G
  MOD_RES (23), (24), (25), (26): Xaa is A or G or is absent
EPXXVPEKMSPINILYFXXXXXXXXXYGKIPNMTVESX

SEQ ID NO: 33434 - protein, 35 aa, Artificial Sequence
  Non-cyclic GFR-binding peptide
  MOD_RES (2), (3), (35): Xaa is C or S
TXXVPTRLEPISILYLDSANNVVKFKYEDMVVESX

SEQ ID NO: 33435 - protein, 36 aa, Artificial Sequence
  Non-cyclic GFR-binding peptide
  MOD_RES (1), (2), (35): Xaa is C or S
  MOD_RES (16), (17), (18), (19), (20): Xaa is A or G
  MOD_RES (21), (22), (23), (24): Xaa is A or G or is absent
XXVPQDLSPINILYFXXXXXXXXXYGKIPMVVKSXK

SEQ ID NO: 33436 - protein, 37 aa, Artificial Sequence
  Non-cyclic GFR-binding peptide
  MOD_RES (1), (2), (36): Xaa is C or S
  MOD_RES (16), (17), (18), (19), (20): Xaa is A or G
  MOD_RES (21), (22), (23), (24): Xaa is A or G or is absent
XXTPTKMSPISMLYKXXXXXXXXXLKYHYGMVVDRXG

SEQ ID NO: 33437 - protein, 37 aa, Artificial Sequence
  Non-cyclic GFR-binding peptide
  MOD_RES (6), (7): Xaa is C or S
HVPKPXXAPTKLEPISVLYLDDSSNVIKFKYENMVVR

SEQ ID NO: 33438 - protein, 40 aa, Artificial Sequence
  Non-cyclic GFR-binding peptide
  MOD_RES (6), (7), (39): Xaa is C or S
HVPKPXXAPTKLSPISVLYKDDSSNVILKYHYNMVVRSXG

SEQ ID NO: 33439 - protein, 33 aa, Artificial Sequence
  Non-cyclic GFR-binding peptide
  MOD_RES (31), (33): Xaa is C or S
APVKTSPISMLYKDNGRVLLLKYHYMIVEEXGX

SEQ ID NO: 33440 - protein, 39 aa, Artificial Sequence
  Non-cyclic GFR-binding peptide
  MOD_RES (5), (6): Xaa is C or S
  MOD_RES (20), (21), (22), (23), (24): Xaa is A or G
  MOD_RES (25), (26), (27), (28): Xaa is A or G or is absent
IPEPXXVPEKMSATSILYYXXXXXXXXXLRKHRNMTVES

SEQ ID NO: 33441 - protein, 35 aa, Artificial Sequence
  Non-cyclic GFR-binding peptide
  MOD_RES (1), (34): Xaa is C or S
  MOD_RES (15), (16), (17), (18), (19): Xaa is A or G
  MOD_RES (20), (21), (22), (23): Xaa is A or G or is absent
XVPQDLSPINILYFXXXXXXXXXYGKIPMVVKSXK

SEQ ID NO: 33442 - protein, 38 aa, Artificial Sequence
  Non-cyclic GFR-binding peptide
  MOD_RES (1), (35), (37): Xaa is C or S
  MOD_RES (15), (16), (17), (18), (19): Xaa is A or G
  MOD_RES (20), (21), (22), (23): Xaa is A or G or is absent
XTPTKMSPISMLYKXXXXXXXXXLKYHYGMVVDRXGXS

SEQ ID NO: 33443 - protein, 37 aa, Artificial Sequence
  Non-cyclic GFR-binding peptide
  MOD_RES (5), (6): Xaa is C or S
SAGPXXTPTKMSATSMLYYNDKQQIILRKHRGMVVDR

SEQ ID NO: 33444 - protein, 37 aa, Artificial Sequence
  Non-cyclic GFR-binding peptide
  MOD_RES (3), (4): Xaa is C or S
  MOD_RES (18), (19), (20), (21), (22): Xaa is A or G
  MOD_RES (23), (24), (25), (26): Xaa is A or G or is absent
GPXXTPTKMSATSMLYYXXXXXXXXXLRKHRGMVVDR

SEQ ID NO: 33445 - protein, 33 aa, Artificial Sequence
  Non-cyclic GFR-binding peptide
  MOD_RES (1), (1): Xaa is C or S
  MOD_RES (15), (16), (17), (18), (19): Xaa is A or G
  MOD_RES (20), (21), (22), (23): Xaa is A or G or is absent
XVSQDLSPINILYFXXXXXXXXXYGKIPMIVKS

SEQ ID NO: 33446 - protein, 34 aa, Artificial Sequence
  Non-cyclic GFR-binding peptide
  MOD_RES (1), (34): Xaa is C or S
  MOD_RES (15), (16), (17), (18), (19): Xaa is A or G
  MOD_RES (20), (21), (22), (23): Xaa is A or G or is absent
XVPQALSPINILYFXXXXXXXXXYGKIPMIVRSX

SEQ ID NO: 33447 - protein, 37 aa, Artificial Sequence
  Non-cyclic GFR-binding peptide
  MOD_RES (1), (2), (36): Xaa is C or S
  MOD_RES (16), (17), (18), (19), (20): Xaa is A or G
  MOD_RES (21), (22), (23), (24): Xaa is A or G or is absent
XXTPTKMEPISMLYLXXXXXXXXXKFKYEGMVVDRXG

SEQ ID NO: 33448 - protein, 36 aa, Artificial Sequence
  Non-cyclic GFR-binding peptide
  MOD_RES (2), (3), (34), (36): Xaa is C or S
TXXAPVKTSATSMLYYDNGRVLLLRKHRMIVEEXGX

SEQ ID NO: 33449 - protein, 37 aa, Artificial Sequence
  Non-cyclic GFR-binding peptide
  MOD_RES (5), (6): Xaa is C or S
IPEPXXVPEKMSPINILYFDENKNVVYGKIPNMTVES

SEQ ID NO: 33450 - protein, 34 aa, Artificial Sequence
  Non-cyclic GFR-binding peptide
  MOD_RES (32), (34): Xaa is C or S
TPTKMSPISMLYKNDKQQIILKYHYGMVVDRXGX

SEQ ID NO: 33451 - protein, 41 aa, Artificial Sequence
  Non-cyclic GFR-binding peptide
  MOD_RES (5), (6), (40): Xaa is C or S
  MOD_RES (20), (21), (22), (23), (24): Xaa is A or G
  MOD_RES (25), (26), (27), (28): Xaa is A or G or is absent
TPPTXXVPTRLSPISILYKXXXXXXXXXLKYHYDMVVESXG

SEQ ID NO: 33452 - protein, 41 aa, Artificial Sequence
  Non-cyclic GFR-binding peptide
  MOD_RES (6), (7), (39), (41): Xaa is C or S
KASKAXXVPTKLSATSILYYDKGVVTYLRKHRGMAVSEXGX

SEQ ID NO: 33453 - protein, 38 aa, Artificial Sequence
  Non-cyclic GFR-binding peptide
  MOD_RES (3), (4), (38): Xaa is C or S
  MOD_RES (18), (19), (20), (21), (22): Xaa is A or G
  MOD_RES (23), (24), (25), (26): Xaa is A or G or is absent
GPXXTPTKMEPISMLYLXXXXXXXXXKFKYEGMVVDRX

SEQ ID NO: 33454 - protein, 41 aa, Artificial Sequence
  Non-cyclic GFR-binding peptide
  MOD_RES (6), (7), (39), (41): Xaa is C or S
STPPTXXVPTRLSPISILYKDSANNVVLKYHYDMVVESXGX

SEQ ID NO: 33455 - protein, 39 aa, Artificial Sequence
  Non-cyclic GFR-binding peptide
  MOD_RES (2), (3), (37), (39): Xaa is C or S
  MOD_RES (17), (18), (19), (20), (21): Xaa is A or G
  MOD_RES (22), (23), (24), (25): Xaa is A or G or is absent
PXXTPTKMEPISMLYLXXXXXXXXXKFKYEGMVVDRXGX

SEQ ID NO: 33456 - protein, 37 aa, Artificial Sequence
  Non-cyclic GFR-binding peptide
  MOD_RES (5), (6): Xaa is C or S
SAGPXXTPTKMEPISMLYLNDKQQIIKFKYEGMVVDR

SEQ ID NO: 33457 - protein, 36 aa, Artificial Sequence
  Non-cyclic GFR-binding peptide
  MOD_RES (3), (4): Xaa is C or S
  MOD_RES (18), (19), (20), (21), (22): Xaa is A or G
  MOD_RES (23), (24), (25), (26): Xaa is A or G or is absent
STXXAPVKTEPISMLYLXXXXXXXXXKFKYEMIVEE

SEQ ID NO: 33458 - protein, 38 aa, Artificial Sequence
  Non-cyclic GFR-binding peptide
  MOD_RES (5), (6), (38): Xaa is C or S
TPPTXXVPTRLEPISILYLDSANNVVKFKYEDMVVESX

SEQ ID NO: 33459 - protein, 38 aa, Artificial Sequence
  Non-cyclic GFR-binding peptide
  MOD_RES (3), (4), (38): Xaa is C or S
  MOD_RES (18), (19), (20), (21), (22): Xaa is A or G
  MOD_RES (23), (24), (25), (26): Xaa is A or G or is absent
ASXXVPARLSATSILYYXXXXXXXXXLRKHRDMVVEAX

SEQ ID NO: 33460 - protein, 35 aa, Artificial Sequence
  Non-cyclic GFR-binding peptide
  MOD_RES (1), (2), (35): Xaa is C or S
  MOD_RES (16), (17), (18), (19), (20): Xaa is A or G
  MOD_RES (21), (22), (23), (24): Xaa is A or G or is absent
XXVSQDLSPINILYFXXXXXXXXXYGKIPMIVKSX

SEQ ID NO: 33461 - protein, 36 aa, Artificial Sequence
  Non-cyclic GFR-binding peptide
  MOD_RES (5), (6): Xaa is C or S
VPSTXXAPVKTSATSMLYYDNGRVLLLRKHRMIVEE

SEQ ID NO: 33462 - protein, 30 aa, Artificial Sequence
  Non-cyclic GFR-binding peptide
TPTKMEPISMLYLNDKQQIIKFKYEGMVVD

SEQ ID NO: 33463 - protein, 36 aa, Artificial Sequence
  Non-cyclic GFR-binding peptide
  MOD_RES (4), (5): Xaa is C or S
PPTXXVPTRLEPISILYLDSANNVVKFKYEDMVVES

SEQ ID NO: 33464 - protein, 31 aa, Artificial Sequence
  Non-cyclic GFR-binding peptide
  MOD_RES (1), (1): Xaa is C or S
XVPEKMSPINILYFDENKNVVYGKIPNMTVE

SEQ ID NO: 33465 - protein, 37 aa, Artificial Sequence
  Non-cyclic GFR-binding peptide
  MOD_RES (2), (3), (37): Xaa is C or S
  MOD_RES (17), (18), (19), (20), (21): Xaa is A or G
  MOD_RES (22), (23), (24), (25): Xaa is A or G or is absent
TXXVPTRLSPISILYKXXXXXXXXXLKYHYDMVVESX

SEQ ID NO: 33466 - protein, 32 aa, Artificial Sequence
  Non-cyclic GFR-binding peptide
  MOD_RES (14), (15), (16), (17), (18): Xaa is A or G
  MOD_RES (19), (20), (21), (22): Xaa is A or G or is absent
VPTRLSATSILYYXXXXXXXXXLRKHRDMVVE

SEQ ID NO: 33467 - protein, 36 aa, Artificial Sequence
  Non-cyclic GFR-binding peptide
  MOD_RES (4), (5), (36): Xaa is C or S
PSTXXAPVKTEPISMLYLDNGRVLLKFKYEMIVEEX

SEQ ID NO: 33468 - protein, 38 aa, Artificial Sequence
  Non-cyclic GFR-binding peptide
  MOD_RES (4), (5): Xaa is C or S
  MOD_RES (19), (20), (21), (22), (23): Xaa is A or G
  MOD_RES (24), (25), (26), (27): Xaa is A or G or is absent
PASXXVPARLSATSILYYXXXXXXXXXLRKHRDMVVEA

SEQ ID NO: 33469 - protein, 35 aa, Artificial Sequence
  Non-cyclic GFR-binding peptide
  MOD_RES (1), (33), (35): Xaa is C or S
XVPARLSATSILYYDAANNVVLRKHRDMVVEAXGX

SEQ ID NO: 33470 - protein, 35 aa, Artificial Sequence
  Non-cyclic GFR-binding peptide
  MOD_RES (1), (33), (35): Xaa is C or S
XVPEKMEPISILYLDENKNVVKFKYENMTVESXAX

SEQ ID NO: 33471 - protein, 35 aa, Artificial Sequence
  Non-cyclic GFR-binding peptide
  MOD_RES (2), (3): Xaa is C or S
  MOD_RES (17), (18), (19), (20), (21): Xaa is A or G
  MOD_RES (22), (23), (24), (25): Xaa is A or G or is absent
TXXAPVKTEPISMLYLXXXXXXXXXKFKYEMIVEE

SEQ ID NO: 33472 - protein, 35 aa, Artificial Sequence
  Non-cyclic GFR-binding peptide
  MOD_RES (1), (35): Xaa is C or S
  MOD_RES (15), (16), (17), (18), (19): Xaa is A or G
  MOD_RES (20), (21), (22), (23): Xaa is A or G or is absent
XTPTKMEPISMLYLXXXXXXXXXKFKYEGMVVDRX

SEQ ID NO: 33473 - protein, 41 aa, Artificial Sequence
  Non-cyclic GFR-binding peptide
  MOD_RES (6), (7), (41): Xaa is C or S
  MOD_RES (21), (22), (23), (24), (25): Xaa is A or G
  MOD_RES (26), (27), (28), (29): Xaa is A or G or is absent
GIPEPXXVPEKMSPISILYKXXXXXXXXXLKYHYNMTVESX

SEQ ID NO: 33474 - protein, 36 aa, Artificial Sequence
  Non-cyclic GFR-binding peptide
  MOD_RES (34), (36): Xaa is C or S
  MOD_RES (14), (15), (16), (17), (18): Xaa is A or G
  MOD_RES (19), (20), (21), (22): Xaa is A or G or is absent
VPEKMEPISILYLXXXXXXXXXKFKYENMTVESXAX

SEQ ID NO: 33475 - protein, 41 aa, Artificial Sequence
  Non-cyclic GFR-binding peptide
  MOD_RES (4), (5), (39), (41): Xaa is C or S
  MOD_RES (19), (20), (21), (22), (23): Xaa is A or G
  MOD_RES (24), (25), (26), (27): Xaa is A or G or is absent
PPTXXVPTRLSATSILYYXXXXXXXXXLRKHRDMVVESXGX

SEQ ID NO: 33476 - protein, 35 aa, Artificial Sequence
  Non-cyclic GFR-binding peptide
  MOD_RES (33), (35): Xaa is C or S
  MOD_RES (14), (15), (16), (17), (18): Xaa is A or G
  MOD_RES (19), (20), (21), (22): Xaa is A or G or is absent
VPQALSPINILYFXXXXXXXXXYGKIPMIVRSXKX

SEQ ID NO: 33477 - protein, 40 aa, Artificial Sequence
  Non-cyclic GFR-binding peptide
  MOD_RES (4), (5), (37), (39): Xaa is C or S
PEPXXVPEKMSPISILYKDENKNVVLKYHYNMTVESXAXR

SEQ ID NO: 33478 - protein, 36 aa, Artificial Sequence
  Non-cyclic GFR-binding peptide
  MOD_RES (1), (35): Xaa is C or S
  MOD_RES (15), (16), (17), (18), (19): Xaa is A or G
  MOD_RES (20), (21), (22), (23): Xaa is A or G or is absent
XTPTKMSATSMLYYXXXXXXXXXLRKHRGMVVDRXG

SEQ ID NO: 33479 - protein, 42 aa, Artificial Sequence
  Non-cyclic GFR-binding peptide
  MOD_RES (5), (6), (40), (42): Xaa is C or S
  MOD_RES (20), (21), (22), (23), (24): Xaa is A or G
  MOD_RES (25), (26), (27), (28): Xaa is A or G or is absent
IPEPXXVPEKMEPISILYLXXXXXXXXXKFKYENMTVESXAX

SEQ ID NO: 33480 - protein, 37 aa, Artificial Sequence
  Non-cyclic GFR-binding peptide
  MOD_RES (34), (36): Xaa is C or S
  MOD_RES (14), (15), (16), (17), (18): Xaa is A or G
  MOD_RES (19), (20), (21), (22): Xaa is A or G or is absent
TPTKMSATSMLYYXXXXXXXXXLRKHRGMVVDRXGXS

SEQ ID NO: 33481 - protein, 39 aa, Artificial Sequence
  Non-cyclic GFR-binding peptide
  MOD_RES (2), (3), (36), (38): Xaa is C or S
  MOD_RES (17), (18), (19), (20), (21): Xaa is A or G
  MOD_RES (22), (23), (24), (25): Xaa is A or G or is absent
TXXAPVKTSATSMLYYXXXXXXXXXLRKHRMIVEEXGXL

SEQ ID NO: 33482 - protein, 39 aa, Artificial Sequence
  Non-cyclic GFR-binding peptide
  MOD_RES (4), (5), (39): Xaa is C or S
  MOD_RES (19), (20), (21), (22), (23): Xaa is A or G
  MOD_RES (24), (25), (26), (27): Xaa is A or G or is absent
AGPXXTPTKMSPISMLYKXXXXXXXXXLKYHYGMVVDRX

SEQ ID NO: 33483 - protein, 37 aa, Artificial Sequence
  Non-cyclic GFR-binding peptide
  MOD_RES (34), (36): Xaa is C or S
  MOD_RES (14), (15), (16), (17), (18): Xaa is A or G
  MOD_RES (19), (20), (21), (22): Xaa is A or G or is absent
VPARLSATSILYYXXXXXXXXXLRKHRDMVVEAXGXR

SEQ ID NO: 33484 - protein, 34 aa, Artificial Sequence
  Non-cyclic GFR-binding peptide
  MOD_RES (1), (2): Xaa is C or S
  MOD_RES (16), (17), (18), (19), (20): Xaa is A or G
  MOD_RES (21), (22), (23), (24): Xaa is A or G or is absent
XXTPTKMEPISMLYLXXXXXXXXXKFKYEGMVVD

SEQ ID NO: 33485 - protein, 35 aa, Artificial Sequence
  Non-cyclic GFR-binding peptide
  MOD_RES (1), (2), (34): Xaa is C or S
XXTPTKMSPISMLYKNDKQQIILKYHYGMVVDRXG

SEQ ID NO: 33486 - protein, 43 aa, Artificial Sequence
  Non-cyclic GFR-binding peptide
  MOD_RES (6), (7), (41), (43): Xaa is C or S
  MOD_RES (21), (22), (23), (24), (25): Xaa is A or G
  MOD_RES (26), (27), (28), (29): Xaa is A or G or is absent
HVPKPXXAPTKLSATSVLYYXXXXXXXXXLRKHRNMVVRSXGX

SEQ ID NO: 33487 - protein, 42 aa, Artificial Sequence
  Non-cyclic GFR-binding peptide
  MOD_RES (6), (7), (39), (41): Xaa is C or S
HVPKPXXAPTKLSATSVLYYDDSSNVILRKHRNMVVRSXGXH

SEQ ID NO: 33488 - protein, 34 aa, Artificial Sequence
  Non-cyclic GFR-binding peptide
  MOD_RES (34), (34): Xaa is C or S
  MOD_RES (14), (15), (16), (17), (18): Xaa is A or G
  MOD_RES (19), (20), (21), (22): Xaa is A or G or is absent
TPTKMEPISMLYLXXXXXXXXXKFKYEGMVVDRX

SEQ ID NO: 33489 - protein, 35 aa, Artificial Sequence
  Non-cyclic GFR-binding peptide
  MOD_RES (2), (3), (34): Xaa is C or S
TXXAPVKTSPISMLYKDNGRVLLLKYHYMIVEEXG

SEQ ID NO: 33490 - protein, 34 aa, Artificial Sequence
  Non-cyclic GFR-binding peptide
  MOD_RES (2), (3): Xaa is C or S
PXXTPTKMSATSMLYYNDKQQIILRKHRGMVVDR

SEQ ID NO: 33491 - protein, 36 aa, Artificial Sequence
  Non-cyclic GFR-binding peptide
  MOD_RES (5), (6): Xaa is C or S
VPSTXXAPVKTSPISMLYKDNGRVLLLKYHYMIVEE

SEQ ID NO: 33492 - protein, 39 aa, Artificial Sequence
  Non-cyclic GFR-binding peptide
  MOD_RES (3), (4), (38): Xaa is C or S
  MOD_RES (18), (19), (20), (21), (22): Xaa is A or G
  MOD_RES (23), (24), (25), (26): Xaa is A or G or is absent
EPXXVPEKMSATSILYYXXXXXXXXXLRKHRNMTVESXA

SEQ ID NO: 33493 - protein, 41 aa, Artificial Sequence
  Non-cyclic GFR-binding peptide
  MOD_RES (6), (7), (41): Xaa is C or S
  MOD_RES (21), (22), (23), (24), (25): Xaa is A or G
  MOD_RES (26), (27), (28), (29): Xaa is A or G or is absent
HVPKPXXAPTKLSATSVLYYXXXXXXXXXLRKHRNMVVRSX

SEQ ID NO: 33494 - protein, 34 aa, Artificial Sequence
  Non-cyclic GFR-binding peptide
  MOD_RES (1), (33): Xaa is C or S
XVPEKMSPINILYFDENKNVVYGKIPNMTVESXA

SEQ ID NO: 33495 - protein, 32 aa, Artificial Sequence
  Non-cyclic GFR-binding peptide
  MOD_RES (14), (15), (16), (17), (18): Xaa is A or G
  MOD_RES (19), (20), (21), (22): Xaa is A or G or is absent
VPQDLSPINILYFXXXXXXXXXYGKIPMVVKS

SEQ ID NO: 33496 - protein, 38 aa, Artificial Sequence
  Non-cyclic GFR-binding peptide
  MOD_RES (3), (4), (35), (37): Xaa is C or S
SPXXVPQDLSPINILYFVGRTPKVYGKIPMVVKSXKXS

SEQ ID NO: 33497 - protein, 37 aa, Artificial Sequence
  Non-cyclic GFR-binding peptide
  MOD_RES (3), (4), (37): Xaa is C or S
  MOD_RES (18), (19), (20), (21), (22): Xaa is A or G
  MOD_RES (23), (24), (25), (26): Xaa is A or G or is absent
SPXXVPQDLSPINILYFXXXXXXXXXYGKIPMVVKSX

SEQ ID NO: 33498 - protein, 40 aa, Artificial Sequence
  Non-cyclic GFR-binding peptide
  MOD_RES (6), (7), (40): Xaa is C or S
  MOD_RES (21), (22), (23), (24), (25): Xaa is A or G
  MOD_RES (26), (27), (28), (29): Xaa is A or G or is absent
RVPSTXXAPVKTSATSMLYYXXXXXXXXXLRKHRMIVEEX

SEQ ID NO: 33499 - protein, 38 aa, Artificial Sequence
  Non-cyclic GFR-binding peptide
  MOD_RES (4), (5), (37): Xaa is C or S
PEPXXVPEKMSATSILYYDENKNVVLRKHRNMTVESXA

SEQ ID NO: 33500 - protein, 35 aa, Artificial Sequence
  Non-cyclic GFR-binding peptide
  MOD_RES (2), (3): Xaa is C or S
  MOD_RES (17), (18), (19), (20), (21): Xaa is A or G
  MOD_RES (22), (23), (24), (25): Xaa is A or G or is absent
TXXAPVKTSPISMLYKXXXXXXXXXLKYHYMIVEE

SEQ ID NO: 33501 - protein, 38 aa, Artificial Sequence
  Non-cyclic GFR-binding peptide
  MOD_RES (2), (3), (37): Xaa is C or S
  MOD_RES (17), (18), (19), (20), (21): Xaa is A or G
  MOD_RES (22), (23), (24), (25): Xaa is A or G or is absent
PXXTPTKMEPISMLYLXXXXXXXXXKFKYEGMVVDRXG

SEQ ID NO: 33502 - protein, 37 aa, Artificial Sequence
  Non-cyclic GFR-binding peptide
  MOD_RES (34), (36): Xaa is C or S
  MOD_RES (14), (15), (16), (17), (18): Xaa is A or G
  MOD_RES (19), (20), (21), (22): Xaa is A or G or is absent
TPTKMEPISMLYLXXXXXXXXXKFKYEGMVVDRXGXS

SEQ ID NO: 33503 - protein, 40 aa, Artificial Sequence
  Non-cyclic GFR-binding peptide
  MOD_RES (4), (5), (37), (39): Xaa is C or S
SKAXXVPTKLSATSILYYDKGVVTYLRKHRGMAVSEXGXR

SEQ ID NO: 33504 - protein, 37 aa, Artificial Sequence
  Non-cyclic GFR-binding peptide
  MOD_RES (1), (35), (37): Xaa is C or S
  MOD_RES (15), (16), (17), (18), (19): Xaa is A or G
  MOD_RES (20), (21), (22), (23): Xaa is A or G or is absent
XTPTKMEPISMLYLXXXXXXXXXKFKYEGMVVDRXGX

SEQ ID NO: 33505 - protein, 35 aa, Artificial Sequence
  Non-cyclic GFR-binding peptide
  MOD_RES (1), (33), (35): Xaa is C or S
XVPTRLSPISILYKDSANNVVLKYHYDMVVESXGX

SEQ ID NO: 33506 - protein, 37 aa, Artificial Sequence
  Non-cyclic GFR-binding peptide
  MOD_RES (6), (7): Xaa is C or S
GSAGPXXTPTKMEPISMLYLNDKQQIIKFKYEGMVVD

SEQ ID NO: 33507 - protein, 30 aa, Artificial Sequence
  Non-cyclic GFR-binding peptide
VPEKMSPISILYKDENKNVVLKYHYNMTVE

SEQ ID NO: 33508 - protein, 35 aa, Artificial Sequence
  Non-cyclic GFR-binding peptide
  MOD_RES (1), (2), (33), (35): Xaa is C or S
XXAPVKTSPISMLYKDNGRVLLLKYHYMIVEEXGX

SEQ ID NO: 33509 - protein, 38 aa, Artificial Sequence
  Non-cyclic GFR-binding peptide
  MOD_RES (2), (3), (37): Xaa is C or S
  MOD_RES (17), (18), (19), (20), (21): Xaa is A or G
  MOD_RES (22), (23), (24), (25): Xaa is A or G or is absent
SXXVPARLSATSILYYXXXXXXXXXLRKHRDMVVEAXG

SEQ ID NO: 33510 - protein, 34 aa, Artificial Sequence
  Non-cyclic GFR-binding peptide
  MOD_RES (1), (2), (34): Xaa is C or S
XXVPTRLSPISILYKDSANNVVLKYHYDMVVESX

SEQ ID NO: 33511 - protein, 35 aa, Artificial Sequence
  Non-cyclic GFR-binding peptide
  MOD_RES (34), (34): Xaa is C or S
  MOD_RES (14), (15), (16), (17), (18): Xaa is A or G
  MOD_RES (19), (20), (21), (22): Xaa is A or G or is absent
VPEKMNAISILYFXXXXXXXXXLKKYRNMTVESXA

SEQ ID NO: 33512 - protein, 33 aa, Artificial Sequence
  Non-cyclic GFR-binding peptide
  MOD_RES (14), (15), (16), (17), (18): Xaa is A or G
  MOD_RES (19), (20), (21), (22): Xaa is A or G or is absent
TPTKMSATSMLYYXXXXXXXXXLRKHRGMVVDR

SEQ ID NO: 33513 - protein, 37 aa, Artificial Sequence
  Non-cyclic GFR-binding peptide
  MOD_RES (1), (2), (36): Xaa is C or S
  MOD_RES (16), (17), (18), (19), (20): Xaa is A or G
  MOD_RES (21), (22), (23), (24): Xaa is A or G or is absent
XXVPEKMSPISILYKXXXXXXXXXLKYHYNMTVESXA

SEQ ID NO: 33514 - protein, 39 aa, Artificial Sequence
  Non-cyclic GFR-binding peptide
  MOD_RES (2), (3), (37), (39): Xaa is C or S
  MOD_RES (17), (18), (19), (20), (21): Xaa is A or G
  MOD_RES (22), (23), (24), (25): Xaa is A or G or is absent
TXXVPTRLSATSILYYXXXXXXXXXLRKHRDMVVESXGX

SEQ ID NO: 33515 - protein, 38 aa, Artificial Sequence
  Non-cyclic GFR-binding peptide
  MOD_RES (2), (3), (35), (37): Xaa is C or S
PXXVPEKMSPINILYFDENKNVVYGKIPNMTVESXAXR

SEQ ID NO: 33516 - protein, 38 aa, Artificial Sequence
  Non-cyclic GFR-binding peptide
  MOD_RES (4), (5), (37): Xaa is C or S
PPTXXVPTRLSATSILYYDSANNVVLRKHRDMVVESXG

SEQ ID NO: 33517 - protein, 41 aa, Artificial Sequence
  Non-cyclic GFR-binding peptide
  MOD_RES (5), (6), (40): Xaa is C or S
  MOD_RES (20), (21), (22), (23), (24): Xaa is A or G
  MOD_RES (25), (26), (27), (28): Xaa is A or G or is absent
TPPTXXVPTRLEPISILYLXXXXXXXXXKFKYEDMVVESXG

SEQ ID NO: 33518 - protein, 40 aa, Artificial Sequence
  Non-cyclic GFR-binding peptide
  MOD_RES (5), (6), (40): Xaa is C or S
  MOD_RES (20), (21), (22), (23), (24): Xaa is A or G
  MOD_RES (25), (26), (27), (28): Xaa is A or G or is absent
IPEPXXVPEKMSPINILYFXXXXXXXXXYGKIPNMTVESX

SEQ ID NO: 33519 - protein, 31 aa, Artificial Sequence
  Non-cyclic GFR-binding peptide
TPTKMSATSMLYYNDKQQIILRKHRGMVVDR

SEQ ID NO: 33520 - protein, 38 aa, Artificial Sequence
  Non-cyclic GFR-binding peptide
  MOD_RES (2), (3), (37): Xaa is C or S
  MOD_RES (17), (18), (19), (20), (21): Xaa is A or G
  MOD_RES (22), (23), (24), (25): Xaa is A or G or is absent
PXXVPEKMEPISILYLXXXXXXXXXKFKYENMTVESXA

SEQ ID NO: 33521 - protein, 38 aa, Artificial Sequence
  Non-cyclic GFR-binding peptide
  MOD_RES (3), (4), (37): Xaa is C or S
  MOD_RES (18), (19), (20), (21), (22): Xaa is A or G
  MOD_RES (23), (24), (25), (26): Xaa is A or G or is absent
STXXAPVKTSPISMLYKXXXXXXXXXLKYHYMIVEEXG

SEQ ID NO: 33522 - protein, 37 aa, Artificial Sequence
  Non-cyclic GFR-binding peptide
  MOD_RES (4), (5), (37): Xaa is C or S
PPTXXVPTRLEPISILYLDSANNVVKFKYEDMVVESX

SEQ ID NO: 33523 - protein, 36 aa, Artificial Sequence
  Non-cyclic GFR-binding peptide
  MOD_RES (1), (2), (35): Xaa is C or S
  MOD_RES (16), (17), (18), (19), (20): Xaa is A or G
  MOD_RES (21), (22), (23), (24): Xaa is A or G or is absent
XXVSQDLSPINILYFXXXXXXXXXYGKIPMIVKSXK

SEQ ID NO: 33524 - protein, 32 aa, Artificial Sequence
  Non-cyclic GFR-binding peptide
  MOD_RES (1), (1): Xaa is C or S
XVPTRLSATSILYYDSANNVVLRKHRDMVVES

SEQ ID NO: 33525 - protein, 39 aa, Artificial Sequence
  Non-cyclic GFR-binding peptide
  MOD_RES (3), (4), (36), (38): Xaa is C or S
ASXXVPARLSATSILYYDAANNVVLRKHRDMVVEAXGXR

SEQ ID NO: 33526 - protein, 30 aa, Artificial Sequence
  Non-cyclic GFR-binding peptide
VPQALSPINILYFVGRKPKVYGKIPMIVRS

SEQ ID NO: 33527 - protein, 39 aa, Artificial Sequence
  Non-cyclic GFR-binding peptide
  MOD_RES (1), (2), (36), (38): Xaa is C or S
  MOD_RES (16), (17), (18), (19), (20): Xaa is A or G
  MOD_RES (21), (22), (23), (24): Xaa is A or G or is absent
XXTPTKMSPISMLYKXXXXXXXXXLKYHYGMVVDRXGXS

SEQ ID NO: 33528 - protein, 37 aa, Artificial Sequence
  Non-cyclic GFR-binding peptide
  MOD_RES (3), (4), (36): Xaa is C or S
GPXXTPTKMEPISMLYLNDKQQIIKFKYEGMVVDRXG

SEQ ID NO: 33529 - protein, 39 aa, Artificial Sequence
  Non-cyclic GFR-binding peptide
  MOD_RES (6), (7): Xaa is C or S
  MOD_RES (21), (22), (23), (24), (25): Xaa is A or G
  MOD_RES (26), (27), (28), (29): Xaa is A or G or is absent
GIPEPXXVPEKMSPISILYKXXXXXXXXXLKYHYNMTVE

SEQ ID NO: 33530 - protein, 33 aa, Artificial Sequence
  Non-cyclic GFR-binding peptide
  MOD_RES (14), (15), (16), (17), (18): Xaa is A or G
  MOD_RES (19), (20), (21), (22): Xaa is A or G or is absent
VPEKMEPISILYLXXXXXXXXXKFKYENMTVES

SEQ ID NO: 33531 - protein, 38 aa, Artificial Sequence
  Non-cyclic GFR-binding peptide
  MOD_RES (6), (7), (38): Xaa is C or S
ASASPXXVPQDLSPINILYFVGRTPKVYGKIPMVVKSX

SEQ ID NO: 33532 - protein, 37 aa, Artificial Sequence
  Non-cyclic GFR-binding peptide
  MOD_RES (3), (4), (36): Xaa is C or S
EPXXVPEKMSATSILYYDENKNVVLRKHRNMTVESXA

SEQ ID NO: 33533 - protein, 33 aa, Artificial Sequence
  Non-cyclic GFR-binding peptide
  MOD_RES (1), (2): Xaa is C or S
XXTPTKMEPISMLYLNDKQQIIKFKYEGMVVDR

SEQ ID NO: 33534 - protein, 35 aa, Artificial Sequence
  Non-cyclic GFR-binding peptide
  MOD_RES (1), (35): Xaa is C or S
  MOD_RES (15), (16), (17), (18), (19): Xaa is A or G
  MOD_RES (20), (21), (22), (23): Xaa is A or G or is absent
XVPEKMEPISILYLXXXXXXXXXKFKYENMTVESX

SEQ ID NO: 33535 - protein, 40 aa, Artificial Sequence
  Non-cyclic GFR-binding peptide
  MOD_RES (4), (5), (39): Xaa is C or S
  MOD_RES (19), (20), (21), (22), (23): Xaa is A or G
  MOD_RES (24), (25), (26), (27): Xaa is A or G or is absent
AGPXXTPTKMSATSMLYYXXXXXXXXXLRKHRGMVVDRXG

SEQ ID NO: 33536 - protein, 39 aa, Artificial Sequence
  Non-cyclic GFR-binding peptide
  MOD_RES (6), (7): Xaa is C or S
  MOD_RES (21), (22), (23), (24), (25): Xaa is A or G
  MOD_RES (26), (27), (28), (29): Xaa is A or G or is absent
GIPEPXXVPEKMEPISILYLXXXXXXXXXKFKYENMTVE

SEQ ID NO: 33537 - protein, 41 aa, Artificial Sequence
  Non-cyclic GFR-binding peptide
  MOD_RES (6), (7), (39), (41): Xaa is C or S
HVPKPXXAPTKLEPISVLYLDDSSNVIKFKYENMVVRSXGX

SEQ ID NO: 33538 - protein, 41 aa, Artificial Sequence
  Non-cyclic GFR-binding peptide
  MOD_RES (5), (6), (39), (41): Xaa is C or S
  MOD_RES (20), (21), (22), (23), (24): Xaa is A or G
  MOD_RES (25), (26), (27), (28): Xaa is A or G or is absent
SASPXXVPQDLSPINILYFXXXXXXXXXYGKIPMVVKSXKX

SEQ ID NO: 33539 - protein, 34 aa, Artificial Sequence
  Non-cyclic GFR-binding peptide
  MOD_RES (3), (4): Xaa is C or S
GPXXTPTKMEPISMLYLNDKQQIIKFKYEGMVVD

SEQ ID NO: 33540 - protein, 35 aa, Artificial Sequence
  Non-cyclic GFR-binding peptide
  MOD_RES (2), (3), (35): Xaa is C or S
SXXVPARLSATSILYYDAANNVVLRKHRDMVVEAX

SEQ ID NO: 33541 - protein, 36 aa, Artificial Sequence
  Non-cyclic GFR-binding peptide
  MOD_RES (2), (3), (36): Xaa is C or S
  MOD_RES (17), (18), (19), (20), (21): Xaa is A or G
  MOD_RES (22), (23), (24), (25): Xaa is A or G or is absent
TXXAPVKTSATSMLYYXXXXXXXXXLRKHRMIVEEX

SEQ ID NO: 33542 - protein, 36 aa, Artificial Sequence
  Non-cyclic GFR-binding peptide
  MOD_RES (1), (2), (34), (36): Xaa is C or S
XXVPTRLSPISILYKDSANNVVLKYHYDMVVESXGX

SEQ ID NO: 33543 - protein, 38 aa, Artificial Sequence
  Non-cyclic GFR-binding peptide
  MOD_RES (4), (5), (36), (38): Xaa is C or S
ASPXXVSQDLSPINILYFIGKTPKIYGKIPMIVKSXKX

SEQ ID NO: 33544 - protein, 39 aa, Artificial Sequence
  Non-cyclic GFR-binding peptide
  MOD_RES (5), (6): Xaa is C or S
  MOD_RES (20), (21), (22), (23), (24): Xaa is A or G
  MOD_RES (25), (26), (27), (28): Xaa is A or G or is absent
IPEPXXVPEKMNAISILYFXXXXXXXXXLKKYRNMTVES

SEQ ID NO: 33545 - protein, 32 aa, Artificial Sequence
  Non-cyclic GFR-binding peptide
  MOD_RES (14), (15), (16), (17), (18): Xaa is A or G
  MOD_RES (19), (20), (21), (22): Xaa is A or G or is absent
TPTKMSPISMLYKXXXXXXXXXLKYHYGMVVD

SEQ ID NO: 33546 - protein, 38 aa, Artificial Sequence
  Non-cyclic GFR-binding peptide
  MOD_RES (1), (35), (37): Xaa is C or S
  MOD_RES (15), (16), (17), (18), (19): Xaa is A or G
  MOD_RES (20), (21), (22), (23): Xaa is A or G or is absent
XVPEKMNAISILYFXXXXXXXXXLKKYRNMTVESXAXR

SEQ ID NO: 33547 - protein, 36 aa, Artificial Sequence
  Non-cyclic GFR-binding peptide
  MOD_RES (1), (33), (35): Xaa is C or S
XTPTKMSPISMLYKNDKQQIILKYHYGMVVDRXGXS

SEQ ID NO: 33548 - protein, 33 aa, Artificial Sequence
  Non-cyclic GFR-binding peptide
  MOD_RES (2), (3): Xaa is C or S
PXXVPEKMSATSILYYDENKNVVLRKHRNMTVE

SEQ ID NO: 33549 - protein, 34 aa, Artificial Sequence
  Non-cyclic GFR-binding peptide
  MOD_RES (1), (33): Xaa is C or S
XVPEKMSATSILYYDENKNVVLRKHRNMTVESXA

SEQ ID NO: 33550 - protein, 37 aa, Artificial Sequence
  Non-cyclic GFR-binding peptide
  MOD_RES (5), (6): Xaa is C or S
IPEPXXVPEKMSATSILYYDENKNVVLRKHRNMTVES

SEQ ID NO: 33551 - protein, 35 aa, Artificial Sequence
  Non-cyclic GFR-binding peptide
  MOD_RES (3), (4): Xaa is C or S
EPXXVPEKMEPISILYLDENKNVVKFKYENMTVES

SEQ ID NO: 33552 - protein, 36 aa, Artificial Sequence
  Non-cyclic GFR-binding peptide
  MOD_RES (3), (4), (36): Xaa is C or S
PTXXVPTRLEPISILYLDSANNVVKFKYEDMVVESX

SEQ ID NO: 33553 - protein, 34 aa, Artificial Sequence
  Non-cyclic GFR-binding peptide
  MOD_RES (1), (2), (33): Xaa is C or S
XXVPQALSPINILYFVGRKPKVYGKIPMIVRSXK

SEQ ID NO: 33554 - protein, 36 aa, Artificial Sequence
  Non-cyclic GFR-binding peptide
  MOD_RES (1), (35): Xaa is C or S
  MOD_RES (15), (16), (17), (18), (19): Xaa is A or G
  MOD_RES (20), (21), (22), (23): Xaa is A or G or is absent
XVPEKMSATSILYYXXXXXXXXXLRKHRNMTVESXA

SEQ ID NO: 33555 - protein, 38 aa, Artificial Sequence
  Non-cyclic GFR-binding peptide
  MOD_RES (1), (35), (37): Xaa is C or S
  MOD_RES (15), (16), (17), (18), (19): Xaa is A or G
  MOD_RES (20), (21), (22), (23): Xaa is A or G or is absent
XVPTKLSATSILYYXXXXXXXXXLRKHRGMAVSEXGXR

SEQ ID NO: 33556 - protein, 33 aa, Artificial Sequence
  Non-cyclic GFR-binding peptide
  MOD_RES (1), (2): Xaa is C or S
XXVPEKMEPISILYLDENKNVVKFKYENMTVES

SEQ ID NO: 33557 - protein, 34 aa, Artificial Sequence
  Non-cyclic GFR-binding peptide
  MOD_RES (1), (33): Xaa is C or S
XVPTRLEPISILYLDSANNVVKFKYEDMVVESXG

SEQ ID NO: 33558 - protein, 34 aa, Artificial Sequence
  Non-cyclic GFR-binding peptide
  MOD_RES (1), (2): Xaa is C or S
  MOD_RES (16), (17), (18), (19), (20): Xaa is A or G
  MOD_RES (21), (22), (23), (24): Xaa is A or G or is absent
XXVPTRLSPISILYKXXXXXXXXXLKYHYDMVVE

SEQ ID NO: 33559 - protein, 35 aa, Artificial Sequence
  Non-cyclic GFR-binding peptide
  MOD_RES (32), (34): Xaa is C or S
VPTRLSATSILYYDSANNVVLRKHRDMVVESXGXR

SEQ ID NO: 33560 - protein, 34 aa, Artificial Sequence
  Non-cyclic GFR-binding peptide
  MOD_RES (1), (33): Xaa is C or S
XTPTKMSATSMLYYNDKQQIILRKHRGMVVDRXG

SEQ ID NO: 33561 - protein, 37 aa, Artificial Sequence
  Non-cyclic GFR-binding peptide
  MOD_RES (1), (34), (36): Xaa is C or S
  MOD_RES (15), (16), (17), (18), (19): Xaa is A or G
  MOD_RES (20), (21), (22), (23): Xaa is A or G or is absent
XAPVKTEPISMLYLXXXXXXXXXKFKYEMIVEEXGXL

SEQ ID NO: 33562 - protein, 39 aa, Artificial Sequence
  Non-cyclic GFR-binding peptide
  MOD_RES (4), (5), (37), (39): Xaa is C or S
PPTXXVPTRLSATSILYYDSANNVVLRKHRDMVVESXGX

SEQ ID NO: 33563 - protein, 32 aa, Artificial Sequence
  Non-cyclic GFR-binding peptide
  MOD_RES (1), (2): Xaa is C or S
XXVPEKMSPINILYFDENKNVVYGKIPNMTVE

SEQ ID NO: 33564 - protein, 42 aa, Artificial Sequence
  Non-cyclic GFR-binding peptide
  MOD_RES (4), (5), (39), (41): Xaa is C or S
  MOD_RES (19), (20), (21), (22), (23): Xaa is A or G
  MOD_RES (24), (25), (26), (27): Xaa is A or G or is absent
AGPXXTPTKMSPISMLYKXXXXXXXXXLKYHYGMVVDRXGXS

SEQ ID NO: 33565 - protein, 38 aa, Artificial Sequence
  Non-cyclic GFR-binding peptide
  MOD_RES (2), (3), (35), (37): Xaa is C or S
AXXVPTKLSATSILYYDKGVVTYLRKHRGMAVSEXGXR

SEQ ID NO: 33566 - protein, 37 aa, Artificial Sequence
  Non-cyclic GFR-binding peptide
  MOD_RES (1), (2), (34), (36): Xaa is C or S
XXTPTKMEPISMLYLNDKQQIIKFKYEGMVVDRXGXS

SEQ ID NO: 33567 - protein, 32 aa, Artificial Sequence
  Non-cyclic GFR-binding peptide
  MOD_RES (1), (32): Xaa is C or S
XAPVKTSATSMLYYDNGRVLLLRKHRMIVEEX

SEQ ID NO: 33568 - protein, 42 aa, Artificial Sequence
  Non-cyclic GFR-binding peptide
  MOD_RES (5), (6), (39), (41): Xaa is C or S
  MOD_RES (20), (21), (22), (23), (24): Xaa is A or G
  MOD_RES (25), (26), (27), (28): Xaa is A or G or is absent
SAAPXXVPQALSPINILYFXXXXXXXXXYGKIPMIVRSXKXS

SEQ ID NO: 33569 - protein, 35 aa, Artificial Sequence
  Non-cyclic GFR-binding peptide
  MOD_RES (1), (2): Xaa is C or S
  MOD_RES (16), (17), (18), (19), (20): Xaa is A or G
  MOD_RES (21), (22), (23), (24): Xaa is A or G or is absent
XXTPTKMSPISMLYKXXXXXXXXXLKYHYGMVVDR

SEQ ID NO: 33570 - protein, 32 aa, Artificial Sequence
  Non-cyclic GFR-binding peptide
  MOD_RES (14), (15), (16), (17), (18): Xaa is A or G
  MOD_RES (19), (20), (21), (22): Xaa is A or G or is absent
TPTKMSATSMLYYXXXXXXXXXLRKHRGMVVD

SEQ ID NO: 33571 - protein, 43 aa, Artificial Sequence
  Non-cyclic GFR-binding peptide
  MOD_RES (6), (7), (41), (43): Xaa is C or S
  MOD_RES (21), (22), (23), (24), (25): Xaa is A or G
  MOD_RES (26), (27), (28), (29): Xaa is A or G or is absent
KASKAXXVPTKLSATSILYYXXXXXXXXXLRKHRGMAVSEXGX

SEQ ID NO: 33572 - protein, 40 aa, Artificial Sequence
  Non-cyclic GFR-binding peptide
  MOD_RES (6), (7), (40): Xaa is C or S
  MOD_RES (21), (22), (23), (24), (25): Xaa is A or G
  MOD_RES (26), (27), (28), (29): Xaa is A or G or is absent
RVPSTXXAPVKTEPISMLYLXXXXXXXXXKFKYEMIVEEX

SEQ ID NO: 33573 - protein, 34 aa, Artificial Sequence
  Non-cyclic GFR-binding peptide
  MOD_RES (3), (4): Xaa is C or S
GPXXTPTKMSATSMLYYNDKQQIILRKHRGMVVD

SEQ ID NO: 33574 - protein, 44 aa, Artificial Sequence
  Non-cyclic GFR-binding peptide
  MOD_RES (6), (7), (41), (43): Xaa is C or S
  MOD_RES (21), (22), (23), (24), (25): Xaa is A or G
  MOD_RES (26), (27), (28), (29): Xaa is A or G or is absent
GIPEPXXVPEKMSPISILYKXXXXXXXXXLKYHYNMTVESXAXR

SEQ ID NO: 33575 - protein, 35 aa, Artificial Sequence
  Non-cyclic GFR-binding peptide
  MOD_RES (2), (3): Xaa is C or S
  MOD_RES (17), (18), (19), (20), (21): Xaa is A or G
  MOD_RES (22), (23), (24), (25): Xaa is A or G or is absent
PXXTPTKMSPISMLYKXXXXXXXXXLKYHYGMVVD

SEQ ID NO: 33576 - protein, 40 aa, Artificial Sequence
  Non-cyclic GFR-binding peptide
  MOD_RES (6), (7), (39): Xaa is C or S
AAPASXXVPARLSATSILYYDAANNVVLRKHRDMVVEAXG

SEQ ID NO: 33577 - protein, 34 aa, Artificial Sequence
  Non-cyclic GFR-binding peptide
  MOD_RES (1), (1): Xaa is C or S
  MOD_RES (15), (16), (17), (18), (19): Xaa is A or G
  MOD_RES (20), (21), (22), (23): Xaa is A or G or is absent
XTPTKMEPISMLYLXXXXXXXXXKFKYEGMVVDR

SEQ ID NO: 33578 - protein, 33 aa, Artificial Sequence
  Non-cyclic GFR-binding peptide
  MOD_RES (14), (15), (16), (17), (18): Xaa is A or G
  MOD_RES (19), (20), (21), (22): Xaa is A or G or is absent
VPEKMSPISILYKXXXXXXXXXLKYHYNMTVES

SEQ ID NO: 33579 - protein, 34 aa, Artificial Sequence
  Non-cyclic GFR-binding peptide
  MOD_RES (1), (2): Xaa is C or S
  MOD_RES (16), (17), (18), (19), (20): Xaa is A or G
  MOD_RES (21), (22), (23), (24): Xaa is A or G or is absent
XXVPTRLEPISILYLXXXXXXXXXKFKYEDMVVE

SEQ ID NO: 33580 - protein, 40 aa, Artificial Sequence
  Non-cyclic GFR-binding peptide
  MOD_RES (5), (6), (37), (39): Xaa is C or S
VPSTXXAPVKTSATSMLYYDNGRVLLLRKHRMIVEEXGXL

SEQ ID NO: 33581 - protein, 40 aa, Artificial Sequence
  Non-cyclic GFR-binding peptide
  MOD_RES (6), (7): Xaa is C or S
  MOD_RES (21), (22), (23), (24), (25): Xaa is A or G
  MOD_RES (26), (27), (28), (29): Xaa is A or G or is absent
STPPTXXVPTRLSATSILYYXXXXXXXXXLRKHRDMVVES

SEQ ID NO: 33582 - protein, 41 aa, Artificial Sequence
  Non-cyclic GFR-binding peptide
  MOD_RES (5), (6), (39), (41): Xaa is C or S
  MOD_RES (20), (21), (22), (23), (24): Xaa is A or G
  MOD_RES (25), (26), (27), (28): Xaa is A or G or is absent
SAAPXXVPQALSPINILYFXXXXXXXXXYGKIPMIVRSXKX

SEQ ID NO: 33583 - protein, 34 aa, Artificial Sequence
  Non-cyclic GFR-binding peptide
  MOD_RES (33), (33): Xaa is C or S
  MOD_RES (14), (15), (16), (17), (18): Xaa is A or G
  MOD_RES (19), (20), (21), (22): Xaa is A or G or is absent
APVKTSATSMLYYXXXXXXXXXLRKHRMIVEEXG

SEQ ID NO: 33584 - protein, 38 aa, Artificial Sequence
  Non-cyclic GFR-binding peptide
  MOD_RES (4), (5), (37): Xaa is C or S
SKAXXVPTKLSATSILYYDKGVVTYLRKHRGMAVSEXG

SEQ ID NO: 33585 - protein, 42 aa, Artificial Sequence
  Non-cyclic GFR-binding peptide
  MOD_RES (4), (5), (39), (41): Xaa is C or S
  MOD_RES (19), (20), (21), (22), (23): Xaa is A or G
  MOD_RES (24), (25), (26), (27): Xaa is A or G or is absent
SKAXXVPTKLSATSILYYXXXXXXXXXLRKHRGMAVSEXGXR

SEQ ID NO: 33586 - protein, 34 aa, Artificial Sequence
  Non-cyclic GFR-binding peptide
  MOD_RES (1), (2): Xaa is C or S
  MOD_RES (16), (17), (18), (19), (20): Xaa is A or G
  MOD_RES (21), (22), (23), (24): Xaa is A or G or is absent
XXVPARLSATSILYYXXXXXXXXXLRKHRDMVVE

SEQ ID NO: 33587 - protein, 34 aa, Artificial Sequence
  Non-cyclic GFR-binding peptide
  MOD_RES (1), (2): Xaa is C or S
  MOD_RES (16), (17), (18), (19), (20): Xaa is A or G
  MOD_RES (21), (22), (23), (24): Xaa is A or G or is absent
XXVPTRLSATSILYYXXXXXXXXXLRKHRDMVVE

SEQ ID NO: 33588 - protein, 36 aa, Artificial Sequence
  Non-cyclic GFR-binding peptide
  MOD_RES (3), (4), (35): Xaa is C or S
STXXAPVKTSATSMLYYDNGRVLLLRKHRMIVEEXG

SEQ ID NO: 33589 - protein, 39 aa, Artificial Sequence
  Non-cyclic GFR-binding peptide
  MOD_RES (4), (5), (38): Xaa is C or S
  MOD_RES (19), (20), (21), (22), (23): Xaa is A or G
  MOD_RES (24), (25), (26), (27): Xaa is A or G or is absent
ASPXXVPQDLSPINILYFXXXXXXXXXYGKIPMVVKSXK

SEQ ID NO: 33590 - protein, 38 aa, Artificial Sequence
  Non-cyclic GFR-binding peptide
  MOD_RES (5), (6): Xaa is C or S
  MOD_RES (20), (21), (22), (23), (24): Xaa is A or G
  MOD_RES (25), (26), (27), (28): Xaa is A or G or is absent
APASXXVPARLSATSILYYXXXXXXXXXLRKHRDMVVE

SEQ ID NO: 33591 - protein, 36 aa, Artificial Sequence
  Non-cyclic GFR-binding peptide
  MOD_RES (1), (34), (36): Xaa is C or S
  MOD_RES (15), (16), (17), (18), (19): Xaa is A or G
  MOD_RES (20), (21), (22), (23): Xaa is A or G or is absent
XVSQDLSPINILYFXXXXXXXXXYGKIPMIVKSXKX

SEQ ID NO: 33592 - protein, 31 aa, Artificial Sequence
  Non-cyclic GFR-binding peptide
VPTRLSPISILYKDSANNVVLKYHYDMVVES

SEQ ID NO: 33593 - protein, 39 aa, Artificial Sequence
  Non-cyclic GFR-binding peptide
  MOD_RES (5), (6), (38): Xaa is C or S
SAGPXXTPTKMSATSMLYYNDKQQIILRKHRGMVVDRXG

SEQ ID NO: 33594 - protein, 34 aa, Artificial Sequence
  Non-cyclic GFR-binding peptide
  MOD_RES (1), (1): Xaa is C or S
  MOD_RES (15), (16), (17), (18), (19): Xaa is A or G
  MOD_RES (20), (21), (22), (23): Xaa is A or G or is absent
XTPTKMSPISMLYKXXXXXXXXXLKYHYGMVVDR

SEQ ID NO: 33595 - protein, 41 aa, Artificial Sequence
  Non-cyclic GFR-binding peptide
  MOD_RES (6), (7), (38), (40): Xaa is C or S
RVPSTXXAPVKTSPISMLYKDNGRVLLLKYHYMIVEEXGXL

SEQ ID NO: 33596 - protein, 35 aa, Artificial Sequence
  Non-cyclic GFR-binding peptide
  MOD_RES (33), (35): Xaa is C or S
  MOD_RES (14), (15), (16), (17), (18): Xaa is A or G
  MOD_RES (19), (20), (21), (22): Xaa is A or G or is absent
APVKTEPISMLYLXXXXXXXXXKFKYEMIVEEXGX

SEQ ID NO: 33597 - protein, 32 aa, Artificial Sequence
  Non-cyclic GFR-binding peptide
  MOD_RES (32), (32): Xaa is C or S
VPEKMSATSILYYDENKNVVLRKHRNMTVESX

SEQ ID NO: 33598 - protein, 42 aa, Artificial Sequence
  Non-cyclic GFR-binding peptide
  MOD_RES (6), (7), (41): Xaa is C or S
  MOD_RES (21), (22), (23), (24), (25): Xaa is A or G
  MOD_RES (26), (27), (28), (29): Xaa is A or G or is absent
HVPKPXXAPTKLEPISVLYLXXXXXXXXXKFKYENMVVRSXG

SEQ ID NO: 33599 - protein, 40 aa, Artificial Sequence
  Non-cyclic GFR-binding peptide
  MOD_RES (4), (5), (39): Xaa is C or S
  MOD_RES (19), (20), (21), (22), (23): Xaa is A or G
  MOD_RES (24), (25), (26), (27): Xaa is A or G or is absent
PEPXXVPEKMSPINILYFXXXXXXXXXYGKIPNMTVESXA

SEQ ID NO: 33600 - protein, 37 aa, Artificial Sequence
  Non-cyclic GFR-binding peptide
  MOD_RES (5), (6): Xaa is C or S
TPPTXXVPTRLSPISILYKDSANNVVLKYHYDMVVES

SEQ ID NO: 33601 - protein, 33 aa, Artificial Sequence
  Non-cyclic GFR-binding peptide
  MOD_RES (1), (32): Xaa is C or S
XVPQALSPINILYFVGRKPKVYGKIPMIVRSXK

SEQ ID NO: 33602 - protein, 35 aa, Artificial Sequence
  Non-cyclic GFR-binding peptide
  MOD_RES (1), (2): Xaa is C or S
  MOD_RES (16), (17), (18), (19), (20): Xaa is A or G
  MOD_RES (21), (22), (23), (24): Xaa is A or G or is absent
XXVPTRLSATSILYYXXXXXXXXXLRKHRDMVVES

SEQ ID NO: 33603 - protein, 38 aa, Artificial Sequence
  Non-cyclic GFR-binding peptide
  MOD_RES (1), (2), (36), (38): Xaa is C or S
  MOD_RES (16), (17), (18), (19), (20): Xaa is A or G
  MOD_RES (21), (22), (23), (24): Xaa is A or G or is absent
XXVPEKMEPISILYLXXXXXXXXXKFKYENMTVESXAX

SEQ ID NO: 33604 - protein, 36 aa, Artificial Sequence
  Non-cyclic GFR-binding peptide
  MOD_RES (5), (6): Xaa is C or S
IPEPXXVPEKMSPINILYFDENKNVVYGKIPNMTVE

SEQ ID NO: 33605 - protein, 31 aa, Artificial Sequence
  Non-cyclic GFR-binding peptide
VPTRLEPISILYLDSANNVVKFKYEDMVVES

SEQ ID NO: 33606 - protein, 37 aa, Artificial Sequence
  Non-cyclic GFR-binding peptide
  MOD_RES (4), (5), (37): Xaa is C or S
AGPXXTPTKMEPISMLYLNDKQQIIKFKYEGMVVDRX

SEQ ID NO: 33607 - protein, 39 aa, Artificial Sequence
  Non-cyclic GFR-binding peptide
  MOD_RES (5), (6), (38): Xaa is C or S
TPPTXXVPTRLEPISILYLDSANNVVKFKYEDMVVESXG

SEQ ID NO: 33608 - protein, 37 aa, Artificial Sequence
  Non-cyclic GFR-binding peptide
  MOD_RES (1), (35), (37): Xaa is C or S
  MOD_RES (15), (16), (17), (18), (19): Xaa is A or G
  MOD_RES (20), (21), (22), (23): Xaa is A or G or is absent
XVPEKMSPISILYKXXXXXXXXXLKYHYNMTVESXAX

SEQ ID NO: 33609 - protein, 44 aa, Artificial Sequence
  Non-cyclic GFR-binding peptide
  MOD_RES (6), (7), (41), (43): Xaa is C or S
  MOD_RES (21), (22), (23), (24), (25): Xaa is A or G
  MOD_RES (26), (27), (28), (29): Xaa is A or G or is absent
HVPKPXXAPTKLSPISVLYKXXXXXXXXXLKYHYNMVVRSXGXH

SEQ ID NO: 33610 - protein, 38 aa, Artificial Sequence
  Non-cyclic GFR-binding peptide
  MOD_RES (1), (35), (37): Xaa is C or S
  MOD_RES (15), (16), (17), (18), (19): Xaa is A or G
  MOD_RES (20), (21), (22), (23): Xaa is A or G or is absent
XVPEKMEPISILYLXXXXXXXXXKFKYENMTVESXAXR

SEQ ID NO: 33611 - protein, 36 aa, Artificial Sequence
  Non-cyclic GFR-binding peptide
  MOD_RES (4), (5), (36): Xaa is C or S
PSTXXAPVKTSATSMLYYDNGRVLLLRKHRMIVEEX

SEQ ID NO: 33612 - protein, 34 aa, Artificial Sequence
  Non-cyclic GFR-binding peptide
  MOD_RES (1), (1): Xaa is C or S
  MOD_RES (15), (16), (17), (18), (19): Xaa is A or G
  MOD_RES (20), (21), (22), (23): Xaa is A or G or is absent
XVPTRLSATSILYYXXXXXXXXXLRKHRDMVVES

SEQ ID NO: 33613 - protein, 33 aa, Artificial Sequence
  Non-cyclic GFR-binding peptide
  MOD_RES (1), (33): Xaa is C or S
XTPTKMSPISMLYKNDKQQIILKYHYGMVVDRX

SEQ ID NO: 33614 - protein, 37 aa, Artificial Sequence
  Non-cyclic GFR-binding peptide
  MOD_RES (6), (7): Xaa is C or S
KASKAXXVPTKLSATSILYYDKGVVTYLRKHRGMAVS

SEQ ID NO: 33615 - protein, 36 aa, Artificial Sequence
  Non-cyclic GFR-binding peptide
  MOD_RES (2), (3): Xaa is C or S
  MOD_RES (17), (18), (19), (20), (21): Xaa is A or G
  MOD_RES (22), (23), (24), (25): Xaa is A or G or is absent
PXXVPEKMSPISILYKXXXXXXXXXLKYHYNMTVES

SEQ ID NO: 33616 - protein, 42 aa, Artificial Sequence
  Non-cyclic GFR-binding peptide
  MOD_RES (6), (7), (39), (41): Xaa is C or S
GSAGPXXTPTKMSATSMLYYNDKQQIILRKHRGMVVDRXGXS

SEQ ID NO: 33617 - protein, 43 aa, Artificial Sequence
  Non-cyclic GFR-binding peptide
  MOD_RES (5), (6), (40), (42): Xaa is C or S
  MOD_RES (20), (21), (22), (23), (24): Xaa is A or G
  MOD_RES (25), (26), (27), (28): Xaa is A or G or is absent
IPEPXXVPEKMSPINILYFXXXXXXXXXYGKIPNMTVESXAXR

SEQ ID NO: 33618 - protein, 35 aa, Artificial Sequence
  Non-cyclic GFR-binding peptide
  MOD_RES (2), (3): Xaa is C or S
  MOD_RES (17), (18), (19), (20), (21): Xaa is A or G
  MOD_RES (22), (23), (24), (25): Xaa is A or G or is absent
PXXVPEKMSATSILYYXXXXXXXXXLRKHRNMTVE

SEQ ID NO: 33619 - protein, 36 aa, Artificial Sequence
  Non-cyclic GFR-binding peptide
  MOD_RES (4), (5): Xaa is C or S
PPTXXVPTRLSATSILYYDSANNVVLRKHRDMVVES

SEQ ID NO: 33620 - protein, 37 aa, Artificial Sequence
  Non-cyclic GFR-binding peptide
  MOD_RES (2), (3), (35), (37): Xaa is C or S
TXXVPTRLSATSILYYDSANNVVLRKHRDMVVESXGX

SEQ ID NO: 33621 - protein, 37 aa, Artificial Sequence
  Non-cyclic GFR-binding peptide
  MOD_RES (4), (5), (36): Xaa is C or S
PSTXXAPVKTSPISMLYKDNGRVLLLKYHYMIVEEXG

SEQ ID NO: 33622 - protein, 43 aa, Artificial Sequence
  Non-cyclic GFR-binding peptide
  MOD_RES (6), (7), (41), (43): Xaa is C or S
  MOD_RES (21), (22), (23), (24), (25): Xaa is A or G
  MOD_RES (26), (27), (28), (29): Xaa is A or G or is absent
AAPASXXVPARLSATSILYYXXXXXXXXXLRKHRDMVVEAXGX

SEQ ID NO: 33623 - protein, 35 aa, Artificial Sequence
  Non-cyclic GFR-binding peptide
  MOD_RES (4), (5): Xaa is C or S
PEPXXVPEKMNAISILYFDENKNVVLKKYRNMTVE

SEQ ID NO: 33624 - protein, 32 aa, Artificial Sequence
  Non-cyclic GFR-binding peptide
  MOD_RES (31), (31): Xaa is C or S
APVKTEPISMLYLDNGRVLLKFKYEMIVEEXG

SEQ ID NO: 33625 - protein, 43 aa, Artificial Sequence
  Non-cyclic GFR-binding peptide
  MOD_RES (5), (6), (40), (42): Xaa is C or S
  MOD_RES (20), (21), (22), (23), (24): Xaa is A or G
  MOD_RES (25), (26), (27), (28): Xaa is A or G or is absent
IPEPXXVPEKMSATSILYYXXXXXXXXXLRKHRNMTVESXAXR

SEQ ID NO: 33626 - protein, 37 aa, Artificial Sequence
  Non-cyclic GFR-binding peptide
  MOD_RES (34), (36): Xaa is C or S
  MOD_RES (14), (15), (16), (17), (18): Xaa is A or G
  MOD_RES (19), (20), (21), (22): Xaa is A or G or is absent
VPTRLSPISILYKXXXXXXXXXLKYHYDMVVESXGXR

SEQ ID NO: 33627 - protein, 35 aa, Artificial Sequence
  Non-cyclic GFR-binding peptide
  MOD_RES (2), (3): Xaa is C or S
  MOD_RES (17), (18), (19), (20), (21): Xaa is A or G
  MOD_RES (22), (23), (24), (25): Xaa is A or G or is absent
PXXTPTKMSATSMLYYXXXXXXXXXLRKHRGMVVD

SEQ ID NO: 33628 - protein, 33 aa, Artificial Sequence
  Non-cyclic GFR-binding peptide
  MOD_RES (2), (3): Xaa is C or S
PXXVPEKMEPISILYLDENKNVVKFKYENMTVE

SEQ ID NO: 33629 - protein, 39 aa, Artificial Sequence
  Non-cyclic GFR-binding peptide
  MOD_RES (3), (4), (36), (38): Xaa is C or S
PTXXVPTRLSPISILYKDSANNVVLKYHYDMVVESXGXR

SEQ ID NO: 33630 - protein, 36 aa, Artificial Sequence
  Non-cyclic GFR-binding peptide
  MOD_RES (2), (3), (35): Xaa is C or S
TXXVPTRLSPISILYKDSANNVVLKYHYDMVVESXG

SEQ ID NO: 33631 - protein, 35 aa, Artificial Sequence
  Non-cyclic GFR-binding peptide
  MOD_RES (3), (4), (35): Xaa is C or S
SPXXVPQDLSPINILYFVGRTPKVYGKIPMVVKSX

SEQ ID NO: 33632 - protein, 42 aa, Artificial Sequence
  Non-cyclic GFR-binding peptide
  MOD_RES (4), (5), (39), (41): Xaa is C or S
  MOD_RES (19), (20), (21), (22), (23): Xaa is A or G
  MOD_RES (24), (25), (26), (27): Xaa is A or G or is absent
PEPXXVPEKMNAISILYFXXXXXXXXXLKKYRNMTVESXAXR

SEQ ID NO: 33633 - protein, 33 aa, Artificial Sequence
  Non-cyclic GFR-binding peptide
  MOD_RES (1), (1): Xaa is C or S
  MOD_RES (15), (16), (17), (18), (19): Xaa is A or G
  MOD_RES (20), (21), (22), (23): Xaa is A or G or is absent
XVPTRLEPISILYLXXXXXXXXXKFKYEDMVVE

SEQ ID NO: 33634 - protein, 38 aa, Artificial Sequence
  Non-cyclic GFR-binding peptide
  MOD_RES (1), (35), (37): Xaa is C or S
  MOD_RES (15), (16), (17), (18), (19): Xaa is A or G
  MOD_RES (20), (21), (22), (23): Xaa is A or G or is absent
XVPTRLSATSILYYXXXXXXXXXLRKHRDMVVESXGXR

SEQ ID NO: 33635 - protein, 36 aa, Artificial Sequence
  Non-cyclic GFR-binding peptide
  MOD_RES (1), (2), (36): Xaa is C or S
  MOD_RES (16), (17), (18), (19), (20): Xaa is A or G
  MOD_RES (21), (22), (23), (24): Xaa is A or G or is absent
XXVPEKMSPINILYFXXXXXXXXXYGKIPNMTVESX

SEQ ID NO: 33636 - protein, 35 aa, Artificial Sequence
  Non-cyclic GFR-binding peptide
  MOD_RES (4), (5): Xaa is C or S
ASPXXVPQDLSPINILYFVGRTPKVYGKIPMVVKS

SEQ ID NO: 33637 - protein, 40 aa, Artificial Sequence
  Non-cyclic GFR-binding peptide
  MOD_RES (6), (7), (38), (40): Xaa is C or S
ASAAPXXVPQALSPINILYFVGRKPKVYGKIPMIVRSXKX

SEQ ID NO: 33638 - protein, 42 aa, Artificial Sequence
  Non-cyclic GFR-binding peptide
  MOD_RES (5), (6), (39), (41): Xaa is C or S
  MOD_RES (20), (21), (22), (23), (24): Xaa is A or G
  MOD_RES (25), (26), (27), (28): Xaa is A or G or is absent
SASPXXVPQDLSPINILYFXXXXXXXXXYGKIPMVVKSXKXS

SEQ ID NO: 33639 - protein, 34 aa, Artificial Sequence
  Non-cyclic GFR-binding peptide
  MOD_RES (34), (34): Xaa is C or S
  MOD_RES (14), (15), (16), (17), (18): Xaa is A or G
  MOD_RES (19), (20), (21), (22): Xaa is A or G or is absent
VPEKMEPISILYLXXXXXXXXXKFKYENMTVESX

SEQ ID NO: 33640 - protein, 40 aa, Artificial Sequence
  Non-cyclic GFR-binding peptide
  MOD_RES (6), (7), (38), (40): Xaa is C or S
RVPSTXXAPVKTEPISMLYLDNGRVLLKFKYEMIVEEXGX

SEQ ID NO: 33641 - protein, 41 aa, Artificial Sequence
  Non-cyclic GFR-binding peptide
  MOD_RES (4), (5), (39), (41): Xaa is C or S
  MOD_RES (19), (20), (21), (22), (23): Xaa is A or G
  MOD_RES (24), (25), (26), (27): Xaa is A or G or is absent
PASXXVPARLSATSILYYXXXXXXXXXLRKHRDMVVEAXGX

SEQ ID NO: 33642 - protein, 42 aa, Artificial Sequence
  Non-cyclic GFR-binding peptide
  MOD_RES (4), (5), (39), (41): Xaa is C or S
  MOD_RES (19), (20), (21), (22), (23): Xaa is A or G
  MOD_RES (24), (25), (26), (27): Xaa is A or G or is absent
PEPXXVPEKMEPISILYLXXXXXXXXXKFKYENMTVESXAXR

SEQ ID NO: 33643 - protein, 34 aa, Artificial Sequence
  Non-cyclic GFR-binding peptide
  MOD_RES (33), (33): Xaa is C or S
  MOD_RES (14), (15), (16), (17), (18): Xaa is A or G
  MOD_RES (19), (20), (21), (22): Xaa is A or G or is absent
VPQDLSPINILYFXXXXXXXXXYGKIPMVVKSXK

SEQ ID NO: 33644 - protein, 39 aa, Artificial Sequence
  Non-cyclic GFR-binding peptide
  MOD_RES (5), (6): Xaa is C or S
  MOD_RES (20), (21), (22), (23), (24): Xaa is A or G
  MOD_RES (25), (26), (27), (28): Xaa is A or G or is absent
SAGPXXTPTKMSPISMLYKXXXXXXXXXLKYHYGMVVDR

SEQ ID NO: 33645 - protein, 38 aa, Artificial Sequence
  Non-cyclic GFR-binding peptide
  MOD_RES (1), (2), (35), (37): Xaa is C or S
  MOD_RES (16), (17), (18), (19), (20): Xaa is A or G
  MOD_RES (21), (22), (23), (24): Xaa is A or G or is absent
XXVSQDLSPINILYFXXXXXXXXXYGKIPMIVKSXKXS

SEQ ID NO: 33646 - protein, 41 aa, Artificial Sequence
  Non-cyclic GFR-binding peptide
  MOD_RES (3), (4), (38), (40): Xaa is C or S
  MOD_RES (18), (19), (20), (21), (22): Xaa is A or G
  MOD_RES (23), (24), (25), (26): Xaa is A or G or is absent
EPXXVPEKMSATSILYYXXXXXXXXXLRKHRNMTVESXAXR

SEQ ID NO: 33647 - protein, 34 aa, Artificial Sequence
  Non-cyclic GFR-binding peptide
  MOD_RES (3), (4): Xaa is C or S
GPXXTPTKMSPISMLYKNDKQQIILKYHYGMVVD

SEQ ID NO: 33648 - protein, 34 aa, Artificial Sequence
  Non-cyclic GFR-binding peptide
  MOD_RES (1), (33): Xaa is C or S
XVPTKLSATSILYYDKGVVTYLRKHRGMAVSEXG

SEQ ID NO: 33649 - protein, 35 aa, Artificial Sequence
  Non-cyclic GFR-binding peptide
  MOD_RES (1), (34): Xaa is C or S
  MOD_RES (15), (16), (17), (18), (19): Xaa is A or G
  MOD_RES (20), (21), (22), (23): Xaa is A or G or is absent
XAPVKTSATSMLYYXXXXXXXXXLRKHRMIVEEXG

SEQ ID NO: 33650 - protein, 35 aa, Artificial Sequence
  Non-cyclic GFR-binding peptide
  MOD_RES (34), (34): Xaa is C or S
  MOD_RES (14), (15), (16), (17), (18): Xaa is A or G
  MOD_RES (19), (20), (21), (22): Xaa is A or G or is absent
TPTKMEPISMLYLXXXXXXXXXKFKYEGMVVDRXG

SEQ ID NO: 33651 - protein, 38 aa, Artificial Sequence
  Non-cyclic GFR-binding peptide
  MOD_RES (4), (5): Xaa is C or S
  MOD_RES (19), (20), (21), (22), (23): Xaa is A or G
  MOD_RES (24), (25), (26), (27): Xaa is A or G or is absent
PPTXXVPTRLSATSILYYXXXXXXXXXLRKHRDMVVES

SEQ ID NO: 33652 - protein, 33 aa, Artificial Sequence
  Non-cyclic GFR-binding peptide
  MOD_RES (1), (1): Xaa is C or S
  MOD_RES (15), (16), (17), (18), (19): Xaa is A or G
  MOD_RES (20), (21), (22), (23): Xaa is A or G or is absent
XVPEKMNAISILYFXXXXXXXXXLKKYRNMTVE

SEQ ID NO: 33653 - protein, 33 aa, Artificial Sequence
  Non-cyclic GFR-binding peptide
  MOD_RES (1), (2): Xaa is C or S
XXTPTKMSPISMLYKNDKQQIILKYHYGMVVDR

SEQ ID NO: 33654 - protein, 38 aa, Artificial Sequence
  Non-cyclic GFR-binding peptide
  MOD_RES (1), (35), (37): Xaa is C or S
  MOD_RES (15), (16), (17), (18), (19): Xaa is A or G
  MOD_RES (20), (21), (22), (23): Xaa is A or G or is absent
XVPTRLEPISILYLXXXXXXXXXKFKYEDMVVESXGXR

SEQ ID NO: 33655 - protein, 34 aa, Artificial Sequence
  Non-cyclic GFR-binding peptide
  MOD_RES (1), (33): Xaa is C or S
XVPTRLSPISILYKDSANNVVLKYHYDMVVESXG

SEQ ID NO: 33656 - protein, 39 aa, Artificial Sequence
  Non-cyclic GFR-binding peptide
  MOD_RES (5), (6): Xaa is C or S
  MOD_RES (20), (21), (22), (23), (24): Xaa is A or G
  MOD_RES (25), (26), (27), (28): Xaa is A or G or is absent
SAGPXXTPTKMEPISMLYLXXXXXXXXXKFKYEGMVVDR

SEQ ID NO: 33657 - protein, 35 aa, Artificial Sequence
  Non-cyclic GFR-binding peptide
  MOD_RES (1), (2), (35): Xaa is C or S
  MOD_RES (16), (17), (18), (19), (20): Xaa is A or G
  MOD_RES (21), (22), (23), (24): Xaa is A or G or is absent
XXVPQDLSPINILYFXXXXXXXXXYGKIPMVVKSX

SEQ ID NO: 33658 - protein, 37 aa, Artificial Sequence
  Non-cyclic GFR-binding peptide
  MOD_RES (1), (2), (34), (36): Xaa is C or S
XXVPTRLSPISILYKDSANNVVLKYHYDMVVESXGXR

SEQ ID NO: 33659 - protein, 36 aa, Artificial Sequence
  Non-cyclic GFR-binding peptide
  MOD_RES (3), (4), (36): Xaa is C or S
KAXXVPTKLSATSILYYDKGVVTYLRKHRGMAVSEX

SEQ ID NO: 33660 - protein, 43 aa, Artificial Sequence
  Non-cyclic GFR-binding peptide
  MOD_RES (6), (7), (40), (42): Xaa is C or S
  MOD_RES (21), (22), (23), (24), (25): Xaa is A or G
  MOD_RES (26), (27), (28), (29): Xaa is A or G or is absent
ASASPXXVSQDLSPINILYFXXXXXXXXXYGKIPMIVKSXKXS

SEQ ID NO: 33661 - protein, 35 aa, Artificial Sequence
  Non-cyclic GFR-binding peptide
  MOD_RES (1), (2), (34): Xaa is C or S
XXVPEKMSPISILYKDENKNVVLKYHYNMTVESXA

SEQ ID NO: 33662 - protein, 41 aa, Artificial Sequence
  Non-cyclic GFR-binding peptide
  MOD_RES (6), (7), (38), (40): Xaa is C or S
ASAAPXXVPQALSPINILYFVGRKPKVYGKIPMIVRSXKXS

SEQ ID NO: 33663 - protein, 40 aa, Artificial Sequence
  Non-cyclic GFR-binding peptide
  MOD_RES (6), (7), (40): Xaa is C or S
  MOD_RES (21), (22), (23), (24), (25): Xaa is A or G
  MOD_RES (26), (27), (28), (29): Xaa is A or G or is absent
ASASPXXVPQDLSPINILYFXXXXXXXXXYGKIPMVVKSX

SEQ ID NO: 33664 - protein, 39 aa, Artificial Sequence
  Non-cyclic GFR-binding peptide
  MOD_RES (5), (6): Xaa is C or S
  MOD_RES (20), (21), (22), (23), (24): Xaa is A or G
  MOD_RES (25), (26), (27), (28): Xaa is A or G or is absent
TPPTXXVPTRLSATSILYYXXXXXXXXXLRKHRDMVVES

SEQ ID NO: 33665 - protein, 36 aa, Artificial Sequence
  Non-cyclic GFR-binding peptide
  MOD_RES (1), (35): Xaa is C or S
  MOD_RES (15), (16), (17), (18), (19): Xaa is A or G
  MOD_RES (20), (21), (22), (23): Xaa is A or G or is absent
XVPEKMSPINILYFXXXXXXXXXYGKIPNMTVESXA

SEQ ID NO: 33666 - protein, 33 aa, Artificial Sequence
  Non-cyclic GFR-binding peptide
  MOD_RES (2), (3): Xaa is C or S
PXXVPEKMSPISILYKDENKNVVLKYHYNMTVE

SEQ ID NO: 33667 - protein, 35 aa, Artificial Sequence
  Non-cyclic GFR-binding peptide
  MOD_RES (2), (3): Xaa is C or S
  MOD_RES (17), (18), (19), (20), (21): Xaa is A or G
  MOD_RES (22), (23), (24), (25): Xaa is A or G or is absent
PXXVPEKMSPISILYKXXXXXXXXXLKYHYNMTVE

SEQ ID NO: 33668 - protein, 37 aa, Artificial Sequence
  Non-cyclic GFR-binding peptide
  MOD_RES (2), (3), (36): Xaa is C or S
  MOD_RES (17), (18), (19), (20), (21): Xaa is A or G
  MOD_RES (22), (23), (24), (25): Xaa is A or G or is absent
TXXAPVKTEPISMLYLXXXXXXXXXKFKYEMIVEEXG

SEQ ID NO: 33669 - protein, 40 aa, Artificial Sequence
  Non-cyclic GFR-binding peptide
  MOD_RES (4), (5), (37), (39): Xaa is C or S
PASXXVPARLSATSILYYDAANNVVLRKHRDMVVEAXGXR

SEQ ID NO: 33670 - protein, 34 aa, Artificial Sequence
  Non-cyclic GFR-binding peptide
  MOD_RES (1), (2): Xaa is C or S
  MOD_RES (16), (17), (18), (19), (20): Xaa is A or G
  MOD_RES (21), (22), (23), (24): Xaa is A or G or is absent
XXTPTKMSPISMLYKXXXXXXXXXLKYHYGMVVD

SEQ ID NO: 33671 - protein, 41 aa, Artificial Sequence
  Non-cyclic GFR-binding peptide
  MOD_RES (3), (4), (38), (40): Xaa is C or S
  MOD_RES (18), (19), (20), (21), (22): Xaa is A or G
  MOD_RES (23), (24), (25), (26): Xaa is A or G or is absent
GPXXTPTKMSATSMLYYXXXXXXXXXLRKHRGMVVDRXGXS

SEQ ID NO: 33672 - protein, 37 aa, Artificial Sequence
  Non-cyclic GFR-binding peptide
  MOD_RES (2), (3), (37): Xaa is C or S
  MOD_RES (17), (18), (19), (20), (21): Xaa is A or G
  MOD_RES (22), (23), (24), (25): Xaa is A or G or is absent
PXXVPEKMNAISILYFXXXXXXXXXLKKYRNMTVESX

SEQ ID NO: 33673 - protein, 39 aa, Artificial Sequence
  Non-cyclic GFR-binding peptide
  MOD_RES (3), (4), (36), (38): Xaa is C or S
GPXXTPTKMSPISMLYKNDKQQIILKYHYGMVVDRXGXS

SEQ ID NO: 33674 - protein, 36 aa, Artificial Sequence
  Non-cyclic GFR-binding peptide
  MOD_RES (2), (3), (34), (36): Xaa is C or S
PXXVPQALSPINILYFVGRKPKVYGKIPMIVRSXKX

SEQ ID NO: 33675 - protein, 36 aa, Artificial Sequence
  Non-cyclic GFR-binding peptide
  MOD_RES (2), (3): Xaa is C or S
  MOD_RES (17), (18), (19), (20), (21): Xaa is A or G
  MOD_RES (22), (23), (24), (25): Xaa is A or G or is absent
PXXTPTKMEPISMLYLXXXXXXXXXKFKYEGMVVDR

SEQ ID NO: 33676 - protein, 35 aa, Artificial Sequence
  Non-cyclic GFR-binding peptide
  MOD_RES (1), (2): Xaa is C or S
  MOD_RES (16), (17), (18), (19), (20): Xaa is A or G
  MOD_RES (21), (22), (23), (24): Xaa is A or G or is absent
XXTPTKMEPISMLYLXXXXXXXXXKFKYEGMVVDR

SEQ ID NO: 33677 - protein, 43 aa, Artificial Sequence
  Non-cyclic GFR-binding peptide
  MOD_RES (6), (7), (40), (42): Xaa is C or S
  MOD_RES (21), (22), (23), (24), (25): Xaa is A or G
  MOD_RES (26), (27), (28), (29): Xaa is A or G or is absent
RVPSTXXAPVKTSPISMLYKXXXXXXXXXLKYHYMIVEEXGXL

SEQ ID NO: 33678 - protein, 39 aa, Artificial Sequence
  Non-cyclic GFR-binding peptide
  MOD_RES (4), (5), (38): Xaa is C or S
  MOD_RES (19), (20), (21), (22), (23): Xaa is A or G
  MOD_RES (24), (25), (26), (27): Xaa is A or G or is absent
PSTXXAPVKTSPISMLYKXXXXXXXXXLKYHYMIVEEXG

SEQ ID NO: 33679 - protein, 40 aa, Artificial Sequence
  Non-cyclic GFR-binding peptide
  MOD_RES (5), (6), (39): Xaa is C or S
  MOD_RES (20), (21), (22), (23), (24): Xaa is A or G
  MOD_RES (25), (26), (27), (28): Xaa is A or G or is absent
VPSTXXAPVKTSATSMLYYXXXXXXXXXLRKHRMIVEEXG

SEQ ID NO: 33680 - protein, 35 aa, Artificial Sequence
  Non-cyclic GFR-binding peptide
  MOD_RES (1), (2), (33), (35): Xaa is C or S
XXAPVKTEPISMLYLDNGRVLLKFKYEMIVEEXGX

SEQ ID NO: 33681 - protein, 37 aa, Artificial Sequence
  Non-cyclic GFR-binding peptide
  MOD_RES (2), (3), (35), (37): Xaa is C or S
SXXVPARLSATSILYYDAANNVVLRKHRDMVVEAXGX

SEQ ID NO: 33682 - protein, 36 aa, Artificial Sequence
  Non-cyclic GFR-binding peptide
  MOD_RES (3), (4), (35): Xaa is C or S
STXXAPVKTSPISMLYKDNGRVLLLKYHYMIVEEXG

SEQ ID NO: 33683 - protein, 36 aa, Artificial Sequence
  Non-cyclic GFR-binding peptide
  MOD_RES (4), (5): Xaa is C or S
AGPXXTPTKMEPISMLYLNDKQQIIKFKYEGMVVDR

SEQ ID NO: 33684 - protein, 37 aa, Artificial Sequence
  Non-cyclic GFR-binding peptide
  MOD_RES (4), (5), (37): Xaa is C or S
PEPXXVPEKMSPINILYFDENKNVVYGKIPNMTVESX

SEQ ID NO: 33685 - protein, 32 aa, Artificial Sequence
  Non-cyclic GFR-binding peptide
  MOD_RES (1), (2): Xaa is C or S
XXVPQALSPINILYFVGRKPKVYGKIPMIVRS

SEQ ID NO: 33686 - protein, 36 aa, Artificial Sequence
  Non-cyclic GFR-binding peptide
  MOD_RES (5), (6): Xaa is C or S
TPPTXXVPTRLEPISILYLDSANNVVKFKYEDMVVE

SEQ ID NO: 33687 - protein, 35 aa, Artificial Sequence
  Non-cyclic GFR-binding peptide
  MOD_RES (34), (34): Xaa is C or S
  MOD_RES (14), (15), (16), (17), (18): Xaa is A or G
  MOD_RES (19), (20), (21), (22): Xaa is A or G or is absent
TPTKMSPISMLYKXXXXXXXXXLKYHYGMVVDRXG

SEQ ID NO: 33688 - protein, 35 aa, Artificial Sequence
  Non-cyclic GFR-binding peptide
  MOD_RES (2), (3): Xaa is C or S
  MOD_RES (17), (18), (19), (20), (21): Xaa is A or G
  MOD_RES (22), (23), (24), (25): Xaa is A or G or is absent
PXXVPEKMEPISILYLXXXXXXXXXKFKYENMTVE

SEQ ID NO: 33689 - protein, 36 aa, Artificial Sequence
  Non-cyclic GFR-binding peptide
  MOD_RES (3), (4), (35): Xaa is C or S
SPXXVPQDLSPINILYFVGRTPKVYGKIPMVVKSXK

SEQ ID NO: 33690 - protein, 40 aa, Artificial Sequence
  Non-cyclic GFR-binding peptide
  MOD_RES (6), (7): Xaa is C or S
  MOD_RES (21), (22), (23), (24), (25): Xaa is A or G
  MOD_RES (26), (27), (28), (29): Xaa is A or G or is absent
HVPKPXXAPTKLSATSVLYYXXXXXXXXXLRKHRNMVVRS

SEQ ID NO: 33691 - protein, 36 aa, Artificial Sequence
  Non-cyclic GFR-binding peptide
  MOD_RES (3), (4), (36): Xaa is C or S
EPXXVPEKMSPINILYFDENKNVVYGKIPNMTVESX

SEQ ID NO: 33692 - protein, 40 aa, Artificial Sequence
  Non-cyclic GFR-binding peptide
  MOD_RES (4), (5), (37), (39): Xaa is C or S
AGPXXTPTKMSPISMLYKNDKQQIILKYHYGMVVDRXGXS

SEQ ID NO: 33693 - protein, 37 aa, Artificial Sequence
  Non-cyclic GFR-binding peptide
  MOD_RES (1), (35), (37): Xaa is C or S
  MOD_RES (15), (16), (17), (18), (19): Xaa is A or G
  MOD_RES (20), (21), (22), (23): Xaa is A or G or is absent
XVPEKMNAISILYFXXXXXXXXXLKKYRNMTVESXAX

SEQ ID NO: 33694 - protein, 37 aa, Artificial Sequence
  Non-cyclic GFR-binding peptide
  MOD_RES (2), (3), (35), (37): Xaa is C or S
PXXVPEKMSPINILYFDENKNVVYGKIPNMTVESXAX

SEQ ID NO: 33695 - protein, 34 aa, Artificial Sequence
  Non-cyclic GFR-binding peptide
  MOD_RES (33), (33): Xaa is C or S
  MOD_RES (14), (15), (16), (17), (18): Xaa is A or G
  MOD_RES (19), (20), (21), (22): Xaa is A or G or is absent
VPQALSPINILYFXXXXXXXXXYGKIPMIVRSXK

SEQ ID NO: 33696 - protein, 35 aa, Artificial Sequence
  Non-cyclic GFR-binding peptide
  MOD_RES (34), (34): Xaa is C or S
  MOD_RES (14), (15), (16), (17), (18): Xaa is A or G
  MOD_RES (19), (20), (21), (22): Xaa is A or G or is absent
VPTKLSATSILYYXXXXXXXXXLRKHRGMAVSEXG

SEQ ID NO: 33697 - protein, 41 aa, Artificial Sequence
  Non-cyclic GFR-binding peptide
  MOD_RES (6), (7), (39), (41): Xaa is C or S
AAPASXXVPARLSATSILYYDAANNVVLRKHRDMVVEAXGX

SEQ ID NO: 33698 - protein, 35 aa, Artificial Sequence
  Non-cyclic GFR-binding peptide
  MOD_RES (32), (34): Xaa is C or S
VPTRLEPISILYLDSANNVVKFKYEDMVVESXGXR

SEQ ID NO: 33699 - protein, 37 aa, Artificial Sequence
  Non-cyclic GFR-binding peptide
  MOD_RES (1), (2), (34), (36): Xaa is C or S
XXVPEKMSPINILYFDENKNVVYGKIPNMTVESXAXR

SEQ ID NO: 33700 - protein, 36 aa, Artificial Sequence
  Non-cyclic GFR-binding peptide
  MOD_RES (2), (3): Xaa is C or S
  MOD_RES (17), (18), (19), (20), (21): Xaa is A or G
  MOD_RES (22), (23), (24), (25): Xaa is A or G or is absent
PXXTPTKMSPISMLYKXXXXXXXXXLKYHYGMVVDR

SEQ ID NO: 33701 - protein, 37 aa, Artificial Sequence
  Non-cyclic GFR-binding peptide
  MOD_RES (4), (5), (37): Xaa is C or S
AGPXXTPTKMSATSMLYYNDKQQIILRKHRGMVVDRX

SEQ ID NO: 33702 - protein, 37 aa, Artificial Sequence
  Non-cyclic GFR-binding peptide
  MOD_RES (2), (3), (37): Xaa is C or S
  MOD_RES (17), (18), (19), (20), (21): Xaa is A or G
  MOD_RES (22), (23), (24), (25): Xaa is A or G or is absent
PXXTPTKMSATSMLYYXXXXXXXXXLRKHRGMVVDRX

SEQ ID NO: 33703 - protein, 40 aa, Artificial Sequence
  Non-cyclic GFR-binding peptide
  MOD_RES (3), (4), (37), (39): Xaa is C or S
  MOD_RES (18), (19), (20), (21), (22): Xaa is A or G
  MOD_RES (23), (24), (25), (26): Xaa is A or G or is absent
SPXXVSQDLSPINILYFXXXXXXXXXYGKIPMIVKSXKXS

SEQ ID NO: 33704 - protein, 35 aa, Artificial Sequence
  Non-cyclic GFR-binding peptide
  MOD_RES (2), (3), (35): Xaa is C or S
PXXTPTKMSPISMLYKNDKQQIILKYHYGMVVDRX

SEQ ID NO: 33705 - protein, 36 aa, Artificial Sequence
  Non-cyclic GFR-binding peptide
  MOD_RES (4), (5): Xaa is C or S
AGPXXTPTKMSATSMLYYNDKQQIILRKHRGMVVDR

SEQ ID NO: 33706 - protein, 41 aa, Artificial Sequence
  Non-cyclic GFR-binding peptide
  MOD_RES (6), (7), (39), (41): Xaa is C or S
STPPTXXVPTRLSATSILYYDSANNVVLRKHRDMVVESXGX

SEQ ID NO: 33707 - protein, 42 aa, Artificial Sequence
  Non-cyclic GFR-binding peptide
  MOD_RES (6), (7), (41): Xaa is C or S
  MOD_RES (21), (22), (23), (24), (25): Xaa is A or G
  MOD_RES (26), (27), (28), (29): Xaa is A or G or is absent
GIPEPXXVPEKMSPISILYKXXXXXXXXXLKYHYNMTVESXA

SEQ ID NO: 33708 - protein, 32 aa, Artificial Sequence
  Non-cyclic GFR-binding peptide
  MOD_RES (14), (15), (16), (17), (18): Xaa is A or G
  MOD_RES (19), (20), (21), (22): Xaa is A or G or is absent
VPARLSATSILYYXXXXXXXXXLRKHRDMVVE

SEQ ID NO: 33709 - protein, 32 aa, Artificial Sequence
  Non-cyclic GFR-binding peptide
  MOD_RES (32), (32): Xaa is C or S
VPEKMEPISILYLDENKNVVKFKYENMTVESX

SEQ ID NO: 33710 - protein, 36 aa, Artificial Sequence
  Non-cyclic GFR-binding peptide
  MOD_RES (1), (2), (34), (36): Xaa is C or S
XXVPTRLEPISILYLDSANNVVKFKYEDMVVESXGX

SEQ ID NO: 33711 - protein, 39 aa, Artificial Sequence
  Non-cyclic GFR-binding peptide
  MOD_RES (4), (5), (39): Xaa is C or S
  MOD_RES (19), (20), (21), (22), (23): Xaa is A or G
  MOD_RES (24), (25), (26), (27): Xaa is A or G or is absent
PASXXVPARLSATSILYYXXXXXXXXXLRKHRDMVVEAX

SEQ ID NO: 33712 - protein, 42 aa, Artificial Sequence
  Non-cyclic GFR-binding peptide
  MOD_RES (5), (6), (40), (42): Xaa is C or S
  MOD_RES (20), (21), (22), (23), (24): Xaa is A or G
  MOD_RES (25), (26), (27), (28): Xaa is A or G or is absent
IPEPXXVPEKMSPISILYKXXXXXXXXXLKYHYNMTVESXAX

SEQ ID NO: 33713 - protein, 40 aa, Artificial Sequence
  Non-cyclic GFR-binding peptide
  MOD_RES (3), (4), (38), (40): Xaa is C or S
  MOD_RES (18), (19), (20), (21), (22): Xaa is A or G
  MOD_RES (23), (24), (25), (26): Xaa is A or G or is absent
PTXXVPTRLSATSILYYXXXXXXXXXLRKHRDMVVESXGX

SEQ ID NO: 33714 - protein, 37 aa, Artificial Sequence
  Non-cyclic GFR-binding peptide
  MOD_RES (6), (7): Xaa is C or S
GIPEPXXVPEKMNAISILYFDENKNVVLKKYRNMTVE

SEQ ID NO: 33715 - protein, 36 aa, Artificial Sequence
  Non-cyclic GFR-binding peptide
  MOD_RES (34), (36): Xaa is C or S
  MOD_RES (14), (15), (16), (17), (18): Xaa is A or G
  MOD_RES (19), (20), (21), (22): Xaa is A or G or is absent
VPTRLEPISILYLXXXXXXXXXKFKYEDMVVESXGX

SEQ ID NO: 33716 - protein, 35 aa, Artificial Sequence
  Non-cyclic GFR-binding peptide
  MOD_RES (1), (2), (33), (35): Xaa is C or S
XXVSQDLSPINILYFIGKTPKIYGKIPMIVKSXKX

SEQ ID NO: 33717 - protein, 39 aa, Artificial Sequence
  Non-cyclic GFR-binding peptide
  MOD_RES (4), (5), (36), (38): Xaa is C or S
ASPXXVSQDLSPINILYFIGKTPKIYGKIPMIVKSXKXS

SEQ ID NO: 33718 - protein, 34 aa, Artificial Sequence
  Non-cyclic GFR-binding peptide
  MOD_RES (1), (2): Xaa is C or S
  MOD_RES (16), (17), (18), (19), (20): Xaa is A or G
  MOD_RES (21), (22), (23), (24): Xaa is A or G or is absent
XXAPVKTSPISMLYKXXXXXXXXXLKYHYMIVEE

SEQ ID NO: 33719 - protein, 32 aa, Artificial Sequence
  Non-cyclic GFR-binding peptide
  MOD_RES (14), (15), (16), (17), (18): Xaa is A or G
  MOD_RES (19), (20), (21), (22): Xaa is A or G or is absent
VPEKMNAISILYFXXXXXXXXXLKKYRNMTVE

SEQ ID NO: 33720 - protein, 38 aa, Artificial Sequence
  Non-cyclic GFR-binding peptide
  MOD_RES (2), (3), (37): Xaa is C or S
  MOD_RES (17), (18), (19), (20), (21): Xaa is A or G
  MOD_RES (22), (23), (24), (25): Xaa is A or G or is absent
PXXVPEKMNAISILYFXXXXXXXXXLKKYRNMTVESXA

SEQ ID NO: 33721 - protein, 39 aa, Artificial Sequence
  Non-cyclic GFR-binding peptide
  MOD_RES (6), (7): Xaa is C or S
  MOD_RES (21), (22), (23), (24), (25): Xaa is A or G
  MOD_RES (26), (27), (28), (29): Xaa is A or G or is absent
GIPEPXXVPEKMSATSILYYXXXXXXXXXLRKHRNMTVE

SEQ ID NO: 33722 - protein, 40 aa, Artificial Sequence
  Non-cyclic GFR-binding peptide
  MOD_RES (6), (7), (39): Xaa is C or S
HVPKPXXAPTKLEPISVLYLDDSSNVIKFKYENMVVRSXG

SEQ ID NO: 33723 - protein, 35 aa, Artificial Sequence
  Non-cyclic GFR-binding peptide
  MOD_RES (1), (2), (35): Xaa is C or S
  MOD_RES (16), (17), (18), (19), (20): Xaa is A or G
  MOD_RES (21), (22), (23), (24): Xaa is A or G or is absent
XXAPVKTSPISMLYKXXXXXXXXXLKYHYMIVEEX

SEQ ID NO: 33724 - protein, 36 aa, Artificial Sequence
  Non-cyclic GFR-binding peptide
  MOD_RES (2), (3): Xaa is C or S
  MOD_RES (17), (18), (19), (20), (21): Xaa is A or G
  MOD_RES (22), (23), (24), (25): Xaa is A or G or is absent
PXXVPEKMEPISILYLXXXXXXXXXKFKYENMTVES

SEQ ID NO: 33725 - protein, 38 aa, Artificial Sequence
  Non-cyclic GFR-binding peptide
  MOD_RES (4), (5), (38): Xaa is C or S
  MOD_RES (19), (20), (21), (22), (23): Xaa is A or G
  MOD_RES (24), (25), (26), (27): Xaa is A or G or is absent
ASPXXVSQDLSPINILYFXXXXXXXXXYGKIPMIVKSX

SEQ ID NO: 33726 - protein, 42 aa, Artificial Sequence
  Non-cyclic GFR-binding peptide
  MOD_RES (5), (6), (40), (42): Xaa is C or S
  MOD_RES (20), (21), (22), (23), (24): Xaa is A or G
  MOD_RES (25), (26), (27), (28): Xaa is A or G or is absent
TPPTXXVPTRLSPISILYKXXXXXXXXXLKYHYDMVVESXGX

SEQ ID NO: 33727 - protein, 42 aa, Artificial Sequence
  Non-cyclic GFR-binding peptide
  MOD_RES (6), (7), (39), (41): Xaa is C or S
HVPKPXXAPTKLEPISVLYLDDSSNVIKFKYENMVVRSXGXH

SEQ ID NO: 33728 - protein, 42 aa, Artificial Sequence
  Non-cyclic GFR-binding peptide
  MOD_RES (6), (7), (41): Xaa is C or S
  MOD_RES (21), (22), (23), (24), (25): Xaa is A or G
  MOD_RES (26), (27), (28), (29): Xaa is A or G or is absent
HVPKPXXAPTKLSPISVLYKXXXXXXXXXLKYHYNMVVRSXG

SEQ ID NO: 33729 - protein, 34 aa, Artificial Sequence
  Non-cyclic GFR-binding peptide
  MOD_RES (1), (2): Xaa is C or S
  MOD_RES (16), (17), (18), (19), (20): Xaa is A or G
  MOD_RES (21), (22), (23), (24): Xaa is A or G or is absent
XXTPTKMSATSMLYYXXXXXXXXXLRKHRGMVVD

SEQ ID NO: 33730 - protein, 35 aa, Artificial Sequence
  Non-cyclic GFR-binding peptide
  MOD_RES (1), (2), (33), (35): Xaa is C or S
XXVPQDLSPINILYFVGRTPKVYGKIPMVVKSXKX

SEQ ID NO: 33731 - protein, 33 aa, Artificial Sequence
  Non-cyclic GFR-binding peptide
  MOD_RES (2), (3): Xaa is C or S
PXXVPEKMNAISILYFDENKNVVLKKYRNMTVE

SEQ ID NO: 33732 - protein, 39 aa, Artificial Sequence
  Non-cyclic GFR-binding peptide
  MOD_RES (6), (7): Xaa is C or S
  MOD_RES (21), (22), (23), (24), (25): Xaa is A or G
  MOD_RES (26), (27), (28), (29): Xaa is A or G or is absent
ASAAPXXVPQALSPINILYFXXXXXXXXXYGKIPMIVRS

SEQ ID NO: 33733 - protein, 42 aa, Artificial Sequence
  Non-cyclic GFR-binding peptide
  MOD_RES (4), (5), (39), (41): Xaa is C or S
  MOD_RES (19), (20), (21), (22), (23): Xaa is A or G
  MOD_RES (24), (25), (26), (27): Xaa is A or G or is absent
PASXXVPARLSATSILYYXXXXXXXXXLRKHRDMVVEAXGXR

SEQ ID NO: 33734 - protein, 37 aa, Artificial Sequence
  Non-cyclic GFR-binding peptide
  MOD_RES (4), (5): Xaa is C or S
  MOD_RES (19), (20), (21), (22), (23): Xaa is A or G
  MOD_RES (24), (25), (26), (27): Xaa is A or G or is absent
PSTXXAPVKTEPISMLYLXXXXXXXXXKFKYEMIVEE

SEQ ID NO: 33735 - protein, 42 aa, Artificial Sequence
  Non-cyclic GFR-binding peptide
  MOD_RES (5), (6), (40), (42): Xaa is C or S
  MOD_RES (20), (21), (22), (23), (24): Xaa is A or G
  MOD_RES (25), (26), (27), (28): Xaa is A or G or is absent
IPEPXXVPEKMSPINILYFXXXXXXXXXYGKIPNMTVESXAX

SEQ ID NO: 33736 - protein, 36 aa, Artificial Sequence
  Non-cyclic GFR-binding peptide
  MOD_RES (1), (2), (35): Xaa is C or S
  MOD_RES (16), (17), (18), (19), (20): Xaa is A or G
  MOD_RES (21), (22), (23), (24): Xaa is A or G or is absent
XXAPVKTEPISMLYLXXXXXXXXXKFKYEMIVEEXG

SEQ ID NO: 33737 - protein, 41 aa, Artificial Sequence
  Non-cyclic GFR-binding peptide
  MOD_RES (3), (4), (38), (40): Xaa is C or S
  MOD_RES (18), (19), (20), (21), (22): Xaa is A or G
  MOD_RES (23), (24), (25), (26): Xaa is A or G or is absent
GPXXTPTKMEPISMLYLXXXXXXXXXKFKYEGMVVDRXGXS

SEQ ID NO: 33738 - protein, 36 aa, Artificial Sequence
  Non-cyclic GFR-binding peptide
  MOD_RES (1), (2), (36): Xaa is C or S
  MOD_RES (16), (17), (18), (19), (20): Xaa is A or G
  MOD_RES (21), (22), (23), (24): Xaa is A or G or is absent
XXVPARLSATSILYYXXXXXXXXXLRKHRDMVVEAX

SEQ ID NO: 33739 - protein, 39 aa, Artificial Sequence
  Non-cyclic GFR-binding peptide
  MOD_RES (6), (7): Xaa is C or S
  MOD_RES (21), (22), (23), (24), (25): Xaa is A or G
  MOD_RES (26), (27), (28), (29): Xaa is A or G or is absent
GSAGPXXTPTKMSATSMLYYXXXXXXXXXLRKHRGMVVD

SEQ ID NO: 33740 - protein, 38 aa, Artificial Sequence
  Non-cyclic GFR-binding peptide
  MOD_RES (5), (6): Xaa is C or S
  MOD_RES (20), (21), (22), (23), (24): Xaa is A or G
  MOD_RES (25), (26), (27), (28): Xaa is A or G or is absent
SAAPXXVPQALSPINILYFXXXXXXXXXYGKIPMIVRS

SEQ ID NO: 33741 - protein, 32 aa, Artificial Sequence
  Non-cyclic GFR-binding peptide
  MOD_RES (14), (15), (16), (17), (18): Xaa is A or G
  MOD_RES (19), (20), (21), (22): Xaa is A or G or is absent
TPTKMEPISMLYLXXXXXXXXXKFKYEGMVVD

SEQ ID NO: 33742 - protein, 40 aa, Artificial Sequence
  Non-cyclic GFR-binding peptide
  MOD_RES (4), (5), (38), (40): Xaa is C or S
  MOD_RES (19), (20), (21), (22), (23): Xaa is A or G
  MOD_RES (24), (25), (26), (27): Xaa is A or G or is absent
PSTXXAPVKTSATSMLYYXXXXXXXXXLRKHRMIVEEXGX

SEQ ID NO: 33743 - protein, 41 aa, Artificial Sequence
  Non-cyclic GFR-binding peptide
  MOD_RES (5), (6), (40): Xaa is C or S
  MOD_RES (20), (21), (22), (23), (24): Xaa is A or G
  MOD_RES (25), (26), (27), (28): Xaa is A or G or is absent
IPEPXXVPEKMSPINILYFXXXXXXXXXYGKIPNMTVESXA

SEQ ID NO: 33744 - protein, 35 aa, Artificial Sequence
  Non-cyclic GFR-binding peptide
  MOD_RES (1), (35): Xaa is C or S
  MOD_RES (15), (16), (17), (18), (19): Xaa is A or G
  MOD_RES (20), (21), (22), (23): Xaa is A or G or is absent
XVPTRLSPISILYKXXXXXXXXXLKYHYDMVVESX

SEQ ID NO: 33745 - protein, 35 aa, Artificial Sequence
  Non-cyclic GFR-binding peptide
  MOD_RES (2), (3), (34): Xaa is C or S
TXXAPVKTEPISMLYLDNGRVLLKFKYEMIVEEXG

SEQ ID NO: 33746 - protein, 39 aa, Artificial Sequence
  Non-cyclic GFR-binding peptide
  MOD_RES (3), (4), (36), (38): Xaa is C or S
KAXXVPTKLSATSILYYDKGVVTYLRKHRGMAVSEXGXR

SEQ ID NO: 33747 - protein, 39 aa, Artificial Sequence
  Non-cyclic GFR-binding peptide
  MOD_RES (6), (7), (39): Xaa is C or S
GIPEPXXVPEKMSPISILYKDENKNVVLKYHYNMTVESX

SEQ ID NO: 33748 - protein, 40 aa, Artificial Sequence
  Non-cyclic GFR-binding peptide
  MOD_RES (6), (7), (39): Xaa is C or S
GIPEPXXVPEKMSPINILYFDENKNVVYGKIPNMTVESXA

SEQ ID NO: 33749 - protein, 39 aa, Artificial Sequence
  Non-cyclic GFR-binding peptide
  MOD_RES (5), (6): Xaa is C or S
  MOD_RES (20), (21), (22), (23), (24): Xaa is A or G
  MOD_RES (25), (26), (27), (28): Xaa is A or G or is absent
TPPTXXVPTRLEPISILYLXXXXXXXXXKFKYEDMVVES

SEQ ID NO: 33750 - protein, 36 aa, Artificial Sequence
  Non-cyclic GFR-binding peptide
  MOD_RES (3), (4), (36): Xaa is C or S
GPXXTPTKMEPISMLYLNDKQQIIKFKYEGMVVDRX

SEQ ID NO: 33751 - protein, 36 aa, Artificial Sequence
  Non-cyclic GFR-binding peptide
  MOD_RES (4), (5): Xaa is C or S
PEPXXVPEKMEPISILYLDENKNVVKFKYENMTVES

SEQ ID NO: 33752 - protein, 40 aa, Artificial Sequence
  Non-cyclic GFR-binding peptide
  MOD_RES (4), (5), (37), (39): Xaa is C or S
PEPXXVPEKMSPINILYFDENKNVVYGKIPNMTVESXAXR

SEQ ID NO: 33753 - protein, 40 aa, Artificial Sequence
  Non-cyclic GFR-binding peptide
  MOD_RES (3), (4), (38), (40): Xaa is C or S
  MOD_RES (18), (19), (20), (21), (22): Xaa is A or G
  MOD_RES (23), (24), (25), (26): Xaa is A or G or is absent
ASXXVPARLSATSILYYXXXXXXXXXLRKHRDMVVEAXGX

SEQ ID NO: 33754 - protein, 39 aa, Artificial Sequence
  Non-cyclic GFR-binding peptide
  MOD_RES (3), (4), (38): Xaa is C or S
  MOD_RES (18), (19), (20), (21), (22): Xaa is A or G
  MOD_RES (23), (24), (25), (26): Xaa is A or G or is absent
GPXXTPTKMEPISMLYLXXXXXXXXXKFKYEGMVVDRXG

SEQ ID NO: 33755 - protein, 37 aa, Artificial Sequence
  Non-cyclic GFR-binding peptide
  MOD_RES (2), (3), (37): Xaa is C or S
  MOD_RES (17), (18), (19), (20), (21): Xaa is A or G
  MOD_RES (22), (23), (24), (25): Xaa is A or G or is absent
AXXVPTKLSATSILYYXXXXXXXXXLRKHRGMAVSEX

SEQ ID NO: 33756 - protein, 32 aa, Artificial Sequence
  Non-cyclic GFR-binding peptide
  MOD_RES (1), (32): Xaa is C or S
XAPVKTSPISMLYKDNGRVLLLKYHYMIVEEX

SEQ ID NO: 33757 - protein, 37 aa, Artificial Sequence
  Non-cyclic GFR-binding peptide
  MOD_RES (1), (2), (36): Xaa is C or S
  MOD_RES (16), (17), (18), (19), (20): Xaa is A or G
  MOD_RES (21), (22), (23), (24): Xaa is A or G or is absent
XXVPEKMSPINILYFXXXXXXXXXYGKIPNMTVESXA

SEQ ID NO: 33758 - protein, 37 aa, Artificial Sequence
  Non-cyclic GFR-binding peptide
  MOD_RES (1), (2), (35), (37): Xaa is C or S
  MOD_RES (16), (17), (18), (19), (20): Xaa is A or G
  MOD_RES (21), (22), (23), (24): Xaa is A or G or is absent
XXAPVKTSPISMLYKXXXXXXXXXLKYHYMIVEEXGX

SEQ ID NO: 33759 - protein, 41 aa, Artificial Sequence
  Non-cyclic GFR-binding peptide
  MOD_RES (4), (5), (38), (40): Xaa is C or S
  MOD_RES (19), (20), (21), (22), (23): Xaa is A or G
  MOD_RES (24), (25), (26), (27): Xaa is A or G or is absent
ASPXXVPQDLSPINILYFXXXXXXXXXYGKIPMVVKSXKXS

SEQ ID NO: 33760 - protein, 36 aa, Artificial Sequence
  Non-cyclic GFR-binding peptide
  MOD_RES (2), (3), (35): Xaa is C or S
PXXTPTKMSPISMLYKNDKQQIILKYHYGMVVDRXG

SEQ ID NO: 33761 - protein, 38 aa, Artificial Sequence
  Non-cyclic GFR-binding peptide
  MOD_RES (5), (6), (37): Xaa is C or S
VPSTXXAPVKTEPISMLYLDNGRVLLKFKYEMIVEEXG

SEQ ID NO: 33762 - protein, 36 aa, Artificial Sequence
  Non-cyclic GFR-binding peptide
  MOD_RES (5), (6): Xaa is C or S
SASPXXVPQDLSPINILYFVGRTPKVYGKIPMVVKS

SEQ ID NO: 33763 - protein, 39 aa, Artificial Sequence
  Non-cyclic GFR-binding peptide
  MOD_RES (3), (4), (38): Xaa is C or S
  MOD_RES (18), (19), (20), (21), (22): Xaa is A or G
  MOD_RES (23), (24), (25), (26): Xaa is A or G or is absent
GPXXTPTKMSPISMLYKXXXXXXXXXLKYHYGMVVDRXG

SEQ ID NO: 33764 - protein, 34 aa, Artificial Sequence
  Non-cyclic GFR-binding peptide
  MOD_RES (32), (34): Xaa is C or S
VPEKMSPISILYKDENKNVVLKYHYNMTVESXAX

SEQ ID NO: 33765 - protein, 36 aa, Artificial Sequence
  Non-cyclic GFR-binding peptide
  MOD_RES (2), (3), (35): Xaa is C or S
PXXVPEKMSPISILYKDENKNVVLKYHYNMTVESXA

SEQ ID NO: 33766 - protein, 32 aa, Artificial Sequence
  Non-cyclic GFR-binding peptide
  MOD_RES (1), (2): Xaa is C or S
XXVPTRLSATSILYYDSANNVVLRKHRDMVVE

SEQ ID NO: 33767 - protein, 39 aa, Artificial Sequence
  Non-cyclic GFR-binding peptide
  MOD_RES (5), (6), (38): Xaa is C or S
IPEPXXVPEKMSATSILYYDENKNVVLRKHRNMTVESXA

SEQ ID NO: 33768 - protein, 33 aa, Artificial Sequence
  Non-cyclic GFR-binding peptide
  MOD_RES (2), (3): Xaa is C or S
TXXAPVKTSPISMLYKDNGRVLLLKYHYMIVEE

SEQ ID NO: 33769 - protein, 36 aa, Artificial Sequence
  Non-cyclic GFR-binding peptide
  MOD_RES (5), (6): Xaa is C or S
IPEPXXVPEKMNAISILYFDENKNVVLKKYRNMTVE

SEQ ID NO: 33770 - protein, 33 aa, Artificial Sequence
  Non-cyclic GFR-binding peptide
  MOD_RES (1), (2): Xaa is C or S
XXTPTKMSATSMLYYNDKQQIILRKHRGMVVDR

SEQ ID NO: 33771 - protein, 36 aa, Artificial Sequence
  Non-cyclic GFR-binding peptide
  MOD_RES (1), (2), (33), (35): Xaa is C or S
XXVSQDLSPINILYFIGKTPKIYGKIPMIVKSXKXS

SEQ ID NO: 33772 - protein, 36 aa, Artificial Sequence
  Non-cyclic GFR-binding peptide
  MOD_RES (1), (2), (34), (36): Xaa is C or S
XXTPTKMSATSMLYYNDKQQIILRKHRGMVVDRXGX

SEQ ID NO: 33773 - protein, 34 aa, Artificial Sequence
  Non-cyclic GFR-binding peptide
  MOD_RES (1), (2), (33): Xaa is C or S
XXVSQDLSPINILYFIGKTPKIYGKIPMIVKSXK

SEQ ID NO: 33774 - protein, 34 aa, Artificial Sequence
  Non-cyclic GFR-binding peptide
  MOD_RES (2), (3): Xaa is C or S
AXXVPTKLSATSILYYDKGVVTYLRKHRGMAVSE

SEQ ID NO: 33775 - protein, 34 aa, Artificial Sequence
  Non-cyclic GFR-binding peptide
  MOD_RES (1), (2), (34): Xaa is C or S
XXVPTRLEPISILYLDSANNVVKFKYEDMVVESX

SEQ ID NO: 33776 - protein, 37 aa, Artificial Sequence
  Non-cyclic GFR-binding peptide
  MOD_RES (6), (7): Xaa is C or S
STPPTXXVPTRLSPISILYKDSANNVVLKYHYDMVVE

SEQ ID NO: 33777 - protein, 39 aa, Artificial Sequence
  Non-cyclic GFR-binding peptide
  MOD_RES (6), (7): Xaa is C or S
  MOD_RES (21), (22), (23), (24), (25): Xaa is A or G
  MOD_RES (26), (27), (28), (29): Xaa is A or G or is absent
GSAGPXXTPTKMEPISMLYLXXXXXXXXXKFKYEGMVVD

SEQ ID NO: 33778 - protein, 42 aa, Artificial Sequence
  Non-cyclic GFR-binding peptide
  MOD_RES (4), (5), (39), (41): Xaa is C or S
  MOD_RES (19), (20), (21), (22), (23): Xaa is A or G
  MOD_RES (24), (25), (26), (27): Xaa is A or G or is absent
PPTXXVPTRLSPISILYKXXXXXXXXXLKYHYDMVVESXGXR

SEQ ID NO: 33779 - protein, 43 aa, Artificial Sequence
  Non-cyclic GFR-binding peptide
  MOD_RES (5), (6), (40), (42): Xaa is C or S
  MOD_RES (20), (21), (22), (23), (24): Xaa is A or G
  MOD_RES (25), (26), (27), (28): Xaa is A or G or is absent
TPPTXXVPTRLSATSILYYXXXXXXXXXLRKHRDMVVESXGXR

SEQ ID NO: 33780 - protein, 39 aa, Artificial Sequence
  Non-cyclic GFR-binding peptide
  MOD_RES (6), (7): Xaa is C or S
  MOD_RES (21), (22), (23), (24), (25): Xaa is A or G
  MOD_RES (26), (27), (28), (29): Xaa is A or G or is absent
GSAGPXXTPTKMSPISMLYKXXXXXXXXXLKYHYGMVVD

SEQ ID NO: 33781 - protein, 40 aa, Artificial Sequence
  Non-cyclic GFR-binding peptide
  MOD_RES (5), (6), (40): Xaa is C or S
  MOD_RES (20), (21), (22), (23), (24): Xaa is A or G
  MOD_RES (25), (26), (27), (28): Xaa is A or G or is absent
SAGPXXTPTKMSPISMLYKXXXXXXXXXLKYHYGMVVDRX

SEQ ID NO: 33782 - protein, 39 aa, Artificial Sequence
  Non-cyclic GFR-binding peptide
  MOD_RES (5), (6), (37), (39): Xaa is C or S
VPSTXXAPVKTSATSMLYYDNGRVLLLRKHRMIVEEXGX

SEQ ID NO: 33783 - protein, 43 aa, Artificial Sequence
  Non-cyclic GFR-binding peptide
  MOD_RES (6), (7), (41), (43): Xaa is C or S
  MOD_RES (21), (22), (23), (24), (25): Xaa is A or G
  MOD_RES (26), (27), (28), (29): Xaa is A or G or is absent
STPPTXXVPTRLSPISILYKXXXXXXXXXLKYHYDMVVESXGX

SEQ ID NO: 33784 - protein, 37 aa, Artificial Sequence
  Non-cyclic GFR-binding peptide
  MOD_RES (1), (35), (37): Xaa is C or S
  MOD_RES (15), (16), (17), (18), (19): Xaa is A or G
  MOD_RES (20), (21), (22), (23): Xaa is A or G or is absent
XVPEKMEPISILYLXXXXXXXXXKFKYENMTVESXAX

SEQ ID NO: 33785 - protein, 37 aa, Artificial Sequence
  Non-cyclic GFR-binding peptide
  MOD_RES (3), (4), (37): Xaa is C or S
  MOD_RES (18), (19), (20), (21), (22): Xaa is A or G
  MOD_RES (23), (24), (25), (26): Xaa is A or G or is absent
STXXAPVKTEPISMLYLXXXXXXXXXKFKYEMIVEEX

SEQ ID NO: 33786 - protein, 38 aa, Artificial Sequence
  Non-cyclic GFR-binding peptide
  MOD_RES (5), (6), (38): Xaa is C or S
IPEPXXVPEKMNAISILYFDENKNVVLKKYRNMTVESX

SEQ ID NO: 33787 - protein, 32 aa, Artificial Sequence
  Non-cyclic GFR-binding peptide
  MOD_RES (1), (2): Xaa is C or S
XXTPTKMSPISMLYKNDKQQIILKYHYGMVVD

SEQ ID NO: 33788 - protein, 40 aa, Artificial Sequence
  Non-cyclic GFR-binding peptide
  MOD_RES (5), (6), (39): Xaa is C or S
  MOD_RES (20), (21), (22), (23), (24): Xaa is A or G
  MOD_RES (25), (26), (27), (28): Xaa is A or G or is absent
VPSTXXAPVKTEPISMLYLXXXXXXXXXKFKYEMIVEEXG

SEQ ID NO: 33789 - protein, 34 aa, Artificial Sequence
  Non-cyclic GFR-binding peptide
  MOD_RES (1), (2): Xaa is C or S
  MOD_RES (16), (17), (18), (19), (20): Xaa is A or G
  MOD_RES (21), (22), (23), (24): Xaa is A or G or is absent
XXAPVKTSATSMLYYXXXXXXXXXLRKHRMIVEE

SEQ ID NO: 33790 - protein, 40 aa, Artificial Sequence
  Non-cyclic GFR-binding peptide
  MOD_RES (6), (7), (40): Xaa is C or S
  MOD_RES (21), (22), (23), (24), (25): Xaa is A or G
  MOD_RES (26), (27), (28), (29): Xaa is A or G or is absent
ASAAPXXVPQALSPINILYFXXXXXXXXXYGKIPMIVRSX

SEQ ID NO: 33791 - protein, 37 aa, Artificial Sequence
  Non-cyclic GFR-binding peptide
  MOD_RES (1), (35), (37): Xaa is C or S
  MOD_RES (15), (16), (17), (18), (19): Xaa is A or G
  MOD_RES (20), (21), (22), (23): Xaa is A or G or is absent
XVPARLSATSILYYXXXXXXXXXLRKHRDMVVEAXGX

SEQ ID NO: 33792 - protein, 37 aa, Artificial Sequence
  Non-cyclic GFR-binding peptide
  MOD_RES (4), (5): Xaa is C or S
  MOD_RES (19), (20), (21), (22), (23): Xaa is A or G
  MOD_RES (24), (25), (26), (27): Xaa is A or G or is absent
PSTXXAPVKTSATSMLYYXXXXXXXXXLRKHRMIVEE

SEQ ID NO: 33793 - protein, 38 aa, Artificial Sequence
  Non-cyclic GFR-binding peptide
  MOD_RES (3), (4), (36), (38): Xaa is C or S
EPXXVPEKMSPISILYKDENKNVVLKYHYNMTVESXAX

SEQ ID NO: 33794 - protein, 35 aa, Artificial Sequence
  Non-cyclic GFR-binding peptide
  MOD_RES (1), (34): Xaa is C or S
  MOD_RES (15), (16), (17), (18), (19): Xaa is A or G
  MOD_RES (20), (21), (22), (23): Xaa is A or G or is absent
XAPVKTSPISMLYKXXXXXXXXXLKYHYMIVEEXG

SEQ ID NO: 33795 - protein, 39 aa, Artificial Sequence
  Non-cyclic GFR-binding peptide
  MOD_RES (5), (6): Xaa is C or S
  MOD_RES (20), (21), (22), (23), (24): Xaa is A or G
  MOD_RES (25), (26), (27), (28): Xaa is A or G or is absent
APASXXVPARLSATSILYYXXXXXXXXXLRKHRDMVVEA

SEQ ID NO: 33796 - protein, 40 aa, Artificial Sequence
  Non-cyclic GFR-binding peptide
  MOD_RES (5), (6), (40): Xaa is C or S
  MOD_RES (20), (21), (22), (23), (24): Xaa is A or G
  MOD_RES (25), (26), (27), (28): Xaa is A or G or is absent
TPPTXXVPTRLSATSILYYXXXXXXXXXLRKHRDMVVESX

SEQ ID NO: 33797 - protein, 32 aa, Artificial Sequence
  Non-cyclic GFR-binding peptide
  MOD_RES (1), (2): Xaa is C or S
XXVPTRLEPISILYLDSANNVVKFKYEDMVVE

SEQ ID NO: 33798 - protein, 39 aa, Artificial Sequence
  Non-cyclic GFR-binding peptide
  MOD_RES (1), (2), (36), (38): Xaa is C or S
  MOD_RES (16), (17), (18), (19), (20): Xaa is A or G
  MOD_RES (21), (22), (23), (24): Xaa is A or G or is absent
XXVPTRLSATSILYYXXXXXXXXXLRKHRDMVVESXGXR

SEQ ID NO: 33799 - protein, 41 aa, Artificial Sequence
  Non-cyclic GFR-binding peptide
  MOD_RES (5), (6), (40): Xaa is C or S
  MOD_RES (20), (21), (22), (23), (24): Xaa is A or G
  MOD_RES (25), (26), (27), (28): Xaa is A or G or is absent
APASXXVPARLSATSILYYXXXXXXXXXLRKHRDMVVEAXG

SEQ ID NO: 33800 - protein, 40 aa, Artificial Sequence
  Non-cyclic GFR-binding peptide
  MOD_RES (6), (7): Xaa is C or S
  MOD_RES (21), (22), (23), (24), (25): Xaa is A or G
  MOD_RES (26), (27), (28), (29): Xaa is A or G or is absent
GIPEPXXVPEKMSPISILYKXXXXXXXXXLKYHYNMTVES

SEQ ID NO: 33801 - protein, 35 aa, Artificial Sequence
  Non-cyclic GFR-binding peptide
  MOD_RES (34), (34): Xaa is C or S
  MOD_RES (14), (15), (16), (17), (18): Xaa is A or G
  MOD_RES (19), (20), (21), (22): Xaa is A or G or is absent
VPARLSATSILYYXXXXXXXXXLRKHRDMVVEAXG

SEQ ID NO: 33802 - protein, 36 aa, Artificial Sequence
  Non-cyclic GFR-binding peptide
  MOD_RES (1), (2), (36): Xaa is C or S
  MOD_RES (16), (17), (18), (19), (20): Xaa is A or G
  MOD_RES (21), (22), (23), (24): Xaa is A or G or is absent
XXVPTRLSPISILYKXXXXXXXXXLKYHYDMVVESX

SEQ ID NO: 33803 - protein, 34 aa, Artificial Sequence
  Non-cyclic GFR-binding peptide
  MOD_RES (34), (34): Xaa is C or S
  MOD_RES (14), (15), (16), (17), (18): Xaa is A or G
  MOD_RES (19), (20), (21), (22): Xaa is A or G or is absent
TPTKMSATSMLYYXXXXXXXXXLRKHRGMVVDRX

SEQ ID NO: 33804 - protein, 37 aa, Artificial Sequence
  Non-cyclic GFR-binding peptide
  MOD_RES (6), (7): Xaa is C or S
STPPTXXVPTRLSATSILYYDSANNVVLRKHRDMVVE

SEQ ID NO: 33805 - protein, 36 aa, Artificial Sequence
  Non-cyclic GFR-binding peptide
  MOD_RES (1), (2), (36): Xaa is C or S
  MOD_RES (16), (17), (18), (19), (20): Xaa is A or G
  MOD_RES (21), (22), (23), (24): Xaa is A or G or is absent
XXVPEKMNAISILYFXXXXXXXXXLKKYRNMTVESX

SEQ ID NO: 33806 - protein, 39 aa, Artificial Sequence
  Non-cyclic GFR-binding peptide
  MOD_RES (6), (7): Xaa is C or S
  MOD_RES (21), (22), (23), (24), (25): Xaa is A or G
  MOD_RES (26), (27), (28), (29): Xaa is A or G or is absent
HVPKPXXAPTKLSATSVLYYXXXXXXXXXLRKHRNMVVR

SEQ ID NO: 33807 - protein, 41 aa, Artificial Sequence
  Non-cyclic GFR-binding peptide
  MOD_RES (5), (6), (38), (40): Xaa is C or S
TPPTXXVPTRLSPISILYKDSANNVVLKYHYDMVVESXGXR

SEQ ID NO: 33808 - protein, 41 aa, Artificial Sequence
  Non-cyclic GFR-binding peptide
  MOD_RES (4), (5), (39), (41): Xaa is C or S
  MOD_RES (19), (20), (21), (22), (23): Xaa is A or G
  MOD_RES (24), (25), (26), (27): Xaa is A or G or is absent
PEPXXVPEKMSPISILYKXXXXXXXXXLKYHYNMTVESXAX

SEQ ID NO: 33809 - protein, 36 aa, Artificial Sequence
  Non-cyclic GFR-binding peptide
  MOD_RES (1), (2), (34), (36): Xaa is C or S
XXVPARLSATSILYYDAANNVVLRKHRDMVVEAXGX

SEQ ID NO: 33810 - protein, 33 aa, Artificial Sequence
  Non-cyclic GFR-binding peptide
  MOD_RES (32), (32): Xaa is C or S
TPTKMSPISMLYKNDKQQIILKYHYGMVVDRXG

SEQ ID NO: 33811 - protein, 34 aa, Artificial Sequence
  Non-cyclic GFR-binding peptide
  MOD_RES (1), (2), (34): Xaa is C or S
XXVPARLSATSILYYDAANNVVLRKHRDMVVEAX

SEQ ID NO: 33812 - protein, 36 aa, Artificial Sequence
  Non-cyclic GFR-binding peptide
  MOD_RES (4), (5): Xaa is C or S
AGPXXTPTKMSPISMLYKNDKQQIILKYHYGMVVDR

SEQ ID NO: 33813 - protein, 41 aa, Artificial Sequence
  Non-cyclic GFR-binding peptide
  MOD_RES (5), (6), (39), (41): Xaa is C or S
  MOD_RES (20), (21), (22), (23), (24): Xaa is A or G
  MOD_RES (25), (26), (27), (28): Xaa is A or G or is absent
VPSTXXAPVKTSPISMLYKXXXXXXXXXLKYHYMIVEEXGX

SEQ ID NO: 33814 - protein, 37 aa, Artificial Sequence
  Non-cyclic GFR-binding peptide
  MOD_RES (2), (3), (35), (37): Xaa is C or S
PXXVPEKMEPISILYLDENKNVVKFKYENMTVESXAX

SEQ ID NO: 33815 - protein, 34 aa, Artificial Sequence
  Non-cyclic GFR-binding peptide
  MOD_RES (33), (33): Xaa is C or S
  MOD_RES (14), (15), (16), (17), (18): Xaa is A or G
  MOD_RES (19), (20), (21), (22): Xaa is A or G or is absent
APVKTSPISMLYKXXXXXXXXXLKYHYMIVEEXG

SEQ ID NO: 33816 - protein, 39 aa, Artificial Sequence
  Non-cyclic GFR-binding peptide
  MOD_RES (2), (3), (37), (39): Xaa is C or S
  MOD_RES (17), (18), (19), (20), (21): Xaa is A or G
  MOD_RES (22), (23), (24), (25): Xaa is A or G or is absent
PXXVPEKMEPISILYLXXXXXXXXXKFKYENMTVESXAX

SEQ ID NO: 33817 - protein, 37 aa, Artificial Sequence
  Non-cyclic GFR-binding peptide
  MOD_RES (2), (3), (34), (36): Xaa is C or S
TXXAPVKTSPISMLYKDNGRVLLLKYHYMIVEEXGXL

SEQ ID NO: 33818 - protein, 40 aa, Artificial Sequence
  Non-cyclic GFR-binding peptide
  MOD_RES (2), (3), (37), (39): Xaa is C or S
  MOD_RES (17), (18), (19), (20), (21): Xaa is A or G
  MOD_RES (22), (23), (24), (25): Xaa is A or G or is absent
TXXVPTRLSATSILYYXXXXXXXXXLRKHRDMVVESXGXR

SEQ ID NO: 33819 - protein, 41 aa, Artificial Sequence
  Non-cyclic GFR-binding peptide
  MOD_RES (5), (6), (38), (40): Xaa is C or S
IPEPXXVPEKMSPINILYFDENKNVVYGKIPNMTVESXAXR

SEQ ID NO: 33820 - protein, 34 aa, Artificial Sequence
  Non-cyclic GFR-binding peptide
  MOD_RES (1), (33): Xaa is C or S
XVPARLSATSILYYDAANNVVLRKHRDMVVEAXG

SEQ ID NO: 33821 - protein, 38 aa, Artificial Sequence
  Non-cyclic GFR-binding peptide
  MOD_RES (5), (6): Xaa is C or S
  MOD_RES (20), (21), (22), (23), (24): Xaa is A or G
  MOD_RES (25), (26), (27), (28): Xaa is A or G or is absent
SASPXXVSQDLSPINILYFXXXXXXXXXYGKIPMIVKS

SEQ ID NO: 33822 - protein, 42 aa, Artificial Sequence
  Non-cyclic GFR-binding peptide
  MOD_RES (4), (5), (39), (41): Xaa is C or S
  MOD_RES (19), (20), (21), (22), (23): Xaa is A or G
  MOD_RES (24), (25), (26), (27): Xaa is A or G or is absent
PEPXXVPEKMSATSILYYXXXXXXXXXLRKHRNMTVESXAXR

SEQ ID NO: 33823 - protein, 37 aa, Artificial Sequence
  Non-cyclic GFR-binding peptide
  MOD_RES (1), (2), (36): Xaa is C or S
  MOD_RES (16), (17), (18), (19), (20): Xaa is A or G
  MOD_RES (21), (22), (23), (24): Xaa is A or G or is absent
XXVPEKMNAISILYFXXXXXXXXXLKKYRNMTVESXA

SEQ ID NO: 33824 - protein, 41 aa, Artificial Sequence
  Non-cyclic GFR-binding peptide
  MOD_RES (6), (7), (41): Xaa is C or S
  MOD_RES (21), (22), (23), (24), (25): Xaa is A or G
  MOD_RES (26), (27), (28), (29): Xaa is A or G or is absent
HVPKPXXAPTKLEPISVLYLXXXXXXXXXKFKYENMVVRSX

SEQ ID NO: 33825 - protein, 39 aa, Artificial Sequence
  Non-cyclic GFR-binding peptide
  MOD_RES (4), (5), (39): Xaa is C or S
  MOD_RES (19), (20), (21), (22), (23): Xaa is A or G
  MOD_RES (24), (25), (26), (27): Xaa is A or G or is absent
PEPXXVPEKMSPINILYFXXXXXXXXXYGKIPNMTVESX

SEQ ID NO: 33826 - protein, 33 aa, Artificial Sequence
  Non-cyclic GFR-binding peptide
  MOD_RES (33), (33): Xaa is C or S
  MOD_RES (14), (15), (16), (17), (18): Xaa is A or G
  MOD_RES (19), (20), (21), (22): Xaa is A or G or is absent
APVKTSPISMLYKXXXXXXXXXLKYHYMIVEEX

SEQ ID NO: 33827 - protein, 41 aa, Artificial Sequence
  Non-cyclic GFR-binding peptide
  MOD_RES (6), (7), (39), (41): Xaa is C or S
GIPEPXXVPEKMSPISILYKDENKNVVLKYHYNMTVESXAX

SEQ ID NO: 33828 - protein, 40 aa, Artificial Sequence
  Non-cyclic GFR-binding peptide
  MOD_RES (3), (4), (38), (40): Xaa is C or S
  MOD_RES (18), (19), (20), (21), (22): Xaa is A or G
  MOD_RES (23), (24), (25), (26): Xaa is A or G or is absent
GPXXTPTKMEPISMLYLXXXXXXXXXKFKYEGMVVDRXGX

SEQ ID NO: 33829 - protein, 40 aa, Artificial Sequence
  Non-cyclic GFR-binding peptide
  MOD_RES (5), (6), (40): Xaa is C or S
  MOD_RES (20), (21), (22), (23), (24): Xaa is A or G
  MOD_RES (25), (26), (27), (28): Xaa is A or G or is absent
ASKAXXVPTKLSATSILYYXXXXXXXXXLRKHRGMAVSEX

SEQ ID NO: 33830 - protein, 37 aa, Artificial Sequence
  Non-cyclic GFR-binding peptide
  MOD_RES (6), (7): Xaa is C or S
ASASPXXVSQDLSPINILYFIGKTPKIYGKIPMIVKS

SEQ ID NO: 33831 - protein, 33 aa, Artificial Sequence
  Non-cyclic GFR-binding peptide
  MOD_RES (1), (32): Xaa is C or S
XVSQDLSPINILYFIGKTPKIYGKIPMIVKSXK

SEQ ID NO: 33832 - protein, 34 aa, Artificial Sequence
  Non-cyclic GFR-binding peptide
  MOD_RES (1), (2): Xaa is C or S
  MOD_RES (16), (17), (18), (19), (20): Xaa is A or G
  MOD_RES (21), (22), (23), (24): Xaa is A or G or is absent
XXAPVKTEPISMLYLXXXXXXXXXKFKYEMIVEE

SEQ ID NO: 33833 - protein, 37 aa, Artificial Sequence
  Non-cyclic GFR-binding peptide
  MOD_RES (5), (6), (37): Xaa is C or S
SASPXXVPQDLSPINILYFVGRTPKVYGKIPMVVKSX

SEQ ID NO: 33834 - protein, 33 aa, Artificial Sequence
  Non-cyclic GFR-binding peptide
  MOD_RES (1), (2): Xaa is C or S
XXVPTRLSPISILYKDSANNVVLKYHYDMVVES

SEQ ID NO: 33835 - protein, 33 aa, Artificial Sequence
  Non-cyclic GFR-binding peptide
  MOD_RES (1), (33): Xaa is C or S
XVPARLSATSILYYDAANNVVLRKHRDMVVEAX

SEQ ID NO: 33836 - protein, 39 aa, Artificial Sequence
  Non-cyclic GFR-binding peptide
  MOD_RES (6), (7), (39): Xaa is C or S
GSAGPXXTPTKMSPISMLYKNDKQQIILKYHYGMVVDRX

SEQ ID NO: 33837 - protein, 31 aa, Artificial Sequence
  Non-cyclic GFR-binding peptide
  MOD_RES (1), (1): Xaa is C or S
XVPTKLSATSILYYDKGVVTYLRKHRGMAVS

SEQ ID NO: 33838 - protein, 38 aa, Artificial Sequence
  Non-cyclic GFR-binding peptide
  MOD_RES (6), (7): Xaa is C or S
HVPKPXXAPTKLEPISVLYLDDSSNVIKFKYENMVVRS

SEQ ID NO: 33839 - protein, 38 aa, Artificial Sequence
  Non-cyclic GFR-binding peptide
  MOD_RES (1), (35), (37): Xaa is C or S
  MOD_RES (15), (16), (17), (18), (19): Xaa is A or G
  MOD_RES (20), (21), (22), (23): Xaa is A or G or is absent
XVPEKMSPINILYFXXXXXXXXXYGKIPNMTVESXAXR

SEQ ID NO: 33840 - protein, 43 aa, Artificial Sequence
  Non-cyclic GFR-binding peptide
  MOD_RES (5), (6), (40), (42): Xaa is C or S
  MOD_RES (20), (21), (22), (23), (24): Xaa is A or G
  MOD_RES (25), (26), (27), (28): Xaa is A or G or is absent
IPEPXXVPEKMEPISILYLXXXXXXXXXKFKYENMTVESXAXR

SEQ ID NO: 33841 - protein, 38 aa, Artificial Sequence
  Non-cyclic GFR-binding peptide
  MOD_RES (4), (5), (37): Xaa is C or S
PEPXXVPEKMNAISILYFDENKNVVLKKYRNMTVESXA

SEQ ID NO: 33842 - protein, 36 aa, Artificial Sequence
  Non-cyclic GFR-binding peptide
  MOD_RES (1), (2), (35): Xaa is C or S
  MOD_RES (16), (17), (18), (19), (20): Xaa is A or G
  MOD_RES (21), (22), (23), (24): Xaa is A or G or is absent
XXAPVKTSATSMLYYXXXXXXXXXLRKHRMIVEEXG

SEQ ID NO: 33843 - protein, 38 aa, Artificial Sequence
  Non-cyclic GFR-binding peptide
  MOD_RES (2), (3), (36), (38): Xaa is C or S
  MOD_RES (17), (18), (19), (20), (21): Xaa is A or G
  MOD_RES (22), (23), (24), (25): Xaa is A or G or is absent
PXXVPQALSPINILYFXXXXXXXXXYGKIPMIVRSXKX

SEQ ID NO: 33844 - protein, 37 aa, Artificial Sequence
  Non-cyclic GFR-binding peptide
  MOD_RES (6), (7): Xaa is C or S
GIPEPXXVPEKMEPISILYLDENKNVVKFKYENMTVE

SEQ ID NO: 33845 - protein, 38 aa, Artificial Sequence
  Non-cyclic GFR-binding peptide
  MOD_RES (4), (5): Xaa is C or S
  MOD_RES (19), (20), (21), (22), (23): Xaa is A or G
  MOD_RES (24), (25), (26), (27): Xaa is A or G or is absent
PEPXXVPEKMNAISILYFXXXXXXXXXLKKYRNMTVES

SEQ ID NO: 33846 - protein, 38 aa, Artificial Sequence
  Non-cyclic GFR-binding peptide
  MOD_RES (4), (5), (37): Xaa is C or S
AGPXXTPTKMSATSMLYYNDKQQIILRKHRGMVVDRXG

SEQ ID NO: 33847 - protein, 37 aa, Artificial Sequence
  Non-cyclic GFR-binding peptide
  MOD_RES (2), (3), (35), (37): Xaa is C or S
TXXVPTRLSPISILYKDSANNVVLKYHYDMVVESXGX

SEQ ID NO: 33848 - protein, 38 aa, Artificial Sequence
  Non-cyclic GFR-binding peptide
  MOD_RES (4), (5), (37): Xaa is C or S
PASXXVPARLSATSILYYDAANNVVLRKHRDMVVEAXG

SEQ ID NO: 33849 - protein, 32 aa, Artificial Sequence
  Non-cyclic GFR-binding peptide
  MOD_RES (1), (32): Xaa is C or S
XVPQALSPINILYFVGRKPKVYGKIPMIVRSX

SEQ ID NO: 33850 - protein, 36 aa, Artificial Sequence
  Non-cyclic GFR-binding peptide
  MOD_RES (1), (35): Xaa is C or S
  MOD_RES (15), (16), (17), (18), (19): Xaa is A or G
  MOD_RES (20), (21), (22), (23): Xaa is A or G or is absent
XTPTKMSPISMLYKXXXXXXXXXLKYHYGMVVDRXG

SEQ ID NO: 33851 - protein, 36 aa, Artificial Sequence
  Non-cyclic GFR-binding peptide
  MOD_RES (1), (35): Xaa is C or S
  MOD_RES (15), (16), (17), (18), (19): Xaa is A or G
  MOD_RES (20), (21), (22), (23): Xaa is A or G or is absent
XVPTRLSPISILYKXXXXXXXXXLKYHYDMVVESXG

SEQ ID NO: 33852 - protein, 40 aa, Artificial Sequence
  Non-cyclic GFR-binding peptide
  MOD_RES (6), (7): Xaa is C or S
  MOD_RES (21), (22), (23), (24), (25): Xaa is A or G
  MOD_RES (26), (27), (28), (29): Xaa is A or G or is absent
HVPKPXXAPTKLSPISVLYKXXXXXXXXXLKYHYNMVVRS

SEQ ID NO: 33853 - protein, 36 aa, Artificial Sequence
  Non-cyclic GFR-binding peptide
  MOD_RES (2), (3), (34), (36): Xaa is C or S
TXXAPVKTSPISMLYKDNGRVLLLKYHYMIVEEXGX

SEQ ID NO: 33854 - protein, 34 aa, Artificial Sequence
  Non-cyclic GFR-binding peptide
  MOD_RES (1), (1): Xaa is C or S
  MOD_RES (15), (16), (17), (18), (19): Xaa is A or G
  MOD_RES (20), (21), (22), (23): Xaa is A or G or is absent
XTPTKMSATSMLYYXXXXXXXXXLRKHRGMVVDR

SEQ ID NO: 33855 - protein, 37 aa, Artificial Sequence
  Non-cyclic GFR-binding peptide
  MOD_RES (3), (4): Xaa is C or S
  MOD_RES (18), (19), (20), (21), (22): Xaa is A or G
  MOD_RES (23), (24), (25), (26): Xaa is A or G or is absent
PTXXVPTRLEPISILYLXXXXXXXXXKFKYEDMVVES

SEQ ID NO: 33856 - protein, 35 aa, Artificial Sequence
  Non-cyclic GFR-binding peptide
  MOD_RES (2), (3), (35): Xaa is C or S
PXXVPEKMSPISILYKDENKNVVLKYHYNMTVESX

SEQ ID NO: 33857 - protein, 33 aa, Artificial Sequence
  Non-cyclic GFR-binding peptide
  MOD_RES (1), (32): Xaa is C or S
XAPVKTSPISMLYKDNGRVLLLKYHYMIVEEXG

SEQ ID NO: 33858 - protein, 33 aa, Artificial Sequence
  Non-cyclic GFR-binding peptide
  MOD_RES (33), (33): Xaa is C or S
  MOD_RES (14), (15), (16), (17), (18): Xaa is A or G
  MOD_RES (19), (20), (21), (22): Xaa is A or G or is absent
VPQALSPINILYFXXXXXXXXXYGKIPMIVRSX

SEQ ID NO: 33859 - protein, 40 aa, Artificial Sequence
  Non-cyclic GFR-binding peptide
  MOD_RES (6), (7), (39): Xaa is C or S
GSAGPXXTPTKMEPISMLYLNDKQQIIKFKYEGMVVDRXG

SEQ ID NO: 33860 - protein, 31 aa, Artificial Sequence
  Non-cyclic GFR-binding peptide
  MOD_RES (1), (1): Xaa is C or S
XVPQDLSPINILYFVGRTPKVYGKIPMVVKS

SEQ ID NO: 33861 - protein, 37 aa, Artificial Sequence
  Non-cyclic GFR-binding peptide
  MOD_RES (2), (3), (37): Xaa is C or S
  MOD_RES (17), (18), (19), (20), (21): Xaa is A or G
  MOD_RES (22), (23), (24), (25): Xaa is A or G or is absent
PXXVPEKMSPINILYFXXXXXXXXXYGKIPNMTVESX

SEQ ID NO: 33862 - protein, 38 aa, Artificial Sequence
  Non-cyclic GFR-binding peptide
  MOD_RES (4), (5): Xaa is C or S
  MOD_RES (19), (20), (21), (22), (23): Xaa is A or G
  MOD_RES (24), (25), (26), (27): Xaa is A or G or is absent
AGPXXTPTKMSPISMLYKXXXXXXXXXLKYHYGMVVDR

SEQ ID NO: 33863 - protein, 35 aa, Artificial Sequence
  Non-cyclic GFR-binding peptide
  MOD_RES (2), (3): Xaa is C or S
  MOD_RES (17), (18), (19), (20), (21): Xaa is A or G
  MOD_RES (22), (23), (24), (25): Xaa is A or G or is absent
TXXVPTRLSPISILYKXXXXXXXXXLKYHYDMVVE

SEQ ID NO: 33864 - protein, 35 aa, Artificial Sequence
  Non-cyclic GFR-binding peptide
  MOD_RES (2), (3): Xaa is C or S
  MOD_RES (17), (18), (19), (20), (21): Xaa is A or G
  MOD_RES (22), (23), (24), (25): Xaa is A or G or is absent
TXXVPTRLEPISILYLXXXXXXXXXKFKYEDMVVE

SEQ ID NO: 33865 - protein, 37 aa, Artificial Sequence
  Non-cyclic GFR-binding peptide
  MOD_RES (4), (5): Xaa is C or S
  MOD_RES (19), (20), (21), (22), (23): Xaa is A or G
  MOD_RES (24), (25), (26), (27): Xaa is A or G or is absent
PEPXXVPEKMSATSILYYXXXXXXXXXLRKHRNMTVE

SEQ ID NO: 33866 - protein, 35 aa, Artificial Sequence
  Non-cyclic GFR-binding peptide
  MOD_RES (32), (34): Xaa is C or S
VPARLSATSILYYDAANNVVLRKHRDMVVEAXGXR

SEQ ID NO: 33867 - protein, 40 aa, Artificial Sequence
  Non-cyclic GFR-binding peptide
  MOD_RES (5), (6), (37), (39): Xaa is C or S
VPSTXXAPVKTEPISMLYLDNGRVLLKFKYEMIVEEXGXL

SEQ ID NO: 33868 - protein, 38 aa, Artificial Sequence
  Non-cyclic GFR-binding peptide
  MOD_RES (3), (4), (35), (37): Xaa is C or S
APXXVPQALSPINILYFVGRKPKVYGKIPMIVRSXKXS

SEQ ID NO: 33869 - protein, 40 aa, Artificial Sequence
  Non-cyclic GFR-binding peptide
  MOD_RES (2), (3), (37), (39): Xaa is C or S
  MOD_RES (17), (18), (19), (20), (21): Xaa is A or G
  MOD_RES (22), (23), (24), (25): Xaa is A or G or is absent
TXXVPTRLSPISILYKXXXXXXXXXLKYHYDMVVESXGXR

SEQ ID NO: 33870 - protein, 37 aa, Artificial Sequence
  Non-cyclic GFR-binding peptide
  MOD_RES (1), (35), (37): Xaa is C or S
  MOD_RES (15), (16), (17), (18), (19): Xaa is A or G
  MOD_RES (20), (21), (22), (23): Xaa is A or G or is absent
XVPEKMSATSILYYXXXXXXXXXLRKHRNMTVESXAX

SEQ ID NO: 33871 - protein, 35 aa, Artificial Sequence
  Non-cyclic GFR-binding peptide
  MOD_RES (1), (33), (35): Xaa is C or S
XVPEKMSPISILYKDENKNVVLKYHYNMTVESXAX

SEQ ID NO: 33872 - protein, 40 aa, Artificial Sequence
  Non-cyclic GFR-binding peptide
  MOD_RES (2), (3), (37), (39): Xaa is C or S
  MOD_RES (17), (18), (19), (20), (21): Xaa is A or G
  MOD_RES (22), (23), (24), (25): Xaa is A or G or is absent
PXXTPTKMSATSMLYYXXXXXXXXXLRKHRGMVVDRXGXS

SEQ ID NO: 33873 - protein, 34 aa, Artificial Sequence
  Non-cyclic GFR-binding peptide
  MOD_RES (1), (2): Xaa is C or S
  MOD_RES (16), (17), (18), (19), (20): Xaa is A or G
  MOD_RES (21), (22), (23), (24): Xaa is A or G or is absent
XXVPEKMNAISILYFXXXXXXXXXLKKYRNMTVE

SEQ ID NO: 33874 - protein, 32 aa, Artificial Sequence
  Non-cyclic GFR-binding peptide
  MOD_RES (31), (31): Xaa is C or S
VSQDLSPINILYFIGKTPKIYGKIPMIVKSXK

SEQ ID NO: 33875 - protein, 35 aa, Artificial Sequence
  Non-cyclic GFR-binding peptide
  MOD_RES (3), (4), (35): Xaa is C or S
STXXAPVKTSPISMLYKDNGRVLLLKYHYMIVEEX

SEQ ID NO: 33876 - protein, 40 aa, Artificial Sequence
  Non-cyclic GFR-binding peptide
  MOD_RES (4), (5), (39): Xaa is C or S
  MOD_RES (19), (20), (21), (22), (23): Xaa is A or G
  MOD_RES (24), (25), (26), (27): Xaa is A or G or is absent
PASXXVPARLSATSILYYXXXXXXXXXLRKHRDMVVEAXG

SEQ ID NO: 33877 - protein, 33 aa, Artificial Sequence
  Non-cyclic GFR-binding peptide
  MOD_RES (2), (3): Xaa is C or S
TXXAPVKTEPISMLYLDNGRVLLKFKYEMIVEE

SEQ ID NO: 33878 - protein, 39 aa, Artificial Sequence
  Non-cyclic GFR-binding peptide
  MOD_RES (2), (3), (37), (39): Xaa is C or S
  MOD_RES (17), (18), (19), (20), (21): Xaa is A or G
  MOD_RES (22), (23), (24), (25): Xaa is A or G or is absent
PXXTPTKMSPISMLYKXXXXXXXXXLKYHYGMVVDRXGX

SEQ ID NO: 33879 - protein, 36 aa, Artificial Sequence
  Non-cyclic GFR-binding peptide
  MOD_RES (3), (4): Xaa is C or S
  MOD_RES (18), (19), (20), (21), (22): Xaa is A or G
  MOD_RES (23), (24), (25), (26): Xaa is A or G or is absent
ASXXVPARLSATSILYYXXXXXXXXXLRKHRDMVVE

SEQ ID NO: 33880 - protein, 36 aa, Artificial Sequence
  Non-cyclic GFR-binding peptide
  MOD_RES (2), (3), (35): Xaa is C or S
TXXVPTRLSATSILYYDSANNVVLRKHRDMVVESXG

SEQ ID NO: 33881 - protein, 37 aa, Artificial Sequence
  Non-cyclic GFR-binding peptide
  MOD_RES (3), (4), (36): Xaa is C or S
PTXXVPTRLEPISILYLDSANNVVKFKYEDMVVESXG

SEQ ID NO: 33882 - protein, 38 aa, Artificial Sequence
  Non-cyclic GFR-binding peptide
  MOD_RES (4), (5), (38): Xaa is C or S
  MOD_RES (19), (20), (21), (22), (23): Xaa is A or G
  MOD_RES (24), (25), (26), (27): Xaa is A or G or is absent
AAPXXVPQALSPINILYFXXXXXXXXXYGKIPMIVRSX

SEQ ID NO: 33883 - protein, 42 aa, Artificial Sequence
  Non-cyclic GFR-binding peptide
  MOD_RES (5), (6), (40), (42): Xaa is C or S
  MOD_RES (20), (21), (22), (23), (24): Xaa is A or G
  MOD_RES (25), (26), (27), (28): Xaa is A or G or is absent
TPPTXXVPTRLEPISILYLXXXXXXXXXKFKYEDMVVESXGX

SEQ ID NO: 33884 - protein, 39 aa, Artificial Sequence
  Non-cyclic GFR-binding peptide
  MOD_RES (6), (7), (39): Xaa is C or S
STPPTXXVPTRLSATSILYYDSANNVVLRKHRDMVVESX

SEQ ID NO: 33885 - protein, 41 aa, Artificial Sequence
  Non-cyclic GFR-binding peptide
  MOD_RES (5), (6), (40): Xaa is C or S
  MOD_RES (20), (21), (22), (23), (24): Xaa is A or G
  MOD_RES (25), (26), (27), (28): Xaa is A or G or is absent
IPEPXXVPEKMSATSILYYXXXXXXXXXLRKHRNMTVESXA

SEQ ID NO: 33886 - protein, 34 aa, Artificial Sequence
  Non-cyclic GFR-binding peptide
  MOD_RES (34), (34): Xaa is C or S
  MOD_RES (14), (15), (16), (17), (18): Xaa is A or G
  MOD_RES (19), (20), (21), (22): Xaa is A or G or is absent
TPTKMSPISMLYKXXXXXXXXXLKYHYGMVVDRX

SEQ ID NO: 33887 - protein, 43 aa, Artificial Sequence
  Non-cyclic GFR-binding peptide
  MOD_RES (6), (7), (41), (43): Xaa is C or S
  MOD_RES (21), (22), (23), (24), (25): Xaa is A or G
  MOD_RES (26), (27), (28), (29): Xaa is A or G or is absent
GIPEPXXVPEKMEPISILYLXXXXXXXXXKFKYENMTVESXAX

SEQ ID NO: 33888 - protein, 39 aa, Artificial Sequence
  Non-cyclic GFR-binding peptide
  MOD_RES (3), (4), (36), (38): Xaa is C or S
EPXXVPEKMNAISILYFDENKNVVLKKYRNMTVESXAXR

SEQ ID NO: 33889 - protein, 35 aa, Artificial Sequence
  Non-cyclic GFR-binding peptide
  MOD_RES (3), (4), (35): Xaa is C or S
STXXAPVKTSATSMLYYDNGRVLLLRKHRMIVEEX

SEQ ID NO: 33890 - protein, 39 aa, Artificial Sequence
  Non-cyclic GFR-binding peptide
  MOD_RES (3), (4), (38): Xaa is C or S
  MOD_RES (18), (19), (20), (21), (22): Xaa is A or G
  MOD_RES (23), (24), (25), (26): Xaa is A or G or is absent
ASXXVPARLSATSILYYXXXXXXXXXLRKHRDMVVEAXG

SEQ ID NO: 33891 - protein, 36 aa, Artificial Sequence
  Non-cyclic GFR-binding peptide
  MOD_RES (34), (36): Xaa is C or S
  MOD_RES (14), (15), (16), (17), (18): Xaa is A or G
  MOD_RES (19), (20), (21), (22): Xaa is A or G or is absent
VPTRLSPISILYKXXXXXXXXXLKYHYDMVVESXGX

SEQ ID NO: 33892 - protein, 40 aa, Artificial Sequence
  Non-cyclic GFR-binding peptide
  MOD_RES (6), (7), (39): Xaa is C or S
GIPEPXXVPEKMSATSILYYDENKNVVLRKHRNMTVESXA

SEQ ID NO: 33893 - protein, 36 aa, Artificial Sequence
  Non-cyclic GFR-binding peptide
  MOD_RES (3), (4), (36): Xaa is C or S
GPXXTPTKMSATSMLYYNDKQQIILRKHRGMVVDRX

SEQ ID NO: 33894 - protein, 40 aa, Artificial Sequence
  Non-cyclic GFR-binding peptide
  MOD_RES (6), (7): Xaa is C or S
  MOD_RES (21), (22), (23), (24), (25): Xaa is A or G
  MOD_RES (26), (27), (28), (29): Xaa is A or G or is absent
GSAGPXXTPTKMEPISMLYLXXXXXXXXXKFKYEGMVVDR

SEQ ID NO: 33895 - protein, 37 aa, Artificial Sequence
  Non-cyclic GFR-binding peptide
  MOD_RES (1), (2), (36): Xaa is C or S
  MOD_RES (16), (17), (18), (19), (20): Xaa is A or G
  MOD_RES (21), (22), (23), (24): Xaa is A or G or is absent
XXVPEKMSATSILYYXXXXXXXXXLRKHRNMTVESXA

SEQ ID NO: 33896 - protein, 38 aa, Artificial Sequence
  Non-cyclic GFR-binding peptide
  MOD_RES (1), (35), (37): Xaa is C or S
  MOD_RES (15), (16), (17), (18), (19): Xaa is A or G
  MOD_RES (20), (21), (22), (23): Xaa is A or G or is absent
XVPTRLSPISILYKXXXXXXXXXLKYHYDMVVESXGXR

SEQ ID NO: 33897 - protein, 39 aa, Artificial Sequence
  Non-cyclic GFR-binding peptide
  MOD_RES (2), (3), (37), (39): Xaa is C or S
  MOD_RES (17), (18), (19), (20), (21): Xaa is A or G
  MOD_RES (22), (23), (24), (25): Xaa is A or G or is absent
SXXVPARLSATSILYYXXXXXXXXXLRKHRDMVVEAXGX

SEQ ID NO: 33898 - protein, 39 aa, Artificial Sequence
  Non-cyclic GFR-binding peptide
  MOD_RES (3), (4), (36), (38): Xaa is C or S
PTXXVPTRLEPISILYLDSANNVVKFKYEDMVVESXGXR

SEQ ID NO: 33899 - protein, 31 aa, Artificial Sequence
  Non-cyclic GFR-binding peptide
TPTKMEPISMLYLNDKQQIIKFKYEGMVVDR

SEQ ID NO: 33900 - protein, 38 aa, Artificial Sequence
  Non-cyclic GFR-binding peptide
  MOD_RES (4), (5), (36), (38): Xaa is C or S
ASPXXVPQDLSPINILYFVGRTPKVYGKIPMVVKSXKX

SEQ ID NO: 33901 - protein, 36 aa, Artificial Sequence
  Non-cyclic GFR-binding peptide
  MOD_RES (2), (3), (35): Xaa is C or S
PXXVPEKMSPINILYFDENKNVVYGKIPNMTVESXA

SEQ ID NO: 33902 - protein, 33 aa, Artificial Sequence
  Non-cyclic GFR-binding peptide
  MOD_RES (2), (3): Xaa is C or S
PXXTPTKMSATSMLYYNDKQQIILRKHRGMVVD

SEQ ID NO: 33903 - protein, 35 aa, Artificial Sequence
  Non-cyclic GFR-binding peptide
  MOD_RES (32), (34): Xaa is C or S
VPEKMSPINILYFDENKNVVYGKIPNMTVESXAXR

SEQ ID NO: 33904 - protein, 35 aa, Artificial Sequence
  Non-cyclic GFR-binding peptide
  MOD_RES (1), (2), (35): Xaa is C or S
  MOD_RES (16), (17), (18), (19), (20): Xaa is A or G
  MOD_RES (21), (22), (23), (24): Xaa is A or G or is absent
XXAPVKTEPISMLYLXXXXXXXXXKFKYEMIVEEX

SEQ ID NO: 33905 - protein, 39 aa, Artificial Sequence
  Non-cyclic GFR-binding peptide
  MOD_RES (6), (7): Xaa is C or S
  MOD_RES (21), (22), (23), (24), (25): Xaa is A or G
  MOD_RES (26), (27), (28), (29): Xaa is A or G or is absent
RVPSTXXAPVKTSATSMLYYXXXXXXXXXLRKHRMIVEE

SEQ ID NO: 33906 - protein, 36 aa, Artificial Sequence
  Non-cyclic GFR-binding peptide
  MOD_RES (1), (35): Xaa is C or S
  MOD_RES (15), (16), (17), (18), (19): Xaa is A or G
  MOD_RES (20), (21), (22), (23): Xaa is A or G or is absent
XVPEKMEPISILYLXXXXXXXXXKFKYENMTVESXA

SEQ ID NO: 33907 - protein, 40 aa, Artificial Sequence
  Non-cyclic GFR-binding peptide
  MOD_RES (6), (7), (39): Xaa is C or S
STPPTXXVPTRLSPISILYKDSANNVVLKYHYDMVVESXG

SEQ ID NO: 33908 - protein, 41 aa, Artificial Sequence
  Non-cyclic GFR-binding peptide
  MOD_RES (5), (6), (39), (41): Xaa is C or S
  MOD_RES (20), (21), (22), (23), (24): Xaa is A or G
  MOD_RES (25), (26), (27), (28): Xaa is A or G or is absent
VPSTXXAPVKTSATSMLYYXXXXXXXXXLRKHRMIVEEXGX

SEQ ID NO: 33909 - protein, 37 aa, Artificial Sequence
  Non-cyclic GFR-binding peptide
  MOD_RES (2), (3), (34), (36): Xaa is C or S
PXXVPQDLSPINILYFVGRTPKVYGKIPMVVKSXKXS

SEQ ID NO: 33910 - protein, 37 aa, Artificial Sequence
  Non-cyclic GFR-binding peptide
  MOD_RES (5), (6), (37): Xaa is C or S
VPSTXXAPVKTSATSMLYYDNGRVLLLRKHRMIVEEX

SEQ ID NO: 33911 - protein, 33 aa, Artificial Sequence
  Non-cyclic GFR-binding peptide
  MOD_RES (1), (2), (33): Xaa is C or S
XXVPQDLSPINILYFVGRTPKVYGKIPMVVKSX

SEQ ID NO: 33912 - protein, 33 aa, Artificial Sequence
  Non-cyclic GFR-binding peptide
  MOD_RES (31), (33): Xaa is C or S
APVKTSATSMLYYDNGRVLLLRKHRMIVEEXGX

SEQ ID NO: 33913 - protein, 34 aa, Artificial Sequence
  Non-cyclic GFR-binding peptide
  MOD_RES (32), (34): Xaa is C or S
VPTRLSATSILYYDSANNVVLRKHRDMVVESXGX

SEQ ID NO: 33914 - protein, 32 aa, Artificial Sequence
  Non-cyclic GFR-binding peptide
  MOD_RES (1), (2): Xaa is C or S
XXTPTKMSATSMLYYNDKQQIILRKHRGMVVD

SEQ ID NO: 33915 - protein, 40 aa, Artificial Sequence
  Non-cyclic GFR-binding peptide
  MOD_RES (5), (6), (39): Xaa is C or S
  MOD_RES (20), (21), (22), (23), (24): Xaa is A or G
  MOD_RES (25), (26), (27), (28): Xaa is A or G or is absent
VPSTXXAPVKTSPISMLYKXXXXXXXXXLKYHYMIVEEXG

SEQ ID NO: 33916 - protein, 35 aa, Artificial Sequence
  Non-cyclic GFR-binding peptide
  MOD_RES (1), (2): Xaa is C or S
  MOD_RES (16), (17), (18), (19), (20): Xaa is A or G
  MOD_RES (21), (22), (23), (24): Xaa is A or G or is absent
XXVPTKLSATSILYYXXXXXXXXXLRKHRGMAVSE

SEQ ID NO: 33917 - protein, 34 aa, Artificial Sequence
  Non-cyclic GFR-binding peptide
  MOD_RES (34), (34): Xaa is C or S
  MOD_RES (14), (15), (16), (17), (18): Xaa is A or G
  MOD_RES (19), (20), (21), (22): Xaa is A or G or is absent
VPTRLEPISILYLXXXXXXXXXKFKYEDMVVESX

SEQ ID NO: 33918 - protein, 42 aa, Artificial Sequence
  Non-cyclic GFR-binding peptide
  MOD_RES (4), (5), (39), (41): Xaa is C or S
  MOD_RES (19), (20), (21), (22), (23): Xaa is A or G
  MOD_RES (24), (25), (26), (27): Xaa is A or G or is absent
PEPXXVPEKMSPISILYKXXXXXXXXXLKYHYNMTVESXAXR

SEQ ID NO: 33919 - protein, 38 aa, Artificial Sequence
  Non-cyclic GFR-binding peptide
  MOD_RES (4), (5), (37): Xaa is C or S
PEPXXVPEKMEPISILYLDENKNVVKFKYENMTVESXA

SEQ ID NO: 33920 - protein, 42 aa, Artificial Sequence
  Non-cyclic GFR-binding peptide
  MOD_RES (6), (7), (41): Xaa is C or S
  MOD_RES (21), (22), (23), (24), (25): Xaa is A or G
  MOD_RES (26), (27), (28), (29): Xaa is A or G or is absent
GSAGPXXTPTKMSATSMLYYXXXXXXXXXLRKHRGMVVDRXG

SEQ ID NO: 33921 - protein, 38 aa, Artificial Sequence
  Non-cyclic GFR-binding peptide
  MOD_RES (1), (2), (36), (38): Xaa is C or S
  MOD_RES (16), (17), (18), (19), (20): Xaa is A or G
  MOD_RES (21), (22), (23), (24): Xaa is A or G or is absent
XXVPTRLSPISILYKXXXXXXXXXLKYHYDMVVESXGX

SEQ ID NO: 33922 - protein, 41 aa, Artificial Sequence
  Non-cyclic GFR-binding peptide
  MOD_RES (5), (6), (40): Xaa is C or S
  MOD_RES (20), (21), (22), (23), (24): Xaa is A or G
  MOD_RES (25), (26), (27), (28): Xaa is A or G or is absent
TPPTXXVPTRLSATSILYYXXXXXXXXXLRKHRDMVVESXG

SEQ ID NO: 33923 - protein, 32 aa, Artificial Sequence
  Non-cyclic GFR-binding peptide
  MOD_RES (32), (32): Xaa is C or S
VPARLSATSILYYDAANNVVLRKHRDMVVEAX

SEQ ID NO: 33924 - protein, 33 aa, Artificial Sequence
  Non-cyclic GFR-binding peptide
  MOD_RES (1), (2): Xaa is C or S
XXVPARLSATSILYYDAANNVVLRKHRDMVVEA

SEQ ID NO: 33925 - protein, 32 aa, Artificial Sequence
  Non-cyclic GFR-binding peptide
  MOD_RES (1), (32): Xaa is C or S
XAPVKTEPISMLYLDNGRVLLKFKYEMIVEEX

SEQ ID NO: 33926 - protein, 39 aa, Artificial Sequence
  Non-cyclic GFR-binding peptide
  MOD_RES (4), (5), (39): Xaa is C or S
  MOD_RES (19), (20), (21), (22), (23): Xaa is A or G
  MOD_RES (24), (25), (26), (27): Xaa is A or G or is absent
SKAXXVPTKLSATSILYYXXXXXXXXXLRKHRGMAVSEX

SEQ ID NO: 33927 - protein, 33 aa, Artificial Sequence
  Non-cyclic GFR-binding peptide
  MOD_RES (1), (1): Xaa is C or S
  MOD_RES (15), (16), (17), (18), (19): Xaa is A or G
  MOD_RES (20), (21), (22), (23): Xaa is A or G or is absent
XVPTRLSPISILYKXXXXXXXXXLKYHYDMVVE

SEQ ID NO: 33928 - protein, 44 aa, Artificial Sequence
  Non-cyclic GFR-binding peptide
  MOD_RES (6), (7), (41), (43): Xaa is C or S
  MOD_RES (21), (22), (23), (24), (25): Xaa is A or G
  MOD_RES (26), (27), (28), (29): Xaa is A or G or is absent
KASKAXXVPTKLSATSILYYXXXXXXXXXLRKHRGMAVSEXGXR

SEQ ID NO: 33929 - protein, 37 aa, Artificial Sequence
  Non-cyclic GFR-binding peptide
  MOD_RES (1), (2), (34), (36): Xaa is C or S
XXVPEKMNAISILYFDENKNVVLKKYRNMTVESXAXR

SEQ ID NO: 33930 - protein, 36 aa, Artificial Sequence
  Non-cyclic GFR-binding peptide
  MOD_RES (3), (4), (35): Xaa is C or S
APXXVPQALSPINILYFVGRKPKVYGKIPMIVRSXK

SEQ ID NO: 33931 - protein, 40 aa, Artificial Sequence
  Non-cyclic GFR-binding peptide
  MOD_RES (5), (6), (40): Xaa is C or S
  MOD_RES (20), (21), (22), (23), (24): Xaa is A or G
  MOD_RES (25), (26), (27), (28): Xaa is A or G or is absent
SAGPXXTPTKMSATSMLYYXXXXXXXXXLRKHRGMVVDRX

SEQ ID NO: 33932 - protein, 34 aa, Artificial Sequence
  Non-cyclic GFR-binding peptide
  MOD_RES (2), (3): Xaa is C or S
PXXVPEKMSPINILYFDENKNVVYGKIPNMTVES

SEQ ID NO: 33933 - protein, 36 aa, Artificial Sequence
  Non-cyclic GFR-binding peptide
  MOD_RES (3), (4): Xaa is C or S
  MOD_RES (18), (19), (20), (21), (22): Xaa is A or G
  MOD_RES (23), (24), (25), (26): Xaa is A or G or is absent
PTXXVPTRLSATSILYYXXXXXXXXXLRKHRDMVVE

SEQ ID NO: 33934 - protein, 42 aa, Artificial Sequence
  Non-cyclic GFR-binding peptide
  MOD_RES (5), (6), (39), (41): Xaa is C or S
  MOD_RES (20), (21), (22), (23), (24): Xaa is A or G
  MOD_RES (25), (26), (27), (28): Xaa is A or G or is absent
VPSTXXAPVKTEPISMLYLXXXXXXXXXKFKYEMIVEEXGXL

SEQ ID NO: 33935 - protein, 37 aa, Artificial Sequence
  Non-cyclic GFR-binding peptide
  MOD_RES (2), (3), (36): Xaa is C or S
  MOD_RES (17), (18), (19), (20), (21): Xaa is A or G
  MOD_RES (22), (23), (24), (25): Xaa is A or G or is absent
PXXVSQDLSPINILYFXXXXXXXXXYGKIPMIVKSXK

SEQ ID NO: 33936 - protein, 39 aa, Artificial Sequence
  Non-cyclic GFR-binding peptide
  MOD_RES (4), (5), (37), (39): Xaa is C or S
PEPXXVPEKMSPISILYKDENKNVVLKYHYNMTVESXAX

SEQ ID NO: 33937 - protein, 38 aa, Artificial Sequence
  Non-cyclic GFR-binding peptide
  MOD_RES (6), (7): Xaa is C or S
GSAGPXXTPTKMSPISMLYKNDKQQIILKYHYGMVVDR

SEQ ID NO: 33938 - protein, 37 aa, Artificial Sequence
  Non-cyclic GFR-binding peptide
  MOD_RES (2), (3), (37): Xaa is C or S
  MOD_RES (17), (18), (19), (20), (21): Xaa is A or G
  MOD_RES (22), (23), (24), (25): Xaa is A or G or is absent
SXXVPARLSATSILYYXXXXXXXXXLRKHRDMVVEAX

SEQ ID NO: 33939 - protein, 34 aa, Artificial Sequence
  Non-cyclic GFR-binding peptide
  MOD_RES (1), (2): Xaa is C or S
  MOD_RES (16), (17), (18), (19), (20): Xaa is A or G
  MOD_RES (21), (22), (23), (24): Xaa is A or G or is absent
XXVPEKMSATSILYYXXXXXXXXXLRKHRNMTVE

SEQ ID NO: 33940 - protein, 35 aa, Artificial Sequence
  Non-cyclic GFR-binding peptide
  MOD_RES (3), (4): Xaa is C or S
PTXXVPTRLSATSILYYDSANNVVLRKHRDMVVES

SEQ ID NO: 33941 - protein, 43 aa, Artificial Sequence
  Non-cyclic GFR-binding peptide
  MOD_RES (6), (7), (40), (42): Xaa is C or S
  MOD_RES (21), (22), (23), (24), (25): Xaa is A or G
  MOD_RES (26), (27), (28), (29): Xaa is A or G or is absent
ASAAPXXVPQALSPINILYFXXXXXXXXXYGKIPMIVRSXKXS

SEQ ID NO: 33942 - protein, 33 aa, Artificial Sequence
  Non-cyclic GFR-binding peptide
  MOD_RES (14), (15), (16), (17), (18): Xaa is A or G
  MOD_RES (19), (20), (21), (22): Xaa is A or G or is absent
VPTKLSATSILYYXXXXXXXXXLRKHRGMAVSE

SEQ ID NO: 33943 - protein, 41 aa, Artificial Sequence
  Non-cyclic GFR-binding peptide
  MOD_RES (6), (7), (39), (41): Xaa is C or S
GSAGPXXTPTKMEPISMLYLNDKQQIIKFKYEGMVVDRXGX

SEQ ID NO: 33944 - protein, 35 aa, Artificial Sequence
  Non-cyclic GFR-binding peptide
  MOD_RES (1), (2): Xaa is C or S
  MOD_RES (16), (17), (18), (19), (20): Xaa is A or G
  MOD_RES (21), (22), (23), (24): Xaa is A or G or is absent
XXVPEKMSPISILYKXXXXXXXXXLKYHYNMTVES

SEQ ID NO: 33945 - protein, 36 aa, Artificial Sequence
  Non-cyclic GFR-binding peptide
  MOD_RES (2), (3): Xaa is C or S
  MOD_RES (17), (18), (19), (20), (21): Xaa is A or G
  MOD_RES (22), (23), (24), (25): Xaa is A or G or is absent
PXXVPEKMSATSILYYXXXXXXXXXLRKHRNMTVES

SEQ ID NO: 33946 - protein, 34 aa, Artificial Sequence
  Non-cyclic GFR-binding peptide
  MOD_RES (32), (34): Xaa is C or S
VPEKMNAISILYFDENKNVVLKKYRNMTVESXAX

SEQ ID NO: 33947 - protein, 39 aa, Artificial Sequence
  Non-cyclic GFR-binding peptide
  MOD_RES (2), (3), (36), (38): Xaa is C or S
  MOD_RES (17), (18), (19), (20), (21): Xaa is A or G
  MOD_RES (22), (23), (24), (25): Xaa is A or G or is absent
TXXAPVKTSPISMLYKXXXXXXXXXLKYHYMIVEEXGXL

SEQ ID NO: 33948 - protein, 35 aa, Artificial Sequence
  Non-cyclic GFR-binding peptide
  MOD_RES (3), (4): Xaa is C or S
GPXXTPTKMEPISMLYLNDKQQIIKFKYEGMVVDR

SEQ ID NO: 33949 - protein, 38 aa, Artificial Sequence
  Non-cyclic GFR-binding peptide
  MOD_RES (5), (6), (37): Xaa is C or S
SAAPXXVPQALSPINILYFVGRKPKVYGKIPMIVRSXK

SEQ ID NO: 33950 - protein, 34 aa, Artificial Sequence
  Non-cyclic GFR-binding peptide
  MOD_RES (2), (3): Xaa is C or S
PXXVPEKMSATSILYYDENKNVVLRKHRNMTVES

SEQ ID NO: 33951 - protein, 39 aa, Artificial Sequence
  Non-cyclic GFR-binding peptide
  MOD_RES (3), (4), (38): Xaa is C or S
  MOD_RES (18), (19), (20), (21), (22): Xaa is A or G
  MOD_RES (23), (24), (25), (26): Xaa is A or G or is absent
EPXXVPEKMEPISILYLXXXXXXXXXKFKYENMTVESXA

SEQ ID NO: 33952 - protein, 41 aa, Artificial Sequence
  Non-cyclic GFR-binding peptide
  MOD_RES (3), (4), (38), (40): Xaa is C or S
  MOD_RES (18), (19), (20), (21), (22): Xaa is A or G
  MOD_RES (23), (24), (25), (26): Xaa is A or G or is absent
KAXXVPTKLSATSILYYXXXXXXXXXLRKHRGMAVSEXGXR

SEQ ID NO: 33953 - protein, 35 aa, Artificial Sequence
  Non-cyclic GFR-binding peptide
  MOD_RES (1), (2), (33), (35): Xaa is C or S
XXAPVKTSATSMLYYDNGRVLLLRKHRMIVEEXGX

SEQ ID NO: 33954 - protein, 37 aa, Artificial Sequence
  Non-cyclic GFR-binding peptide
  MOD_RES (4), (5): Xaa is C or S
  MOD_RES (19), (20), (21), (22), (23): Xaa is A or G
  MOD_RES (24), (25), (26), (27): Xaa is A or G or is absent
AGPXXTPTKMSPISMLYKXXXXXXXXXLKYHYGMVVD

SEQ ID NO: 33955 - protein, 35 aa, Artificial Sequence
  Non-cyclic GFR-binding peptide
  MOD_RES (1), (35): Xaa is C or S
  MOD_RES (15), (16), (17), (18), (19): Xaa is A or G
  MOD_RES (20), (21), (22), (23): Xaa is A or G or is absent
XVPTRLEPISILYLXXXXXXXXXKFKYEDMVVESX

SEQ ID NO: 33956 - protein, 32 aa, Artificial Sequence
  Non-cyclic GFR-binding peptide
  MOD_RES (14), (15), (16), (17), (18): Xaa is A or G
  MOD_RES (19), (20), (21), (22): Xaa is A or G or is absent
APVKTSATSMLYYXXXXXXXXXLRKHRMIVEE

SEQ ID NO: 33957 - protein, 37 aa, Artificial Sequence
  Non-cyclic GFR-binding peptide
  MOD_RES (3), (4), (35), (37): Xaa is C or S
SPXXVSQDLSPINILYFIGKTPKIYGKIPMIVKSXKX

SEQ ID NO: 33958 - protein, 37 aa, Artificial Sequence
  Non-cyclic GFR-binding peptide
  MOD_RES (3), (4): Xaa is C or S
  MOD_RES (18), (19), (20), (21), (22): Xaa is A or G
  MOD_RES (23), (24), (25), (26): Xaa is A or G or is absent
KAXXVPTKLSATSILYYXXXXXXXXXLRKHRGMAVSE

SEQ ID NO: 33959 - protein, 35 aa, Artificial Sequence
  Non-cyclic GFR-binding peptide
  MOD_RES (32), (34): Xaa is C or S
VPTKLSATSILYYDKGVVTYLRKHRGMAVSEXGXR

SEQ ID NO: 33960 - protein, 43 aa, Artificial Sequence
  Non-cyclic GFR-binding peptide
  MOD_RES (5), (6), (40), (42): Xaa is C or S
  MOD_RES (20), (21), (22), (23), (24): Xaa is A or G
  MOD_RES (25), (26), (27), (28): Xaa is A or G or is absent
SAGPXXTPTKMSPISMLYKXXXXXXXXXLKYHYGMVVDRXGXS

SEQ ID NO: 33961 - protein, 40 aa, Artificial Sequence
  Non-cyclic GFR-binding peptide
  MOD_RES (4), (5), (39): Xaa is C or S
  MOD_RES (19), (20), (21), (22), (23): Xaa is A or G
  MOD_RES (24), (25), (26), (27): Xaa is A or G or is absent
PEPXXVPEKMEPISILYLXXXXXXXXXKFKYENMTVESXA

SEQ ID NO: 33962 - protein, 36 aa, Artificial Sequence
  Non-cyclic GFR-binding peptide
  MOD_RES (3), (4): Xaa is C or S
  MOD_RES (18), (19), (20), (21), (22): Xaa is A or G
  MOD_RES (23), (24), (25), (26): Xaa is A or G or is absent
GPXXTPTKMSPISMLYKXXXXXXXXXLKYHYGMVVD

SEQ ID NO: 33963 - protein, 38 aa, Artificial Sequence
  Non-cyclic GFR-binding peptide
  MOD_RES (2), (3), (37): Xaa is C or S
  MOD_RES (17), (18), (19), (20), (21): Xaa is A or G
  MOD_RES (22), (23), (24), (25): Xaa is A or G or is absent
PXXTPTKMSATSMLYYXXXXXXXXXLRKHRGMVVDRXG

SEQ ID NO: 33964 - protein, 39 aa, Artificial Sequence
  Non-cyclic GFR-binding peptide
  MOD_RES (6), (7), (39): Xaa is C or S
STPPTXXVPTRLEPISILYLDSANNVVKFKYEDMVVESX

SEQ ID NO: 33965 - protein, 34 aa, Artificial Sequence
  Non-cyclic GFR-binding peptide
  MOD_RES (1), (1): Xaa is C or S
  MOD_RES (15), (16), (17), (18), (19): Xaa is A or G
  MOD_RES (20), (21), (22), (23): Xaa is A or G or is absent
XVPEKMSPISILYKXXXXXXXXXLKYHYNMTVES

SEQ ID NO: 33966 - protein, 34 aa, Artificial Sequence
  Non-cyclic GFR-binding peptide
  MOD_RES (34), (34): Xaa is C or S
  MOD_RES (14), (15), (16), (17), (18): Xaa is A or G
  MOD_RES (19), (20), (21), (22): Xaa is A or G or is absent
VPTRLSPISILYKXXXXXXXXXLKYHYDMVVESX

SEQ ID NO: 33967 - protein, 35 aa, Artificial Sequence
  Non-cyclic GFR-binding peptide
  MOD_RES (4), (5): Xaa is C or S
PEPXXVPEKMEPISILYLDENKNVVKFKYENMTVE

SEQ ID NO: 33968 - protein, 39 aa, Artificial Sequence
  Non-cyclic GFR-binding peptide
  MOD_RES (5), (6), (39): Xaa is C or S
  MOD_RES (20), (21), (22), (23), (24): Xaa is A or G
  MOD_RES (25), (26), (27), (28): Xaa is A or G or is absent
SASPXXVPQDLSPINILYFXXXXXXXXXYGKIPMVVKSX

SEQ ID NO: 33969 - protein, 42 aa, Artificial Sequence
  Non-cyclic GFR-binding peptide
  MOD_RES (6), (7), (41): Xaa is C or S
  MOD_RES (21), (22), (23), (24), (25): Xaa is A or G
  MOD_RES (26), (27), (28), (29): Xaa is A or G or is absent
STPPTXXVPTRLSATSILYYXXXXXXXXXLRKHRDMVVESXG

SEQ ID NO: 33970 - protein, 31 aa, Artificial Sequence
  Non-cyclic GFR-binding peptide
VPEKMSPISILYKDENKNVVLKYHYNMTVES

SEQ ID NO: 33971 - protein, 34 aa, Artificial Sequence
  Non-cyclic GFR-binding peptide
  MOD_RES (3), (4): Xaa is C or S
EPXXVPEKMSPISILYKDENKNVVLKYHYNMTVE

SEQ ID NO: 33972 - protein, 39 aa, Artificial Sequence
  Non-cyclic GFR-binding peptide
  MOD_RES (1), (2), (36), (38): Xaa is C or S
  MOD_RES (16), (17), (18), (19), (20): Xaa is A or G
  MOD_RES (21), (22), (23), (24): Xaa is A or G or is absent
XXVPTRLEPISILYLXXXXXXXXXKFKYEDMVVESXGXR

SEQ ID NO: 33973 - protein, 40 aa, Artificial Sequence
  Non-cyclic GFR-binding peptide
  MOD_RES (4), (5), (39): Xaa is C or S
  MOD_RES (19), (20), (21), (22), (23): Xaa is A or G
  MOD_RES (24), (25), (26), (27): Xaa is A or G or is absent
PEPXXVPEKMNAISILYFXXXXXXXXXLKKYRNMTVESXA

SEQ ID NO: 33974 - protein, 37 aa, Artificial Sequence
  Non-cyclic GFR-binding peptide
  MOD_RES (4), (5): Xaa is C or S
  MOD_RES (19), (20), (21), (22), (23): Xaa is A or G
  MOD_RES (24), (25), (26), (27): Xaa is A or G or is absent
PPTXXVPTRLSPISILYKXXXXXXXXXLKYHYDMVVE

SEQ ID NO: 33975 - protein, 38 aa, Artificial Sequence
  Non-cyclic GFR-binding peptide
  MOD_RES (3), (4), (36), (38): Xaa is C or S
GPXXTPTKMSPISMLYKNDKQQIILKYHYGMVVDRXGX

SEQ ID NO: 33976 - protein, 37 aa, Artificial Sequence
  Non-cyclic GFR-binding peptide
  MOD_RES (1), (35), (37): Xaa is C or S
  MOD_RES (15), (16), (17), (18), (19): Xaa is A or G
  MOD_RES (20), (21), (22), (23): Xaa is A or G or is absent
XVPTRLEPISILYLXXXXXXXXXKFKYEDMVVESXGX

SEQ ID NO: 33977 - protein, 34 aa, Artificial Sequence
  Non-cyclic GFR-binding peptide
  MOD_RES (34), (34): Xaa is C or S
  MOD_RES (14), (15), (16), (17), (18): Xaa is A or G
  MOD_RES (19), (20), (21), (22): Xaa is A or G or is absent
VPARLSATSILYYXXXXXXXXXLRKHRDMVVEAX

SEQ ID NO: 33978 - protein, 35 aa, Artificial Sequence
  Non-cyclic GFR-binding peptide
  MOD_RES (1), (35): Xaa is C or S
  MOD_RES (15), (16), (17), (18), (19): Xaa is A or G
  MOD_RES (20), (21), (22), (23): Xaa is A or G or is absent
XTPTKMSPISMLYKXXXXXXXXXLKYHYGMVVDRX

SEQ ID NO: 33979 - protein, 42 aa, Artificial Sequence
  Non-cyclic GFR-binding peptide
  MOD_RES (6), (7), (39), (41): Xaa is C or S
STPPTXXVPTRLEPISILYLDSANNVVKFKYEDMVVESXGXR

SEQ ID NO: 33980 - protein, 41 aa, Artificial Sequence
  Non-cyclic GFR-binding peptide
  MOD_RES (5), (6), (39), (41): Xaa is C or S
  MOD_RES (20), (21), (22), (23), (24): Xaa is A or G
  MOD_RES (25), (26), (27), (28): Xaa is A or G or is absent
VPSTXXAPVKTEPISMLYLXXXXXXXXXKFKYEMIVEEXGX

SEQ ID NO: 33981 - protein, 42 aa, Artificial Sequence
  Non-cyclic GFR-binding peptide
  MOD_RES (5), (6), (40), (42): Xaa is C or S
  MOD_RES (20), (21), (22), (23), (24): Xaa is A or G
  MOD_RES (25), (26), (27), (28): Xaa is A or G or is absent
TPPTXXVPTRLSATSILYYXXXXXXXXXLRKHRDMVVESXGX

SEQ ID NO: 33982 - protein, 35 aa, Artificial Sequence
  Non-cyclic GFR-binding peptide
  MOD_RES (2), (3): Xaa is C or S
  MOD_RES (17), (18), (19), (20), (21): Xaa is A or G
  MOD_RES (22), (23), (24), (25): Xaa is A or G or is absent
PXXTPTKMEPISMLYLXXXXXXXXXKFKYEGMVVD

SEQ ID NO: 33983 - protein, 33 aa, Artificial Sequence
  Non-cyclic GFR-binding peptide
  MOD_RES (1), (2): Xaa is C or S
XXVPEKMNAISILYFDENKNVVLKKYRNMTVES

SEQ ID NO: 33984 - protein, 36 aa, Artificial Sequence
  Non-cyclic GFR-binding peptide
  MOD_RES (1), (2), (36): Xaa is C or S
  MOD_RES (16), (17), (18), (19), (20): Xaa is A or G
  MOD_RES (21), (22), (23), (24): Xaa is A or G or is absent
XXVPEKMEPISILYLXXXXXXXXXKFKYENMTVESX

SEQ ID NO: 33985 - protein, 41 aa, Artificial Sequence
  Non-cyclic GFR-binding peptide
  MOD_RES (6), (7), (41): Xaa is C or S
  MOD_RES (21), (22), (23), (24), (25): Xaa is A or G
  MOD_RES (26), (27), (28), (29): Xaa is A or G or is absent
HVPKPXXAPTKLSPISVLYKXXXXXXXXXLKYHYNMVVRSX

SEQ ID NO: 33986 - protein, 36 aa, Artificial Sequence
  Non-cyclic GFR-binding peptide
  MOD_RES (2), (3), (36): Xaa is C or S
  MOD_RES (17), (18), (19), (20), (21): Xaa is A or G
  MOD_RES (22), (23), (24), (25): Xaa is A or G or is absent
PXXVSQDLSPINILYFXXXXXXXXXYGKIPMIVKSX

SEQ ID NO: 33987 - protein, 44 aa, Artificial Sequence
  Non-cyclic GFR-binding peptide
  MOD_RES (6), (7), (41), (43): Xaa is C or S
  MOD_RES (21), (22), (23), (24), (25): Xaa is A or G
  MOD_RES (26), (27), (28), (29): Xaa is A or G or is absent
GSAGPXXTPTKMSATSMLYYXXXXXXXXXLRKHRGMVVDRXGXS

SEQ ID NO: 33988 - protein, 38 aa, Artificial Sequence
  Non-cyclic GFR-binding peptide
  MOD_RES (6), (7): Xaa is C or S
GIPEPXXVPEKMSPINILYFDENKNVVYGKIPNMTVES

SEQ ID NO: 33989 - protein, 37 aa, Artificial Sequence
  Non-cyclic GFR-binding peptide
  MOD_RES (4), (5): Xaa is C or S
  MOD_RES (19), (20), (21), (22), (23): Xaa is A or G
  MOD_RES (24), (25), (26), (27): Xaa is A or G or is absent
AGPXXTPTKMEPISMLYLXXXXXXXXXKFKYEGMVVD

SEQ ID NO: 33990 - protein, 41 aa, Artificial Sequence
  Non-cyclic GFR-binding peptide
  MOD_RES (3), (4), (38), (40): Xaa is C or S
  MOD_RES (18), (19), (20), (21), (22): Xaa is A or G
  MOD_RES (23), (24), (25), (26): Xaa is A or G or is absent
ASXXVPARLSATSILYYXXXXXXXXXLRKHRDMVVEAXGXR

SEQ ID NO: 33991 - protein, 41 aa, Artificial Sequence
  Non-cyclic GFR-binding peptide
  MOD_RES (6), (7), (39), (41): Xaa is C or S
GIPEPXXVPEKMNAISILYFDENKNVVLKKYRNMTVESXAX

SEQ ID NO: 33992 - protein, 35 aa, Artificial Sequence
  Non-cyclic GFR-binding peptide
  MOD_RES (4), (5): Xaa is C or S
AAPXXVPQALSPINILYFVGRKPKVYGKIPMIVRS

SEQ ID NO: 33993 - protein, 39 aa, Artificial Sequence
  Non-cyclic GFR-binding peptide
  MOD_RES (4), (5), (37), (39): Xaa is C or S
PEPXXVPEKMEPISILYLDENKNVVKFKYENMTVESXAX

SEQ ID NO: 33994 - protein, 38 aa, Artificial Sequence
  Non-cyclic GFR-binding peptide
  MOD_RES (5), (6), (38): Xaa is C or S
APASXXVPARLSATSILYYDAANNVVLRKHRDMVVEAX

SEQ ID NO: 33995 - protein, 38 aa, Artificial Sequence
  Non-cyclic GFR-binding peptide
  MOD_RES (4), (5): Xaa is C or S
  MOD_RES (19), (20), (21), (22), (23): Xaa is A or G
  MOD_RES (24), (25), (26), (27): Xaa is A or G or is absent
PPTXXVPTRLEPISILYLXXXXXXXXXKFKYEDMVVES

SEQ ID NO: 33996 - protein, 41 aa, Artificial Sequence
  Non-cyclic GFR-binding peptide
  MOD_RES (6), (7), (41): Xaa is C or S
  MOD_RES (21), (22), (23), (24), (25): Xaa is A or G
  MOD_RES (26), (27), (28), (29): Xaa is A or G or is absent
GIPEPXXVPEKMSATSILYYXXXXXXXXXLRKHRNMTVESX

SEQ ID NO: 33997 - protein, 34 aa, Artificial Sequence
  Non-cyclic GFR-binding peptide
  MOD_RES (1), (2), (33): Xaa is C or S
XXAPVKTSPISMLYKDNGRVLLLKYHYMIVEEXG

SEQ ID NO: 33998 - protein, 39 aa, Artificial Sequence
  Non-cyclic GFR-binding peptide
  MOD_RES (4), (5), (39): Xaa is C or S
  MOD_RES (19), (20), (21), (22), (23): Xaa is A or G
  MOD_RES (24), (25), (26), (27): Xaa is A or G or is absent
PEPXXVPEKMSATSILYYXXXXXXXXXLRKHRNMTVESX

SEQ ID NO: 33999 - protein, 38 aa, Artificial Sequence
  Non-cyclic GFR-binding peptide
  MOD_RES (2), (3), (35), (37): Xaa is C or S
TXXVPTRLSATSILYYDSANNVVLRKHRDMVVESXGXR

SEQ ID NO: 34000 - protein, 32 aa, Artificial Sequence
  Non-cyclic GFR-binding peptide
  MOD_RES (1), (1): Xaa is C or S
XTPTKMSATSMLYYNDKQQIILRKHRGMVVDR

SEQ ID NO: 34001 - protein, 38 aa, Artificial Sequence
  Non-cyclic GFR-binding peptide
  MOD_RES (4), (5): Xaa is C or S
  MOD_RES (19), (20), (21), (22), (23): Xaa is A or G
  MOD_RES (24), (25), (26), (27): Xaa is A or G or is absent
PEPXXVPEKMEPISILYLXXXXXXXXXKFKYENMTVES

SEQ ID NO: 34002 - protein, 34 aa, Artificial Sequence
  Non-cyclic GFR-binding peptide
  MOD_RES (1), (32), (34): Xaa is C or S
XVSQDLSPINILYFIGKTPKIYGKIPMIVKSXKX

SEQ ID NO: 34003 - protein, 37 aa, Artificial Sequence
  Non-cyclic GFR-binding peptide
  MOD_RES (5), (6), (37): Xaa is C or S
VPSTXXAPVKTSPISMLYKDNGRVLLLKYHYMIVEEX

SEQ ID NO: 34004 - protein, 38 aa, Artificial Sequence
  Non-cyclic GFR-binding peptide
  MOD_RES (5), (6): Xaa is C or S
  MOD_RES (20), (21), (22), (23), (24): Xaa is A or G
  MOD_RES (25), (26), (27), (28): Xaa is A or G or is absent
VPSTXXAPVKTEPISMLYLXXXXXXXXXKFKYEMIVEE

SEQ ID NO: 34005 - protein, 37 aa, Artificial Sequence
  Non-cyclic GFR-binding peptide
  MOD_RES (2), (3), (35), (37): Xaa is C or S
PXXTPTKMEPISMLYLNDKQQIIKFKYEGMVVDRXGX

SEQ ID NO: 34006 - protein, 40 aa, Artificial Sequence
  Non-cyclic GFR-binding peptide
  MOD_RES (4), (5), (38), (40): Xaa is C or S
  MOD_RES (19), (20), (21), (22), (23): Xaa is A or G
  MOD_RES (24), (25), (26), (27): Xaa is A or G or is absent
PSTXXAPVKTSPISMLYKXXXXXXXXXLKYHYMIVEEXGX

SEQ ID NO: 34007 - protein, 36 aa, Artificial Sequence
  Non-cyclic GFR-binding peptide
  MOD_RES (3), (4): Xaa is C or S
  MOD_RES (18), (19), (20), (21), (22): Xaa is A or G
  MOD_RES (23), (24), (25), (26): Xaa is A or G or is absent
KAXXVPTKLSATSILYYXXXXXXXXXLRKHRGMAVS

SEQ ID NO: 34008 - protein, 35 aa, Artificial Sequence
  Non-cyclic GFR-binding peptide
  MOD_RES (2), (3), (35): Xaa is C or S
PXXVPEKMSPINILYFDENKNVVYGKIPNMTVESX

SEQ ID NO: 34009 - protein, 38 aa, Artificial Sequence
  Non-cyclic GFR-binding peptide
  MOD_RES (1), (2), (36), (38): Xaa is C or S
  MOD_RES (16), (17), (18), (19), (20): Xaa is A or G
  MOD_RES (21), (22), (23), (24): Xaa is A or G or is absent
XXVPARLSATSILYYXXXXXXXXXLRKHRDMVVEAXGX

SEQ ID NO: 34010 - protein, 38 aa, Artificial Sequence
  Non-cyclic GFR-binding peptide
  MOD_RES (5), (6), (37): Xaa is C or S
SASPXXVPQDLSPINILYFVGRTPKVYGKIPMVVKSXK

SEQ ID NO: 34011 - protein, 39 aa, Artificial Sequence
  Non-cyclic GFR-binding peptide
  MOD_RES (4), (5), (36), (38): Xaa is C or S
ASPXXVPQDLSPINILYFVGRTPKVYGKIPMVVKSXKXS

SEQ ID NO: 34012 - protein, 42 aa, Artificial Sequence
  Non-cyclic GFR-binding peptide
  MOD_RES (5), (6), (40), (42): Xaa is C or S
  MOD_RES (20), (21), (22), (23), (24): Xaa is A or G
  MOD_RES (25), (26), (27), (28): Xaa is A or G or is absent
IPEPXXVPEKMSATSILYYXXXXXXXXXLRKHRNMTVESXAX

SEQ ID NO: 34013 - protein, 33 aa, Artificial Sequence
  Non-cyclic GFR-binding peptide
  MOD_RES (1), (2): Xaa is C or S
XXVPTRLEPISILYLDSANNVVKFKYEDMVVES

SEQ ID NO: 34014 - protein, 37 aa, Artificial Sequence
  Non-cyclic GFR-binding peptide
  MOD_RES (4), (5), (36): Xaa is C or S
AAPXXVPQALSPINILYFVGRKPKVYGKIPMIVRSXK

SEQ ID NO: 34015 - protein, 39 aa, Artificial Sequence
  Non-cyclic GFR-binding peptide
  MOD_RES (2), (3), (36), (38): Xaa is C or S
  MOD_RES (17), (18), (19), (20), (21): Xaa is A or G
  MOD_RES (22), (23), (24), (25): Xaa is A or G or is absent
PXXVPQDLSPINILYFXXXXXXXXXYGKIPMVVKSXKXS

SEQ ID NO: 34016 - protein, 39 aa, Artificial Sequence
  Non-cyclic GFR-binding peptide
  MOD_RES (3), (4), (37), (39): Xaa is C or S
  MOD_RES (18), (19), (20), (21), (22): Xaa is A or G
  MOD_RES (23), (24), (25), (26): Xaa is A or G or is absent
SPXXVSQDLSPINILYFXXXXXXXXXYGKIPMIVKSXKX

SEQ ID NO: 34017 - protein, 34 aa, Artificial Sequence
  Non-cyclic GFR-binding peptide
  MOD_RES (1), (32), (34): Xaa is C or S
XAPVKTSATSMLYYDNGRVLLLRKHRMIVEEXGX

SEQ ID NO: 34018 - protein, 31 aa, Artificial Sequence
  Non-cyclic GFR-binding peptide
VPTKLSATSILYYDKGVVTYLRKHRGMAVSE

SEQ ID NO: 34019 - protein, 39 aa, Artificial Sequence
  Non-cyclic GFR-binding peptide
  MOD_RES (3), (4), (36), (38): Xaa is C or S
EPXXVPEKMSPISILYKDENKNVVLKYHYNMTVESXAXR

SEQ ID NO: 34020 - protein, 40 aa, Artificial Sequence
  Non-cyclic GFR-binding peptide
  MOD_RES (3), (4), (38), (40): Xaa is C or S
  MOD_RES (18), (19), (20), (21), (22): Xaa is A or G
  MOD_RES (23), (24), (25), (26): Xaa is A or G or is absent
GPXXTPTKMSPISMLYKXXXXXXXXXLKYHYGMVVDRXGX

SEQ ID NO: 34021 - protein, 41 aa, Artificial Sequence
  Non-cyclic GFR-binding peptide
  MOD_RES (6), (7), (40): Xaa is C or S
  MOD_RES (21), (22), (23), (24), (25): Xaa is A or G
  MOD_RES (26), (27), (28), (29): Xaa is A or G or is absent
RVPSTXXAPVKTSPISMLYKXXXXXXXXXLKYHYMIVEEXG

SEQ ID NO: 34022 - protein, 34 aa, Artificial Sequence
  Non-cyclic GFR-binding peptide
  MOD_RES (1), (1): Xaa is C or S
  MOD_RES (15), (16), (17), (18), (19): Xaa is A or G
  MOD_RES (20), (21), (22), (23): Xaa is A or G or is absent
XVPTKLSATSILYYXXXXXXXXXLRKHRGMAVSE

SEQ ID NO: 34023 - protein, 37 aa, Artificial Sequence
  Non-cyclic GFR-binding peptide
  MOD_RES (34), (36): Xaa is C or S
  MOD_RES (14), (15), (16), (17), (18): Xaa is A or G
  MOD_RES (19), (20), (21), (22): Xaa is A or G or is absent
VPEKMEPISILYLXXXXXXXXXKFKYENMTVESXAXR

SEQ ID NO: 34024 - protein, 38 aa, Artificial Sequence
  Non-cyclic GFR-binding peptide
  MOD_RES (6), (7): Xaa is C or S
GSAGPXXTPTKMEPISMLYLNDKQQIIKFKYEGMVVDR

SEQ ID NO: 34025 - protein, 35 aa, Artificial Sequence
  Non-cyclic GFR-binding peptide
  MOD_RES (1), (34): Xaa is C or S
  MOD_RES (15), (16), (17), (18), (19): Xaa is A or G
  MOD_RES (20), (21), (22), (23): Xaa is A or G or is absent
XAPVKTEPISMLYLXXXXXXXXXKFKYEMIVEEXG

SEQ ID NO: 34026 - protein, 35 aa, Artificial Sequence
  Non-cyclic GFR-binding peptide
  MOD_RES (1), (34): Xaa is C or S
  MOD_RES (15), (16), (17), (18), (19): Xaa is A or G
  MOD_RES (20), (21), (22), (23): Xaa is A or G or is absent
XVSQDLSPINILYFXXXXXXXXXYGKIPMIVKSXK

SEQ ID NO: 34027 - protein, 40 aa, Artificial Sequence
  Non-cyclic GFR-binding peptide
  MOD_RES (2), (3), (37), (39): Xaa is C or S
  MOD_RES (17), (18), (19), (20), (21): Xaa is A or G
  MOD_RES (22), (23), (24), (25): Xaa is A or G or is absent
PXXVPEKMSATSILYYXXXXXXXXXLRKHRNMTVESXAXR

SEQ ID NO: 34028 - protein, 38 aa, Artificial Sequence
  Non-cyclic GFR-binding peptide
  MOD_RES (5), (6): Xaa is C or S
  MOD_RES (20), (21), (22), (23), (24): Xaa is A or G
  MOD_RES (25), (26), (27), (28): Xaa is A or G or is absent
VPSTXXAPVKTSPISMLYKXXXXXXXXXLKYHYMIVEE

SEQ ID NO: 34029 - protein, 35 aa, Artificial Sequence
  Non-cyclic GFR-binding peptide
  MOD_RES (2), (3): Xaa is C or S
  MOD_RES (17), (18), (19), (20), (21): Xaa is A or G
  MOD_RES (22), (23), (24), (25): Xaa is A or G or is absent
PXXVPEKMNAISILYFXXXXXXXXXLKKYRNMTVE

SEQ ID NO: 34030 - protein, 34 aa, Artificial Sequence
  Non-cyclic GFR-binding peptide
  MOD_RES (33), (33): Xaa is C or S
  MOD_RES (14), (15), (16), (17), (18): Xaa is A or G
  MOD_RES (19), (20), (21), (22): Xaa is A or G or is absent
VSQDLSPINILYFXXXXXXXXXYGKIPMIVKSXK

SEQ ID NO: 34031 - protein, 30 aa, Artificial Sequence
  Non-cyclic GFR-binding peptide
APVKTEPISMLYLDNGRVLLKFKYEMIVEE

SEQ ID NO: 34032 - protein, 32 aa, Artificial Sequence
  Non-cyclic GFR-binding peptide
  MOD_RES (1), (1): Xaa is C or S
XVPEKMSATSILYYDENKNVVLRKHRNMTVES

SEQ ID NO: 34033 - protein, 40 aa, Artificial Sequence
  Non-cyclic GFR-binding peptide
  MOD_RES (3), (4), (37), (39): Xaa is C or S
  MOD_RES (18), (19), (20), (21), (22): Xaa is A or G
  MOD_RES (23), (24), (25), (26): Xaa is A or G or is absent
STXXAPVKTSATSMLYYXXXXXXXXXLRKHRMIVEEXGXL

SEQ ID NO: 34034 - protein, 35 aa, Artificial Sequence
  Non-cyclic GFR-binding peptide
  MOD_RES (4), (5): Xaa is C or S
PSTXXAPVKTEPISMLYLDNGRVLLKFKYEMIVEE

SEQ ID NO: 34035 - protein, 39 aa, Artificial Sequence
  Non-cyclic GFR-binding peptide
  MOD_RES (6), (7): Xaa is C or S
  MOD_RES (21), (22), (23), (24), (25): Xaa is A or G
  MOD_RES (26), (27), (28), (29): Xaa is A or G or is absent
STPPTXXVPTRLSATSILYYXXXXXXXXXLRKHRDMVVE

SEQ ID NO: 34036 - protein, 35 aa, Artificial Sequence
  Non-cyclic GFR-binding peptide
  MOD_RES (33), (35): Xaa is C or S
  MOD_RES (14), (15), (16), (17), (18): Xaa is A or G
  MOD_RES (19), (20), (21), (22): Xaa is A or G or is absent
VSQDLSPINILYFXXXXXXXXXYGKIPMIVKSXKX

SEQ ID NO: 34037 - protein, 36 aa, Artificial Sequence
  Non-cyclic GFR-binding peptide
  MOD_RES (1), (2), (36): Xaa is C or S
  MOD_RES (16), (17), (18), (19), (20): Xaa is A or G
  MOD_RES (21), (22), (23), (24): Xaa is A or G or is absent
XXVPTKLSATSILYYXXXXXXXXXLRKHRGMAVSEX

SEQ ID NO: 34038 - protein, 43 aa, Artificial Sequence
  Non-cyclic GFR-binding peptide
  MOD_RES (5), (6), (40), (42): Xaa is C or S
  MOD_RES (20), (21), (22), (23), (24): Xaa is A or G
  MOD_RES (25), (26), (27), (28): Xaa is A or G or is absent
APASXXVPARLSATSILYYXXXXXXXXXLRKHRDMVVEAXGXR

SEQ ID NO: 34039 - protein, 33 aa, Artificial Sequence
  Non-cyclic GFR-binding peptide
  MOD_RES (2), (3): Xaa is C or S
PXXVPQALSPINILYFVGRKPKVYGKIPMIVRS

SEQ ID NO: 34040 - protein, 37 aa, Artificial Sequence
  Non-cyclic GFR-binding peptide
  MOD_RES (4), (5), (37): Xaa is C or S
PEPXXVPEKMEPISILYLDENKNVVKFKYENMTVESX

SEQ ID NO: 34041 - protein, 42 aa, Artificial Sequence
  Non-cyclic GFR-binding peptide
  MOD_RES (6), (7), (39), (41): Xaa is C or S
GIPEPXXVPEKMSPINILYFDENKNVVYGKIPNMTVESXAXR

SEQ ID NO: 34042 - protein, 41 aa, Artificial Sequence
  Non-cyclic GFR-binding peptide
  MOD_RES (3), (4), (38), (40): Xaa is C or S
  MOD_RES (18), (19), (20), (21), (22): Xaa is A or G
  MOD_RES (23), (24), (25), (26): Xaa is A or G or is absent
EPXXVPEKMSPISILYKXXXXXXXXXLKYHYNMTVESXAXR

SEQ ID NO: 34043 - protein, 37 aa, Artificial Sequence
  Non-cyclic GFR-binding peptide
  MOD_RES (4), (5): Xaa is C or S
  MOD_RES (19), (20), (21), (22), (23): Xaa is A or G
  MOD_RES (24), (25), (26), (27): Xaa is A or G or is absent
ASPXXVPQDLSPINILYFXXXXXXXXXYGKIPMVVKS

SEQ ID NO: 34044 - protein, 30 aa, Artificial Sequence
  Non-cyclic GFR-binding peptide
VPEKMSATSILYYDENKNVVLRKHRNMTVE

SEQ ID NO: 34045 - protein, 38 aa, Artificial Sequence
  Non-cyclic GFR-binding peptide
  MOD_RES (4), (5), (36), (38): Xaa is C or S
PSTXXAPVKTEPISMLYLDNGRVLLKFKYEMIVEEXGX

SEQ ID NO: 34046 - protein, 41 aa, Artificial Sequence
  Non-cyclic GFR-binding peptide
  MOD_RES (6), (7), (41): Xaa is C or S
  MOD_RES (21), (22), (23), (24), (25): Xaa is A or G
  MOD_RES (26), (27), (28), (29): Xaa is A or G or is absent
KASKAXXVPTKLSATSILYYXXXXXXXXXLRKHRGMAVSEX

SEQ ID NO: 34047 - protein, 32 aa, Artificial Sequence
  Non-cyclic GFR-binding peptide
  MOD_RES (31), (31): Xaa is C or S
APVKTSPISMLYKDNGRVLLLKYHYMIVEEXG

SEQ ID NO: 34048 - protein, 37 aa, Artificial Sequence
  Non-cyclic GFR-binding peptide
  MOD_RES (2), (3), (35), (37): Xaa is C or S
PXXTPTKMSPISMLYKNDKQQIILKYHYGMVVDRXGX

SEQ ID NO: 34049 - protein, 31 aa, Artificial Sequence
  Non-cyclic GFR-binding peptide
TPTKMSPISMLYKNDKQQIILKYHYGMVVDR

SEQ ID NO: 34050 - protein, 36 aa, Artificial Sequence
  Non-cyclic GFR-binding peptide
  MOD_RES (2), (3): Xaa is C or S
  MOD_RES (17), (18), (19), (20), (21): Xaa is A or G
  MOD_RES (22), (23), (24), (25): Xaa is A or G or is absent
PXXVPEKMNAISILYFXXXXXXXXXLKKYRNMTVES

SEQ ID NO: 34051 - protein, 33 aa, Artificial Sequence
  Non-cyclic GFR-binding peptide
  MOD_RES (31), (33): Xaa is C or S
VSQDLSPINILYFIGKTPKIYGKIPMIVKSXKX

SEQ ID NO: 34052 - protein, 36 aa, Artificial Sequence
  Non-cyclic GFR-binding peptide
  MOD_RES (33), (35): Xaa is C or S
  MOD_RES (14), (15), (16), (17), (18): Xaa is A or G
  MOD_RES (19), (20), (21), (22): Xaa is A or G or is absent
VPQALSPINILYFXXXXXXXXXYGKIPMIVRSXKXS

SEQ ID NO: 34053 - protein, 37 aa, Artificial Sequence
  Non-cyclic GFR-binding peptide
  MOD_RES (6), (7): Xaa is C or S
AAPASXXVPARLSATSILYYDAANNVVLRKHRDMVVE

SEQ ID NO: 34054 - protein, 38 aa, Artificial Sequence
  Non-cyclic GFR-binding peptide
  MOD_RES (5), (6), (37): Xaa is C or S
VPSTXXAPVKTSATSMLYYDNGRVLLLRKHRMIVEEXG

SEQ ID NO: 34055 - protein, 44 aa, Artificial Sequence
  Non-cyclic GFR-binding peptide
  MOD_RES (6), (7), (41), (43): Xaa is C or S
  MOD_RES (21), (22), (23), (24), (25): Xaa is A or G
  MOD_RES (26), (27), (28), (29): Xaa is A or G or is absent
HVPKPXXAPTKLSATSVLYYXXXXXXXXXLRKHRNMVVRSXGXH

SEQ ID NO: 34056 - protein, 36 aa, Artificial Sequence
  Non-cyclic GFR-binding peptide
  MOD_RES (1), (34), (36): Xaa is C or S
  MOD_RES (15), (16), (17), (18), (19): Xaa is A or G
  MOD_RES (20), (21), (22), (23): Xaa is A or G or is absent
XVPQALSPINILYFXXXXXXXXXYGKIPMIVRSXKX

SEQ ID NO: 34057 - protein, 32 aa, Artificial Sequence
  Non-cyclic GFR-binding peptide
  MOD_RES (32), (32): Xaa is C or S
VPTRLSATSILYYDSANNVVLRKHRDMVVESX

SEQ ID NO: 34058 - protein, 34 aa, Artificial Sequence
  Non-cyclic GFR-binding peptide
  MOD_RES (1), (34): Xaa is C or S
  MOD_RES (15), (16), (17), (18), (19): Xaa is A or G
  MOD_RES (20), (21), (22), (23): Xaa is A or G or is absent
XVPQDLSPINILYFXXXXXXXXXYGKIPMVVKSX

SEQ ID NO: 34059 - protein, 43 aa, Artificial Sequence
  Non-cyclic GFR-binding peptide
  MOD_RES (6), (7), (41), (43): Xaa is C or S
  MOD_RES (21), (22), (23), (24), (25): Xaa is A or G
  MOD_RES (26), (27), (28), (29): Xaa is A or G or is absent
STPPTXXVPTRLSATSILYYXXXXXXXXXLRKHRDMVVESXGX

SEQ ID NO: 34060 - protein, 35 aa, Artificial Sequence
  Non-cyclic GFR-binding peptide
  MOD_RES (1), (2), (34): Xaa is C or S
XXVPTKLSATSILYYDKGVVTYLRKHRGMAVSEXG

SEQ ID NO: 34061 - protein, 39 aa, Artificial Sequence
  Non-cyclic GFR-binding peptide
  MOD_RES (2), (3), (36), (38): Xaa is C or S
  MOD_RES (17), (18), (19), (20), (21): Xaa is A or G
  MOD_RES (22), (23), (24), (25): Xaa is A or G or is absent
PXXVPQALSPINILYFXXXXXXXXXYGKIPMIVRSXKXS

SEQ ID NO: 34062 - protein, 41 aa, Artificial Sequence
  Non-cyclic GFR-binding peptide
  MOD_RES (6), (7), (41): Xaa is C or S
  MOD_RES (21), (22), (23), (24), (25): Xaa is A or G
  MOD_RES (26), (27), (28), (29): Xaa is A or G or is absent
GSAGPXXTPTKMSPISMLYKXXXXXXXXXLKYHYGMVVDRX

SEQ ID NO: 34063 - protein, 34 aa, Artificial Sequence
  Non-cyclic GFR-binding peptide
  MOD_RES (3), (4): Xaa is C or S
STXXAPVKTSPISMLYKDNGRVLLLKYHYMIVEE

SEQ ID NO: 34064 - protein, 36 aa, Artificial Sequence
  Non-cyclic GFR-binding peptide
  MOD_RES (1), (33), (35): Xaa is C or S
XVPTRLSATSILYYDSANNVVLRKHRDMVVESXGXR

SEQ ID NO: 34065 - protein, 38 aa, Artificial Sequence
  Non-cyclic GFR-binding peptide
  MOD_RES (3), (4), (36), (38): Xaa is C or S
GPXXTPTKMEPISMLYLNDKQQIIKFKYEGMVVDRXGX

SEQ ID NO: 34066 - protein, 43 aa, Artificial Sequence
  Non-cyclic GFR-binding peptide
  MOD_RES (6), (7), (41), (43): Xaa is C or S
  MOD_RES (21), (22), (23), (24), (25): Xaa is A or G
  MOD_RES (26), (27), (28), (29): Xaa is A or G or is absent
STPPTXXVPTRLEPISILYLXXXXXXXXXKFKYEDMVVESXGX

SEQ ID NO: 34067 - protein, 37 aa, Artificial Sequence
  Non-cyclic GFR-binding peptide
  MOD_RES (4), (5), (37): Xaa is C or S
PEPXXVPEKMSATSILYYDENKNVVLRKHRNMTVESX

SEQ ID NO: 34068 - protein, 40 aa, Artificial Sequence
  Non-cyclic GFR-binding peptide
  MOD_RES (2), (3), (37), (39): Xaa is C or S
  MOD_RES (17), (18), (19), (20), (21): Xaa is A or G
  MOD_RES (22), (23), (24), (25): Xaa is A or G or is absent
PXXTPTKMEPISMLYLXXXXXXXXXKFKYEGMVVDRXGXS

SEQ ID NO: 34069 - protein, 36 aa, Artificial Sequence
  Non-cyclic GFR-binding peptide
  MOD_RES (3), (4), (36): Xaa is C or S
EPXXVPEKMSATSILYYDENKNVVLRKHRNMTVESX

SEQ ID NO: 34070 - protein, 37 aa, Artificial Sequence
  Non-cyclic GFR-binding peptide
  MOD_RES (1), (2), (34), (36): Xaa is C or S
XXTPTKMSPISMLYKNDKQQIILKYHYGMVVDRXGXS

SEQ ID NO: 34071 - protein, 39 aa, Artificial Sequence
  Non-cyclic GFR-binding peptide
  MOD_RES (6), (7): Xaa is C or S
  MOD_RES (21), (22), (23), (24), (25): Xaa is A or G
  MOD_RES (26), (27), (28), (29): Xaa is A or G or is absent
ASASPXXVPQDLSPINILYFXXXXXXXXXYGKIPMVVKS

SEQ ID NO: 34072 - protein, 36 aa, Artificial Sequence
  Non-cyclic GFR-binding peptide
  MOD_RES (1), (2), (33), (35): Xaa is C or S
XXAPVKTSPISMLYKDNGRVLLLKYHYMIVEEXGXL

SEQ ID NO: 34073 - protein, 39 aa, Artificial Sequence
  Non-cyclic GFR-binding peptide
  MOD_RES (5), (6), (37), (39): Xaa is C or S
VPSTXXAPVKTEPISMLYLDNGRVLLKFKYEMIVEEXGX

SEQ ID NO: 34074 - protein, 39 aa, Artificial Sequence
  Non-cyclic GFR-binding peptide
  MOD_RES (3), (4), (36), (38): Xaa is C or S
EPXXVPEKMEPISILYLDENKNVVKFKYENMTVESXAXR

SEQ ID NO: 34075 - protein, 36 aa, Artificial Sequence
  Non-cyclic GFR-binding peptide
  MOD_RES (1), (35): Xaa is C or S
  MOD_RES (15), (16), (17), (18), (19): Xaa is A or G
  MOD_RES (20), (21), (22), (23): Xaa is A or G or is absent
XVPARLSATSILYYXXXXXXXXXLRKHRDMVVEAXG

SEQ ID NO: 34076 - protein, 35 aa, Artificial Sequence
  Non-cyclic GFR-binding peptide
  MOD_RES (3), (4): Xaa is C or S
EPXXVPEKMNAISILYFDENKNVVLKKYRNMTVES

SEQ ID NO: 34077 - protein, 34 aa, Artificial Sequence
  Non-cyclic GFR-binding peptide
  MOD_RES (2), (3): Xaa is C or S
TXXVPTRLSATSILYYDSANNVVLRKHRDMVVES

SEQ ID NO: 34078 - protein, 37 aa, Artificial Sequence
  Non-cyclic GFR-binding peptide
  MOD_RES (1), (2), (36): Xaa is C or S
  MOD_RES (16), (17), (18), (19), (20): Xaa is A or G
  MOD_RES (21), (22), (23), (24): Xaa is A or G or is absent
XXVPTKLSATSILYYXXXXXXXXXLRKHRGMAVSEXG

SEQ ID NO: 34079 - protein, 32 aa, Artificial Sequence
  Non-cyclic GFR-binding peptide
  MOD_RES (14), (15), (16), (17), (18): Xaa is A or G
  MOD_RES (19), (20), (21), (22): Xaa is A or G or is absent
VPEKMSATSILYYXXXXXXXXXLRKHRNMTVE

SEQ ID NO: 34080 - protein, 35 aa, Artificial Sequence
  Non-cyclic GFR-binding peptide
  MOD_RES (1), (2), (34): Xaa is C or S
XXVPARLSATSILYYDAANNVVLRKHRDMVVEAXG

SEQ ID NO: 34081 - protein, 38 aa, Artificial Sequence
  Non-cyclic GFR-binding peptide
  MOD_RES (3), (4), (37): Xaa is C or S
  MOD_RES (18), (19), (20), (21), (22): Xaa is A or G
  MOD_RES (23), (24), (25), (26): Xaa is A or G or is absent
SPXXVSQDLSPINILYFXXXXXXXXXYGKIPMIVKSXK

SEQ ID NO: 34082 - protein, 39 aa, Artificial Sequence
  Non-cyclic GFR-binding peptide
  MOD_RES (6), (7): Xaa is C or S
  MOD_RES (21), (22), (23), (24), (25): Xaa is A or G
  MOD_RES (26), (27), (28), (29): Xaa is A or G or is absent
GIPEPXXVPEKMNAISILYFXXXXXXXXXLKKYRNMTVE

SEQ ID NO: 34083 - protein, 40 aa, Artificial Sequence
  Non-cyclic GFR-binding peptide
  MOD_RES (5), (6), (37), (39): Xaa is C or S
VPSTXXAPVKTSPISMLYKDNGRVLLLKYHYMIVEEXGXL

SEQ ID NO: 34084 - protein, 38 aa, Artificial Sequence
  Non-cyclic GFR-binding peptide
  MOD_RES (3), (4), (38): Xaa is C or S
  MOD_RES (18), (19), (20), (21), (22): Xaa is A or G
  MOD_RES (23), (24), (25), (26): Xaa is A or G or is absent
EPXXVPEKMEPISILYLXXXXXXXXXKFKYENMTVESX

SEQ ID NO: 34085 - protein, 41 aa, Artificial Sequence
  Non-cyclic GFR-binding peptide
  MOD_RES (6), (7), (40): Xaa is C or S
  MOD_RES (21), (22), (23), (24), (25): Xaa is A or G
  MOD_RES (26), (27), (28), (29): Xaa is A or G or is absent
RVPSTXXAPVKTSATSMLYYXXXXXXXXXLRKHRMIVEEXG

SEQ ID NO: 34086 - protein, 36 aa, Artificial Sequence
  Non-cyclic GFR-binding peptide
  MOD_RES (1), (33), (35): Xaa is C or S
XVPARLSATSILYYDAANNVVLRKHRDMVVEAXGXR

SEQ ID NO: 34087 - protein, 35 aa, Artificial Sequence
  Non-cyclic GFR-binding peptide
  MOD_RES (2), (3), (35): Xaa is C or S
PXXVPEKMNAISILYFDENKNVVLKKYRNMTVESX

SEQ ID NO: 34088 - protein, 38 aa, Artificial Sequence
  Non-cyclic GFR-binding peptide
  MOD_RES (4), (5), (37): Xaa is C or S
PEPXXVPEKMSPINILYFDENKNVVYGKIPNMTVESXA

SEQ ID NO: 34089 - protein, 43 aa, Artificial Sequence
  Non-cyclic GFR-binding peptide
  MOD_RES (5), (6), (40), (42): Xaa is C or S
  MOD_RES (20), (21), (22), (23), (24): Xaa is A or G
  MOD_RES (25), (26), (27), (28): Xaa is A or G or is absent
IPEPXXVPEKMNAISILYFXXXXXXXXXLKKYRNMTVESXAXR

SEQ ID NO: 34090 - protein, 36 aa, Artificial Sequence
  Non-cyclic GFR-binding peptide
  MOD_RES (3), (4): Xaa is C or S
  MOD_RES (18), (19), (20), (21), (22): Xaa is A or G
  MOD_RES (23), (24), (25), (26): Xaa is A or G or is absent
STXXAPVKTSPISMLYKXXXXXXXXXLKYHYMIVEE

SEQ ID NO: 34091 - protein, 43 aa, Artificial Sequence
  Non-cyclic GFR-binding peptide
  MOD_RES (6), (7), (41), (43): Xaa is C or S
  MOD_RES (21), (22), (23), (24), (25): Xaa is A or G
  MOD_RES (26), (27), (28), (29): Xaa is A or G or is absent
GIPEPXXVPEKMSPISILYKXXXXXXXXXLKYHYNMTVESXAX

SEQ ID NO: 34092 - protein, 39 aa, Artificial Sequence
  Non-cyclic GFR-binding peptide
  MOD_RES (5), (6), (39): Xaa is C or S
  MOD_RES (20), (21), (22), (23), (24): Xaa is A or G
  MOD_RES (25), (26), (27), (28): Xaa is A or G or is absent
VPSTXXAPVKTSATSMLYYXXXXXXXXXLRKHRMIVEEX

SEQ ID NO: 34093 - protein, 37 aa, Artificial Sequence
  Non-cyclic GFR-binding peptide
  MOD_RES (6), (7): Xaa is C or S
STPPTXXVPTRLEPISILYLDSANNVVKFKYEDMVVE

SEQ ID NO: 34094 - protein, 37 aa, Artificial Sequence
  Non-cyclic GFR-binding peptide
  MOD_RES (1), (35), (37): Xaa is C or S
  MOD_RES (15), (16), (17), (18), (19): Xaa is A or G
  MOD_RES (20), (21), (22), (23): Xaa is A or G or is absent
XTPTKMSPISMLYKXXXXXXXXXLKYHYGMVVDRXGX

SEQ ID NO: 34095 - protein, 38 aa, Artificial Sequence
  Non-cyclic GFR-binding peptide
  MOD_RES (6), (7): Xaa is C or S
STPPTXXVPTRLSATSILYYDSANNVVLRKHRDMVVES

SEQ ID NO: 34096 - protein, 36 aa, Artificial Sequence
  Non-cyclic GFR-binding peptide
  MOD_RES (2), (3): Xaa is C or S
  MOD_RES (17), (18), (19), (20), (21): Xaa is A or G
  MOD_RES (22), (23), (24), (25): Xaa is A or G or is absent
TXXVPTRLSATSILYYXXXXXXXXXLRKHRDMVVES

SEQ ID NO: 34097 - protein, 32 aa, Artificial Sequence
  Non-cyclic GFR-binding peptide
  MOD_RES (32), (32): Xaa is C or S
VPTRLEPISILYLDSANNVVKFKYEDMVVESX

SEQ ID NO: 34098 - protein, 40 aa, Artificial Sequence
  Non-cyclic GFR-binding peptide
  MOD_RES (5), (6), (38), (40): Xaa is C or S
TPPTXXVPTRLSATSILYYDSANNVVLRKHRDMVVESXGX

SEQ ID NO: 34099 - protein, 35 aa, Artificial Sequence
  Non-cyclic GFR-binding peptide
  MOD_RES (2), (3), (34): Xaa is C or S
TXXAPVKTSATSMLYYDNGRVLLLRKHRMIVEEXG

SEQ ID NO: 34100 - protein, 39 aa, Artificial Sequence
  Non-cyclic GFR-binding peptide
  MOD_RES (4), (5), (39): Xaa is C or S
  MOD_RES (19), (20), (21), (22), (23): Xaa is A or G
  MOD_RES (24), (25), (26), (27): Xaa is A or G or is absent
PEPXXVPEKMSPISILYKXXXXXXXXXLKYHYNMTVESX

SEQ ID NO: 34101 - protein, 31 aa, Artificial Sequence
  Non-cyclic GFR-binding peptide
  MOD_RES (1), (1): Xaa is C or S
XTPTKMEPISMLYLNDKQQIIKFKYEGMVVD

SEQ ID NO: 34102 - protein, 40 aa, Artificial Sequence
  Non-cyclic GFR-binding peptide
  MOD_RES (4), (5), (39): Xaa is C or S
  MOD_RES (19), (20), (21), (22), (23): Xaa is A or G
  MOD_RES (24), (25), (26), (27): Xaa is A or G or is absent
PPTXXVPTRLSATSILYYXXXXXXXXXLRKHRDMVVESXG

SEQ ID NO: 34103 - protein, 44 aa, Artificial Sequence
  Non-cyclic GFR-binding peptide
  MOD_RES (6), (7), (41), (43): Xaa is C or S
  MOD_RES (21), (22), (23), (24), (25): Xaa is A or G
  MOD_RES (26), (27), (28), (29): Xaa is A or G or is absent
AAPASXXVPARLSATSILYYXXXXXXXXXLRKHRDMVVEAXGXR

SEQ ID NO: 34104 - protein, 36 aa, Artificial Sequence
  Non-cyclic GFR-binding peptide
  MOD_RES (34), (36): Xaa is C or S
  MOD_RES (14), (15), (16), (17), (18): Xaa is A or G
  MOD_RES (19), (20), (21), (22): Xaa is A or G or is absent
VPARLSATSILYYXXXXXXXXXLRKHRDMVVEAXGX

SEQ ID NO: 34105 - protein, 32 aa, Artificial Sequence
  Non-cyclic GFR-binding peptide
  MOD_RES (31), (31): Xaa is C or S
VPQDLSPINILYFVGRTPKVYGKIPMVVKSXK

SEQ ID NO: 34106 - protein, 30 aa, Artificial Sequence
  Non-cyclic GFR-binding peptide
APVKTSATSMLYYDNGRVLLLRKHRMIVEE

SEQ ID NO: 34107 - protein, 33 aa, Artificial Sequence
  Non-cyclic GFR-binding peptide
  MOD_RES (14), (15), (16), (17), (18): Xaa is A or G
  MOD_RES (19), (20), (21), (22): Xaa is A or G or is absent
VPARLSATSILYYXXXXXXXXXLRKHRDMVVEA

SEQ ID NO: 34108 - protein, 37 aa, Artificial Sequence
  Non-cyclic GFR-binding peptide
  MOD_RES (6), (7): Xaa is C or S
GSAGPXXTPTKMSATSMLYYNDKQQIILRKHRGMVVD

SEQ ID NO: 34109 - protein, 38 aa, Artificial Sequence
  Non-cyclic GFR-binding peptide
  MOD_RES (1), (35), (37): Xaa is C or S
  MOD_RES (15), (16), (17), (18), (19): Xaa is A or G
  MOD_RES (20), (21), (22), (23): Xaa is A or G or is absent
XVPARLSATSILYYXXXXXXXXXLRKHRDMVVEAXGXR

SEQ ID NO: 34110 - protein, 34 aa, Artificial Sequence
  Non-cyclic GFR-binding peptide
  MOD_RES (32), (34): Xaa is C or S
TPTKMEPISMLYLNDKQQIIKFKYEGMVVDRXGX

SEQ ID NO: 34111 - protein, 35 aa, Artificial Sequence
  Non-cyclic GFR-binding peptide
  MOD_RES (1), (35): Xaa is C or S
  MOD_RES (15), (16), (17), (18), (19): Xaa is A or G
  MOD_RES (20), (21), (22), (23): Xaa is A or G or is absent
XVPARLSATSILYYXXXXXXXXXLRKHRDMVVEAX

SEQ ID NO: 34112 - protein, 41 aa, Artificial Sequence
  Non-cyclic GFR-binding peptide
  MOD_RES (3), (4), (38), (40): Xaa is C or S
  MOD_RES (18), (19), (20), (21), (22): Xaa is A or G
  MOD_RES (23), (24), (25), (26): Xaa is A or G or is absent
GPXXTPTKMSPISMLYKXXXXXXXXXLKYHYGMVVDRXGXS

SEQ ID NO: 34113 - protein, 36 aa, Artificial Sequence
  Non-cyclic GFR-binding peptide
  MOD_RES (1), (2), (36): Xaa is C or S
  MOD_RES (16), (17), (18), (19), (20): Xaa is A or G
  MOD_RES (21), (22), (23), (24): Xaa is A or G or is absent
XXVPTRLSATSILYYXXXXXXXXXLRKHRDMVVESX

SEQ ID NO: 34114 - protein, 34 aa, Artificial Sequence
  Non-cyclic GFR-binding peptide
  MOD_RES (31), (33): Xaa is C or S
APVKTSATSMLYYDNGRVLLLRKHRMIVEEXGXL

SEQ ID NO: 34115 - protein, 37 aa, Artificial Sequence
  Non-cyclic GFR-binding peptide
  MOD_RES (3), (4), (36): Xaa is C or S
GPXXTPTKMSPISMLYKNDKQQIILKYHYGMVVDRXG

SEQ ID NO: 34116 - protein, 41 aa, Artificial Sequence
  Non-cyclic GFR-binding peptide
  MOD_RES (6), (7), (41): Xaa is C or S
  MOD_RES (21), (22), (23), (24), (25): Xaa is A or G
  MOD_RES (26), (27), (28), (29): Xaa is A or G or is absent
STPPTXXVPTRLEPISILYLXXXXXXXXXKFKYEDMVVESX

SEQ ID NO: 34117 - protein, 39 aa, Artificial Sequence
  Non-cyclic GFR-binding peptide
  MOD_RES (1), (2), (36), (38): Xaa is C or S
  MOD_RES (16), (17), (18), (19), (20): Xaa is A or G
  MOD_RES (21), (22), (23), (24): Xaa is A or G or is absent
XXVPEKMSPINILYFXXXXXXXXXYGKIPNMTVESXAXR

SEQ ID NO: 34118 - protein, 38 aa, Artificial Sequence
  Non-cyclic GFR-binding peptide
  MOD_RES (1), (2), (36), (38): Xaa is C or S
  MOD_RES (16), (17), (18), (19), (20): Xaa is A or G
  MOD_RES (21), (22), (23), (24): Xaa is A or G or is absent
XXVPEKMSPISILYKXXXXXXXXXLKYHYNMTVESXAX

SEQ ID NO: 34119 - protein, 38 aa, Artificial Sequence
  Non-cyclic GFR-binding peptide
  MOD_RES (5), (6): Xaa is C or S
  MOD_RES (20), (21), (22), (23), (24): Xaa is A or G
  MOD_RES (25), (26), (27), (28): Xaa is A or G or is absent
IPEPXXVPEKMSATSILYYXXXXXXXXXLRKHRNMTVE

SEQ ID NO: 34120 - protein, 35 aa, Artificial Sequence
  Non-cyclic GFR-binding peptide
  MOD_RES (3), (4): Xaa is C or S
KAXXVPTKLSATSILYYDKGVVTYLRKHRGMAVSE

SEQ ID NO: 34121 - protein, 39 aa, Artificial Sequence
  Non-cyclic GFR-binding peptide
  MOD_RES (4), (5), (38): Xaa is C or S
  MOD_RES (19), (20), (21), (22), (23): Xaa is A or G
  MOD_RES (24), (25), (26), (27): Xaa is A or G or is absent
AAPXXVPQALSPINILYFXXXXXXXXXYGKIPMIVRSXK

SEQ ID NO: 34122 - protein, 36 aa, Artificial Sequence
  Non-cyclic GFR-binding peptide
  MOD_RES (4), (5), (36): Xaa is C or S
ASPXXVSQDLSPINILYFIGKTPKIYGKIPMIVKSX

SEQ ID NO: 34123 - protein, 32 aa, Artificial Sequence
  Non-cyclic GFR-binding peptide
  MOD_RES (1), (1): Xaa is C or S
XVPTRLSPISILYKDSANNVVLKYHYDMVVES

SEQ ID NO: 34124 - protein, 34 aa, Artificial Sequence
  Non-cyclic GFR-binding peptide
  MOD_RES (33), (33): Xaa is C or S
  MOD_RES (14), (15), (16), (17), (18): Xaa is A or G
  MOD_RES (19), (20), (21), (22): Xaa is A or G or is absent
APVKTEPISMLYLXXXXXXXXXKFKYEMIVEEXG

SEQ ID NO: 34125 - protein, 33 aa, Artificial Sequence
  Non-cyclic GFR-binding peptide
  MOD_RES (2), (3): Xaa is C or S
TXXAPVKTSATSMLYYDNGRVLLLRKHRMIVEE

SEQ ID NO: 34126 - protein, 38 aa, Artificial Sequence
  Non-cyclic GFR-binding peptide
  MOD_RES (5), (6): Xaa is C or S
  MOD_RES (20), (21), (22), (23), (24): Xaa is A or G
  MOD_RES (25), (26), (27), (28): Xaa is A or G or is absent
SAGPXXTPTKMSATSMLYYXXXXXXXXXLRKHRGMVVD

SEQ ID NO: 34127 - protein, 35 aa, Artificial Sequence
  Non-cyclic GFR-binding peptide
  MOD_RES (1), (35): Xaa is C or S
  MOD_RES (15), (16), (17), (18), (19): Xaa is A or G
  MOD_RES (20), (21), (22), (23): Xaa is A or G or is absent
XTPTKMSATSMLYYXXXXXXXXXLRKHRGMVVDRX

SEQ ID NO: 34128 - protein, 37 aa, Artificial Sequence
  Non-cyclic GFR-binding peptide
  MOD_RES (3), (4): Xaa is C or S
  MOD_RES (18), (19), (20), (21), (22): Xaa is A or G
  MOD_RES (23), (24), (25), (26): Xaa is A or G or is absent
EPXXVPEKMEPISILYLXXXXXXXXXKFKYENMTVES

SEQ ID NO: 34129 - protein, 39 aa, Artificial Sequence
  Non-cyclic GFR-binding peptide
  MOD_RES (5), (6), (38): Xaa is C or S
IPEPXXVPEKMNAISILYFDENKNVVLKKYRNMTVESXA

SEQ ID NO: 34130 - protein, 40 aa, Artificial Sequence
  Non-cyclic GFR-binding peptide
  MOD_RES (6), (7): Xaa is C or S
  MOD_RES (21), (22), (23), (24), (25): Xaa is A or G
  MOD_RES (26), (27), (28), (29): Xaa is A or G or is absent
STPPTXXVPTRLSPISILYKXXXXXXXXXLKYHYDMVVES

SEQ ID NO: 34131 - protein, 40 aa, Artificial Sequence
  Non-cyclic GFR-binding peptide
  MOD_RES (6), (7): Xaa is C or S
  MOD_RES (21), (22), (23), (24), (25): Xaa is A or G
  MOD_RES (26), (27), (28), (29): Xaa is A or G or is absent
GIPEPXXVPEKMSATSILYYXXXXXXXXXLRKHRNMTVES

SEQ ID NO: 34132 - protein, 36 aa, Artificial Sequence
  Non-cyclic GFR-binding peptide
  MOD_RES (1), (2), (35): Xaa is C or S
  MOD_RES (16), (17), (18), (19), (20): Xaa is A or G
  MOD_RES (21), (22), (23), (24): Xaa is A or G or is absent
XXAPVKTSPISMLYKXXXXXXXXXLKYHYMIVEEXG

SEQ ID NO: 34133 - protein, 38 aa, Artificial Sequence
  Non-cyclic GFR-binding peptide
  MOD_RES (5), (6), (38): Xaa is C or S
TPPTXXVPTRLSPISILYKDSANNVVLKYHYDMVVESX

SEQ ID NO: 34134 - protein, 36 aa, Artificial Sequence
  Non-cyclic GFR-binding peptide
  MOD_RES (1), (35): Xaa is C or S
  MOD_RES (15), (16), (17), (18), (19): Xaa is A or G
  MOD_RES (20), (21), (22), (23): Xaa is A or G or is absent
XVPEKMNAISILYFXXXXXXXXXLKKYRNMTVESXA

SEQ ID NO: 34135 - protein, 33 aa, Artificial Sequence
  Non-cyclic GFR-binding peptide
  MOD_RES (1), (32): Xaa is C or S
XVPQDLSPINILYFVGRTPKVYGKIPMVVKSXK

SEQ ID NO: 34136 - protein, 35 aa, Artificial Sequence
  Non-cyclic GFR-binding peptide
  MOD_RES (34), (34): Xaa is C or S
  MOD_RES (14), (15), (16), (17), (18): Xaa is A or G
  MOD_RES (19), (20), (21), (22): Xaa is A or G or is absent
TPTKMSATSMLYYXXXXXXXXXLRKHRGMVVDRXG

SEQ ID NO: 34137 - protein, 36 aa, Artificial Sequence
  Non-cyclic GFR-binding peptide
  MOD_RES (3), (4), (36): Xaa is C or S
PTXXVPTRLSPISILYKDSANNVVLKYHYDMVVESX

SEQ ID NO: 34138 - protein, 41 aa, Artificial Sequence
  Non-cyclic GFR-binding peptide
  MOD_RES (6), (7), (38), (40): Xaa is C or S
ASASPXXVPQDLSPINILYFVGRTPKVYGKIPMVVKSXKXS

SEQ ID NO: 34139 - protein, 34 aa, Artificial Sequence
  Non-cyclic GFR-binding peptide
  MOD_RES (3), (4): Xaa is C or S
STXXAPVKTEPISMLYLDNGRVLLKFKYEMIVEE

SEQ ID NO: 34140 - protein, 39 aa, Artificial Sequence
  Non-cyclic GFR-binding peptide
  MOD_RES (5), (6): Xaa is C or S
  MOD_RES (20), (21), (22), (23), (24): Xaa is A or G
  MOD_RES (25), (26), (27), (28): Xaa is A or G or is absent
IPEPXXVPEKMSPISILYKXXXXXXXXXLKYHYNMTVES

SEQ ID NO: 34141 - protein, 39 aa, Artificial Sequence
  Non-cyclic GFR-binding peptide
  MOD_RES (2), (3), (37), (39): Xaa is C or S
  MOD_RES (17), (18), (19), (20), (21): Xaa is A or G
  MOD_RES (22), (23), (24), (25): Xaa is A or G or is absent
TXXVPTRLEPISILYLXXXXXXXXXKFKYEDMVVESXGX

SEQ ID NO: 34142 - protein, 40 aa, Artificial Sequence
  Non-cyclic GFR-binding peptide
  MOD_RES (5), (6), (38), (40): Xaa is C or S
ASKAXXVPTKLSATSILYYDKGVVTYLRKHRGMAVSEXGX

SEQ ID NO: 34143 - protein, 38 aa, Artificial Sequence
  Non-cyclic GFR-binding peptide
  MOD_RES (5), (6), (37): Xaa is C or S
SASPXXVSQDLSPINILYFIGKTPKIYGKIPMIVKSXK

SEQ ID NO: 34144 - protein, 32 aa, Artificial Sequence
  Non-cyclic GFR-binding peptide
  MOD_RES (1), (2): Xaa is C or S
XXTPTKMEPISMLYLNDKQQIIKFKYEGMVVD

SEQ ID NO: 34145 - protein, 34 aa, Artificial Sequence
  Non-cyclic GFR-binding peptide
  MOD_RES (1), (1): Xaa is C or S
  MOD_RES (15), (16), (17), (18), (19): Xaa is A or G
  MOD_RES (20), (21), (22), (23): Xaa is A or G or is absent
XVPARLSATSILYYXXXXXXXXXLRKHRDMVVEA

SEQ ID NO: 34146 - protein, 37 aa, Artificial Sequence
  Non-cyclic GFR-binding peptide
  MOD_RES (4), (5), (37): Xaa is C or S
PPTXXVPTRLSPISILYKDSANNVVLKYHYDMVVESX

SEQ ID NO: 34147 - protein, 33 aa, Artificial Sequence
  Non-cyclic GFR-binding peptide
  MOD_RES (1), (33): Xaa is C or S
XVPTRLSATSILYYDSANNVVLRKHRDMVVESX

SEQ ID NO: 34148 - protein, 42 aa, Artificial Sequence
  Non-cyclic GFR-binding peptide
  MOD_RES (6), (7), (40), (42): Xaa is C or S
  MOD_RES (21), (22), (23), (24), (25): Xaa is A or G
  MOD_RES (26), (27), (28), (29): Xaa is A or G or is absent
ASASPXXVSQDLSPINILYFXXXXXXXXXYGKIPMIVKSXKX

SEQ ID NO: 34149 - protein, 36 aa, Artificial Sequence
  Non-cyclic GFR-binding peptide
  MOD_RES (34), (36): Xaa is C or S
  MOD_RES (14), (15), (16), (17), (18): Xaa is A or G
  MOD_RES (19), (20), (21), (22): Xaa is A or G or is absent
VPEKMSPISILYKXXXXXXXXXLKYHYNMTVESXAX

SEQ ID NO: 34150 - protein, 34 aa, Artificial Sequence
  Non-cyclic GFR-binding peptide
  MOD_RES (1), (2), (34): Xaa is C or S
XXVPTRLSATSILYYDSANNVVLRKHRDMVVESX

SEQ ID NO: 34151 - protein, 30 aa, Artificial Sequence
  Non-cyclic GFR-binding peptide
APVKTSPISMLYKDNGRVLLLKYHYMIVEE

SEQ ID NO: 34152 - protein, 40 aa, Artificial Sequence
  Non-cyclic GFR-binding peptide
  MOD_RES (2), (3), (37), (39): Xaa is C or S
  MOD_RES (17), (18), (19), (20), (21): Xaa is A or G
  MOD_RES (22), (23), (24), (25): Xaa is A or G or is absent
AXXVPTKLSATSILYYXXXXXXXXXLRKHRGMAVSEXGXR

SEQ ID NO: 34153 - protein, 36 aa, Artificial Sequence
  Non-cyclic GFR-binding peptide
  MOD_RES (3), (4), (36): Xaa is C or S
EPXXVPEKMEPISILYLDENKNVVKFKYENMTVESX

SEQ ID NO: 34154 - protein, 37 aa, Artificial Sequence
  Non-cyclic GFR-binding peptide
  MOD_RES (3), (4), (35), (37): Xaa is C or S
STXXAPVKTSPISMLYKDNGRVLLLKYHYMIVEEXGX

SEQ ID NO: 34155 - protein, 40 aa, Artificial Sequence
  Non-cyclic GFR-binding peptide
  MOD_RES (4), (5), (38), (40): Xaa is C or S
  MOD_RES (19), (20), (21), (22), (23): Xaa is A or G
  MOD_RES (24), (25), (26), (27): Xaa is A or G or is absent
ASPXXVSQDLSPINILYFXXXXXXXXXYGKIPMIVKSXKX

SEQ ID NO: 34156 - protein, 40 aa, Artificial Sequence
  Non-cyclic GFR-binding peptide
  MOD_RES (5), (6), (38), (40): Xaa is C or S
IPEPXXVPEKMSATSILYYDENKNVVLRKHRNMTVESXAX

SEQ ID NO: 34157 - protein, 38 aa, Artificial Sequence
  Non-cyclic GFR-binding peptide
  MOD_RES (4), (5): Xaa is C or S
  MOD_RES (19), (20), (21), (22), (23): Xaa is A or G
  MOD_RES (24), (25), (26), (27): Xaa is A or G or is absent
AGPXXTPTKMSATSMLYYXXXXXXXXXLRKHRGMVVDR

SEQ ID NO: 34158 - protein, 33 aa, Artificial Sequence
  Non-cyclic GFR-binding peptide
  MOD_RES (1), (33): Xaa is C or S
XVPTRLEPISILYLDSANNVVKFKYEDMVVESX

SEQ ID NO: 34159 - protein, 42 aa, Artificial Sequence
  Non-cyclic GFR-binding peptide
  MOD_RES (5), (6), (39), (41): Xaa is C or S
  MOD_RES (20), (21), (22), (23), (24): Xaa is A or G
  MOD_RES (25), (26), (27), (28): Xaa is A or G or is absent
VPSTXXAPVKTSATSMLYYXXXXXXXXXLRKHRMIVEEXGXL

SEQ ID NO: 34160 - protein, 39 aa, Artificial Sequence
  Non-cyclic GFR-binding peptide
  MOD_RES (3), (4), (38): Xaa is C or S
  MOD_RES (18), (19), (20), (21), (22): Xaa is A or G
  MOD_RES (23), (24), (25), (26): Xaa is A or G or is absent
GPXXTPTKMSATSMLYYXXXXXXXXXLRKHRGMVVDRXG

SEQ ID NO: 34161 - protein, 35 aa, Artificial Sequence
  Non-cyclic GFR-binding peptide
  MOD_RES (1), (2): Xaa is C or S
  MOD_RES (16), (17), (18), (19), (20): Xaa is A or G
  MOD_RES (21), (22), (23), (24): Xaa is A or G or is absent
XXVPARLSATSILYYXXXXXXXXXLRKHRDMVVEA

SEQ ID NO: 34162 - protein, 39 aa, Artificial Sequence
  Non-cyclic GFR-binding peptide
  MOD_RES (5), (6), (38): Xaa is C or S
IPEPXXVPEKMSPINILYFDENKNVVYGKIPNMTVESXA

SEQ ID NO: 34163 - protein, 33 aa, Artificial Sequence
  Non-cyclic GFR-binding peptide
  MOD_RES (31), (33): Xaa is C or S
APVKTEPISMLYLDNGRVLLKFKYEMIVEEXGX

SEQ ID NO: 34164 - protein, 33 aa, Artificial Sequence
  Non-cyclic GFR-binding peptide
  MOD_RES (31), (33): Xaa is C or S
VPQALSPINILYFVGRKPKVYGKIPMIVRSXKX

SEQ ID NO: 34165 - protein, 37 aa, Artificial Sequence
  Non-cyclic GFR-binding peptide
  MOD_RES (2), (3), (35), (37): Xaa is C or S
PXXVPEKMNAISILYFDENKNVVLKKYRNMTVESXAX

SEQ ID NO: 34166 - protein, 34 aa, Artificial Sequence
  Non-cyclic GFR-binding peptide
  MOD_RES (1), (2), (33): Xaa is C or S
XXVPQDLSPINILYFVGRTPKVYGKIPMVVKSXK

SEQ ID NO: 34167 - protein, 36 aa, Artificial Sequence
  Non-cyclic GFR-binding peptide
  MOD_RES (1), (2), (35): Xaa is C or S
  MOD_RES (16), (17), (18), (19), (20): Xaa is A or G
  MOD_RES (21), (22), (23), (24): Xaa is A or G or is absent
XXVPQALSPINILYFXXXXXXXXXYGKIPMIVRSXK

SEQ ID NO: 34168 - protein, 42 aa, Artificial Sequence
  Non-cyclic GFR-binding peptide
  MOD_RES (6), (7), (40), (42): Xaa is C or S
  MOD_RES (21), (22), (23), (24), (25): Xaa is A or G
  MOD_RES (26), (27), (28), (29): Xaa is A or G or is absent
RVPSTXXAPVKTSATSMLYYXXXXXXXXXLRKHRMIVEEXGX

SEQ ID NO: 34169 - protein, 30 aa, Artificial Sequence
  Non-cyclic GFR-binding peptide
VPARLSATSILYYDAANNVVLRKHRDMVVE

SEQ ID NO: 34170 - protein, 38 aa, Artificial Sequence
  Non-cyclic GFR-binding peptide
  MOD_RES (6), (7): Xaa is C or S
KASKAXXVPTKLSATSILYYDKGVVTYLRKHRGMAVSE

SEQ ID NO: 34171 - protein, 39 aa, Artificial Sequence
  Non-cyclic GFR-binding peptide
  MOD_RES (6), (7), (38): Xaa is C or S
RVPSTXXAPVKTSPISMLYKDNGRVLLLKYHYMIVEEXG

SEQ ID NO: 34172 - protein, 37 aa, Artificial Sequence
  Non-cyclic GFR-binding peptide
  MOD_RES (1), (2), (35), (37): Xaa is C or S
  MOD_RES (16), (17), (18), (19), (20): Xaa is A or G
  MOD_RES (21), (22), (23), (24): Xaa is A or G or is absent
XXAPVKTSATSMLYYXXXXXXXXXLRKHRMIVEEXGX

SEQ ID NO: 34173 - protein, 41 aa, Artificial Sequence
  Non-cyclic GFR-binding peptide
  MOD_RES (5), (6), (40): Xaa is C or S
  MOD_RES (20), (21), (22), (23), (24): Xaa is A or G
  MOD_RES (25), (26), (27), (28): Xaa is A or G or is absent
SAGPXXTPTKMEPISMLYLXXXXXXXXXKFKYEGMVVDRXG

SEQ ID NO: 34174 - protein, 39 aa, Artificial Sequence
  Non-cyclic GFR-binding peptide
  MOD_RES (4), (5), (37), (39): Xaa is C or S
SKAXXVPTKLSATSILYYDKGVVTYLRKHRGMAVSEXGX

SEQ ID NO: 34175 - protein, 39 aa, Artificial Sequence
  Non-cyclic GFR-binding peptide
  MOD_RES (2), (3), (37), (39): Xaa is C or S
  MOD_RES (17), (18), (19), (20), (21): Xaa is A or G
  MOD_RES (22), (23), (24), (25): Xaa is A or G or is absent
PXXVPEKMSPISILYKXXXXXXXXXLKYHYNMTVESXAX

SEQ ID NO: 34176 - protein, 44 aa, Artificial Sequence
  Non-cyclic GFR-binding peptide
  MOD_RES (6), (7), (41), (43): Xaa is C or S
  MOD_RES (21), (22), (23), (24), (25): Xaa is A or G
  MOD_RES (26), (27), (28), (29): Xaa is A or G or is absent
GIPEPXXVPEKMSPINILYFXXXXXXXXXYGKIPNMTVESXAXR

SEQ ID NO: 34177 - protein, 36 aa, Artificial Sequence
  Non-cyclic GFR-binding peptide
  MOD_RES (4), (5): Xaa is C or S
PPTXXVPTRLSPISILYKDSANNVVLKYHYDMVVES

SEQ ID NO: 34178 - protein, 34 aa, Artificial Sequence
  Non-cyclic GFR-binding peptide
  MOD_RES (1), (32), (34): Xaa is C or S
XAPVKTEPISMLYLDNGRVLLKFKYEMIVEEXGX

SEQ ID NO: 34179 - protein, 39 aa, Artificial Sequence
  Non-cyclic GFR-binding peptide
  MOD_RES (1), (2), (36), (38): Xaa is C or S
  MOD_RES (16), (17), (18), (19), (20): Xaa is A or G
  MOD_RES (21), (22), (23), (24): Xaa is A or G or is absent
XXVPTKLSATSILYYXXXXXXXXXLRKHRGMAVSEXGXR

SEQ ID NO: 34180 - protein, 42 aa, Artificial Sequence
  Non-cyclic GFR-binding peptide
  MOD_RES (6), (7), (39), (41): Xaa is C or S
STPPTXXVPTRLSPISILYKDSANNVVLKYHYDMVVESXGXR

SEQ ID NO: 34181 - protein, 36 aa, Artificial Sequence
  Non-cyclic GFR-binding peptide
  MOD_RES (1), (33), (35): Xaa is C or S
XVPEKMSATSILYYDENKNVVLRKHRNMTVESXAXR

SEQ ID NO: 34182 - protein, 35 aa, Artificial Sequence
  Non-cyclic GFR-binding peptide
  MOD_RES (34), (34): Xaa is C or S
  MOD_RES (14), (15), (16), (17), (18): Xaa is A or G
  MOD_RES (19), (20), (21), (22): Xaa is A or G or is absent
VPTRLSATSILYYXXXXXXXXXLRKHRDMVVESXG

SEQ ID NO: 34183 - protein, 35 aa, Artificial Sequence
  Non-cyclic GFR-binding peptide
  MOD_RES (1), (33), (35): Xaa is C or S
XVPTRLSATSILYYDSANNVVLRKHRDMVVESXGX

SEQ ID NO: 34184 - protein, 39 aa, Artificial Sequence
  Non-cyclic GFR-binding peptide
  MOD_RES (5), (6), (38): Xaa is C or S
SAGPXXTPTKMSPISMLYKNDKQQIILKYHYGMVVDRXG

SEQ ID NO: 34185 - protein, 40 aa, Artificial Sequence
  Non-cyclic GFR-binding peptide
  MOD_RES (5), (6), (38), (40): Xaa is C or S
IPEPXXVPEKMSPINILYFDENKNVVYGKIPNMTVESXAX

SEQ ID NO: 34186 - protein, 41 aa, Artificial Sequence
  Non-cyclic GFR-binding peptide
  MOD_RES (4), (5), (39), (41): Xaa is C or S
  MOD_RES (19), (20), (21), (22), (23): Xaa is A or G
  MOD_RES (24), (25), (26), (27): Xaa is A or G or is absent
PEPXXVPEKMEPISILYLXXXXXXXXXKFKYENMTVESXAX

SEQ ID NO: 34187 - protein, 35 aa, Artificial Sequence
  Non-cyclic GFR-binding peptide
  MOD_RES (3), (4): Xaa is C or S
GPXXTPTKMSPISMLYKNDKQQIILKYHYGMVVDR

SEQ ID NO: 34188 - protein, 41 aa, Artificial Sequence
  Non-cyclic GFR-binding peptide
  MOD_RES (6), (7), (41): Xaa is C or S
  MOD_RES (21), (22), (23), (24), (25): Xaa is A or G
  MOD_RES (26), (27), (28), (29): Xaa is A or G or is absent
GSAGPXXTPTKMSATSMLYYXXXXXXXXXLRKHRGMVVDRX

SEQ ID NO: 34189 - protein, 34 aa, Artificial Sequence
  Non-cyclic GFR-binding peptide
  MOD_RES (34), (34): Xaa is C or S
  MOD_RES (14), (15), (16), (17), (18): Xaa is A or G
  MOD_RES (19), (20), (21), (22): Xaa is A or G or is absent
VPEKMNAISILYFXXXXXXXXXLKKYRNMTVESX

SEQ ID NO: 34190 - protein, 37 aa, Artificial Sequence
  Non-cyclic GFR-binding peptide
  MOD_RES (2), (3), (36): Xaa is C or S
  MOD_RES (17), (18), (19), (20), (21): Xaa is A or G
  MOD_RES (22), (23), (24), (25): Xaa is A or G or is absent
PXXVPQALSPINILYFXXXXXXXXXYGKIPMIVRSXK

SEQ ID NO: 34191 - protein, 39 aa, Artificial Sequence
  Non-cyclic GFR-binding peptide
  MOD_RES (3), (4), (38): Xaa is C or S
  MOD_RES (18), (19), (20), (21), (22): Xaa is A or G
  MOD_RES (23), (24), (25), (26): Xaa is A or G or is absent
PTXXVPTRLSATSILYYXXXXXXXXXLRKHRDMVVESXG

SEQ ID NO: 34192 - protein, 34 aa, Artificial Sequence
  Non-cyclic GFR-binding peptide
  MOD_RES (1), (34): Xaa is C or S
  MOD_RES (15), (16), (17), (18), (19): Xaa is A or G
  MOD_RES (20), (21), (22), (23): Xaa is A or G or is absent
XAPVKTEPISMLYLXXXXXXXXXKFKYEMIVEEX

SEQ ID NO: 34193 - protein, 36 aa, Artificial Sequence
  Non-cyclic GFR-binding peptide
  MOD_RES (3), (4): Xaa is C or S
  MOD_RES (18), (19), (20), (21), (22): Xaa is A or G
  MOD_RES (23), (24), (25), (26): Xaa is A or G or is absent
EPXXVPEKMEPISILYLXXXXXXXXXKFKYENMTVE

SEQ ID NO: 34194 - protein, 32 aa, Artificial Sequence
  Non-cyclic GFR-binding peptide
  MOD_RES (1), (2): Xaa is C or S
XXVPTRLSPISILYKDSANNVVLKYHYDMVVE

SEQ ID NO: 34195 - protein, 37 aa, Artificial Sequence
  Non-cyclic GFR-binding peptide
  MOD_RES (1), (2), (35), (37): Xaa is C or S
  MOD_RES (16), (17), (18), (19), (20): Xaa is A or G
  MOD_RES (21), (22), (23), (24): Xaa is A or G or is absent
XXVPQDLSPINILYFXXXXXXXXXYGKIPMVVKSXKX

SEQ ID NO: 34196 - protein, 32 aa, Artificial Sequence
  Non-cyclic GFR-binding peptide
  MOD_RES (1), (2): Xaa is C or S
XXVPEKMNAISILYFDENKNVVLKKYRNMTVE

SEQ ID NO: 34197 - protein, 35 aa, Artificial Sequence
  Non-cyclic GFR-binding peptide
  MOD_RES (1), (35): Xaa is C or S
  MOD_RES (15), (16), (17), (18), (19): Xaa is A or G
  MOD_RES (20), (21), (22), (23): Xaa is A or G or is absent
XVPEKMNAISILYFXXXXXXXXXLKKYRNMTVESX

SEQ ID NO: 34198 - protein, 31 aa, Artificial Sequence
  Non-cyclic GFR-binding peptide
  MOD_RES (1), (1): Xaa is C or S
XVPTRLSPISILYKDSANNVVLKYHYDMVVE

SEQ ID NO: 34199 - protein, 32 aa, Artificial Sequence
  Non-cyclic GFR-binding peptide
  MOD_RES (1), (32): Xaa is C or S
XVPQDLSPINILYFVGRTPKVYGKIPMVVKSX

SEQ ID NO: 34200 - protein, 31 aa, Artificial Sequence
  Non-cyclic GFR-binding peptide
  MOD_RES (31), (31): Xaa is C or S
VPQDLSPINILYFVGRTPKVYGKIPMVVKSX

SEQ ID NO: 34201 - protein, 38 aa, Artificial Sequence
  Non-cyclic GFR-binding peptide
  MOD_RES (3), (4), (38): Xaa is C or S
  MOD_RES (18), (19), (20), (21), (22): Xaa is A or G
  MOD_RES (23), (24), (25), (26): Xaa is A or G or is absent
PTXXVPTRLSATSILYYXXXXXXXXXLRKHRDMVVESX

SEQ ID NO: 34202 - protein, 36 aa, Artificial Sequence
  Non-cyclic GFR-binding peptide
  MOD_RES (1), (2), (34), (36): Xaa is C or S
XXVPEKMSPISILYKDENKNVVLKYHYNMTVESXAX

SEQ ID NO: 34203 - protein, 36 aa, Artificial Sequence
  Non-cyclic GFR-binding peptide
  MOD_RES (34), (36): Xaa is C or S
  MOD_RES (14), (15), (16), (17), (18): Xaa is A or G
  MOD_RES (19), (20), (21), (22): Xaa is A or G or is absent
VPEKMSATSILYYXXXXXXXXXLRKHRNMTVESXAX

SEQ ID NO: 34204 - protein, 31 aa, Artificial Sequence
  Non-cyclic GFR-binding peptide
  MOD_RES (1), (1): Xaa is C or S
XVPEKMNAISILYFDENKNVVLKKYRNMTVE

SEQ ID NO: 34205 - protein, 38 aa, Artificial Sequence
  Non-cyclic GFR-binding peptide
  MOD_RES (4), (5), (36), (38): Xaa is C or S
PSTXXAPVKTSATSMLYYDNGRVLLLRKHRMIVEEXGX

SEQ ID NO: 34206 - protein, 42 aa, Artificial Sequence
  Non-cyclic GFR-binding peptide
  MOD_RES (6), (7), (41): Xaa is C or S
  MOD_RES (21), (22), (23), (24), (25): Xaa is A or G
  MOD_RES (26), (27), (28), (29): Xaa is A or G or is absent
GSAGPXXTPTKMEPISMLYLXXXXXXXXXKFKYEGMVVDRXG

SEQ ID NO: 34207 - protein, 34 aa, Artificial Sequence
  Non-cyclic GFR-binding peptide
  MOD_RES (32), (34): Xaa is C or S
VPEKMEPISILYLDENKNVVKFKYENMTVESXAX

SEQ ID NO: 34208 - protein, 40 aa, Artificial Sequence
  Non-cyclic GFR-binding peptide
  MOD_RES (6), (7), (38), (40): Xaa is C or S
ASASPXXVSQDLSPINILYFIGKTPKIYGKIPMIVKSXKX

SEQ ID NO: 34209 - protein, 33 aa, Artificial Sequence
  Non-cyclic GFR-binding peptide
  MOD_RES (1), (1): Xaa is C or S
  MOD_RES (15), (16), (17), (18), (19): Xaa is A or G
  MOD_RES (20), (21), (22), (23): Xaa is A or G or is absent
XAPVKTSPISMLYKXXXXXXXXXLKYHYMIVEE

SEQ ID NO: 34210 - protein, 37 aa, Artificial Sequence
  Non-cyclic GFR-binding peptide
  MOD_RES (1), (2), (34), (36): Xaa is C or S
XXVPEKMSPISILYKDENKNVVLKYHYNMTVESXAXR

SEQ ID NO: 34211 - protein, 39 aa, Artificial Sequence
  Non-cyclic GFR-binding peptide
  MOD_RES (5), (6), (37), (39): Xaa is C or S
SASPXXVPQDLSPINILYFVGRTPKVYGKIPMVVKSXKX

SEQ ID NO: 34212 - protein, 33 aa, Artificial Sequence
  Non-cyclic GFR-binding peptide
  MOD_RES (1), (1): Xaa is C or S
  MOD_RES (15), (16), (17), (18), (19): Xaa is A or G
  MOD_RES (20), (21), (22), (23): Xaa is A or G or is absent
XAPVKTEPISMLYLXXXXXXXXXKFKYEMIVEE

SEQ ID NO: 34213 - protein, 40 aa, Artificial Sequence
  Non-cyclic GFR-binding peptide
  MOD_RES (3), (4), (37), (39): Xaa is C or S
  MOD_RES (18), (19), (20), (21), (22): Xaa is A or G
  MOD_RES (23), (24), (25), (26): Xaa is A or G or is absent
STXXAPVKTSPISMLYKXXXXXXXXXLKYHYMIVEEXGXL

SEQ ID NO: 34214 - protein, 34 aa, Artificial Sequence
  Non-cyclic GFR-binding peptide
  MOD_RES (2), (3): Xaa is C or S
SXXVPARLSATSILYYDAANNVVLRKHRDMVVEA

SEQ ID NO: 34215 - protein, 40 aa, Artificial Sequence
  Non-cyclic GFR-binding peptide
  MOD_RES (5), (6), (38), (40): Xaa is C or S
IPEPXXVPEKMSPISILYKDENKNVVLKYHYNMTVESXAX

SEQ ID NO: 34216 - protein, 37 aa, Artificial Sequence
  Non-cyclic GFR-binding peptide
  MOD_RES (4), (5), (36): Xaa is C or S
ASPXXVSQDLSPINILYFIGKTPKIYGKIPMIVKSXK

SEQ ID NO: 34217 - protein, 33 aa, Artificial Sequence
  Non-cyclic GFR-binding peptide
  MOD_RES (1), (1): Xaa is C or S
  MOD_RES (15), (16), (17), (18), (19): Xaa is A or G
  MOD_RES (20), (21), (22), (23): Xaa is A or G or is absent
XVPEKMSPISILYKXXXXXXXXXLKYHYNMTVE

SEQ ID NO: 34218 - protein, 32 aa, Artificial Sequence
  Non-cyclic GFR-binding peptide
  MOD_RES (1), (2): Xaa is C or S
XXAPVKTEPISMLYLDNGRVLLKFKYEMIVEE

SEQ ID NO: 34219 - protein, 33 aa, Artificial Sequence
  Non-cyclic GFR-binding peptide
  MOD_RES (1), (1): Xaa is C or S
  MOD_RES (15), (16), (17), (18), (19): Xaa is A or G
  MOD_RES (20), (21), (22), (23): Xaa is A or G or is absent
XVPEKMEPISILYLXXXXXXXXXKFKYENMTVE

SEQ ID NO: 34220 - protein, 35 aa, Artificial Sequence
  Non-cyclic GFR-binding peptide
  MOD_RES (1), (2), (34): Xaa is C or S
XXVPEKMSPINILYFDENKNVVYGKIPNMTVESXA

SEQ ID NO: 34221 - protein, 44 aa, Artificial Sequence
  Non-cyclic GFR-binding peptide
  MOD_RES (6), (7), (41), (43): Xaa is C or S
  MOD_RES (21), (22), (23), (24), (25): Xaa is A or G
  MOD_RES (26), (27), (28), (29): Xaa is A or G or is absent
HVPKPXXAPTKLEPISVLYLXXXXXXXXXKFKYENMVVRSXGXH

SEQ ID NO: 34222 - protein, 39 aa, Artificial Sequence
  Non-cyclic GFR-binding peptide
  MOD_RES (4), (5), (37), (39): Xaa is C or S
PASXXVPARLSATSILYYDAANNVVLRKHRDMVVEAXGX

SEQ ID NO: 34223 - protein, 39 aa, Artificial Sequence
  Non-cyclic GFR-binding peptide
  MOD_RES (1), (2), (36), (38): Xaa is C or S
  MOD_RES (16), (17), (18), (19), (20): Xaa is A or G
  MOD_RES (21), (22), (23), (24): Xaa is A or G or is absent
XXVPARLSATSILYYXXXXXXXXXLRKHRDMVVEAXGXR

SEQ ID NO: 34224 - protein, 38 aa, Artificial Sequence
  Non-cyclic GFR-binding peptide
  MOD_RES (2), (3), (35), (37): Xaa is C or S
PXXTPTKMSPISMLYKNDKQQIILKYHYGMVVDRXGXS

SEQ ID NO: 34225 - protein, 39 aa, Artificial Sequence
  Non-cyclic GFR-binding peptide
  MOD_RES (3), (4), (38): Xaa is C or S
  MOD_RES (18), (19), (20), (21), (22): Xaa is A or G
  MOD_RES (23), (24), (25), (26): Xaa is A or G or is absent
EPXXVPEKMNAISILYFXXXXXXXXXLKKYRNMTVESXA

SEQ ID NO: 34226 - protein, 35 aa, Artificial Sequence
  Non-cyclic GFR-binding peptide
  MOD_RES (34), (34): Xaa is C or S
  MOD_RES (14), (15), (16), (17), (18): Xaa is A or G
  MOD_RES (19), (20), (21), (22): Xaa is A or G or is absent
VPEKMSPINILYFXXXXXXXXXYGKIPNMTVESXA

SEQ ID NO: 34227 - protein, 40 aa, Artificial Sequence
  Non-cyclic GFR-binding peptide
  MOD_RES (4), (5), (39): Xaa is C or S
  MOD_RES (19), (20), (21), (22), (23): Xaa is A or G
  MOD_RES (24), (25), (26), (27): Xaa is A or G or is absent
PPTXXVPTRLSPISILYKXXXXXXXXXLKYHYDMVVESXG

SEQ ID NO: 34228 - protein, 31 aa, Artificial Sequence
  Non-cyclic GFR-binding peptide
  MOD_RES (1), (1): Xaa is C or S
XVPTRLEPISILYLDSANNVVKFKYEDMVVE

SEQ ID NO: 34229 - protein, 37 aa, Artificial Sequence
  Non-cyclic GFR-binding peptide
  MOD_RES (3), (4), (37): Xaa is C or S
  MOD_RES (18), (19), (20), (21), (22): Xaa is A or G
  MOD_RES (23), (24), (25), (26): Xaa is A or G or is absent
STXXAPVKTSATSMLYYXXXXXXXXXLRKHRMIVEEX

SEQ ID NO: 34230 - protein, 34 aa, Artificial Sequence
  Non-cyclic GFR-binding peptide
  MOD_RES (1), (2): Xaa is C or S
  MOD_RES (16), (17), (18), (19), (20): Xaa is A or G
  MOD_RES (21), (22), (23), (24): Xaa is A or G or is absent
XXVPQALSPINILYFXXXXXXXXXYGKIPMIVRS

SEQ ID NO: 34231 - protein, 33 aa, Artificial Sequence
  Non-cyclic GFR-binding peptide
  MOD_RES (14), (15), (16), (17), (18): Xaa is A or G
  MOD_RES (19), (20), (21), (22): Xaa is A or G or is absent
VPEKMNAISILYFXXXXXXXXXLKKYRNMTVES

SEQ ID NO: 34232 - protein, 39 aa, Artificial Sequence
  Non-cyclic GFR-binding peptide
  MOD_RES (4), (5), (37), (39): Xaa is C or S
AGPXXTPTKMSPISMLYKNDKQQIILKYHYGMVVDRXGX

SEQ ID NO: 34233 - protein, 41 aa, Artificial Sequence
  Non-cyclic GFR-binding peptide
  MOD_RES (6), (7), (40): Xaa is C or S
  MOD_RES (21), (22), (23), (24), (25): Xaa is A or G
  MOD_RES (26), (27), (28), (29): Xaa is A or G or is absent
RVPSTXXAPVKTEPISMLYLXXXXXXXXXKFKYEMIVEEXG

SEQ ID NO: 34234 - protein, 33 aa, Artificial Sequence
  Non-cyclic GFR-binding peptide
  MOD_RES (2), (3): Xaa is C or S
TXXVPTRLSPISILYKDSANNVVLKYHYDMVVE

SEQ ID NO: 34235 - protein, 37 aa, Artificial Sequence
  Non-cyclic GFR-binding peptide
  MOD_RES (34), (36): Xaa is C or S
  MOD_RES (14), (15), (16), (17), (18): Xaa is A or G
  MOD_RES (19), (20), (21), (22): Xaa is A or G or is absent
VPEKMSATSILYYXXXXXXXXXLRKHRNMTVESXAXR

SEQ ID NO: 34236 - protein, 39 aa, Artificial Sequence
  Non-cyclic GFR-binding peptide
  MOD_RES (3), (4), (36), (38): Xaa is C or S
PTXXVPTRLSATSILYYDSANNVVLRKHRDMVVESXGXR

SEQ ID NO: 34237 - protein, 39 aa, Artificial Sequence
  Non-cyclic GFR-binding peptide
  MOD_RES (2), (3), (36), (38): Xaa is C or S
  MOD_RES (17), (18), (19), (20), (21): Xaa is A or G
  MOD_RES (22), (23), (24), (25): Xaa is A or G or is absent
TXXAPVKTEPISMLYLXXXXXXXXXKFKYEMIVEEXGXL

SEQ ID NO: 34238 - protein, 39 aa, Artificial Sequence
  Non-cyclic GFR-binding peptide
  MOD_RES (2), (3), (37), (39): Xaa is C or S
  MOD_RES (17), (18), (19), (20), (21): Xaa is A or G
  MOD_RES (22), (23), (24), (25): Xaa is A or G or is absent
AXXVPTKLSATSILYYXXXXXXXXXLRKHRGMAVSEXGX

SEQ ID NO: 34239 - protein, 43 aa, Artificial Sequence
  Non-cyclic GFR-binding peptide
  MOD_RES (6), (7), (41), (43): Xaa is C or S
  MOD_RES (21), (22), (23), (24), (25): Xaa is A or G
  MOD_RES (26), (27), (28), (29): Xaa is A or G or is absent
GIPEPXXVPEKMNAISILYFXXXXXXXXXLKKYRNMTVESXAX

SEQ ID NO: 34240 - protein, 39 aa, Artificial Sequence
  Non-cyclic GFR-binding peptide
  MOD_RES (4), (5), (38): Xaa is C or S
  MOD_RES (19), (20), (21), (22), (23): Xaa is A or G
  MOD_RES (24), (25), (26), (27): Xaa is A or G or is absent
PSTXXAPVKTEPISMLYLXXXXXXXXXKFKYEMIVEEXG

SEQ ID NO: 34241 - protein, 37 aa, Artificial Sequence
  Non-cyclic GFR-binding peptide
  MOD_RES (3), (4), (36): Xaa is C or S
EPXXVPEKMSPISILYKDENKNVVLKYHYNMTVESXA

SEQ ID NO: 34242 - protein, 36 aa, Artificial Sequence
  Non-cyclic GFR-binding peptide
  MOD_RES (1), (35): Xaa is C or S
  MOD_RES (15), (16), (17), (18), (19): Xaa is A or G
  MOD_RES (20), (21), (22), (23): Xaa is A or G or is absent
XVPTRLSATSILYYXXXXXXXXXLRKHRDMVVESXG

SEQ ID NO: 34243 - protein, 41 aa, Artificial Sequence
  Non-cyclic GFR-binding peptide
  MOD_RES (6), (7), (40): Xaa is C or S
  MOD_RES (21), (22), (23), (24), (25): Xaa is A or G
  MOD_RES (26), (27), (28), (29): Xaa is A or G or is absent
ASASPXXVSQDLSPINILYFXXXXXXXXXYGKIPMIVKSXK

SEQ ID NO: 34244 - protein, 37 aa, Artificial Sequence
  Non-cyclic GFR-binding peptide
  MOD_RES (5), (6): Xaa is C or S
TPPTXXVPTRLSATSILYYDSANNVVLRKHRDMVVES

SEQ ID NO: 34245 - protein, 39 aa, Artificial Sequence
  Non-cyclic GFR-binding peptide
  MOD_RES (5), (6): Xaa is C or S
  MOD_RES (20), (21), (22), (23), (24): Xaa is A or G
  MOD_RES (25), (26), (27), (28): Xaa is A or G or is absent
IPEPXXVPEKMEPISILYLXXXXXXXXXKFKYENMTVES

SEQ ID NO: 34246 - protein, 41 aa, Artificial Sequence
  Non-cyclic GFR-binding peptide
  MOD_RES (6), (7), (41): Xaa is C or S
  MOD_RES (21), (22), (23), (24), (25): Xaa is A or G
  MOD_RES (26), (27), (28), (29): Xaa is A or G or is absent
STPPTXXVPTRLSPISILYKXXXXXXXXXLKYHYDMVVESX

SEQ ID NO: 34247 - protein, 35 aa, Artificial Sequence
  Non-cyclic GFR-binding peptide
  MOD_RES (2), (3): Xaa is C or S
  MOD_RES (17), (18), (19), (20), (21): Xaa is A or G
  MOD_RES (22), (23), (24), (25): Xaa is A or G or is absent
PXXVSQDLSPINILYFXXXXXXXXXYGKIPMIVKS

SEQ ID NO: 34248 - protein, 40 aa, Artificial Sequence
  Non-cyclic GFR-binding peptide
  MOD_RES (5), (6), (40): Xaa is C or S
  MOD_RES (20), (21), (22), (23), (24): Xaa is A or G
  MOD_RES (25), (26), (27), (28): Xaa is A or G or is absent
IPEPXXVPEKMSATSILYYXXXXXXXXXLRKHRNMTVESX

SEQ ID NO: 34249 - protein, 35 aa, Artificial Sequence
  Non-cyclic GFR-binding peptide
  MOD_RES (32), (34): Xaa is C or S
VPEKMEPISILYLDENKNVVKFKYENMTVESXAXR

SEQ ID NO: 34250 - protein, 37 aa, Artificial Sequence
  Non-cyclic GFR-binding peptide
  MOD_RES (2), (3), (34), (36): Xaa is C or S
TXXAPVKTEPISMLYLDNGRVLLKFKYEMIVEEXGXL

SEQ ID NO: 34251 - protein, 35 aa, Artificial Sequence
  Non-cyclic GFR-binding peptide
  MOD_RES (32), (34): Xaa is C or S
TPTKMSATSMLYYNDKQQIILRKHRGMVVDRXGXS

SEQ ID NO: 34252 - protein, 41 aa, Artificial Sequence
  Non-cyclic GFR-binding peptide
  MOD_RES (5), (6), (38), (40): Xaa is C or S
SAGPXXTPTKMSATSMLYYNDKQQIILRKHRGMVVDRXGXS

SEQ ID NO: 34253 - protein, 34 aa, Artificial Sequence
  Non-cyclic GFR-binding peptide
  MOD_RES (1), (1): Xaa is C or S
  MOD_RES (15), (16), (17), (18), (19): Xaa is A or G
  MOD_RES (20), (21), (22), (23): Xaa is A or G or is absent
XVPEKMSPINILYFXXXXXXXXXYGKIPNMTVES

SEQ ID NO: 34254 - protein, 40 aa, Artificial Sequence
  Non-cyclic GFR-binding peptide
  MOD_RES (5), (6), (39): Xaa is C or S
  MOD_RES (20), (21), (22), (23), (24): Xaa is A or G
  MOD_RES (25), (26), (27), (28): Xaa is A or G or is absent
SAAPXXVPQALSPINILYFXXXXXXXXXYGKIPMIVRSXK

SEQ ID NO: 34255 - protein, 40 aa, Artificial Sequence
  Non-cyclic GFR-binding peptide
  MOD_RES (4), (5), (37), (39): Xaa is C or S
PEPXXVPEKMEPISILYLDENKNVVKFKYENMTVESXAXR

SEQ ID NO: 34256 - protein, 33 aa, Artificial Sequence
  Non-cyclic GFR-binding peptide
  MOD_RES (1), (32): Xaa is C or S
XAPVKTEPISMLYLDNGRVLLKFKYEMIVEEXG

SEQ ID NO: 34257 - protein, 43 aa, Artificial Sequence
  Non-cyclic GFR-binding peptide
  MOD_RES (6), (7), (41), (43): Xaa is C or S
  MOD_RES (21), (22), (23), (24), (25): Xaa is A or G
  MOD_RES (26), (27), (28), (29): Xaa is A or G or is absent
HVPKPXXAPTKLEPISVLYLXXXXXXXXXKFKYENMVVRSXGX

SEQ ID NO: 34258 - protein, 35 aa, Artificial Sequence
  Non-cyclic GFR-binding peptide
  MOD_RES (2), (3), (35): Xaa is C or S
PXXVPEKMSATSILYYDENKNVVLRKHRNMTVESX

SEQ ID NO: 34259 - protein, 38 aa, Artificial Sequence
  Non-cyclic GFR-binding peptide
  MOD_RES (3), (4), (35), (37): Xaa is C or S
STXXAPVKTSPISMLYKDNGRVLLLKYHYMIVEEXGXL

SEQ ID NO: 34260 - protein, 41 aa, Artificial Sequence
  Non-cyclic GFR-binding peptide
  MOD_RES (6), (7), (38), (40): Xaa is C or S
ASASPXXVSQDLSPINILYFIGKTPKIYGKIPMIVKSXKXS

SEQ ID NO: 34261 - protein, 36 aa, Artificial Sequence
  Non-cyclic GFR-binding peptide
  MOD_RES (4), (5): Xaa is C or S
PASXXVPARLSATSILYYDAANNVVLRKHRDMVVEA

SEQ ID NO: 34262 - protein, 38 aa, Artificial Sequence
  Non-cyclic GFR-binding peptide
  MOD_RES (6), (7), (38): Xaa is C or S
RVPSTXXAPVKTSPISMLYKDNGRVLLLKYHYMIVEEX

SEQ ID NO: 34263 - protein, 42 aa, Artificial Sequence
  Non-cyclic GFR-binding peptide
  MOD_RES (6), (7), (41): Xaa is C or S
  MOD_RES (21), (22), (23), (24), (25): Xaa is A or G
  MOD_RES (26), (27), (28), (29): Xaa is A or G or is absent
GIPEPXXVPEKMNAISILYFXXXXXXXXXLKKYRNMTVESXA

SEQ ID NO: 34264 - protein, 40 aa, Artificial Sequence
  Non-cyclic GFR-binding peptide
  MOD_RES (5), (6), (38), (40): Xaa is C or S
TPPTXXVPTRLEPISILYLDSANNVVKFKYEDMVVESXGX

SEQ ID NO: 34265 - protein, 37 aa, Artificial Sequence
  Non-cyclic GFR-binding peptide
  MOD_RES (3), (4): Xaa is C or S
  MOD_RES (18), (19), (20), (21), (22): Xaa is A or G
  MOD_RES (23), (24), (25), (26): Xaa is A or G or is absent
GPXXTPTKMSPISMLYKXXXXXXXXXLKYHYGMVVDR

SEQ ID NO: 34266 - protein, 38 aa, Artificial Sequence
  Non-cyclic GFR-binding peptide
  MOD_RES (5), (6): Xaa is C or S
  MOD_RES (20), (21), (22), (23), (24): Xaa is A or G
  MOD_RES (25), (26), (27), (28): Xaa is A or G or is absent
IPEPXXVPEKMSPINILYFXXXXXXXXXYGKIPNMTVE

SEQ ID NO: 34267 - protein, 38 aa, Artificial Sequence
  Non-cyclic GFR-binding peptide
  MOD_RES (6), (7), (38): Xaa is C or S
ASASPXXVSQDLSPINILYFIGKTPKIYGKIPMIVKSX

SEQ ID NO: 34268 - protein, 36 aa, Artificial Sequence
  Non-cyclic GFR-binding peptide
  MOD_RES (1), (2), (36): Xaa is C or S
  MOD_RES (16), (17), (18), (19), (20): Xaa is A or G
  MOD_RES (21), (22), (23), (24): Xaa is A or G or is absent
XXVPEKMSATSILYYXXXXXXXXXLRKHRNMTVESX

SEQ ID NO: 34269 - protein, 32 aa, Artificial Sequence
  Non-cyclic GFR-binding peptide
  MOD_RES (32), (32): Xaa is C or S
TPTKMSPISMLYKNDKQQIILKYHYGMVVDRX

SEQ ID NO: 34270 - protein, 40 aa, Artificial Sequence
  Non-cyclic GFR-binding peptide
  MOD_RES (6), (7), (38), (40): Xaa is C or S
RVPSTXXAPVKTSATSMLYYDNGRVLLLRKHRMIVEEXGX

SEQ ID NO: 34271 - protein, 36 aa, Artificial Sequence
  Non-cyclic GFR-binding peptide
  MOD_RES (3), (4), (36): Xaa is C or S
GPXXTPTKMSPISMLYKNDKQQIILKYHYGMVVDRX

SEQ ID NO: 34272 - protein, 33 aa, Artificial Sequence
  Non-cyclic GFR-binding peptide
  MOD_RES (1), (1): Xaa is C or S
  MOD_RES (15), (16), (17), (18), (19): Xaa is A or G
  MOD_RES (20), (21), (22), (23): Xaa is A or G or is absent
XVPEKMSATSILYYXXXXXXXXXLRKHRNMTVE

SEQ ID NO: 34273 - protein, 41 aa, Artificial Sequence
  Non-cyclic GFR-binding peptide
  MOD_RES (6), (7), (41): Xaa is C or S
  MOD_RES (21), (22), (23), (24), (25): Xaa is A or G
  MOD_RES (26), (27), (28), (29): Xaa is A or G or is absent
GIPEPXXVPEKMEPISILYLXXXXXXXXXKFKYENMTVESX

SEQ ID NO: 34274 - protein, 42 aa, Artificial Sequence
  Non-cyclic GFR-binding peptide
  MOD_RES (4), (5), (39), (41): Xaa is C or S
  MOD_RES (19), (20), (21), (22), (23): Xaa is A or G
  MOD_RES (24), (25), (26), (27): Xaa is A or G or is absent
PEPXXVPEKMSPINILYFXXXXXXXXXYGKIPNMTVESXAXR

SEQ ID NO: 34275 - protein, 32 aa, Artificial Sequence
  Non-cyclic GFR-binding peptide
  MOD_RES (1), (1): Xaa is C or S
XVPEKMNAISILYFDENKNVVLKKYRNMTVES

SEQ ID NO: 34276 - protein, 33 aa, Artificial Sequence
  Non-cyclic GFR-binding peptide
  MOD_RES (1), (2), (33): Xaa is C or S
XXVSQDLSPINILYFIGKTPKIYGKIPMIVKSX

SEQ ID NO: 34277 - protein, 32 aa, Artificial Sequence
  Non-cyclic GFR-binding peptide
  MOD_RES (1), (2): Xaa is C or S
XXVPQDLSPINILYFVGRTPKVYGKIPMVVKS

SEQ ID NO: 34278 - protein, 38 aa, Artificial Sequence
  Non-cyclic GFR-binding peptide
  MOD_RES (1), (2), (35), (37): Xaa is C or S
  MOD_RES (16), (17), (18), (19), (20): Xaa is A or G
  MOD_RES (21), (22), (23), (24): Xaa is A or G or is absent
XXVPQDLSPINILYFXXXXXXXXXYGKIPMVVKSXKXS

SEQ ID NO: 34279 - protein, 36 aa, Artificial Sequence
  Non-cyclic GFR-binding peptide
  MOD_RES (2), (3), (35): Xaa is C or S
PXXVPEKMEPISILYLDENKNVVKFKYENMTVESXA

SEQ ID NO: 34280 - protein, 38 aa, Artificial Sequence
  Non-cyclic GFR-binding peptide
  MOD_RES (1), (35), (37): Xaa is C or S
  MOD_RES (15), (16), (17), (18), (19): Xaa is A or G
  MOD_RES (20), (21), (22), (23): Xaa is A or G or is absent
XVPEKMSPISILYKXXXXXXXXXLKYHYNMTVESXAXR

SEQ ID NO: 34281 - protein, 38 aa, Artificial Sequence
  Non-cyclic GFR-binding peptide
  MOD_RES (2), (3), (35), (37): Xaa is C or S
SXXVPARLSATSILYYDAANNVVLRKHRDMVVEAXGXR

SEQ ID NO: 34282 - protein, 37 aa, Artificial Sequence
  Non-cyclic GFR-binding peptide
  MOD_RES (6), (7): Xaa is C or S
GIPEPXXVPEKMSPINILYFDENKNVVYGKIPNMTVE

SEQ ID NO: 34283 - protein, 42 aa, Artificial Sequence
  Non-cyclic GFR-binding peptide
  MOD_RES (5), (6), (39), (41): Xaa is C or S
  MOD_RES (20), (21), (22), (23), (24): Xaa is A or G
  MOD_RES (25), (26), (27), (28): Xaa is A or G or is absent
SASPXXVSQDLSPINILYFXXXXXXXXXYGKIPMIVKSXKXS

SEQ ID NO: 34284 - protein, 33 aa, Artificial Sequence
  Non-cyclic GFR-binding peptide
  MOD_RES (1), (2), (33): Xaa is C or S
XXAPVKTEPISMLYLDNGRVLLKFKYEMIVEEX

SEQ ID NO: 34285 - protein, 38 aa, Artificial Sequence
  Non-cyclic GFR-binding peptide
  MOD_RES (1), (2), (36), (38): Xaa is C or S
  MOD_RES (16), (17), (18), (19), (20): Xaa is A or G
  MOD_RES (21), (22), (23), (24): Xaa is A or G or is absent
XXVPEKMSATSILYYXXXXXXXXXLRKHRNMTVESXAX

SEQ ID NO: 34286 - protein, 38 aa, Artificial Sequence
  Non-cyclic GFR-binding peptide
  MOD_RES (6), (7): Xaa is C or S
GIPEPXXVPEKMSATSILYYDENKNVVLRKHRNMTVES

SEQ ID NO: 34287 - protein, 39 aa, Artificial Sequence
  Non-cyclic GFR-binding peptide
  MOD_RES (4), (5), (36), (38): Xaa is C or S
PSTXXAPVKTSATSMLYYDNGRVLLLRKHRMIVEEXGXL

SEQ ID NO: 34288 - protein, 38 aa, Artificial Sequence
  Non-cyclic GFR-binding peptide
  MOD_RES (4), (5), (37): Xaa is C or S
PEPXXVPEKMSPISILYKDENKNVVLKYHYNMTVESXA

SEQ ID NO: 34289 - protein, 38 aa, Artificial Sequence
  Non-cyclic GFR-binding peptide
  MOD_RES (2), (3), (36), (38): Xaa is C or S
  MOD_RES (17), (18), (19), (20), (21): Xaa is A or G
  MOD_RES (22), (23), (24), (25): Xaa is A or G or is absent
PXXVSQDLSPINILYFXXXXXXXXXYGKIPMIVKSXKX

SEQ ID NO: 34290 - protein, 39 aa, Artificial Sequence
  Non-cyclic GFR-binding peptide
  MOD_RES (4), (5), (36), (38): Xaa is C or S
AAPXXVPQALSPINILYFVGRKPKVYGKIPMIVRSXKXS

SEQ ID NO: 34291 - protein, 37 aa, Artificial Sequence
  Non-cyclic GFR-binding peptide
  MOD_RES (4), (5), (37): Xaa is C or S
SKAXXVPTKLSATSILYYDKGVVTYLRKHRGMAVSEX

SEQ ID NO: 34292 - protein, 36 aa, Artificial Sequence
  Non-cyclic GFR-binding peptide
  MOD_RES (2), (3), (35): Xaa is C or S
PXXTPTKMEPISMLYLNDKQQIIKFKYEGMVVDRXG

SEQ ID NO: 34293 - protein, 36 aa, Artificial Sequence
  Non-cyclic GFR-binding peptide
  MOD_RES (2), (3): Xaa is C or S
  MOD_RES (17), (18), (19), (20), (21): Xaa is A or G
  MOD_RES (22), (23), (24), (25): Xaa is A or G or is absent
AXXVPTKLSATSILYYXXXXXXXXXLRKHRGMAVSE

SEQ ID NO: 34294 - protein, 34 aa, Artificial Sequence
  Non-cyclic GFR-binding peptide
  MOD_RES (1), (33): Xaa is C or S
XVPEKMSPISILYKDENKNVVLKYHYNMTVESXA

SEQ ID NO: 34295 - protein, 31 aa, Artificial Sequence
  Non-cyclic GFR-binding peptide
  MOD_RES (1), (1): Xaa is C or S
XVPTRLSATSILYYDSANNVVLRKHRDMVVE

SEQ ID NO: 34296 - protein, 33 aa, Artificial Sequence
  Non-cyclic GFR-binding peptide
  MOD_RES (14), (15), (16), (17), (18): Xaa is A or G
  MOD_RES (19), (20), (21), (22): Xaa is A or G or is absent
TPTKMSPISMLYKXXXXXXXXXLKYHYGMVVDR

SEQ ID NO: 34297 - protein, 38 aa, Artificial Sequence
  Non-cyclic GFR-binding peptide
  MOD_RES (5), (6): Xaa is C or S
  MOD_RES (20), (21), (22), (23), (24): Xaa is A or G
  MOD_RES (25), (26), (27), (28): Xaa is A or G or is absent
TPPTXXVPTRLSATSILYYXXXXXXXXXLRKHRDMVVE

SEQ ID NO: 34298 - protein, 34 aa, Artificial Sequence
  Non-cyclic GFR-binding peptide
  MOD_RES (34), (34): Xaa is C or S
  MOD_RES (14), (15), (16), (17), (18): Xaa is A or G
  MOD_RES (19), (20), (21), (22): Xaa is A or G or is absent
VPEKMSPISILYKXXXXXXXXXLKYHYNMTVESX

SEQ ID NO: 34299 - protein, 40 aa, Artificial Sequence
  Non-cyclic GFR-binding peptide
  MOD_RES (3), (4), (38), (40): Xaa is C or S
  MOD_RES (18), (19), (20), (21), (22): Xaa is A or G
  MOD_RES (23), (24), (25), (26): Xaa is A or G or is absent
KAXXVPTKLSATSILYYXXXXXXXXXLRKHRGMAVSEXGX

SEQ ID NO: 34300 - protein, 41 aa, Artificial Sequence
  Non-cyclic GFR-binding peptide
  MOD_RES (4), (5), (39), (41): Xaa is C or S
  MOD_RES (19), (20), (21), (22), (23): Xaa is A or G
  MOD_RES (24), (25), (26), (27): Xaa is A or G or is absent
PPTXXVPTRLSPISILYKXXXXXXXXXLKYHYDMVVESXGX

SEQ ID NO: 34301 - protein, 38 aa, Artificial Sequence
  Non-cyclic GFR-binding peptide
  MOD_RES (6), (7): Xaa is C or S
GSAGPXXTPTKMSATSMLYYNDKQQIILRKHRGMVVDR

SEQ ID NO: 34302 - protein, 39 aa, Artificial Sequence
  Non-cyclic GFR-binding peptide
  MOD_RES (3), (4), (36), (38): Xaa is C or S
EPXXVPEKMSATSILYYDENKNVVLRKHRNMTVESXAXR

SEQ ID NO: 34303 - protein, 35 aa, Artificial Sequence
  Non-cyclic GFR-binding peptide
  MOD_RES (1), (35): Xaa is C or S
  MOD_RES (15), (16), (17), (18), (19): Xaa is A or G
  MOD_RES (20), (21), (22), (23): Xaa is A or G or is absent
XVPEKMSPISILYKXXXXXXXXXLKYHYNMTVESX

SEQ ID NO: 34304 - protein, 38 aa, Artificial Sequence
  Non-cyclic GFR-binding peptide
  MOD_RES (3), (4), (35), (37): Xaa is C or S
SPXXVSQDLSPINILYFIGKTPKIYGKIPMIVKSXKXS

SEQ ID NO: 34305 - protein, 35 aa, Artificial Sequence
  Non-cyclic GFR-binding peptide
  MOD_RES (1), (2): Xaa is C or S
  MOD_RES (16), (17), (18), (19), (20): Xaa is A or G
  MOD_RES (21), (22), (23), (24): Xaa is A or G or is absent
XXVPTRLEPISILYLXXXXXXXXXKFKYEDMVVES

SEQ ID NO: 34306 - protein, 38 aa, Artificial Sequence
  Non-cyclic GFR-binding peptide
  MOD_RES (4), (5), (38): Xaa is C or S
  MOD_RES (19), (20), (21), (22), (23): Xaa is A or G
  MOD_RES (24), (25), (26), (27): Xaa is A or G or is absent
PSTXXAPVKTSATSMLYYXXXXXXXXXLRKHRMIVEEX

SEQ ID NO: 34307 - protein, 40 aa, Artificial Sequence
  Non-cyclic GFR-binding peptide
  MOD_RES (3), (4), (37), (39): Xaa is C or S
  MOD_RES (18), (19), (20), (21), (22): Xaa is A or G
  MOD_RES (23), (24), (25), (26): Xaa is A or G or is absent
APXXVPQALSPINILYFXXXXXXXXXYGKIPMIVRSXKXS

SEQ ID NO: 34308 - protein, 36 aa, Artificial Sequence
  Non-cyclic GFR-binding peptide
  MOD_RES (1), (2), (33), (35): Xaa is C or S
XXAPVKTSATSMLYYDNGRVLLLRKHRMIVEEXGXL

SEQ ID NO: 34309 - protein, 38 aa, Artificial Sequence
  Non-cyclic GFR-binding peptide
  MOD_RES (1), (2), (35), (37): Xaa is C or S
  MOD_RES (16), (17), (18), (19), (20): Xaa is A or G
  MOD_RES (21), (22), (23), (24): Xaa is A or G or is absent
XXVPQALSPINILYFXXXXXXXXXYGKIPMIVRSXKXS

SEQ ID NO: 34310 - protein, 39 aa, Artificial Sequence
  Non-cyclic GFR-binding peptide
  MOD_RES (1), (2), (36), (38): Xaa is C or S
  MOD_RES (16), (17), (18), (19), (20): Xaa is A or G
  MOD_RES (21), (22), (23), (24): Xaa is A or G or is absent
XXTPTKMEPISMLYLXXXXXXXXXKFKYEGMVVDRXGXS

SEQ ID NO: 34311 - protein, 34 aa, Artificial Sequence
  Non-cyclic GFR-binding peptide
  MOD_RES (2), (3): Xaa is C or S
PXXVPEKMSPISILYKDENKNVVLKYHYNMTVES

SEQ ID NO: 34312 - protein, 39 aa, Artificial Sequence
  Non-cyclic GFR-binding peptide
  MOD_RES (6), (7), (39): Xaa is C or S
GIPEPXXVPEKMSPINILYFDENKNVVYGKIPNMTVESX

SEQ ID NO: 34313 - protein, 40 aa, Artificial Sequence
  Non-cyclic GFR-binding peptide
  MOD_RES (5), (6), (38), (40): Xaa is C or S
APASXXVPARLSATSILYYDAANNVVLRKHRDMVVEAXGX

SEQ ID NO: 34314 - protein, 34 aa, Artificial Sequence
  Non-cyclic GFR-binding peptide
  MOD_RES (1), (33): Xaa is C or S
XTPTKMSPISMLYKNDKQQIILKYHYGMVVDRXG

SEQ ID NO: 34315 - protein, 32 aa, Artificial Sequence
  Non-cyclic GFR-binding peptide
  MOD_RES (1), (2): Xaa is C or S
XXVPTKLSATSILYYDKGVVTYLRKHRGMAVS

SEQ ID NO: 34316 - protein, 35 aa, Artificial Sequence
  Non-cyclic GFR-binding peptide
  MOD_RES (2), (3), (35): Xaa is C or S
PXXTPTKMEPISMLYLNDKQQIIKFKYEGMVVDRX

SEQ ID NO: 34317 - protein, 39 aa, Artificial Sequence
  Non-cyclic GFR-binding peptide
  MOD_RES (5), (6), (38): Xaa is C or S
IPEPXXVPEKMEPISILYLDENKNVVKFKYENMTVESXA

SEQ ID NO: 34318 - protein, 34 aa, Artificial Sequence
  Non-cyclic GFR-binding peptide
  MOD_RES (3), (4): Xaa is C or S
STXXAPVKTSATSMLYYDNGRVLLLRKHRMIVEE

SEQ ID NO: 34319 - protein, 32 aa, Artificial Sequence
  Non-cyclic GFR-binding peptide
  MOD_RES (31), (31): Xaa is C or S
VPQALSPINILYFVGRKPKVYGKIPMIVRSXK

SEQ ID NO: 34320 - protein, 32 aa, Artificial Sequence
  Non-cyclic GFR-binding peptide
  MOD_RES (1), (2): Xaa is C or S
XXAPVKTSPISMLYKDNGRVLLLKYHYMIVEE

SEQ ID NO: 34321 - protein, 38 aa, Artificial Sequence
  Non-cyclic GFR-binding peptide
  MOD_RES (3), (4), (38): Xaa is C or S
  MOD_RES (18), (19), (20), (21), (22): Xaa is A or G
  MOD_RES (23), (24), (25), (26): Xaa is A or G or is absent
PTXXVPTRLEPISILYLXXXXXXXXXKFKYEDMVVESX

SEQ ID NO: 34322 - protein, 35 aa, Artificial Sequence
  Non-cyclic GFR-binding peptide
  MOD_RES (1), (2): Xaa is C or S
  MOD_RES (16), (17), (18), (19), (20): Xaa is A or G
  MOD_RES (21), (22), (23), (24): Xaa is A or G or is absent
XXVPTRLSPISILYKXXXXXXXXXLKYHYDMVVES

SEQ ID NO: 34323 - protein, 32 aa, Artificial Sequence
  Non-cyclic GFR-binding peptide
  MOD_RES (14), (15), (16), (17), (18): Xaa is A or G
  MOD_RES (19), (20), (21), (22): Xaa is A or G or is absent
VPQALSPINILYFXXXXXXXXXYGKIPMIVRS

SEQ ID NO: 34324 - protein, 41 aa, Artificial Sequence
  Non-cyclic GFR-binding peptide
  MOD_RES (5), (6), (38), (40): Xaa is C or S
IPEPXXVPEKMSPISILYKDENKNVVLKYHYNMTVESXAXR

SEQ ID NO: 34325 - protein, 35 aa, Artificial Sequence
  Non-cyclic GFR-binding peptide
  MOD_RES (1), (32), (34): Xaa is C or S
XVPQALSPINILYFVGRKPKVYGKIPMIVRSXKXS

SEQ ID NO: 34326 - protein, 34 aa, Artificial Sequence
  Non-cyclic GFR-binding peptide
  MOD_RES (1), (34): Xaa is C or S
  MOD_RES (15), (16), (17), (18), (19): Xaa is A or G
  MOD_RES (20), (21), (22), (23): Xaa is A or G or is absent
XAPVKTSPISMLYKXXXXXXXXXLKYHYMIVEEX

SEQ ID NO: 34327 - protein, 39 aa, Artificial Sequence
  Non-cyclic GFR-binding peptide
  MOD_RES (3), (4), (36), (38): Xaa is C or S
GPXXTPTKMEPISMLYLNDKQQIIKFKYEGMVVDRXGXS

SEQ ID NO: 34328 - protein, 35 aa, Artificial Sequence
  Non-cyclic GFR-binding peptide
  MOD_RES (1), (33), (35): Xaa is C or S
XTPTKMSATSMLYYNDKQQIILRKHRGMVVDRXGX

SEQ ID NO: 34329 - protein, 36 aa, Artificial Sequence
  Non-cyclic GFR-binding peptide
  MOD_RES (3), (4), (36): Xaa is C or S
EPXXVPEKMNAISILYFDENKNVVLKKYRNMTVESX

SEQ ID NO: 34330 - protein, 33 aa, Artificial Sequence
  Non-cyclic GFR-binding peptide
  MOD_RES (32), (32): Xaa is C or S
VPEKMEPISILYLDENKNVVKFKYENMTVESXA

SEQ ID NO: 34331 - protein, 41 aa, Artificial Sequence
  Non-cyclic GFR-binding peptide
  MOD_RES (3), (4), (38), (40): Xaa is C or S
  MOD_RES (18), (19), (20), (21), (22): Xaa is A or G
  MOD_RES (23), (24), (25), (26): Xaa is A or G or is absent
PTXXVPTRLSATSILYYXXXXXXXXXLRKHRDMVVESXGXR

SEQ ID NO: 34332 - protein, 38 aa, Artificial Sequence
  Non-cyclic GFR-binding peptide
  MOD_RES (1), (2), (36), (38): Xaa is C or S
  MOD_RES (16), (17), (18), (19), (20): Xaa is A or G
  MOD_RES (21), (22), (23), (24): Xaa is A or G or is absent
XXVPTRLSATSILYYXXXXXXXXXLRKHRDMVVESXGX

SEQ ID NO: 34333 - protein, 40 aa, Artificial Sequence
  Non-cyclic GFR-binding peptide
  MOD_RES (5), (6), (39): Xaa is C or S
  MOD_RES (20), (21), (22), (23), (24): Xaa is A or G
  MOD_RES (25), (26), (27), (28): Xaa is A or G or is absent
SASPXXVSQDLSPINILYFXXXXXXXXXYGKIPMIVKSXK

SEQ ID NO: 34334 - protein, 37 aa, Artificial Sequence
  Non-cyclic GFR-binding peptide
  MOD_RES (34), (36): Xaa is C or S
  MOD_RES (14), (15), (16), (17), (18): Xaa is A or G
  MOD_RES (19), (20), (21), (22): Xaa is A or G or is absent
TPTKMSPISMLYKXXXXXXXXXLKYHYGMVVDRXGXS

SEQ ID NO: 34335 - protein, 33 aa, Artificial Sequence
  Non-cyclic GFR-binding peptide
  MOD_RES (2), (3): Xaa is C or S
TXXVPTRLSATSILYYDSANNVVLRKHRDMVVE

SEQ ID NO: 34336 - protein, 33 aa, Artificial Sequence
  Non-cyclic GFR-binding peptide
  MOD_RES (1), (2): Xaa is C or S
XXVPTKLSATSILYYDKGVVTYLRKHRGMAVSE

SEQ ID NO: 34337 - protein, 34 aa, Artificial Sequence
  Non-cyclic GFR-binding peptide
  MOD_RES (3), (4): Xaa is C or S
EPXXVPEKMEPISILYLDENKNVVKFKYENMTVE

SEQ ID NO: 34338 - protein, 43 aa, Artificial Sequence
  Non-cyclic GFR-binding peptide
  MOD_RES (6), (7), (41), (43): Xaa is C or S
  MOD_RES (21), (22), (23), (24), (25): Xaa is A or G
  MOD_RES (26), (27), (28), (29): Xaa is A or G or is absent
GSAGPXXTPTKMEPISMLYLXXXXXXXXXKFKYEGMVVDRXGX

SEQ ID NO: 34339 - protein, 38 aa, Artificial Sequence
  Non-cyclic GFR-binding peptide
  MOD_RES (6), (7), (38): Xaa is C or S
RVPSTXXAPVKTEPISMLYLDNGRVLLKFKYEMIVEEX

SEQ ID NO: 34340 - protein, 33 aa, Artificial Sequence
  Non-cyclic GFR-binding peptide
  MOD_RES (32), (32): Xaa is C or S
VPTKLSATSILYYDKGVVTYLRKHRGMAVSEXG

SEQ ID NO: 34341 - protein, 33 aa, Artificial Sequence
  Non-cyclic GFR-binding peptide
  MOD_RES (14), (15), (16), (17), (18): Xaa is A or G
  MOD_RES (19), (20), (21), (22): Xaa is A or G or is absent
VPTRLSATSILYYXXXXXXXXXLRKHRDMVVES

SEQ ID NO: 34342 - protein, 37 aa, Artificial Sequence
  Non-cyclic GFR-binding peptide
  MOD_RES (4), (5), (36): Xaa is C or S
PSTXXAPVKTEPISMLYLDNGRVLLKFKYEMIVEEXG

SEQ ID NO: 34343 - protein, 40 aa, Artificial Sequence
  Non-cyclic GFR-binding peptide
  MOD_RES (3), (4), (38), (40): Xaa is C or S
  MOD_RES (18), (19), (20), (21), (22): Xaa is A or G
  MOD_RES (23), (24), (25), (26): Xaa is A or G or is absent
EPXXVPEKMNAISILYFXXXXXXXXXLKKYRNMTVESXAX

SEQ ID NO: 34344 - protein, 38 aa, Artificial Sequence
  Non-cyclic GFR-binding peptide
  MOD_RES (1), (2), (35), (37): Xaa is C or S
  MOD_RES (16), (17), (18), (19), (20): Xaa is A or G
  MOD_RES (21), (22), (23), (24): Xaa is A or G or is absent
XXAPVKTSATSMLYYXXXXXXXXXLRKHRMIVEEXGXL

SEQ ID NO: 34345 - protein, 31 aa, Artificial Sequence
  Non-cyclic GFR-binding peptide
  MOD_RES (31), (31): Xaa is C or S
APVKTEPISMLYLDNGRVLLKFKYEMIVEEX

SEQ ID NO: 34346 - protein, 35 aa, Artificial Sequence
  Non-cyclic GFR-binding peptide
  MOD_RES (4), (5): Xaa is C or S
ASPXXVSQDLSPINILYFIGKTPKIYGKIPMIVKS

SEQ ID NO: 34347 - protein, 32 aa, Artificial Sequence
  Non-cyclic GFR-binding peptide
  MOD_RES (1), (1): Xaa is C or S
XVPEKMSPINILYFDENKNVVYGKIPNMTVES

SEQ ID NO: 34348 - protein, 40 aa, Artificial Sequence
  Non-cyclic GFR-binding peptide
  MOD_RES (6), (7): Xaa is C or S
  MOD_RES (21), (22), (23), (24), (25): Xaa is A or G
  MOD_RES (26), (27), (28), (29): Xaa is A or G or is absent
KASKAXXVPTKLSATSILYYXXXXXXXXXLRKHRGMAVSE

SEQ ID NO: 34349 - protein, 40 aa, Artificial Sequence
  Non-cyclic GFR-binding peptide
  MOD_RES (6), (7): Xaa is C or S
  MOD_RES (21), (22), (23), (24), (25): Xaa is A or G
  MOD_RES (26), (27), (28), (29): Xaa is A or G or is absent
STPPTXXVPTRLEPISILYLXXXXXXXXXKFKYEDMVVES

SEQ ID NO: 34350 - protein, 36 aa, Artificial Sequence
  Non-cyclic GFR-binding peptide
  MOD_RES (2), (3): Xaa is C or S
  MOD_RES (17), (18), (19), (20), (21): Xaa is A or G
  MOD_RES (22), (23), (24), (25): Xaa is A or G or is absent
PXXVPEKMSPINILYFXXXXXXXXXYGKIPNMTVES

SEQ ID NO: 34351 - protein, 38 aa, Artificial Sequence
  Non-cyclic GFR-binding peptide
  MOD_RES (2), (3), (37): Xaa is C or S
  MOD_RES (17), (18), (19), (20), (21): Xaa is A or G
  MOD_RES (22), (23), (24), (25): Xaa is A or G or is absent
TXXVPTRLEPISILYLXXXXXXXXXKFKYEDMVVESXG

SEQ ID NO: 34352 - protein, 36 aa, Artificial Sequence
  Non-cyclic GFR-binding peptide
  MOD_RES (1), (33), (35): Xaa is C or S
XVPTRLSPISILYKDSANNVVLKYHYDMVVESXGXR

SEQ ID NO: 34353 - protein, 38 aa, Artificial Sequence
  Non-cyclic GFR-binding peptide
  MOD_RES (5), (6): Xaa is C or S
  MOD_RES (20), (21), (22), (23), (24): Xaa is A or G
  MOD_RES (25), (26), (27), (28): Xaa is A or G or is absent
TPPTXXVPTRLEPISILYLXXXXXXXXXKFKYEDMVVE

SEQ ID NO: 34354 - protein, 33 aa, Artificial Sequence
  Non-cyclic GFR-binding peptide
  MOD_RES (32), (32): Xaa is C or S
VPEKMNAISILYFDENKNVVLKKYRNMTVESXA

SEQ ID NO: 34355 - protein, 41 aa, Artificial Sequence
  Non-cyclic GFR-binding peptide
  MOD_RES (6), (7), (40): Xaa is C or S
  MOD_RES (21), (22), (23), (24), (25): Xaa is A or G
  MOD_RES (26), (27), (28), (29): Xaa is A or G or is absent
ASAAPXXVPQALSPINILYFXXXXXXXXXYGKIPMIVRSXK

SEQ ID NO: 34356 - protein, 42 aa, Artificial Sequence
  Non-cyclic GFR-binding peptide
  MOD_RES (6), (7), (40), (42): Xaa is C or S
  MOD_RES (21), (22), (23), (24), (25): Xaa is A or G
  MOD_RES (26), (27), (28), (29): Xaa is A or G or is absent
RVPSTXXAPVKTEPISMLYLXXXXXXXXXKFKYEMIVEEXGX

SEQ ID NO: 34357 - protein, 31 aa, Artificial Sequence
  Non-cyclic GFR-binding peptide
VPEKMEPISILYLDENKNVVKFKYENMTVES

SEQ ID NO: 34358 - protein, 36 aa, Artificial Sequence
  Non-cyclic GFR-binding peptide
  MOD_RES (33), (35): Xaa is C or S
  MOD_RES (14), (15), (16), (17), (18): Xaa is A or G
  MOD_RES (19), (20), (21), (22): Xaa is A or G or is absent
VPQDLSPINILYFXXXXXXXXXYGKIPMVVKSXKXS

SEQ ID NO: 34359 - protein, 38 aa, Artificial Sequence
  Non-cyclic GFR-binding peptide
  MOD_RES (2), (3), (35), (37): Xaa is C or S
TXXVPTRLEPISILYLDSANNVVKFKYEDMVVESXGXR

SEQ ID NO: 34360 - protein, 38 aa, Artificial Sequence
  Non-cyclic GFR-binding peptide
  MOD_RES (5), (6): Xaa is C or S
  MOD_RES (20), (21), (22), (23), (24): Xaa is A or G
  MOD_RES (25), (26), (27), (28): Xaa is A or G or is absent
TPPTXXVPTRLSPISILYKXXXXXXXXXLKYHYDMVVE

SEQ ID NO: 34361 - protein, 43 aa, Artificial Sequence
  Non-cyclic GFR-binding peptide
  MOD_RES (5), (6), (40), (42): Xaa is C or S
  MOD_RES (20), (21), (22), (23), (24): Xaa is A or G
  MOD_RES (25), (26), (27), (28): Xaa is A or G or is absent
SAGPXXTPTKMEPISMLYLXXXXXXXXXKFKYEGMVVDRXGXS

SEQ ID NO: 34362 - protein, 37 aa, Artificial Sequence
  Non-cyclic GFR-binding peptide
  MOD_RES (3), (4), (37): Xaa is C or S
  MOD_RES (18), (19), (20), (21), (22): Xaa is A or G
  MOD_RES (23), (24), (25), (26): Xaa is A or G or is absent
APXXVPQALSPINILYFXXXXXXXXXYGKIPMIVRSX

SEQ ID NO: 34363 - protein, 37 aa, Artificial Sequence
  Non-cyclic GFR-binding peptide
  MOD_RES (1), (2), (34), (36): Xaa is C or S
XXVPTRLEPISILYLDSANNVVKFKYEDMVVESXGXR

SEQ ID NO: 34364 - protein, 31 aa, Artificial Sequence
  Non-cyclic GFR-binding peptide
VPARLSATSILYYDAANNVVLRKHRDMVVEA

SEQ ID NO: 34365 - protein, 37 aa, Artificial Sequence
  Non-cyclic GFR-binding peptide
  MOD_RES (34), (36): Xaa is C or S
  MOD_RES (14), (15), (16), (17), (18): Xaa is A or G
  MOD_RES (19), (20), (21), (22): Xaa is A or G or is absent
VPTRLEPISILYLXXXXXXXXXKFKYEDMVVESXGXR

SEQ ID NO: 34366 - protein, 35 aa, Artificial Sequence
  Non-cyclic GFR-binding peptide
  MOD_RES (4), (5): Xaa is C or S
PEPXXVPEKMSPISILYKDENKNVVLKYHYNMTVE

SEQ ID NO: 34367 - protein, 34 aa, Artificial Sequence
  Non-cyclic GFR-binding peptide
  MOD_RES (3), (4): Xaa is C or S
EPXXVPEKMSATSILYYDENKNVVLRKHRNMTVE

SEQ ID NO: 34368 - protein, 36 aa, Artificial Sequence
  Non-cyclic GFR-binding peptide
  MOD_RES (2), (3), (36): Xaa is C or S
  MOD_RES (17), (18), (19), (20), (21): Xaa is A or G
  MOD_RES (22), (23), (24), (25): Xaa is A or G or is absent
TXXAPVKTSPISMLYKXXXXXXXXXLKYHYMIVEEX

SEQ ID NO: 34369 - protein, 36 aa, Artificial Sequence
  Non-cyclic GFR-binding peptide
  MOD_RES (1), (2), (36): Xaa is C or S
  MOD_RES (16), (17), (18), (19), (20): Xaa is A or G
  MOD_RES (21), (22), (23), (24): Xaa is A or G or is absent
XXVPEKMSPISILYKXXXXXXXXXLKYHYNMTVESX

SEQ ID NO: 34370 - protein, 41 aa, Artificial Sequence
  Non-cyclic GFR-binding peptide
  MOD_RES (3), (4), (38), (40): Xaa is C or S
  MOD_RES (18), (19), (20), (21), (22): Xaa is A or G
  MOD_RES (23), (24), (25), (26): Xaa is A or G or is absent
PTXXVPTRLEPISILYLXXXXXXXXXKFKYEDMVVESXGXR

SEQ ID NO: 34371 - protein, 40 aa, Artificial Sequence
  Non-cyclic GFR-binding peptide
  MOD_RES (4), (5), (37), (39): Xaa is C or S
PPTXXVPTRLSATSILYYDSANNVVLRKHRDMVVESXGXR

SEQ ID NO: 34372 - protein, 40 aa, Artificial Sequence
  Non-cyclic GFR-binding peptide
  MOD_RES (5), (6), (37), (39): Xaa is C or S
SASPXXVPQDLSPINILYFVGRTPKVYGKIPMVVKSXKXS

SEQ ID NO: 34373 - protein, 40 aa, Artificial Sequence
  Non-cyclic GFR-binding peptide
  MOD_RES (2), (3), (37), (39): Xaa is C or S
  MOD_RES (17), (18), (19), (20), (21): Xaa is A or G
  MOD_RES (22), (23), (24), (25): Xaa is A or G or is absent
PXXVPEKMSPISILYKXXXXXXXXXLKYHYNMTVESXAXR

SEQ ID NO: 34374 - protein, 34 aa, Artificial Sequence
  Non-cyclic GFR-binding peptide
  MOD_RES (34), (34): Xaa is C or S
  MOD_RES (14), (15), (16), (17), (18): Xaa is A or G
  MOD_RES (19), (20), (21), (22): Xaa is A or G or is absent
VPEKMSATSILYYXXXXXXXXXLRKHRNMTVESX

SEQ ID NO: 34375 - protein, 32 aa, Artificial Sequence
  Non-cyclic GFR-binding peptide
  MOD_RES (1), (1): Xaa is C or S
XVPEKMEPISILYLDENKNVVKFKYENMTVES

SEQ ID NO: 34376 - protein, 40 aa, Artificial Sequence
  Non-cyclic GFR-binding peptide
  MOD_RES (4), (5), (39): Xaa is C or S
  MOD_RES (19), (20), (21), (22), (23): Xaa is A or G
  MOD_RES (24), (25), (26), (27): Xaa is A or G or is absent
AGPXXTPTKMSPISMLYKXXXXXXXXXLKYHYGMVVDRXG

SEQ ID NO: 34377 - protein, 37 aa, Artificial Sequence
  Non-cyclic GFR-binding peptide
  MOD_RES (3), (4): Xaa is C or S
  MOD_RES (18), (19), (20), (21), (22): Xaa is A or G
  MOD_RES (23), (24), (25), (26): Xaa is A or G or is absent
EPXXVPEKMSPINILYFXXXXXXXXXYGKIPNMTVES

SEQ ID NO: 34378 - protein, 33 aa, Artificial Sequence
  Non-cyclic GFR-binding peptide
  MOD_RES (32), (32): Xaa is C or S
VPARLSATSILYYDAANNVVLRKHRDMVVEAXG

SEQ ID NO: 34379 - protein, 38 aa, Artificial Sequence
  Non-cyclic GFR-binding peptide
  MOD_RES (4), (5): Xaa is C or S
  MOD_RES (19), (20), (21), (22), (23): Xaa is A or G
  MOD_RES (24), (25), (26), (27): Xaa is A or G or is absent
PEPXXVPEKMSPINILYFXXXXXXXXXYGKIPNMTVES

SEQ ID NO: 34380 - protein, 37 aa, Artificial Sequence
  Non-cyclic GFR-binding peptide
  MOD_RES (2), (3), (35), (37): Xaa is C or S
PXXVPEKMSPISILYKDENKNVVLKYHYNMTVESXAX

SEQ ID NO: 34381 - protein, 33 aa, Artificial Sequence
  Non-cyclic GFR-binding peptide
  MOD_RES (1), (2), (33): Xaa is C or S
XXAPVKTSATSMLYYDNGRVLLLRKHRMIVEEX

SEQ ID NO: 34382 - protein, 36 aa, Artificial Sequence
  Non-cyclic GFR-binding peptide
  MOD_RES (1), (33), (35): Xaa is C or S
XVPEKMEPISILYLDENKNVVKFKYENMTVESXAXR

SEQ ID NO: 34383 - protein, 41 aa, Artificial Sequence
  Non-cyclic GFR-binding peptide
  MOD_RES (6), (7), (41): Xaa is C or S
  MOD_RES (21), (22), (23), (24), (25): Xaa is A or G
  MOD_RES (26), (27), (28), (29): Xaa is A or G or is absent
STPPTXXVPTRLSATSILYYXXXXXXXXXLRKHRDMVVESX

SEQ ID NO: 34384 - protein, 37 aa, Artificial Sequence
  Non-cyclic GFR-binding peptide
  MOD_RES (2), (3), (37): Xaa is C or S
  MOD_RES (17), (18), (19), (20), (21): Xaa is A or G
  MOD_RES (22), (23), (24), (25): Xaa is A or G or is absent
TXXVPTRLEPISILYLXXXXXXXXXKFKYEDMVVESX

SEQ ID NO: 34385 - protein, 36 aa, Artificial Sequence
  Non-cyclic GFR-binding peptide
  MOD_RES (1), (2), (33), (35): Xaa is C or S
XXAPVKTEPISMLYLDNGRVLLKFKYEMIVEEXGXL

SEQ ID NO: 34386 - protein, 35 aa, Artificial Sequence
  Non-cyclic GFR-binding peptide
  MOD_RES (1), (2), (34): Xaa is C or S
XXVPTRLSPISILYKDSANNVVLKYHYDMVVESXG

SEQ ID NO: 34387 - protein, 35 aa, Artificial Sequence
  Non-cyclic GFR-binding peptide
  MOD_RES (4), (5): Xaa is C or S
PSTXXAPVKTSPISMLYKDNGRVLLLKYHYMIVEE

SEQ ID NO: 34388 - protein, 37 aa, Artificial Sequence
  Non-cyclic GFR-binding peptide
  MOD_RES (1), (34), (36): Xaa is C or S
  MOD_RES (15), (16), (17), (18), (19): Xaa is A or G
  MOD_RES (20), (21), (22), (23): Xaa is A or G or is absent
XVPQALSPINILYFXXXXXXXXXYGKIPMIVRSXKXS

SEQ ID NO: 34389 - protein, 32 aa, Artificial Sequence
  Non-cyclic GFR-binding peptide
  MOD_RES (1), (2): Xaa is C or S
XXAPVKTSATSMLYYDNGRVLLLRKHRMIVEE

SEQ ID NO: 34390 - protein, 35 aa, Artificial Sequence
  Non-cyclic GFR-binding peptide
  MOD_RES (4), (5): Xaa is C or S
PEPXXVPEKMSPINILYFDENKNVVYGKIPNMTVE

SEQ ID NO: 34391 - protein, 36 aa, Artificial Sequence
  Non-cyclic GFR-binding peptide
  MOD_RES (1), (33), (35): Xaa is C or S
XTPTKMSATSMLYYNDKQQIILRKHRGMVVDRXGXS

SEQ ID NO: 34392 - protein, 39 aa, Artificial Sequence
  Non-cyclic GFR-binding peptide
  MOD_RES (5), (6), (39): Xaa is C or S
  MOD_RES (20), (21), (22), (23), (24): Xaa is A or G
  MOD_RES (25), (26), (27), (28): Xaa is A or G or is absent
SAAPXXVPQALSPINILYFXXXXXXXXXYGKIPMIVRSX

SEQ ID NO: 34393 - protein, 40 aa, Artificial Sequence
  Non-cyclic GFR-binding peptide
  MOD_RES (5), (6), (39): Xaa is C or S
  MOD_RES (20), (21), (22), (23), (24): Xaa is A or G
  MOD_RES (25), (26), (27), (28): Xaa is A or G or is absent
SASPXXVPQDLSPINILYFXXXXXXXXXYGKIPMVVKSXK

SEQ ID NO: 34394 - protein, 37 aa, Artificial Sequence
  Non-cyclic GFR-binding peptide
  MOD_RES (4), (5): Xaa is C or S
  MOD_RES (19), (20), (21), (22), (23): Xaa is A or G
  MOD_RES (24), (25), (26), (27): Xaa is A or G or is absent
AAPXXVPQALSPINILYFXXXXXXXXXYGKIPMIVRS

SEQ ID NO: 34395 - protein, 33 aa, Artificial Sequence
  Non-cyclic GFR-binding peptide
  MOD_RES (1), (1): Xaa is C or S
  MOD_RES (15), (16), (17), (18), (19): Xaa is A or G
  MOD_RES (20), (21), (22), (23): Xaa is A or G or is absent
XAPVKTSATSMLYYXXXXXXXXXLRKHRMIVEE

SEQ ID NO: 34396 - protein, 37 aa, Artificial Sequence
  Non-cyclic GFR-binding peptide
  MOD_RES (2), (3), (35), (37): Xaa is C or S
AXXVPTKLSATSILYYDKGVVTYLRKHRGMAVSEXGX

SEQ ID NO: 34397 - protein, 35 aa, Artificial Sequence
  Non-cyclic GFR-binding peptide
  MOD_RES (1), (2), (34): Xaa is C or S
XXVPEKMSATSILYYDENKNVVLRKHRNMTVESXA

SEQ ID NO: 34398 - protein, 42 aa, Artificial Sequence
  Non-cyclic GFR-binding peptide
  MOD_RES (6), (7), (40), (42): Xaa is C or S
  MOD_RES (21), (22), (23), (24), (25): Xaa is A or G
  MOD_RES (26), (27), (28), (29): Xaa is A or G or is absent
RVPSTXXAPVKTSPISMLYKXXXXXXXXXLKYHYMIVEEXGX

SEQ ID NO: 34399 - protein, 35 aa, Artificial Sequence
  Non-cyclic GFR-binding peptide
  MOD_RES (32), (34): Xaa is C or S
VPTRLSPISILYKDSANNVVLKYHYDMVVESXGXR

SEQ ID NO: 34400 - protein, 36 aa, Artificial Sequence
  Non-cyclic GFR-binding peptide
  MOD_RES (3), (4): Xaa is C or S
  MOD_RES (18), (19), (20), (21), (22): Xaa is A or G
  MOD_RES (23), (24), (25), (26): Xaa is A or G or is absent
EPXXVPEKMNAISILYFXXXXXXXXXLKKYRNMTVE

SEQ ID NO: 34401 - protein, 35 aa, Artificial Sequence
  Non-cyclic GFR-binding peptide
  MOD_RES (4), (5): Xaa is C or S
PPTXXVPTRLSPISILYKDSANNVVLKYHYDMVVE

SEQ ID NO: 34402 - protein, 36 aa, Artificial Sequence
  Non-cyclic GFR-binding peptide
  MOD_RES (4), (5): Xaa is C or S
SKAXXVPTKLSATSILYYDKGVVTYLRKHRGMAVSE

SEQ ID NO: 34403 - protein, 33 aa, Artificial Sequence
  Non-cyclic GFR-binding peptide
  MOD_RES (1), (2), (33): Xaa is C or S
XXAPVKTSPISMLYKDNGRVLLLKYHYMIVEEX

SEQ ID NO: 34404 - protein, 37 aa, Artificial Sequence
  Non-cyclic GFR-binding peptide
  MOD_RES (1), (2), (36): Xaa is C or S
  MOD_RES (16), (17), (18), (19), (20): Xaa is A or G
  MOD_RES (21), (22), (23), (24): Xaa is A or G or is absent
XXVPTRLSPISILYKXXXXXXXXXLKYHYDMVVESXG

SEQ ID NO: 34405 - protein, 32 aa, Artificial Sequence
  Non-cyclic GFR-binding peptide
  MOD_RES (1), (1): Xaa is C or S
XVPARLSATSILYYDAANNVVLRKHRDMVVEA

SEQ ID NO: 34406 - protein, 35 aa, Artificial Sequence
  Non-cyclic GFR-binding peptide
  MOD_RES (1), (35): Xaa is C or S
  MOD_RES (15), (16), (17), (18), (19): Xaa is A or G
  MOD_RES (20), (21), (22), (23): Xaa is A or G or is absent
XVPEKMSATSILYYXXXXXXXXXLRKHRNMTVESX

SEQ ID NO: 34407 - protein, 34 aa, Artificial Sequence
  Non-cyclic GFR-binding peptide
  MOD_RES (3), (4): Xaa is C or S
PTXXVPTRLSATSILYYDSANNVVLRKHRDMVVE

SEQ ID NO: 34408 - protein, 38 aa, Artificial Sequence
  Non-cyclic GFR-binding peptide
  MOD_RES (4), (5): Xaa is C or S
  MOD_RES (19), (20), (21), (22), (23): Xaa is A or G
  MOD_RES (24), (25), (26), (27): Xaa is A or G or is absent
PEPXXVPEKMSATSILYYXXXXXXXXXLRKHRNMTVES

SEQ ID NO: 34409 - protein, 36 aa, Artificial Sequence
  Non-cyclic GFR-binding peptide
  MOD_RES (1), (35): Xaa is C or S
  MOD_RES (15), (16), (17), (18), (19): Xaa is A or G
  MOD_RES (20), (21), (22), (23): Xaa is A or G or is absent
XVPTKLSATSILYYXXXXXXXXXLRKHRGMAVSEXG

SEQ ID NO: 34410 - protein, 38 aa, Artificial Sequence
  Non-cyclic GFR-binding peptide
  MOD_RES (2), (3), (37): Xaa is C or S
  MOD_RES (17), (18), (19), (20), (21): Xaa is A or G
  MOD_RES (22), (23), (24), (25): Xaa is A or G or is absent
TXXVPTRLSPISILYKXXXXXXXXXLKYHYDMVVESXG

SEQ ID NO: 34411 - protein, 38 aa, Artificial Sequence
  Non-cyclic GFR-binding peptide
  MOD_RES (3), (4), (38): Xaa is C or S
  MOD_RES (18), (19), (20), (21), (22): Xaa is A or G
  MOD_RES (23), (24), (25), (26): Xaa is A or G or is absent
GPXXTPTKMSPISMLYKXXXXXXXXXLKYHYGMVVDRX

SEQ ID NO: 34412 - protein, 37 aa, Artificial Sequence
  Non-cyclic GFR-binding peptide
  MOD_RES (5), (6): Xaa is C or S
ASKAXXVPTKLSATSILYYDKGVVTYLRKHRGMAVSE

SEQ ID NO: 34413 - protein, 31 aa, Artificial Sequence
  Non-cyclic GFR-binding peptide
VPEKMSPINILYFDENKNVVYGKIPNMTVES

SEQ ID NO: 34414 - protein, 37 aa, Artificial Sequence
  Non-cyclic GFR-binding peptide
  MOD_RES (4), (5): Xaa is C or S
  MOD_RES (19), (20), (21), (22), (23): Xaa is A or G
  MOD_RES (24), (25), (26), (27): Xaa is A or G or is absent
SKAXXVPTKLSATSILYYXXXXXXXXXLRKHRGMAVS

SEQ ID NO: 34415 - protein, 36 aa, Artificial Sequence
  Non-cyclic GFR-binding peptide
  MOD_RES (1), (2), (34), (36): Xaa is C or S
XXTPTKMEPISMLYLNDKQQIIKFKYEGMVVDRXGX

SEQ ID NO: 34416 - protein, 36 aa, Artificial Sequence
  Non-cyclic GFR-binding peptide
  MOD_RES (34), (36): Xaa is C or S
  MOD_RES (14), (15), (16), (17), (18): Xaa is A or G
  MOD_RES (19), (20), (21), (22): Xaa is A or G or is absent
VPTRLSATSILYYXXXXXXXXXLRKHRDMVVESXGX

SEQ ID NO: 34417 - protein, 33 aa, Artificial Sequence
  Non-cyclic GFR-binding peptide
  MOD_RES (1), (33): Xaa is C or S
XVPEKMNAISILYFDENKNVVLKKYRNMTVESX

SEQ ID NO: 34418 - protein, 34 aa, Artificial Sequence
  Non-cyclic GFR-binding peptide
  MOD_RES (1), (2), (34): Xaa is C or S
XXVPEKMNAISILYFDENKNVVLKKYRNMTVESX

SEQ ID NO: 34419 - protein, 36 aa, Artificial Sequence
  Non-cyclic GFR-binding peptide
  MOD_RES (3), (4): Xaa is C or S
  MOD_RES (18), (19), (20), (21), (22): Xaa is A or G
  MOD_RES (23), (24), (25), (26): Xaa is A or G or is absent
APXXVPQALSPINILYFXXXXXXXXXYGKIPMIVRS

SEQ ID NO: 34420 - protein, 36 aa, Artificial Sequence
  Non-cyclic GFR-binding peptide
  MOD_RES (1), (2), (34), (36): Xaa is C or S
XXVPTKLSATSILYYDKGVVTYLRKHRGMAVSEXGX

SEQ ID NO: 34421 - protein, 42 aa, Artificial Sequence
  Non-cyclic GFR-binding peptide
  MOD_RES (6), (7), (41): Xaa is C or S
  MOD_RES (21), (22), (23), (24), (25): Xaa is A or G
  MOD_RES (26), (27), (28), (29): Xaa is A or G or is absent
GSAGPXXTPTKMSPISMLYKXXXXXXXXXLKYHYGMVVDRXG

SEQ ID NO: 34422 - protein, 39 aa, Artificial Sequence
  Non-cyclic GFR-binding peptide
  MOD_RES (5), (6): Xaa is C or S
  MOD_RES (20), (21), (22), (23), (24): Xaa is A or G
  MOD_RES (25), (26), (27), (28): Xaa is A or G or is absent
SAGPXXTPTKMSATSMLYYXXXXXXXXXLRKHRGMVVDR

SEQ ID NO: 34423 - protein, 41 aa, Artificial Sequence
  Non-cyclic GFR-binding peptide
  MOD_RES (6), (7), (40): Xaa is C or S
  MOD_RES (21), (22), (23), (24), (25): Xaa is A or G
  MOD_RES (26), (27), (28), (29): Xaa is A or G or is absent
ASASPXXVPQDLSPINILYFXXXXXXXXXYGKIPMVVKSXK

SEQ ID NO: 34424 - protein, 33 aa, Artificial Sequence
  Non-cyclic GFR-binding peptide
  MOD_RES (1), (2): Xaa is C or S
XXVPTRLSATSILYYDSANNVVLRKHRDMVVES

SEQ ID NO: 34425 - protein, 41 aa, Artificial Sequence
  Non-cyclic GFR-binding peptide
  MOD_RES (4), (5), (39), (41): Xaa is C or S
  MOD_RES (19), (20), (21), (22), (23): Xaa is A or G
  MOD_RES (24), (25), (26), (27): Xaa is A or G or is absent
PEPXXVPEKMSATSILYYXXXXXXXXXLRKHRNMTVESXAX

SEQ ID NO: 34426 - protein, 40 aa, Artificial Sequence
  Non-cyclic GFR-binding peptide
  MOD_RES (3), (4), (38), (40): Xaa is C or S
  MOD_RES (18), (19), (20), (21), (22): Xaa is A or G
  MOD_RES (23), (24), (25), (26): Xaa is A or G or is absent
PTXXVPTRLEPISILYLXXXXXXXXXKFKYEDMVVESXGX

SEQ ID NO: 34427 - protein, 38 aa, Artificial Sequence
  Non-cyclic GFR-binding peptide
  MOD_RES (3), (4), (38): Xaa is C or S
  MOD_RES (18), (19), (20), (21), (22): Xaa is A or G
  MOD_RES (23), (24), (25), (26): Xaa is A or G or is absent
EPXXVPEKMSATSILYYXXXXXXXXXLRKHRNMTVESX

SEQ ID NO: 34428 - protein, 37 aa, Artificial Sequence
  Non-cyclic GFR-binding peptide
  MOD_RES (4), (5): Xaa is C or S
  MOD_RES (19), (20), (21), (22), (23): Xaa is A or G
  MOD_RES (24), (25), (26), (27): Xaa is A or G or is absent
PPTXXVPTRLEPISILYLXXXXXXXXXKFKYEDMVVE

SEQ ID NO: 34429 - protein, 41 aa, Artificial Sequence
  Non-cyclic GFR-binding peptide
  MOD_RES (4), (5), (39), (41): Xaa is C or S
  MOD_RES (19), (20), (21), (22), (23): Xaa is A or G
  MOD_RES (24), (25), (26), (27): Xaa is A or G or is absent
PPTXXVPTRLEPISILYLXXXXXXXXXKFKYEDMVVESXGX

SEQ ID NO: 34430 - protein, 41 aa, Artificial Sequence
  Non-cyclic GFR-binding peptide
  MOD_RES (6), (7), (39), (41): Xaa is C or S
HVPKPXXAPTKLSPISVLYKDDSSNVILKYHYNMVVRSXGX

SEQ ID NO: 34431 - protein, 44 aa, Artificial Sequence
  Non-cyclic GFR-binding peptide
  MOD_RES (6), (7), (41), (43): Xaa is C or S
  MOD_RES (21), (22), (23), (24), (25): Xaa is A or G
  MOD_RES (26), (27), (28), (29): Xaa is A or G or is absent
STPPTXXVPTRLEPISILYLXXXXXXXXXKFKYEDMVVESXGXR

SEQ ID NO: 34432 - protein, 39 aa, Artificial Sequence
  Non-cyclic GFR-binding peptide
  MOD_RES (6), (7): Xaa is C or S
  MOD_RES (21), (22), (23), (24), (25): Xaa is A or G
  MOD_RES (26), (27), (28), (29): Xaa is A or G or is absent
KASKAXXVPTKLSATSILYYXXXXXXXXXLRKHRGMAVS

SEQ ID NO: 34433 - protein, 36 aa, Artificial Sequence
  Non-cyclic GFR-binding peptide
  MOD_RES (34), (36): Xaa is C or S
  MOD_RES (14), (15), (16), (17), (18): Xaa is A or G
  MOD_RES (19), (20), (21), (22): Xaa is A or G or is absent
TPTKMSPISMLYKXXXXXXXXXLKYHYGMVVDRXGX

SEQ ID NO: 34434 - protein, 36 aa, Artificial Sequence
  Non-cyclic GFR-binding peptide
  MOD_RES (5), (6): Xaa is C or S
APASXXVPARLSATSILYYDAANNVVLRKHRDMVVE

SEQ ID NO: 34435 - protein, 37 aa, Artificial Sequence
  Non-cyclic GFR-binding peptide
  MOD_RES (3), (4), (36): Xaa is C or S
PTXXVPTRLSPISILYKDSANNVVLKYHYDMVVESXG

SEQ ID NO: 34436 - protein, 36 aa, Artificial Sequence
  Non-cyclic GFR-binding peptide
  MOD_RES (3), (4): Xaa is C or S
  MOD_RES (18), (19), (20), (21), (22): Xaa is A or G
  MOD_RES (23), (24), (25), (26): Xaa is A or G or is absent
SPXXVPQDLSPINILYFXXXXXXXXXYGKIPMVVKS

SEQ ID NO: 34437 - protein, 37 aa, Artificial Sequence
  Non-cyclic GFR-binding peptide
  MOD_RES (6), (7): Xaa is C or S
GIPEPXXVPEKMSPISILYKDENKNVVLKYHYNMTVE

SEQ ID NO: 34438 - protein, 36 aa, Artificial Sequence
  Non-cyclic GFR-binding peptide
  MOD_RES (1), (33), (35): Xaa is C or S
XTPTKMEPISMLYLNDKQQIIKFKYEGMVVDRXGXS

SEQ ID NO: 34439 - protein, 41 aa, Artificial Sequence
  Non-cyclic GFR-binding peptide
  MOD_RES (5), (6), (39), (41): Xaa is C or S
  MOD_RES (20), (21), (22), (23), (24): Xaa is A or G
  MOD_RES (25), (26), (27), (28): Xaa is A or G or is absent
SASPXXVSQDLSPINILYFXXXXXXXXXYGKIPMIVKSXKX

SEQ ID NO: 34440 - protein, 37 aa, Artificial Sequence
  Non-cyclic GFR-binding peptide
  MOD_RES (34), (36): Xaa is C or S
  MOD_RES (14), (15), (16), (17), (18): Xaa is A or G
  MOD_RES (19), (20), (21), (22): Xaa is A or G or is absent
VPEKMNAISILYFXXXXXXXXXLKKYRNMTVESXAXR

SEQ ID NO: 34441 - protein, 40 aa, Artificial Sequence
  Non-cyclic GFR-binding peptide
  MOD_RES (5), (6), (38), (40): Xaa is C or S
SAGPXXTPTKMEPISMLYLNDKQQIIKFKYEGMVVDRXGX

SEQ ID NO: 34442 - protein, 42 aa, Artificial Sequence
  Non-cyclic GFR-binding peptide
  MOD_RES (5), (6), (40), (42): Xaa is C or S
  MOD_RES (20), (21), (22), (23), (24): Xaa is A or G
  MOD_RES (25), (26), (27), (28): Xaa is A or G or is absent
IPEPXXVPEKMNAISILYFXXXXXXXXXLKKYRNMTVESXAX

SEQ ID NO: 34443 - protein, 40 aa, Artificial Sequence
  Non-cyclic GFR-binding peptide
  MOD_RES (6), (7), (39): Xaa is C or S
GSAGPXXTPTKMSATSMLYYNDKQQIILRKHRGMVVDRXG

SEQ ID NO: 34444 - protein, 40 aa, Artificial Sequence
  Non-cyclic GFR-binding peptide
  MOD_RES (3), (4), (38), (40): Xaa is C or S
  MOD_RES (18), (19), (20), (21), (22): Xaa is A or G
  MOD_RES (23), (24), (25), (26): Xaa is A or G or is absent
EPXXVPEKMSPISILYKXXXXXXXXXLKYHYNMTVESXAX

SEQ ID NO: 34445 - protein, 37 aa, Artificial Sequence
  Non-cyclic GFR-binding peptide
  MOD_RES (4), (5), (37): Xaa is C or S
PEPXXVPEKMNAISILYFDENKNVVLKKYRNMTVESX

SEQ ID NO: 34446 - protein, 35 aa, Artificial Sequence
  Non-cyclic GFR-binding peptide
  MOD_RES (1), (32), (34): Xaa is C or S
XAPVKTSATSMLYYDNGRVLLLRKHRMIVEEXGXL

SEQ ID NO: 34447 - protein, 36 aa, Artificial Sequence
  Non-cyclic GFR-binding peptide
  MOD_RES (33), (35): Xaa is C or S
  MOD_RES (14), (15), (16), (17), (18): Xaa is A or G
  MOD_RES (19), (20), (21), (22): Xaa is A or G or is absent
APVKTSATSMLYYXXXXXXXXXLRKHRMIVEEXGXL

SEQ ID NO: 34448 - protein, 34 aa, Artificial Sequence
  Non-cyclic GFR-binding peptide
  MOD_RES (1), (1): Xaa is C or S
  MOD_RES (15), (16), (17), (18), (19): Xaa is A or G
  MOD_RES (20), (21), (22), (23): Xaa is A or G or is absent
XVPTRLSPISILYKXXXXXXXXXLKYHYDMVVES

SEQ ID NO: 34449 - protein, 41 aa, Artificial Sequence
  Non-cyclic GFR-binding peptide
  MOD_RES (6), (7), (39), (41): Xaa is C or S
GSAGPXXTPTKMSPISMLYKNDKQQIILKYHYGMVVDRXGX

SEQ ID NO: 34450 - protein, 34 aa, Artificial Sequence
  Non-cyclic GFR-binding peptide
  MOD_RES (3), (4): Xaa is C or S
KAXXVPTKLSATSILYYDKGVVTYLRKHRGMAVS

SEQ ID NO: 34451 - protein, 35 aa, Artificial Sequence
  Non-cyclic GFR-binding peptide
  MOD_RES (2), (3), (35): Xaa is C or S
PXXTPTKMSATSMLYYNDKQQIILRKHRGMVVDRX

SEQ ID NO: 34452 - protein, 40 aa, Artificial Sequence
  Non-cyclic GFR-binding peptide
  MOD_RES (5), (6), (38), (40): Xaa is C or S
SAGPXXTPTKMSPISMLYKNDKQQIILKYHYGMVVDRXGX

SEQ ID NO: 34453 - protein, 36 aa, Artificial Sequence
  Non-cyclic GFR-binding peptide
  MOD_RES (2), (3), (35): Xaa is C or S
PXXTPTKMSATSMLYYNDKQQIILRKHRGMVVDRXG

SEQ ID NO: 34454 - protein, 40 aa, Artificial Sequence
  Non-cyclic GFR-binding peptide
  MOD_RES (5), (6), (38), (40): Xaa is C or S
IPEPXXVPEKMNAISILYFDENKNVVLKKYRNMTVESXAX

SEQ ID NO: 34455 - protein, 33 aa, Artificial Sequence
  Non-cyclic GFR-binding peptide
  MOD_RES (32), (32): Xaa is C or S
VPEKMSATSILYYDENKNVVLRKHRNMTVESXA

SEQ ID NO: 34456 - protein, 39 aa, Artificial Sequence
  Non-cyclic GFR-binding peptide
  MOD_RES (6), (7): Xaa is C or S
  MOD_RES (21), (22), (23), (24), (25): Xaa is A or G
  MOD_RES (26), (27), (28), (29): Xaa is A or G or is absent
ASASPXXVSQDLSPINILYFXXXXXXXXXYGKIPMIVKS

SEQ ID NO: 34457 - protein, 37 aa, Artificial Sequence
  Non-cyclic GFR-binding peptide
  MOD_RES (4), (5), (37): Xaa is C or S
PEPXXVPEKMSPISILYKDENKNVVLKYHYNMTVESX

SEQ ID NO: 34458 - protein, 39 aa, Artificial Sequence
  Non-cyclic GFR-binding peptide
  MOD_RES (5), (6), (38): Xaa is C or S
TPPTXXVPTRLSPISILYKDSANNVVLKYHYDMVVESXG

SEQ ID NO: 34459 - protein, 36 aa, Artificial Sequence
  Non-cyclic GFR-binding peptide
  MOD_RES (1), (2), (33), (35): Xaa is C or S
XXVPQALSPINILYFVGRKPKVYGKIPMIVRSXKXS

SEQ ID NO: 34460 - protein, 36 aa, Artificial Sequence
  Non-cyclic GFR-binding peptide
  MOD_RES (2), (3), (35): Xaa is C or S
PXXVPEKMSATSILYYDENKNVVLRKHRNMTVESXA

SEQ ID NO: 34461 - protein, 40 aa, Artificial Sequence
  Non-cyclic GFR-binding peptide
  MOD_RES (4), (5), (37), (39): Xaa is C or S
AGPXXTPTKMEPISMLYLNDKQQIIKFKYEGMVVDRXGXS

SEQ ID NO: 34462 - protein, 35 aa, Artificial Sequence
  Non-cyclic GFR-binding peptide
  MOD_RES (4), (5): Xaa is C or S
PEPXXVPEKMSATSILYYDENKNVVLRKHRNMTVE

SEQ ID NO: 34463 - protein, 39 aa, Artificial Sequence
  Non-cyclic GFR-binding peptide
  MOD_RES (3), (4), (38): Xaa is C or S
  MOD_RES (18), (19), (20), (21), (22): Xaa is A or G
  MOD_RES (23), (24), (25), (26): Xaa is A or G or is absent
PTXXVPTRLSPISILYKXXXXXXXXXLKYHYDMVVESXG

SEQ ID NO: 34464 - protein, 41 aa, Artificial Sequence
  Non-cyclic GFR-binding peptide
  MOD_RES (4), (5), (38), (40): Xaa is C or S
  MOD_RES (19), (20), (21), (22), (23): Xaa is A or G
  MOD_RES (24), (25), (26), (27): Xaa is A or G or is absent
ASPXXVSQDLSPINILYFXXXXXXXXXYGKIPMIVKSXKXS

SEQ ID NO: 34465 - protein, 31 aa, Artificial Sequence
  Non-cyclic GFR-binding peptide
  MOD_RES (31), (31): Xaa is C or S
APVKTSATSMLYYDNGRVLLLRKHRMIVEEX

SEQ ID NO: 34466 - protein, 41 aa, Artificial Sequence
  Non-cyclic GFR-binding peptide
  MOD_RES (5), (6), (38), (40): Xaa is C or S
ASKAXXVPTKLSATSILYYDKGVVTYLRKHRGMAVSEXGXR

SEQ ID NO: 34467 - protein, 39 aa, Artificial Sequence
  Non-cyclic GFR-binding peptide
  MOD_RES (3), (4), (38): Xaa is C or S
  MOD_RES (18), (19), (20), (21), (22): Xaa is A or G
  MOD_RES (23), (24), (25), (26): Xaa is A or G or is absent
PTXXVPTRLEPISILYLXXXXXXXXXKFKYEDMVVESXG

SEQ ID NO: 34468 - protein, 40 aa, Artificial Sequence
  Non-cyclic GFR-binding peptide
  MOD_RES (5), (6), (40): Xaa is C or S
  MOD_RES (20), (21), (22), (23), (24): Xaa is A or G
  MOD_RES (25), (26), (27), (28): Xaa is A or G or is absent
IPEPXXVPEKMSPISILYKXXXXXXXXXLKYHYNMTVESX

SEQ ID NO: 34469 - protein, 35 aa, Artificial Sequence
  Non-cyclic GFR-binding peptide
  MOD_RES (1), (2): Xaa is C or S
  MOD_RES (16), (17), (18), (19), (20): Xaa is A or G
  MOD_RES (21), (22), (23), (24): Xaa is A or G or is absent
XXTPTKMSATSMLYYXXXXXXXXXLRKHRGMVVDR

SEQ ID NO: 34470 - protein, 39 aa, Artificial Sequence
  Non-cyclic GFR-binding peptide
  MOD_RES (4), (5), (37), (39): Xaa is C or S
AGPXXTPTKMSATSMLYYNDKQQIILRKHRGMVVDRXGX

SEQ ID NO: 34471 - protein, 39 aa, Artificial Sequence
  Non-cyclic GFR-binding peptide
  MOD_RES (5), (6), (38): Xaa is C or S
IPEPXXVPEKMSPISILYKDENKNVVLKYHYNMTVESXA

SEQ ID NO: 34472 - protein, 43 aa, Artificial Sequence
  Non-cyclic GFR-binding peptide
  MOD_RES (5), (6), (40), (42): Xaa is C or S
  MOD_RES (20), (21), (22), (23), (24): Xaa is A or G
  MOD_RES (25), (26), (27), (28): Xaa is A or G or is absent
TPPTXXVPTRLEPISILYLXXXXXXXXXKFKYEDMVVESXGXR

SEQ ID NO: 34473 - protein, 33 aa, Artificial Sequence
  Non-cyclic GFR-binding peptide
  MOD_RES (2), (3): Xaa is C or S
PXXTPTKMSPISMLYKNDKQQIILKYHYGMVVD

SEQ ID NO: 34474 - protein, 37 aa, Artificial Sequence
  Non-cyclic GFR-binding peptide
  MOD_RES (1), (34), (36): Xaa is C or S
  MOD_RES (15), (16), (17), (18), (19): Xaa is A or G
  MOD_RES (20), (21), (22), (23): Xaa is A or G or is absent
XVPQDLSPINILYFXXXXXXXXXYGKIPMVVKSXKXS

SEQ ID NO: 34475 - protein, 40 aa, Artificial Sequence
  Non-cyclic GFR-binding peptide
  MOD_RES (5), (6), (40): Xaa is C or S
  MOD_RES (20), (21), (22), (23), (24): Xaa is A or G
  MOD_RES (25), (26), (27), (28): Xaa is A or G or is absent
TPPTXXVPTRLSPISILYKXXXXXXXXXLKYHYDMVVESX

SEQ ID NO: 34476 - protein, 36 aa, Artificial Sequence
  Non-cyclic GFR-binding peptide
  MOD_RES (2), (3): Xaa is C or S
  MOD_RES (17), (18), (19), (20), (21): Xaa is A or G
  MOD_RES (22), (23), (24), (25): Xaa is A or G or is absent
TXXVPTRLSPISILYKXXXXXXXXXLKYHYDMVVES

SEQ ID NO: 34477 - protein, 38 aa, Artificial Sequence
  Non-cyclic GFR-binding peptide
  MOD_RES (4), (5), (36), (38): Xaa is C or S
PSTXXAPVKTSPISMLYKDNGRVLLLKYHYMIVEEXGX

SEQ ID NO: 34478 - protein, 33 aa, Artificial Sequence
  Non-cyclic GFR-binding peptide
  MOD_RES (33), (33): Xaa is C or S
  MOD_RES (14), (15), (16), (17), (18): Xaa is A or G
  MOD_RES (19), (20), (21), (22): Xaa is A or G or is absent
VPQDLSPINILYFXXXXXXXXXYGKIPMVVKSX

SEQ ID NO: 34479 - protein, 36 aa, Artificial Sequence
  Non-cyclic GFR-binding peptide
  MOD_RES (3), (4), (35): Xaa is C or S
SPXXVSQDLSPINILYFIGKTPKIYGKIPMIVKSXK

SEQ ID NO: 34480 - protein, 37 aa, Artificial Sequence
  Non-cyclic GFR-binding peptide
  MOD_RES (4), (5), (37): Xaa is C or S
AGPXXTPTKMSPISMLYKNDKQQIILKYHYGMVVDRX

SEQ ID NO: 34481 - protein, 32 aa, Artificial Sequence
  Non-cyclic GFR-binding peptide
  MOD_RES (32), (32): Xaa is C or S
VPTRLSPISILYKDSANNVVLKYHYDMVVESX

SEQ ID NO: 34482 - protein, 42 aa, Artificial Sequence
  Non-cyclic GFR-binding peptide
  MOD_RES (6), (7), (39), (41): Xaa is C or S
HVPKPXXAPTKLSPISVLYKDDSSNVILKYHYNMVVRSXGXH

SEQ ID NO: 34483 - protein, 35 aa, Artificial Sequence
  Non-cyclic GFR-binding peptide
  MOD_RES (3), (4): Xaa is C or S
ASXXVPARLSATSILYYDAANNVVLRKHRDMVVEA

SEQ ID NO: 34484 - protein, 36 aa, Artificial Sequence
  Non-cyclic GFR-binding peptide
  MOD_RES (5), (6): Xaa is C or S
SAGPXXTPTKMEPISMLYLNDKQQIIKFKYEGMVVD

SEQ ID NO: 34485 - protein, 35 aa, Artificial Sequence
  Non-cyclic GFR-binding peptide
  MOD_RES (4), (5): Xaa is C or S
PSTXXAPVKTSATSMLYYDNGRVLLLRKHRMIVEE

SEQ ID NO: 34486 - protein, 39 aa, Artificial Sequence
  Non-cyclic GFR-binding peptide
  MOD_RES (2), (3), (37), (39): Xaa is C or S
  MOD_RES (17), (18), (19), (20), (21): Xaa is A or G
  MOD_RES (22), (23), (24), (25): Xaa is A or G or is absent
TXXVPTRLSPISILYKXXXXXXXXXLKYHYDMVVESXGX

SEQ ID NO: 34487 - protein, 33 aa, Artificial Sequence
  Non-cyclic GFR-binding peptide
  MOD_RES (1), (1): Xaa is C or S
  MOD_RES (15), (16), (17), (18), (19): Xaa is A or G
  MOD_RES (20), (21), (22), (23): Xaa is A or G or is absent
XTPTKMSATSMLYYXXXXXXXXXLRKHRGMVVD

SEQ ID NO: 34488 - protein, 34 aa, Artificial Sequence
  Non-cyclic GFR-binding peptide
  MOD_RES (34), (34): Xaa is C or S
  MOD_RES (14), (15), (16), (17), (18): Xaa is A or G
  MOD_RES (19), (20), (21), (22): Xaa is A or G or is absent
VPTKLSATSILYYXXXXXXXXXLRKHRGMAVSEX

SEQ ID NO: 34489 - protein, 37 aa, Artificial Sequence
  Non-cyclic GFR-binding peptide
  MOD_RES (5), (6): Xaa is C or S
TPPTXXVPTRLEPISILYLDSANNVVKFKYEDMVVES

SEQ ID NO: 34490 - protein, 34 aa, Artificial Sequence
  Non-cyclic GFR-binding peptide
  MOD_RES (1), (1): Xaa is C or S
  MOD_RES (15), (16), (17), (18), (19): Xaa is A or G
  MOD_RES (20), (21), (22), (23): Xaa is A or G or is absent
XVPTRLEPISILYLXXXXXXXXXKFKYEDMVVES

SEQ ID NO: 34491 - protein, 35 aa, Artificial Sequence
  Non-cyclic GFR-binding peptide
  MOD_RES (1), (33), (35): Xaa is C or S
XTPTKMEPISMLYLNDKQQIIKFKYEGMVVDRXGX

SEQ ID NO: 34492 - protein, 34 aa, Artificial Sequence
  Non-cyclic GFR-binding peptide
  MOD_RES (3), (4): Xaa is C or S
ASXXVPARLSATSILYYDAANNVVLRKHRDMVVE

SEQ ID NO: 34493 - protein, 42 aa, Artificial Sequence
  Non-cyclic GFR-binding peptide
  MOD_RES (6), (7), (41): Xaa is C or S
  MOD_RES (21), (22), (23), (24), (25): Xaa is A or G
  MOD_RES (26), (27), (28), (29): Xaa is A or G or is absent
STPPTXXVPTRLEPISILYLXXXXXXXXXKFKYEDMVVESXG

SEQ ID NO: 34494 - protein, 41 aa, Artificial Sequence
  Non-cyclic GFR-binding peptide
  MOD_RES (3), (4), (38), (40): Xaa is C or S
  MOD_RES (18), (19), (20), (21), (22): Xaa is A or G
  MOD_RES (23), (24), (25), (26): Xaa is A or G or is absent
EPXXVPEKMSPINILYFXXXXXXXXXYGKIPNMTVESXAXR

SEQ ID NO: 34495 - protein, 37 aa, Artificial Sequence
  Non-cyclic GFR-binding peptide
  MOD_RES (4), (5): Xaa is C or S
  MOD_RES (19), (20), (21), (22), (23): Xaa is A or G
  MOD_RES (24), (25), (26), (27): Xaa is A or G or is absent
AGPXXTPTKMSATSMLYYXXXXXXXXXLRKHRGMVVD

SEQ ID NO: 34496 - protein, 33 aa, Artificial Sequence
  Non-cyclic GFR-binding peptide
  MOD_RES (2), (3): Xaa is C or S
PXXVPQDLSPINILYFVGRTPKVYGKIPMVVKS

SEQ ID NO: 34497 - protein, 40 aa, Artificial Sequence
  Non-cyclic GFR-binding peptide
  MOD_RES (2), (3), (37), (39): Xaa is C or S
  MOD_RES (17), (18), (19), (20), (21): Xaa is A or G
  MOD_RES (22), (23), (24), (25): Xaa is A or G or is absent
TXXVPTRLEPISILYLXXXXXXXXXKFKYEDMVVESXGXR

SEQ ID NO: 34498 - protein, 35 aa, Artificial Sequence
  Non-cyclic GFR-binding peptide
  MOD_RES (1), (35): Xaa is C or S
  MOD_RES (15), (16), (17), (18), (19): Xaa is A or G
  MOD_RES (20), (21), (22), (23): Xaa is A or G or is absent
XVPTKLSATSILYYXXXXXXXXXLRKHRGMAVSEX

SEQ ID NO: 34499 - protein, 37 aa, Artificial Sequence
  Non-cyclic GFR-binding peptide
  MOD_RES (5), (6), (37): Xaa is C or S
SAAPXXVPQALSPINILYFVGRKPKVYGKIPMIVRSX

SEQ ID NO: 34500 - protein, 36 aa, Artificial Sequence
  Non-cyclic GFR-binding peptide
  MOD_RES (3), (4): Xaa is C or S
  MOD_RES (18), (19), (20), (21), (22): Xaa is A or G
  MOD_RES (23), (24), (25), (26): Xaa is A or G or is absent
GPXXTPTKMEPISMLYLXXXXXXXXXKFKYEGMVVD

SEQ ID NO: 34501 - protein, 39 aa, Artificial Sequence
  Non-cyclic GFR-binding peptide
  MOD_RES (5), (6), (38): Xaa is C or S
ASKAXXVPTKLSATSILYYDKGVVTYLRKHRGMAVSEXG

SEQ ID NO: 34502 - protein, 38 aa, Artificial Sequence
  Non-cyclic GFR-binding peptide
  MOD_RES (4), (5), (37): Xaa is C or S
PPTXXVPTRLSPISILYKDSANNVVLKYHYDMVVESXG

SEQ ID NO: 34503 - protein, 34 aa, Artificial Sequence
  Non-cyclic GFR-binding peptide
  MOD_RES (1), (2), (33): Xaa is C or S
XXAPVKTSATSMLYYDNGRVLLLRKHRMIVEEXG

SEQ ID NO: 34504 - protein, 36 aa, Artificial Sequence
  Non-cyclic GFR-binding peptide
  MOD_RES (1), (2), (34), (36): Xaa is C or S
XXVPEKMSATSILYYDENKNVVLRKHRNMTVESXAX

SEQ ID NO: 34505 - protein, 35 aa, Artificial Sequence
  Non-cyclic GFR-binding peptide
  MOD_RES (4), (5): Xaa is C or S
PPTXXVPTRLSATSILYYDSANNVVLRKHRDMVVE

SEQ ID NO: 34506 - protein, 35 aa, Artificial Sequence
  Non-cyclic GFR-binding peptide
  MOD_RES (1), (35): Xaa is C or S
  MOD_RES (15), (16), (17), (18), (19): Xaa is A or G
  MOD_RES (20), (21), (22), (23): Xaa is A or G or is absent
XVPTRLSATSILYYXXXXXXXXXLRKHRDMVVESX

SEQ ID NO: 34507 - protein, 42 aa, Artificial Sequence
  Non-cyclic GFR-binding peptide
  MOD_RES (6), (7), (41): Xaa is C or S
  MOD_RES (21), (22), (23), (24), (25): Xaa is A or G
  MOD_RES (26), (27), (28), (29): Xaa is A or G or is absent
STPPTXXVPTRLSPISILYKXXXXXXXXXLKYHYDMVVESXG

SEQ ID NO: 34508 - protein, 37 aa, Artificial Sequence
  Non-cyclic GFR-binding peptide
  MOD_RES (1), (2), (35), (37): Xaa is C or S
  MOD_RES (16), (17), (18), (19), (20): Xaa is A or G
  MOD_RES (21), (22), (23), (24): Xaa is A or G or is absent
XXAPVKTEPISMLYLXXXXXXXXXKFKYEMIVEEXGX

SEQ ID NO: 34509 - protein, 33 aa, Artificial Sequence
  Non-cyclic GFR-binding peptide
  MOD_RES (1), (32): Xaa is C or S
XAPVKTSATSMLYYDNGRVLLLRKHRMIVEEXG

SEQ ID NO: 34510 - protein, 37 aa, Artificial Sequence
  Non-cyclic GFR-binding peptide
  MOD_RES (4), (5), (36): Xaa is C or S
PSTXXAPVKTSATSMLYYDNGRVLLLRKHRMIVEEXG

SEQ ID NO: 34511 - protein, 35 aa, Artificial Sequence
  Non-cyclic GFR-binding peptide
  MOD_RES (2), (3), (35): Xaa is C or S
PXXVPEKMEPISILYLDENKNVVKFKYENMTVESX

SEQ ID NO: 34512 - protein, 39 aa, Artificial Sequence
  Non-cyclic GFR-binding peptide
  MOD_RES (4), (5), (39): Xaa is C or S
  MOD_RES (19), (20), (21), (22), (23): Xaa is A or G
  MOD_RES (24), (25), (26), (27): Xaa is A or G or is absent
PPTXXVPTRLEPISILYLXXXXXXXXXKFKYEDMVVESX

SEQ ID NO: 34513 - protein, 40 aa, Artificial Sequence
  Non-cyclic GFR-binding peptide
  MOD_RES (3), (4), (37), (39): Xaa is C or S
  MOD_RES (18), (19), (20), (21), (22): Xaa is A or G
  MOD_RES (23), (24), (25), (26): Xaa is A or G or is absent
STXXAPVKTEPISMLYLXXXXXXXXXKFKYEMIVEEXGXL

SEQ ID NO: 34514 - protein, 37 aa, Artificial Sequence
  Non-cyclic GFR-binding peptide
  MOD_RES (2), (3), (37): Xaa is C or S
  MOD_RES (17), (18), (19), (20), (21): Xaa is A or G
  MOD_RES (22), (23), (24), (25): Xaa is A or G or is absent
PXXVPEKMSPISILYKXXXXXXXXXLKYHYNMTVESX

SEQ ID NO: 34515 - protein, 37 aa, Artificial Sequence
  Non-cyclic GFR-binding peptide
  MOD_RES (5), (6), (37): Xaa is C or S
SASPXXVSQDLSPINILYFIGKTPKIYGKIPMIVKSX

SEQ ID NO: 34516 - protein, 33 aa, Artificial Sequence
  Non-cyclic GFR-binding peptide
  MOD_RES (2), (3): Xaa is C or S
TXXVPTRLEPISILYLDSANNVVKFKYEDMVVE

SEQ ID NO: 34517 - protein, 40 aa, Artificial Sequence
  Non-cyclic GFR-binding peptide
  MOD_RES (6), (7), (38), (40): Xaa is C or S
RVPSTXXAPVKTSPISMLYKDNGRVLLLKYHYMIVEEXGX

SEQ ID NO: 34518 - protein, 38 aa, Artificial Sequence
  Non-cyclic GFR-binding peptide
  MOD_RES (1), (2), (36), (38): Xaa is C or S
  MOD_RES (16), (17), (18), (19), (20): Xaa is A or G
  MOD_RES (21), (22), (23), (24): Xaa is A or G or is absent
XXTPTKMSPISMLYKXXXXXXXXXLKYHYGMVVDRXGX

SEQ ID NO: 34519 - protein, 33 aa, Artificial Sequence
  Non-cyclic GFR-binding peptide
  MOD_RES (1), (1): Xaa is C or S
  MOD_RES (15), (16), (17), (18), (19): Xaa is A or G
  MOD_RES (20), (21), (22), (23): Xaa is A or G or is absent
XTPTKMSPISMLYKXXXXXXXXXLKYHYGMVVD

SEQ ID NO: 34520 - protein, 37 aa, Artificial Sequence
  Non-cyclic GFR-binding peptide
  MOD_RES (4), (5): Xaa is C or S
  MOD_RES (19), (20), (21), (22), (23): Xaa is A or G
  MOD_RES (24), (25), (26), (27): Xaa is A or G or is absent
PEPXXVPEKMNAISILYFXXXXXXXXXLKKYRNMTVE

SEQ ID NO: 34521 - protein, 38 aa, Artificial Sequence
  Non-cyclic GFR-binding peptide
  MOD_RES (3), (4), (38): Xaa is C or S
  MOD_RES (18), (19), (20), (21), (22): Xaa is A or G
  MOD_RES (23), (24), (25), (26): Xaa is A or G or is absent
EPXXVPEKMSPISILYKXXXXXXXXXLKYHYNMTVESX

SEQ ID NO: 34522 - protein, 36 aa, Artificial Sequence
  Non-cyclic GFR-binding peptide
  MOD_RES (1), (2), (36): Xaa is C or S
  MOD_RES (16), (17), (18), (19), (20): Xaa is A or G
  MOD_RES (21), (22), (23), (24): Xaa is A or G or is absent
XXTPTKMSPISMLYKXXXXXXXXXLKYHYGMVVDRX

SEQ ID NO: 34523 - protein, 34 aa, Artificial Sequence
  Non-cyclic GFR-binding peptide
  MOD_RES (34), (34): Xaa is C or S
  MOD_RES (14), (15), (16), (17), (18): Xaa is A or G
  MOD_RES (19), (20), (21), (22): Xaa is A or G or is absent
VPTRLSATSILYYXXXXXXXXXLRKHRDMVVESX

SEQ ID NO: 34524 - protein, 34 aa, Artificial Sequence
  Non-cyclic GFR-binding peptide
  MOD_RES (2), (3), (34): Xaa is C or S
TXXAPVKTEPISMLYLDNGRVLLKFKYEMIVEEX

SEQ ID NO: 34525 - protein, 38 aa, Artificial Sequence
  Non-cyclic GFR-binding peptide
  MOD_RES (6), (7), (38): Xaa is C or S
RVPSTXXAPVKTSATSMLYYDNGRVLLLRKHRMIVEEX

SEQ ID NO: 34526 - protein, 40 aa, Artificial Sequence
  Non-cyclic GFR-binding peptide
  MOD_RES (4), (5), (37), (39): Xaa is C or S
PEPXXVPEKMSATSILYYDENKNVVLRKHRNMTVESXAXR

SEQ ID NO: 34527 - protein, 40 aa, Artificial Sequence
  Non-cyclic GFR-binding peptide
  MOD_RES (2), (3), (37), (39): Xaa is C or S
  MOD_RES (17), (18), (19), (20), (21): Xaa is A or G
  MOD_RES (22), (23), (24), (25): Xaa is A or G or is absent
SXXVPARLSATSILYYXXXXXXXXXLRKHRDMVVEAXGXR

SEQ ID NO: 34528 - protein, 39 aa, Artificial Sequence
  Non-cyclic GFR-binding peptide
  MOD_RES (5), (6), (39): Xaa is C or S
  MOD_RES (20), (21), (22), (23), (24): Xaa is A or G
  MOD_RES (25), (26), (27), (28): Xaa is A or G or is absent
VPSTXXAPVKTSPISMLYKXXXXXXXXXLKYHYMIVEEX

SEQ ID NO: 34529 - protein, 38 aa, Artificial Sequence
  Non-cyclic GFR-binding peptide
  MOD_RES (3), (4), (36), (38): Xaa is C or S
ASXXVPARLSATSILYYDAANNVVLRKHRDMVVEAXGX

SEQ ID NO: 34530 - protein, 42 aa, Artificial Sequence
  Non-cyclic GFR-binding peptide
  MOD_RES (6), (7), (39), (41): Xaa is C or S
GSAGPXXTPTKMEPISMLYLNDKQQIIKFKYEGMVVDRXGXS

SEQ ID NO: 34531 - protein, 34 aa, Artificial Sequence
  Non-cyclic GFR-binding peptide
  MOD_RES (1), (33): Xaa is C or S
XVPEKMNAISILYFDENKNVVLKKYRNMTVESXA

SEQ ID NO: 34532 - protein, 37 aa, Artificial Sequence
  Non-cyclic GFR-binding peptide
  MOD_RES (4), (5): Xaa is C or S
  MOD_RES (19), (20), (21), (22), (23): Xaa is A or G
  MOD_RES (24), (25), (26), (27): Xaa is A or G or is absent
ASPXXVSQDLSPINILYFXXXXXXXXXYGKIPMIVKS

SEQ ID NO: 34533 - protein, 44 aa, Artificial Sequence
  Non-cyclic GFR-binding peptide
  MOD_RES (6), (7), (41), (43): Xaa is C or S
  MOD_RES (21), (22), (23), (24), (25): Xaa is A or G
  MOD_RES (26), (27), (28), (29): Xaa is A or G or is absent
GSAGPXXTPTKMSPISMLYKXXXXXXXXXLKYHYGMVVDRXGXS

SEQ ID NO: 34534 - protein, 38 aa, Artificial Sequence
  Non-cyclic GFR-binding peptide
  MOD_RES (3), (4), (35), (37): Xaa is C or S
STXXAPVKTSATSMLYYDNGRVLLLRKHRMIVEEXGXL

SEQ ID NO: 34535 - protein, 36 aa, Artificial Sequence
  Non-cyclic GFR-binding peptide
  MOD_RES (5), (6): Xaa is C or S
SAGPXXTPTKMSPISMLYKNDKQQIILKYHYGMVVD

SEQ ID NO: 34536 - protein, 37 aa, Artificial Sequence
  Non-cyclic GFR-binding peptide
  MOD_RES (1), (35), (37): Xaa is C or S
  MOD_RES (15), (16), (17), (18), (19): Xaa is A or G
  MOD_RES (20), (21), (22), (23): Xaa is A or G or is absent
XVPTRLSATSILYYXXXXXXXXXLRKHRDMVVESXGX

SEQ ID NO: 34537 - protein, 43 aa, Artificial Sequence
  Non-cyclic GFR-binding peptide
  MOD_RES (6), (7), (41), (43): Xaa is C or S
  MOD_RES (21), (22), (23), (24), (25): Xaa is A or G
  MOD_RES (26), (27), (28), (29): Xaa is A or G or is absent
HVPKPXXAPTKLSPISVLYKXXXXXXXXXLKYHYNMVVRSXGX

SEQ ID NO: 34538 - protein, 41 aa, Artificial Sequence
  Non-cyclic GFR-binding peptide
  MOD_RES (6), (7), (41): Xaa is C or S
  MOD_RES (21), (22), (23), (24), (25): Xaa is A or G
  MOD_RES (26), (27), (28), (29): Xaa is A or G or is absent
GSAGPXXTPTKMEPISMLYLXXXXXXXXXKFKYEGMVVDRX

SEQ ID NO: 34539 - protein, 39 aa, Artificial Sequence
  Non-cyclic GFR-binding peptide
  MOD_RES (5), (6), (39): Xaa is C or S
  MOD_RES (20), (21), (22), (23), (24): Xaa is A or G
  MOD_RES (25), (26), (27), (28): Xaa is A or G or is absent
VPSTXXAPVKTEPISMLYLXXXXXXXXXKFKYEMIVEEX

SEQ ID NO: 34540 - protein, 33 aa, Artificial Sequence
  Non-cyclic GFR-binding peptide
  MOD_RES (1), (1): Xaa is C or S
  MOD_RES (15), (16), (17), (18), (19): Xaa is A or G
  MOD_RES (20), (21), (22), (23): Xaa is A or G or is absent
XVPTKLSATSILYYXXXXXXXXXLRKHRGMAVS

SEQ ID NO: 34541 - protein, 34 aa, Artificial Sequence
  Non-cyclic GFR-binding peptide
  MOD_RES (1), (33): Xaa is C or S
XVPEKMEPISILYLDENKNVVKFKYENMTVESXA

SEQ ID NO: 34542 - protein, 34 aa, Artificial Sequence
  Non-cyclic GFR-binding peptide
  MOD_RES (1), (2): Xaa is C or S
  MOD_RES (16), (17), (18), (19), (20): Xaa is A or G
  MOD_RES (21), (22), (23), (24): Xaa is A or G or is absent
XXVSQDLSPINILYFXXXXXXXXXYGKIPMIVKS

SEQ ID NO: 34543 - protein, 39 aa, Artificial Sequence
  Non-cyclic GFR-binding peptide
  MOD_RES (5), (6), (39): Xaa is C or S
  MOD_RES (20), (21), (22), (23), (24): Xaa is A or G
  MOD_RES (25), (26), (27), (28): Xaa is A or G or is absent
SASPXXVSQDLSPINILYFXXXXXXXXXYGKIPMIVKSX

SEQ ID NO: 34544 - protein, 38 aa, Artificial Sequence
  Non-cyclic GFR-binding peptide
  MOD_RES (2), (3), (35), (37): Xaa is C or S
PXXVPEKMSATSILYYDENKNVVLRKHRNMTVESXAXR

SEQ ID NO: 34545 - protein, 38 aa, Artificial Sequence
  Non-cyclic GFR-binding peptide
  MOD_RES (3), (4), (38): Xaa is C or S
  MOD_RES (18), (19), (20), (21), (22): Xaa is A or G
  MOD_RES (23), (24), (25), (26): Xaa is A or G or is absent
EPXXVPEKMNAISILYFXXXXXXXXXLKKYRNMTVESX

SEQ ID NO: 34546 - protein, 40 aa, Artificial Sequence
  Non-cyclic GFR-binding peptide
  MOD_RES (5), (6), (40): Xaa is C or S
  MOD_RES (20), (21), (22), (23), (24): Xaa is A or G
  MOD_RES (25), (26), (27), (28): Xaa is A or G or is absent
IPEPXXVPEKMNAISILYFXXXXXXXXXLKKYRNMTVESX

SEQ ID NO: 34547 - protein, 35 aa, Artificial Sequence
  Non-cyclic GFR-binding peptide
  MOD_RES (1), (32), (34): Xaa is C or S
XVSQDLSPINILYFIGKTPKIYGKIPMIVKSXKXS

SEQ ID NO: 34548 - protein, 42 aa, Artificial Sequence
  Non-cyclic GFR-binding peptide
  MOD_RES (5), (6), (39), (41): Xaa is C or S
  MOD_RES (20), (21), (22), (23), (24): Xaa is A or G
  MOD_RES (25), (26), (27), (28): Xaa is A or G or is absent
VPSTXXAPVKTSPISMLYKXXXXXXXXXLKYHYMIVEEXGXL

SEQ ID NO: 34549 - protein, 37 aa, Artificial Sequence
  Non-cyclic GFR-binding peptide
  MOD_RES (2), (3), (35), (37): Xaa is C or S
PXXVPEKMSATSILYYDENKNVVLRKHRNMTVESXAX

SEQ ID NO: 34550 - protein, 33 aa, Artificial Sequence
  Non-cyclic GFR-binding peptide
  MOD_RES (32), (32): Xaa is C or S
VPTRLSPISILYKDSANNVVLKYHYDMVVESXG

SEQ ID NO: 34551 - protein, 37 aa, Artificial Sequence
  Non-cyclic GFR-binding peptide
  MOD_RES (1), (2), (34), (36): Xaa is C or S
XXVPTKLSATSILYYDKGVVTYLRKHRGMAVSEXGXR

SEQ ID NO: 34552 - protein, 35 aa, Artificial Sequence
  Non-cyclic GFR-binding peptide
  MOD_RES (1), (33), (35): Xaa is C or S
XVPEKMNAISILYFDENKNVVLKKYRNMTVESXAX

SEQ ID NO: 34553 - protein, 38 aa, Artificial Sequence
  Non-cyclic GFR-binding peptide
  MOD_RES (1), (35), (37): Xaa is C or S
  MOD_RES (15), (16), (17), (18), (19): Xaa is A or G
  MOD_RES (20), (21), (22), (23): Xaa is A or G or is absent
XTPTKMSATSMLYYXXXXXXXXXLRKHRGMVVDRXGXS

SEQ ID NO: 34554 - protein, 39 aa, Artificial Sequence
  Non-cyclic GFR-binding peptide
  MOD_RES (6), (7), (39): Xaa is C or S
HVPKPXXAPTKLSPISVLYKDDSSNVILKYHYNMVVRSX

SEQ ID NO: 34555 - protein, 39 aa, Artificial Sequence
  Non-cyclic GFR-binding peptide
  MOD_RES (5), (6), (37), (39): Xaa is C or S
SASPXXVSQDLSPINILYFIGKTPKIYGKIPMIVKSXKX

SEQ ID NO: 34556 - protein, 34 aa, Artificial Sequence
  Non-cyclic GFR-binding peptide
  MOD_RES (32), (34): Xaa is C or S
VPTKLSATSILYYDKGVVTYLRKHRGMAVSEXGX

SEQ ID NO: 34557 - protein, 38 aa, Artificial Sequence
  Non-cyclic GFR-binding peptide
  MOD_RES (6), (7): Xaa is C or S
GIPEPXXVPEKMEPISILYLDENKNVVKFKYENMTVES

SEQ ID NO: 34558 - protein, 36 aa, Artificial Sequence
  Non-cyclic GFR-binding peptide
  MOD_RES (2), (3), (35): Xaa is C or S
AXXVPTKLSATSILYYDKGVVTYLRKHRGMAVSEXG

SEQ ID NO: 34559 - protein, 36 aa, Artificial Sequence
  Non-cyclic GFR-binding peptide
  MOD_RES (2), (3), (34), (36): Xaa is C or S
PXXVSQDLSPINILYFIGKTPKIYGKIPMIVKSXKX

SEQ ID NO: 34560 - protein, 35 aa, Artificial Sequence
  Non-cyclic GFR-binding peptide
  MOD_RES (2), (3): Xaa is C or S
  MOD_RES (17), (18), (19), (20), (21): Xaa is A or G
  MOD_RES (22), (23), (24), (25): Xaa is A or G or is absent
PXXVPQALSPINILYFXXXXXXXXXYGKIPMIVRS

SEQ ID NO: 34561 - protein, 39 aa, Artificial Sequence
  Non-cyclic GFR-binding peptide
  MOD_RES (2), (3), (37), (39): Xaa is C or S
  MOD_RES (17), (18), (19), (20), (21): Xaa is A or G
  MOD_RES (22), (23), (24), (25): Xaa is A or G or is absent
PXXVPEKMSATSILYYXXXXXXXXXLRKHRNMTVESXAX

SEQ ID NO: 34562 - protein, 31 aa, Artificial Sequence
  Non-cyclic GFR-binding peptide
VPEKMNAISILYFDENKNVVLKKYRNMTVES

SEQ ID NO: 34563 - protein, 36 aa, Artificial Sequence
  Non-cyclic GFR-binding peptide
  MOD_RES (2), (3), (35): Xaa is C or S
SXXVPARLSATSILYYDAANNVVLRKHRDMVVEAXG

SEQ ID NO: 34564 - protein, 36 aa, Artificial Sequence
  Non-cyclic GFR-binding peptide
  MOD_RES (2), (3), (35): Xaa is C or S
PXXVPEKMNAISILYFDENKNVVLKKYRNMTVESXA

SEQ ID NO: 34565 - protein, 33 aa, Artificial Sequence
  Non-cyclic GFR-binding peptide
  MOD_RES (1), (2): Xaa is C or S
XXVPEKMSPISILYKDENKNVVLKYHYNMTVES

SEQ ID NO: 34566 - protein, 34 aa, Artificial Sequence
  Non-cyclic GFR-binding peptide
  MOD_RES (1), (2), (33): Xaa is C or S
XXAPVKTEPISMLYLDNGRVLLKFKYEMIVEEXG

SEQ ID NO: 34567 - protein, 35 aa, Artificial Sequence
  Non-cyclic GFR-binding peptide
  MOD_RES (2), (3): Xaa is C or S
  MOD_RES (17), (18), (19), (20), (21): Xaa is A or G
  MOD_RES (22), (23), (24), (25): Xaa is A or G or is absent
TXXVPTRLSATSILYYXXXXXXXXXLRKHRDMVVE

SEQ ID NO: 34568 - protein, 36 aa, Artificial Sequence
  Non-cyclic GFR-binding peptide
  MOD_RES (4), (5): Xaa is C or S
PEPXXVPEKMSPINILYFDENKNVVYGKIPNMTVES

SEQ ID NO: 34569 - protein, 35 aa, Artificial Sequence
  Non-cyclic GFR-binding peptide
  MOD_RES (32), (34): Xaa is C or S
VPEKMSATSILYYDENKNVVLRKHRNMTVESXAXR

SEQ ID NO: 34570 - protein, 40 aa, Artificial Sequence
  Non-cyclic GFR-binding peptide
  MOD_RES (6), (7), (38), (40): Xaa is C or S
ASASPXXVPQDLSPINILYFVGRTPKVYGKIPMVVKSXKX

SEQ ID NO: 34571 - protein, 36 aa, Artificial Sequence
  Non-cyclic GFR-binding peptide
  MOD_RES (4), (5): Xaa is C or S
PEPXXVPEKMSPISILYKDENKNVVLKYHYNMTVES

SEQ ID NO: 34572 - protein, 34 aa, Artificial Sequence
  Non-cyclic GFR-binding peptide
  MOD_RES (31), (33): Xaa is C or S
VPQDLSPINILYFVGRTPKVYGKIPMVVKSXKXS

SEQ ID NO: 34573 - protein, 42 aa, Artificial Sequence
  Non-cyclic GFR-binding peptide
  MOD_RES (6), (7), (39), (41): Xaa is C or S
GIPEPXXVPEKMSATSILYYDENKNVVLRKHRNMTVESXAXR

SEQ ID NO: 34574 - protein, 30 aa, Artificial Sequence
  Non-cyclic GFR-binding peptide
VPTKLSATSILYYDKGVVTYLRKHRGMAVS

SEQ ID NO: 34575 - protein, 38 aa, Artificial Sequence
  Non-cyclic GFR-binding peptide
  MOD_RES (1), (35), (37): Xaa is C or S
  MOD_RES (15), (16), (17), (18), (19): Xaa is A or G
  MOD_RES (20), (21), (22), (23): Xaa is A or G or is absent
XTPTKMEPISMLYLXXXXXXXXXKFKYEGMVVDRXGXS

SEQ ID NO: 34576 - protein, 35 aa, Artificial Sequence
  Non-cyclic GFR-binding peptide
  MOD_RES (34), (34): Xaa is C or S
  MOD_RES (14), (15), (16), (17), (18): Xaa is A or G
  MOD_RES (19), (20), (21), (22): Xaa is A or G or is absent
VPTRLSPISILYKXXXXXXXXXLKYHYDMVVESXG

SEQ ID NO: 34577 - protein, 34 aa, Artificial Sequence
  Non-cyclic GFR-binding peptide
  MOD_RES (3), (4): Xaa is C or S
APXXVPQALSPINILYFVGRKPKVYGKIPMIVRS

SEQ ID NO: 34578 - protein, 35 aa, Artificial Sequence
  Non-cyclic GFR-binding peptide
  MOD_RES (3), (4): Xaa is C or S
EPXXVPEKMSPISILYKDENKNVVLKYHYNMTVES

SEQ ID NO: 34579 - protein, 34 aa, Artificial Sequence
  Non-cyclic GFR-binding peptide
  MOD_RES (2), (3): Xaa is C or S
PXXVPEKMNAISILYFDENKNVVLKKYRNMTVES

SEQ ID NO: 34580 - protein, 36 aa, Artificial Sequence
  Non-cyclic GFR-binding peptide
  MOD_RES (2), (3), (34), (36): Xaa is C or S
PXXVPQDLSPINILYFVGRTPKVYGKIPMVVKSXKX

SEQ ID NO: 34581 - protein, 36 aa, Artificial Sequence
  Non-cyclic GFR-binding peptide
  MOD_RES (2), (3), (34), (36): Xaa is C or S
TXXAPVKTEPISMLYLDNGRVLLKFKYEMIVEEXGX

SEQ ID NO: 34582 - protein, 41 aa, Artificial Sequence
  Non-cyclic GFR-binding peptide
  MOD_RES (4), (5), (38), (40): Xaa is C or S
  MOD_RES (19), (20), (21), (22), (23): Xaa is A or G
  MOD_RES (24), (25), (26), (27): Xaa is A or G or is absent
PSTXXAPVKTSPISMLYKXXXXXXXXXLKYHYMIVEEXGXL

SEQ ID NO: 34583 - protein, 35 aa, Artificial Sequence
  Non-cyclic GFR-binding peptide
  MOD_RES (1), (32), (34): Xaa is C or S
XAPVKTSPISMLYKDNGRVLLLKYHYMIVEEXGXL

SEQ ID NO: 34584 - protein, 32 aa, Artificial Sequence
  Non-cyclic GFR-binding peptide
  MOD_RES (14), (15), (16), (17), (18): Xaa is A or G
  MOD_RES (19), (20), (21), (22): Xaa is A or G or is absent
VPTKLSATSILYYXXXXXXXXXLRKHRGMAVS

SEQ ID NO: 34585 - protein, 34 aa, Artificial Sequence
  Non-cyclic GFR-binding peptide
  MOD_RES (1), (2), (34): Xaa is C or S
XXVPEKMSATSILYYDENKNVVLRKHRNMTVESX

SEQ ID NO: 34586 - protein, 31 aa, Artificial Sequence
  Non-cyclic GFR-binding peptide
  MOD_RES (31), (31): Xaa is C or S
APVKTSPISMLYKDNGRVLLLKYHYMIVEEX

SEQ ID NO: 34587 - protein, 43 aa, Artificial Sequence
  Non-cyclic GFR-binding peptide
  MOD_RES (6), (7), (41), (43): Xaa is C or S
  MOD_RES (21), (22), (23), (24), (25): Xaa is A or G
  MOD_RES (26), (27), (28), (29): Xaa is A or G or is absent
GIPEPXXVPEKMSATSILYYXXXXXXXXXLRKHRNMTVESXAX

SEQ ID NO: 34588 - protein, 38 aa, Artificial Sequence
  Non-cyclic GFR-binding peptide
  MOD_RES (3), (4), (37): Xaa is C or S
  MOD_RES (18), (19), (20), (21), (22): Xaa is A or G
  MOD_RES (23), (24), (25), (26): Xaa is A or G or is absent
SPXXVPQDLSPINILYFXXXXXXXXXYGKIPMVVKSXK

SEQ ID NO: 34589 - protein, 40 aa, Artificial Sequence
  Non-cyclic GFR-binding peptide
  MOD_RES (6), (7): Xaa is C or S
  MOD_RES (21), (22), (23), (24), (25): Xaa is A or G
  MOD_RES (26), (27), (28), (29): Xaa is A or G or is absent
GSAGPXXTPTKMSATSMLYYXXXXXXXXXLRKHRGMVVDR

SEQ ID NO: 34590 - protein, 39 aa, Artificial Sequence
  Non-cyclic GFR-binding peptide
  MOD_RES (6), (7): Xaa is C or S
  MOD_RES (21), (22), (23), (24), (25): Xaa is A or G
  MOD_RES (26), (27), (28), (29): Xaa is A or G or is absent
RVPSTXXAPVKTEPISMLYLXXXXXXXXXKFKYEMIVEE

SEQ ID NO: 34591 - protein, 38 aa, Artificial Sequence
  Non-cyclic GFR-binding peptide
  MOD_RES (3), (4), (36), (38): Xaa is C or S
EPXXVPEKMNAISILYFDENKNVVLKKYRNMTVESXAX

SEQ ID NO: 34592 - protein, 35 aa, Artificial Sequence
  Non-cyclic GFR-binding peptide
  MOD_RES (1), (2), (35): Xaa is C or S
  MOD_RES (16), (17), (18), (19), (20): Xaa is A or G
  MOD_RES (21), (22), (23), (24): Xaa is A or G or is absent
XXVPQALSPINILYFXXXXXXXXXYGKIPMIVRSX

SEQ ID NO: 34593 - protein, 40 aa, Artificial Sequence
  Non-cyclic GFR-binding peptide
  MOD_RES (6), (7): Xaa is C or S
  MOD_RES (21), (22), (23), (24), (25): Xaa is A or G
  MOD_RES (26), (27), (28), (29): Xaa is A or G or is absent
GIPEPXXVPEKMNAISILYFXXXXXXXXXLKKYRNMTVES

SEQ ID NO: 34594 - protein, 37 aa, Artificial Sequence
  Non-cyclic GFR-binding peptide
  MOD_RES (3), (4), (37): Xaa is C or S
  MOD_RES (18), (19), (20), (21), (22): Xaa is A or G
  MOD_RES (23), (24), (25), (26): Xaa is A or G or is absent
SPXXVSQDLSPINILYFXXXXXXXXXYGKIPMIVKSX

SEQ ID NO: 34595 - protein, 36 aa, Artificial Sequence
  Non-cyclic GFR-binding peptide
  MOD_RES (1), (33), (35): Xaa is C or S
XVPEKMNAISILYFDENKNVVLKKYRNMTVESXAXR

SEQ ID NO: 34596 - protein, 32 aa, Artificial Sequence
  Non-cyclic GFR-binding peptide
  MOD_RES (1), (1): Xaa is C or S
XTPTKMSPISMLYKNDKQQIILKYHYGMVVDR

SEQ ID NO: 34597 - protein, 32 aa, Artificial Sequence
  Non-cyclic GFR-binding peptide
  MOD_RES (1), (1): Xaa is C or S
XVPEKMSPISILYKDENKNVVLKYHYNMTVES

SEQ ID NO: 34598 - protein, 37 aa, Artificial Sequence
  Non-cyclic GFR-binding peptide
  MOD_RES (6), (7): Xaa is C or S
GIPEPXXVPEKMSATSILYYDENKNVVLRKHRNMTVE

SEQ ID NO: 34599 - protein, 35 aa, Artificial Sequence
  Non-cyclic GFR-binding peptide
  MOD_RES (1), (33), (35): Xaa is C or S
XTPTKMSPISMLYKNDKQQIILKYHYGMVVDRXGX

SEQ ID NO: 34600 - protein, 39 aa, Artificial Sequence
  Non-cyclic GFR-binding peptide
  MOD_RES (4), (5), (37), (39): Xaa is C or S
PEPXXVPEKMNAISILYFDENKNVVLKKYRNMTVESXAX

SEQ ID NO: 34601 - protein, 34 aa, Artificial Sequence
  Non-cyclic GFR-binding peptide
  MOD_RES (1), (2), (34): Xaa is C or S
XXVPEKMEPISILYLDENKNVVKFKYENMTVESX

SEQ ID NO: 34602 - protein, 33 aa, Artificial Sequence
  Non-cyclic GFR-binding peptide
  MOD_RES (2), (3): Xaa is C or S
PXXTPTKMEPISMLYLNDKQQIIKFKYEGMVVD

SEQ ID NO: 34603 - protein, 36 aa, Artificial Sequence
  Non-cyclic GFR-binding peptide
  MOD_RES (3), (4): Xaa is C or S
  MOD_RES (18), (19), (20), (21), (22): Xaa is A or G
  MOD_RES (23), (24), (25), (26): Xaa is A or G or is absent
EPXXVPEKMSPINILYFXXXXXXXXXYGKIPNMTVE

SEQ ID NO: 34604 - protein, 39 aa, Artificial Sequence
  Non-cyclic GFR-binding peptide
  MOD_RES (1), (2), (36), (38): Xaa is C or S
  MOD_RES (16), (17), (18), (19), (20): Xaa is A or G
  MOD_RES (21), (22), (23), (24): Xaa is A or G or is absent
XXVPEKMSPISILYKXXXXXXXXXLKYHYNMTVESXAXR

SEQ ID NO: 34605 - protein, 35 aa, Artificial Sequence
  Non-cyclic GFR-binding peptide
  MOD_RES (1), (34): Xaa is C or S
  MOD_RES (15), (16), (17), (18), (19): Xaa is A or G
  MOD_RES (20), (21), (22), (23): Xaa is A or G or is absent
XVPQALSPINILYFXXXXXXXXXYGKIPMIVRSXK

SEQ ID NO: 34606 - protein, 37 aa, Artificial Sequence
  Non-cyclic GFR-binding peptide
  MOD_RES (1), (35), (37): Xaa is C or S
  MOD_RES (15), (16), (17), (18), (19): Xaa is A or G
  MOD_RES (20), (21), (22), (23): Xaa is A or G or is absent
XTPTKMSATSMLYYXXXXXXXXXLRKHRGMVVDRXGX

SEQ ID NO: 34607 - protein, 40 aa, Artificial Sequence
  Non-cyclic GFR-binding peptide
  MOD_RES (5), (6), (38), (40): Xaa is C or S
SAGPXXTPTKMSATSMLYYNDKQQIILRKHRGMVVDRXGX

SEQ ID NO: 34608 - protein, 35 aa, Artificial Sequence
  Non-cyclic GFR-binding peptide
  MOD_RES (34), (34): Xaa is C or S
  MOD_RES (14), (15), (16), (17), (18): Xaa is A or G
  MOD_RES (19), (20), (21), (22): Xaa is A or G or is absent
VPTRLEPISILYLXXXXXXXXXKFKYEDMVVESXG

SEQ ID NO: 34609 - protein, 33 aa, Artificial Sequence
  Non-cyclic GFR-binding peptide
  MOD_RES (1), (33): Xaa is C or S
XVPEKMSATSILYYDENKNVVLRKHRNMTVESX

SEQ ID NO: 34610 - protein, 33 aa, Artificial Sequence
  Non-cyclic GFR-binding peptide
  MOD_RES (1), (33): Xaa is C or S
XVPEKMEPISILYLDENKNVVKFKYENMTVESX

SEQ ID NO: 34611 - protein, 36 aa, Artificial Sequence
  Non-cyclic GFR-binding peptide
  MOD_RES (1), (2), (36): Xaa is C or S
  MOD_RES (16), (17), (18), (19), (20): Xaa is A or G
  MOD_RES (21), (22), (23), (24): Xaa is A or G or is absent
XXTPTKMSATSMLYYXXXXXXXXXLRKHRGMVVDRX

SEQ ID NO: 34612 - protein, 35 aa, Artificial Sequence
  Non-cyclic GFR-binding peptide
  MOD_RES (33), (35): Xaa is C or S
  MOD_RES (14), (15), (16), (17), (18): Xaa is A or G
  MOD_RES (19), (20), (21), (22): Xaa is A or G or is absent
APVKTSPISMLYKXXXXXXXXXLKYHYMIVEEXGX

SEQ ID NO: 34613 - protein, 36 aa, Artificial Sequence
  Non-cyclic GFR-binding peptide
  MOD_RES (5), (6): Xaa is C or S
SAGPXXTPTKMSATSMLYYNDKQQIILRKHRGMVVD

SEQ ID NO: 34614 - protein, 37 aa, Artificial Sequence
  Non-cyclic GFR-binding peptide
  MOD_RES (1), (2), (36): Xaa is C or S
  MOD_RES (16), (17), (18), (19), (20): Xaa is A or G
  MOD_RES (21), (22), (23), (24): Xaa is A or G or is absent
XXVPARLSATSILYYXXXXXXXXXLRKHRDMVVEAXG

SEQ ID NO: 34615 - protein, 41 aa, Artificial Sequence
  Non-cyclic GFR-binding peptide
  MOD_RES (6), (7), (41): Xaa is C or S
  MOD_RES (21), (22), (23), (24), (25): Xaa is A or G
  MOD_RES (26), (27), (28), (29): Xaa is A or G or is absent
GIPEPXXVPEKMSPINILYFXXXXXXXXXYGKIPNMTVESX

SEQ ID NO: 34616 - protein, 33 aa, Artificial Sequence
  Non-cyclic GFR-binding peptide
  MOD_RES (1), (1): Xaa is C or S
  MOD_RES (15), (16), (17), (18), (19): Xaa is A or G
  MOD_RES (20), (21), (22), (23): Xaa is A or G or is absent
XVPARLSATSILYYXXXXXXXXXLRKHRDMVVE

SEQ ID NO: 34617 - protein, 39 aa, Artificial Sequence
  Non-cyclic GFR-binding peptide
  MOD_RES (1), (2), (36), (38): Xaa is C or S
  MOD_RES (16), (17), (18), (19), (20): Xaa is A or G
  MOD_RES (21), (22), (23), (24): Xaa is A or G or is absent
XXVPTRLSPISILYKXXXXXXXXXLKYHYDMVVESXGXR
